United States Patent Application Publication US 2011/0296543 A1 - sequence listing, part 2

SEQ ID NO: 4187 - DNA, 939 bp, Unknown
  Obtained from environmental sample
  misc_feature (1)..(939): n is a, c, g, or t
ttgtgcctatatattcccttatggtgtttgtgtgtacggacatcaagtccaccagaacgcgcgatttatccggcaatttcggaaacaccggcccctccgcccgtggatttgtacagggcgacaaggtatccgttcctgccgtgcctgtatttatacaaaattgatatgctgcccgtgtcgcttatatcggaattcaaggggctgtataacctgtcaaggattaacaaatggtatattggctgcgaggcgttaagccgaagcatttcgtttgttattacttcagacgcaagttccttattatcaccatccgtgtcgtcggaaacaacggtttccggcgcgtccgtatcctcgccaacgattcccggcgcgcccgtatcccattcgtcaaacgcgggcaacttcggttctacgggcgcgggatccgccggtttaaccgggacgggcgccggttccacgggcgcgggcgccgcaggtttgacgggcgcgggcgccgccggtttaacagggacgggtatcggttctacaggcgcgggctctgccggtttgactggtacaggatccaccggtttgaccggtgcggactctggttcgacgggcacgggttctgccggtttaacgggcgtgggatccgccggtttgaccggcgcaggcgccggctcgacgagcgggggcgccgatacaacaggcgcaggcgtcggttcgacgggcgcgggcgccggtacaacaggcgcaggcgtcggttcaacgggcgggggcgccggtacaacaggcgcaggcgtcggttcgacgggcgcgggcgccggcacaacaggcgcaggcacagttggctcgacaggcgtgggcgccggttcgacaggggcgggatccgctggatcgacgcggttgggggccgccggtttaacgataatgggagtcgtcggttcgatgggaaggaagtga

SEQ ID NO: 4188 - protein, 312 aa, Unknown
  Obtained from environmental sample
  misc_feature (1)..(312): Xaa is any amino acid
MCLYIPLWCLCVRTSSPPERAIYPAISETPAPPPVDLYRATRYPFLPCLYLYKIDMLPVSLISEFKGLYNLSRINKWYIGCEALSRSISFVITSDASSLLSPSVSSETTVSGASVSSPTIPGAPVSHSSNAGNFGSTGAGSAGLTGTGAGSTGAGAAGLTGAGAAGLTGTGIGSTGAGSAGLTGTGSTGLTGADSGSTGTGSAGLTGVGSAGLTGAGAGSTSGGADTTGAGVGSTGAGAGTTGAGVGSTGGGAGTTGAGVGSTGAGAGTTGAGTVGSTGVGAGSTGAGSAGSTRLGAAGLTIMGVVGSMGRK

SEQ ID NO: 4189 - DNA, 756 bp, Unknown
  Obtained from environmental sample
  misc_feature (1)..(756): n is a, c, g, or t
gtgcctgcgcctgttgtgccggcgcccgcgcccgtcgaaccgacgcctgcgcctgttgtaccggcgcccccgcccgttgaaccgacgcctgcgcctgttgtaccggcgcccgcgcccgtcgaaccgacgcctgcgcctgttgtatcggcgcccccgctcgtcgagccggcgcctgcgccggtcaaaccggcggatcccacgcccgttaaaccggcagaacccgtgcccgtcgaaccagagtccgcaccggtcaaaccggtggatcctgtaccagtcaaaccggcagagcccgcgcctgtagaaccgatacccgtccctgttaaaccggcggcgcccgcgcccgtcaaacctgcggcgcccgcgcccgtggaaccggcgcccgtcccggttaaaccggcggatcccgcgcccgtagaaccgaagttgcccgcgtttgacgaatgggatacgggcgcgccgggaatcgttggcgaggatacggacgcgccggaaaccgttgtttccgacgacacggatggtgataataaggaacttgcgtctgaagtaataacaaacgaaatgcttcggcttaacgcctcgcagccaatataccatttgttaatccttgacaggttatacagccccttgaattccgatataagcgacacgggcagcatatcaattttgtataaatacaggcacggcaggaacggataccttgtcgccctgtacaaatccacgggcggaggggccggtgtttccgaaattgccggataa

SEQ ID NO: 4190 - protein, 251 aa, Unknown
  Obtained from environmental sample
  misc_feature (1)..(251): Xaa is any amino acid
MPAPVVPAPAPVEPTPAPVVPAPPPVEPTPAPVVPAPAPVEPTPAPVVSAPPLVEPAPAPVKPADPTPVKPAEPVPVEPESAPVKPVDPVPVKPAEPAPVEPIPVPVKPAAPAPVKPAAPAPVEPAPVPVKPADPAPVEPKLPAFDEWDTGAPGIVGEDTDAPETVVSDDTDGDNKELASEVITNEMLRLNASQPIYHLLILDRLYSPLNSDISDTGSISILYKYRHGRNGYLVALYKSTGGGAGVSEIAG

SEQ ID NO: 4191 - DNA, 474 bp, Unknown
  Obtained from environmental sample
  misc_feature (1)..(474): n is a, c, g, or t
gtggagcagattcccaggggtccggttgcccttatcgggggcggcatccgtatatccccgctcttaccgcttgtgccggaattagaaaaaaggccttttgatttctttgccggttttaagacgcatccattcggcctgggaaacttagagagccgcggcgcaaaaccgcgctccctaatcatcgcgaccgaagacggctccgagggagttaagggacgcattttagactttttcacgccaaaggggtacagcggcgtgtttgcctgcggtcccgagccgatgcttcaagagatagccgacagaagcgtagcgtgcggaaccccctgctttgtaagtaccgaaaggcacatggcctgcggggttggagcctgcctgggctgcaaaataaaaaccactggcggaagccggtgctgctgcgccgacggcccgatattctcaggtgaggagatctgctttgaaaacaagcgagcctga

SEQ ID NO: 4192 - protein, 157 aa, Unknown
  Obtained from environmental sample
  DOMAIN (10)...(100): Oxidoreductase NAD-binding domain
  misc_feature (1)..(157): Xaa is any amino acid
MEQIPRGPVALIGGGIRISPLLPLVPELEKRPFDFFAGFKTHPFGLGNLESRGAKPRSLIIATEDGSEGVKGRILDFFTPKGYSGVFACGPEPMLQEIADRSVACGTPCFVSTERHMACGVGACLGCKIKTTGGSRCCCADGPIFSGEEICFENKRA

SEQ ID NO: 4193 - DNA, 564 bp, Unknown
  Obtained from environmental sample
  misc_feature (1)..(564): n is a, c, g, or t
atgggcgctttggaagatatcaaaagcgagaccgaacagcgaatgcagaagacgctcgacagccttaaaaaggatttggccaagatcaggacggggcgggcgacccccgcgctgctcgacgggatcaccgtggactactacggcagccccgcgccgatcaaccaggtggccaatatctccgtgccagacgcgaggatgctggtcgtccagccgtgggagaagagcatgcttcaggccatagagaaggcggtgcaggcctcgggcctcggcctcaatccgcagagcgacggcaaccaggtccgcctgccgataccgccgctctccgaggagcgccgcaaggagctcttcaaaaactgccgcaagacggcggaggacaccaaggtcgccgtcagaaacgtcaggcgcgattcaaatgagaagctgaaaaaggcgcagaaggacaaggccatcacggaggacttggagaaaaaggggctggacgatatccagaagatcacggacaaatacgttaagcaggcggacgacttgctggctgtcaaagagaaagagatcatggaggtttga

SEQ ID NO: 4194 - protein, 187 aa, Unknown
  Obtained from environmental sample
  DOMAIN (21)...(185): Ribosome recycling factor
  misc_feature (1)..(187): Xaa is any amino acid
MGALEDIKSETEQRMQKTLDSLKKDLAKIRTGRATPALLDGITVDYYGSPAPINQVANISVPDARMLVVQPWEKSMLQAIEKAVQASGLGLNPQSDGNQVRLPIPPLSEERRKELFKNCRKTAEDTKVAVRNVRRDSNEKLKKAQKDKAITEDLEKKGLDDIQKITDKYVKQADDLLAVKEKEIMEV

SEQ ID NO: 4195 - DNA, 318 bp, Unknown
  Obtained from environmental sample
  misc_feature (1)..(318): n is a, c, g, or t
atggaggcgctgcttgccctgcccggtgtcggcagaaaaaccgcgaatctggtgcttaacgaggcgtttgatcttgacgctatctgcgtggatattcatgtgcatcgaatttcaaaccgctgcggctggctctgcagcaaaaatcctgaggaaactgaaatgattttgagggagatccttcctaaaaaattctggaaacgtataaaccgccttcttgttctttacgggcagaagttatgccgtcccataagtccgttctgttcgcgatgcgtaatcgcaaaattttgtttccggtgtgatgtgaaaactacaaggtag

SEQ ID NO: 4196 - protein, 105 aa, Unknown
  Obtained from environmental sample
  misc_feature (1)..(105): Xaa is any amino acid
MEALLALPGVGRKTANLVLNEAFDLDAICVDIHVHRISNRCGWLCSKNPEETEMILREILPKKFWKRINRLLVLYGQKLCRPISPFCSRCVIAKFCFRCDVKTTR

SEQ ID NO: 4197 - DNA, 855 bp, Unknown
  Obtained from environmental sample
  misc_feature (1)..(855): n is a, c, g, or t
atggccggcggccgaggacccatgaccgccgtatacgaagatgtctttatcctgatccacgacaagaaagtttccagcatgaaggatatgcttcccctgctggaaaaagtcgcccagagcggcaagcccctgctcattgtcgcggaagacgtagacggcgaagccctttccaccctggtacttaacagcctgcggggaaccctgaaaaccgtggcggtcaaggcccccggtttcggcgaccgccgcaaagcgatgctggaagacattgccatcctcaccggcgggcaggttattaccgaagagttgggcatgaagctggaaaataccgagctttcccatcttggcaaagccaagacaattaaaatcgacaaagacaataccacgatcatcaacggcggcggcaagaacaaggacattcaggatcgcatcgcccagatcaaggcccagatcgaagacaccaccagcgattacgaccgcgagaaactccaggaacggcttgccaaactggccggcggcgtagcggtgattaacgtcggcgcagccaccgaagttgaactgaaagagaaaaagcaccgtgtggaggacgctttgtccgccacccgcgccgccattgacgaaggcattgtgtcaggcggcgagattgcccttattcaggccgcccttgccctggacaaagccgacaccgccggtcttaccgatgatgaaaaagtcggtttcaaaattgtcaaacgcgcccttgaggagccaatccgccagatcgccgaaaacgccggtcttgacggcgcggtcattgccgatcaggcgaagaaagagaaaaaaggcgtcggctttgacgcggcaaaatgggatgggtag

SEQ ID NO: 4198 - protein, 284 aa, Unknown
  Obtained from environmental sample
  DOMAIN (1)...(284): TCP-1/cpn60 chaperonin family
  misc_feature (1)..(284): Xaa is any amino acid
MAGGRGPMTAVYEDVFILIHDKKVSSMKDMLPLLEKVAQSGKPLLIVAEDVDGEALSTLVLNSLRGTLKTVAVKAPGFGDRRKAMLEDIAILTGGQVITEELGMKLENTELSHLGKAKTIKIDKDNTTIINGGGKNKDIQDRIAQIKAQIEDTTSDYDREKLQERLAKLAGGVAVINVGAATEVELKEKKHRVEDALSATRAAIDEGIVSGGEIALIQAALALDKADTAGLTDDEKVGFKIVKRALEEPIRQIAENAGLDGAVIADQAKKEKKGVGFDAAKWDG

SEQ ID NO: 4199 - DNA, 405 bp, Unknown
  Obtained from environmental sample
  misc_feature (1)..(405): n is a, c, g, or t
ttggccgaggggtttgcttttgttgagcgccacaacttattcgcaccgaaacaagtgattattatattgacatgngttttctataactatattttaaaatgttttgtcctcattgatctcaagaccaaccgtatcactcatcaagacgtagggcagatggatatgtatgtaagaatgtatgacgaactgaaacgcaatgaaagcgataaccccactatcggcattttgctctgttccgaaaccgataaggacattgctcgttattcaattctaaaaggcaatgaacatctttttgcaaccaaatataaactttatcttcccaccgaagaagaacttcgcatagagatagaaaaggaaaaagagtttatccgcctacagttagaggaaagtaaaagtgatacatag

SEQ ID NO: 4200 - protein, 134 aa, Unknown
  Obtained from environmental sample
  DOMAIN (1)...(119): Protein of unknown function (DUF1016)
  misc_feature (1)..(134): Xaa is any amino acid
MAEGFAFVERHNLFAPKQVIIILTXVFYNYILKCFVLIDLKTNRITHQDVGQMDMYVRMYDELKRNESDNPTIGILLCSETDKDIARYSILKGNEHLFATKYKLYLPTEEELRIEIEKEKEFIRLQLEESKSDT

SEQ ID NO: 4201 - DNA, 447 bp, Unknown
  Obtained from environmental sample
  misc_feature (1)..(447): n is a, c, g, or t
atgacggaagaaggttttaccgatgtcgaggcttactttgccgccgtccatcctcccggtgaagcggacaccctggttcccgacggtgaactgcgggcttttcttgccggcatccccattcccaaagctgttctcaccaacgctccccgcgaacacgccgatctggttttggacaaactgggcataagcgatctgtttacccatattattgatgttcgccagtgcaactttttgggcaaaccccggcgggaatttttcgagtatgccctgcgcacgttaggtgtaaatatagacgaagttttgtttgtcgatgaccaccccttctatgtcgaaggctttatcgccctggggggcaaaggcatactgctggatgaagataattttcatactgattatacacagcccaggattagggagttaaaggaaataacgcggtatattgattga

SEQ ID NO: 4202 - protein, 148 aa, Unknown
  Obtained from environmental sample
  misc_feature (1)..(148): Xaa is any amino acid
MTEEGFTDVEAYFAAVHPPGEADTLVPDGELRAFLAGIPIPKAVLTNAPREHADLVLDKLGISDLFTHIIDVRQCNFLGKPRREFFEYALRTLGVNIDEVLFVDDHPFYVEGFIALGGKGILLDEDNFHTDYTQPRIRELKEITRYID

SEQ ID NO: 4203 - DNA, 390 bp, Unknown
  Obtained from environmental sample
  misc_feature (1)..(390): n is a, c, g, or t
atgcaactcgccacagaacaggattcagaatggattgccgctattcaaagtggggcaaatttgccgctgtggaagccaaactccacttcctgggttttggagaagaaagcctttgctatatggcaggcagcagccaacgaatgtgagcttttatccgtagcggttgaacccgccgagcggggcaagggcttggcaaagatgcttatggaacattgctgcaacgagcttgccaaatttggagttgaaaagtttttcttggaggttagagagagcaacatcgtagcaatttccctctataaaaaaatggggtttgaaaaaatctcggagagaaaaaaatattatgcaaacggtgaagcggcggttataatggagcttaatccccaaaaataa

SEQ ID NO: 4204 - protein, 129 aa, Unknown
  Obtained from environmental sample
  DOMAIN (32)...(115): FR47-like protein
  misc_feature (1)..(129): Xaa is any amino acid
MQLATEQDSEWIAAIQSGANLPLWKPNSTSWVLEKKAFAIWQAAANECELLSVAVEPAERGKGLAKMLMEHCCNELAKFGVEKFFLEVRESNIVAISLYKKMGFEKISERKKYYANGEAAVIMELNPQK

SEQ ID NO: 4205 - DNA, 921 bp, Unknown
  Obtained from environmental sample
  misc_feature (1)..(921): n is a, c, g, or t
atgatggccgagaattttgatgggtactgggacgcgcagaaagacggtaaaaaatattataacgctgacatgagttccgcggcgaaatgggataaatcggcagataccgaattattcgcccgctggttaacggcggcgcaaaaatacaatatcaccctggggcaggatgattttgttgcctattttgctgaagttccgccggtgatagacggaaacggcggcgatccggcatgggcaaaggcaaagtggcaggatattaagtatgcatggatgtatcaatcgccgaagagcctctcgggtacgcttaactcagacggcactgtgtcaaaaaccgccgatttttcaggaaggtttaaggtagtatggacggcggagcggctgtatattttagcggaaatcatagatgacataatatacacgcctgccgctaacccgactcaaagtcctgaaaaaaatgactgtctggaattgtttatcgacgagaacgcttccggcggcgtccgcggctctgacggaggaaataactattttacctaccacatgaattttgacggtgtcaatgtcgcggactggatcggaaaccggaatgaattacgaaattcccatttaaactacaagattgataaaaacgacgctgcccatacctatatctgggaagcggaaatgaaggtatacaatggttcgtatcctctggatagcactcctgatactgcgccgctcacattaactgacggcaagaaaatgggctttgcggctgcctattgtgataacgacaataatgcccacagcggcaactcaacccagataggcgaccgcgatcattttatcggcagtatgtttgtcaccggcaattctgacgatgaaaggaatgtagcgtatctggattctacccaatacgcgaaattgtatttggtgaagtag

SEQ ID NO: 4206 - protein, 306 aa, Unknown
  Obtained from environmental sample
  misc_feature (1)..(306): Xaa is any amino acid
MMAENFDGYWDAQKDGKKYYNADMSSAAKWDKSADTELFARWLTAAQKYNITLGQDDFVAYFAEVPPVIDGNGGDPAWAKAKWQDIKYAWMYQSPKSLSGTLNSDGTVSKTADFSGRFKVVWTAERLYILAEIIDDIIYTPAANPTQSPEKNDCLELFIDENASGGVRGSDGGNNYFTYHMNFDGVNVADWIGNRNELRNSHLNYKIDKNDAAHTYIWEAEMKVYNGSYPLDSTPDTAPLTLTDGKKMGFAAAYCDNDNNAHSGNSTQIGDRDHFIGSMFVTGNSDDERNVAYLDSTQYAKLYLVK

SEQ ID NO: 4207 - DNA, 864 bp, Unknown
  Obtained from environmental sample
  misc_feature (1)..(864): n is a, c, g, or t
atgtccgataaattgttcttaaaacttcttgccgacggagaattaaaaaacgactggataattgacatatcaaacggcggaaaaatccttattataagcgatatacacatgggctcaggcacccgggacgacttaagcgaaaataacggggagatgcttatccgcgcgctggaagaatattactttaaaaacggctggattctggtccttaacggcgatattgaggaacttcaacgctactcgcttgatctgatacgggaaaaatgggcggggctttacaaggttttcaaccttttcgccaaagaaaaaaggctttataaaaccgtcggcaaccacgacgaacagcttctttttaagagatatagttcctacccctatcctttgtatacggtagtaaaaatcgaaacgggaactgttcccgcctatgttttccacggccaccagttgtccaatatttattcaaattttaataaaataataggaatctgcatacgttacattcttaaaccgttcgggataaaaaatattatagacgcgcgcagcccgtacaaacgtttccttatagaaagcaaagcttacgcgttttcgataaacaaccattgcctttccattatcggccacacccacaggccgctttttgaatcattggggcgcttcgattacattaaatttgagatcgaacggctctgcagagattatccttccagccaaaacgaggacaaactccgtatagaaaacgaagttacagccctcagaaaagagctcggcaagcttaaacgcaaagagcggcaggatgtcctgcgccagagtctttacggggacgaacttccggtaccgtgccttttaattcaggctgtactatag

SEQ ID NO: 4208 - protein, 287 aa, Unknown
  Obtained from environmental sample
  misc_feature (1)..(287): Xaa is any amino acid
MSDKLFLKLLADGELKNDWIIDISNGGKILIISDIHMGSGTRDDLSENNGEMLIRALEEYYFKNGWILVLNGDIEELQRYSLDLIREKWAGLYKVFNLFAKEKRLYKTVGNHDEQLLFKRYSSYPYPLYTVVKIETGTVPAYVFHGHQLSNIYSNFNKIIGICIRYILKPFGIKNIIDARSPYKRFLIESKAYAFSINNHCLSIIGHTHRPLFESLGRFDYIKFEIERLCRDYPSSQNEDKLRIENEVTALRKELGKLKRKERQDVLRQSLYGDELPVPCLLIQAVL

SEQ ID NO: 4209 - DNA, 516 bp, Unknown
  Obtained from environmental sample
  misc_feature (1)..(516): n is a, c, g, or t
gtgtatgtaaaagaactgcgccgggctaagaccaaggtggacaccgtcatcatattcttcgacgacgagcacgacgaccgctacccgaaccgcacgacttggtacgccgagcacgagtacgagtctacgctgagcttctactccaccaacnccttcgacgaccttatcggcccaggcatagcgcgcagcgtctacggcggtatagcgctgcttttccctccgcgcagcgtgcccaatatctttcgttgcgcggaggcggcgggaattaccggatgcgcggcgcagctcacggcgggatcgctgatgttcgccaaagagagaaacgcggcctttctcgccgccaagccgccctctttgcagatgcgcacgctcgccgcccgcttcaaaaaacatttggtgtggataccgctctcaaccttttcaaacgagacgctctcgcgtatgcgccgcttccacgtgctcaacggcaagcgggtgcgggcttgggcctcgcggttcataggagacgagttatga

SEQ ID NO: 4210 - protein, 171 aa, Unknown
  Obtained from environmental sample
  misc_feature (1)..(171): Xaa is any amino acid
MYVKELRRAKTKVDTVIIFFDDEHDDRYPNRTTWYAEHEYESTLSFYSTNXFDDLIGPGIARSVYGGIALLFPPRSVPNIFRCAEAAGITGCAAQLTAGSLMFAKERNAAFLAAKPPSLQMRTLAARFKKHLVWIPLSTFSNETLSRMRRFHVLNGKRVRAWASRFIGDEL

SEQ ID NO: 4211 - DNA, 525 bp, Unknown
  Obtained from environmental sample
  misc_feature (1)..(525): n is a, c, g, or t
atgggcacaaaaacctttccgttatcaaaatcacaactcgaaaaactggcagagcaatactctaccccgttttacctttacgatgaagatgccatacgcaaaaacgcacgccgcctgattgcggctttttcggtcttcccacgctacaaagagcattttgccgttaaagccatgcccaatccctatatgttaaaaatcctcgcggaagagggcattggcgcggattgttccagcctcccagagctgctgttggcggacatggctggaatgaaaggcgaagagctgatgttcacttcaaatgagactcccgccacggaatatgtaaaggccagggagctgggcgcaataataaacctggacgatttttcccatatcgcttttttagaaagagtcctaaatggagcaggcggtttgccagagctggtttcctgccgttacaatcctggcccgctcaaagaggggaacgccatcatcggcaagccggaagaagcgaaatatggcttacaagggagcagatttggatga

SEQ ID NO: 4212 - protein, 174 aa, Unknown
  Obtained from environmental sample
  misc_feature (1)..(174): Xaa is any amino acid
MGTKTFPLSKSQLEKLAEQYSTPFYLYDEDAIRKNARRLIAAFSVFPRYKEHFAVKAMPNPYMLKILAEEGIGADCSSLPELLLADMAGMKGEELMFTSNETPATEYVKARELGAIINLDDFSHIAFLERVLNGAGGLPELVSCRYNPGPLKEGNAIIGKPEEAKYGLQGSRFG

SEQ ID NO: 4213 - DNA, 456 bp, Unknown
  Obtained from environmental sample
  misc_feature (1)..(456): n is a, c, g, or t
atgaaagggcaggacgcggtatcatctcaatcaaattcggatgcggaatccgcagtttcancagatggcttcaaaggaaaacagatactgctggtcgaagatgtggaaatcaaccgggaaatcgtcattgccctgctcgaagattttggggtagaaattaccgaggcggaagacggccagcaggcgtttgaaatatttgccgcagccccggaaaaatttgatttagtttttatggatatccatatgcccggtatggacggctacgaatcgacaaaactaattcgcactcttgataatcccagggcaaaaaccgttcctataatcgccatgacagccaacgtgtttaaagatgatgttgaacgctgcctggcagcgggaatgaacgaccaccttggaaaaccgctggatataaacgatatgataaatatattaagcaagtacctggggaaaagctga

SEQ ID NO: 4214 - protein, 151 aa, Unknown
  Obtained from environmental sample
  DOMAIN (27)...(145): Response regulator receiver domain
  misc_feature (1)..(151): Xaa is any amino acid
MKGQDAVSSQSNSDAESAVSXDGFKGKQILLVEDVEINREIVIALLEDFGVEITEAEDGQQAFEIFAAAPEKFDLVFMDIHMPGMDGYESTKLIRTLDNPRAKTVPIIAMTANVFKDDVERCLAAGMNDHLGKPLDINDMINILSKYLGKS

SEQ ID NO: 4215 - DNA, 882 bp, Unknown
  Obtained from environmental sample
  misc_feature (1)..(882): n is a, c, g, or t
atgcagggcgtacaggaatcgctggccggacgcgtaggtattctggatctgatggggttttcataccgggaaaaaatcaaaaagccgttttccggtaaaccgtttcttccatccatggacaagtccaatgacggcaaaaagctgaaaatacaggagctgtacaggcatatttgggaaggcagtatgcccgaaccgtttgtcgataaaaagattgaaagggacaggtttttttcatcgtatgtacagtcctatatagaacgcgatgtcaaagacttctacaatgtggaaaagccgatacagttctttaacttcctttcggtagttgccgcgcagacggggcggctgttaaactattcgtctattagtcgcgatgtaaatatagacgtcaagaccgcgcaaacgtggatggggattttggagcgatccggcctggtgtacctgctgcgtccgtattcgcctaacataacaaaccgcattataaagaccccgaagatgtattttctggacacgggtctatgtgcgtatctgacgaagtggccgaccccggaaactttgatgatgggagcgatggccggagagattcttgaaacctatgccataggcgagctcctgaaatcatacctgcataacggcagagaaccggcgatgtggctgtatcgtgattcaaaccaaaacgaagtcgatgttgttctggaagaaaacaacacgctgtatccgatagagataaagaaaacatccaacccgggggcgggcgattatcanagttttaaggaactggcaaaattaaaaaagaaagtcgggctcggcgcggtattatgcctgaagccggaacgtataccgctttcccgcgaagtagtgtcgattccagtttgggagatataa

SEQ ID NO: 4216 - protein, 293 aa, Unknown
  Obtained from environmental sample
  misc_feature (1)..(293): Xaa is any amino acid
MQGVQESLAGRVGILDLMGFSYREKIKKPFSGKPFLPSMDKSNDGKKLKIQELYRHIWEGSMPEPFVDKKIERDRFFSSYVQSYIERDVKDFYNVEKPIQFFNFLSVVAAQTGRLLNYSSISRDVNIDVKTAQTWMGILERSGLVYLLRPYSPNITNRIIKTPKMYFLDTGLCAYLTKWPTPETLMMGAMAGEILETYAIGELLKSYLHNGREPAMWLYRDSNQNEVDVVLEENNTLYPIEIKKTSNPGAGDYXSFKELAKLKKKVGLGAVLCLKPERIPLSREVVSIPVWEI

SEQ ID NO: 4217 - DNA, 810 bp, Unknown
  Obtained from environmental sample
  misc_feature (1)..(810): n is a, c, g, or t
ttgcgcgctgcgcgcgttaacgtcgcttatctacaaacgggggtaaaaatggccgggccgccggtaaaatcggcaattttaattgtcaatctccacaaagaagacgccgcgtccgccgccggggaaatccggcaggaacttgaaagcgggggggtacagacgacgcttttcgcctttgaagggcgtcccgcatcccctcctgaaggccaatgggacatcgcttttagcctgggaggcgacggaactgttctgtatacggcgcgaatccttgcccatacaggcactccgatactccccgtacatcttggaaccctgggatttatcgccggcgtggaaagacatgaatggctttgggtttacaggcgctggctttcaggtgaaataaggctttccagacgctgtatgctggaattttccattgaaaggggcggtaaatatgccgttaataatagtgtatgcctgaatgacgtggtgatttcatctttgggaatagcaaagctgatacgtttgcaggcaagaacagaggttgcccccggcgaatttgcggaaattggctgctatcgctcggacgggcttataatcgctactcccaccggttccacggggtattccatggcggccggcgggccaatactggatccggagatggaagcgcaaattatcagcccaatctgcccctttgccttgtcgaaccgcccgctggtgcttccgtcacggcaggcattacagataacggtttgcagggagcagcgaagcggggttctgctgacttgcgacgggcaggaaacttttgatctggaaccngggtga

SEQ ID NO: 4218 - protein, 269 aa, Unknown
  Obtained from environmental sample
  DOMAIN (24)...(268): ATP-NAD kinase
  misc_feature (1)..(269): Xaa is any amino acid
MRAARVNVAYLQTGVKMAGPPVKSAILIVNLHKEDAASAAGEIRQELESGGVQTTLFAFEGRPASPPEGQWDIAFSLGGDGTVLYTARILAHTGTPILPVHLGTLGFIAGVERHEWLWVYRRWLSGEIRLSRRCMLEFSIERGGKYAVNNSVCLNDVVISSLGIAKLIRLQARTEVAPGEFAEIGCYRSDGLIIATPTGSTGYSMAAGGPILDPEMEAQIISPICPFALSNRPLVLPSRQALQITVCREQRSGVLLTCDGQETFDLEPG

SEQ ID NO: 4219 - DNA, 543 bp, Unknown
  Obtained from environmental sample
  misc_feature (1)..(543): n is a, c, g, or t
atgataggtattatcggaggcagcggtcttgataaccctgaaattttacacaacagcagggatgaaaatgtatcaacggtttacggcgagccatcttcagctcttaaatacggagacataaacggcgttcaggtggctctcttagcccgtcacggaagggaacacaccattcccccttcccaggtaaattacagggccaacatttcagcactaaaaaaagccggatgcagccatataatagcgaccaccgcagttggttctcttaaagaggaaattcaccgcggagatctggtaattatagatcagtttattgattttacaaaacagcggaaaatgagctttcacgaatcttttgagcctcataacccgatacacacagcaatggccgatccctacgacagccgtttgcggaaaattttaatcgatgagtgcaaggcgctgaattacctatatcatgaaaagggaacggtagtaaccattgaagggcccaggttttcaagccgcgctgagtccttcatgttccgcgcctggggggcgacataa

SEQ ID NO: 4220 - protein, 180 aa, Unknown
  Obtained from environmental sample
  DOMAIN (1)...(180): Phosphorylase family 2
  misc_feature (1)..(180): Xaa is any amino acid
MIGIIGGSGLDNPEILHNSRDENVSTVYGEPSSALKYGDINGVQVALLARHGREHTIPPSQVNYRANISALKKAGCSHIIATTAVGSLKEEIHRGDLVIIDQFIDFTKQRKMSFHESFEPHNPIHTAMADPYDSRLRKILIDECKALNYLYHEKGTVVTIEGPRFSSRAESFMFRAWGAT

SEQ ID NO: 4221 - DNA, 597 bp, Unknown
  Obtained from environmental sample
  misc_feature (1)..(597): n is a, c, g, or t
ttgcgagcaaattcaataacggctatttgcatacctaggcaaatacccaaatatggcatattgttttctcttgcatatcggcaggcggctatttttccatcaatgcctctatctccaaaaccacccggaacaatcattccgtctattccgctcagtatttctccagcgttttcattagttatgtttttgctgtctatccaacttattttcacttttgcacccacttcaaatcccgcgtggttcaaactttcaataatggagagatatgcatcgtggagttgcacgtattttccaacaatggcaatgcaaacttctctgtttcttgttgcaactttttgcatcatattttgccattcgctcaaatctggttcgggagcggtgaatttcaattcgcggcaaacaacattgtccaagccgtttttgtggagcataagcggtgcttcgtacaaagttggtagagttatgttttcaattacgcagtctggttttacattgcaaaaaagagctattttttctttgatgccattgttaataggttcgtctgctctagctattataatgcttggcgaaattcccattctcggccgtcggcgataa

SEQ ID NO: 4222 - protein, 198 aa, Unknown
  Obtained from environmental sample
  misc_feature (1)..(198): Xaa is any amino acid
MRANSITAICIPRQIPKYGILFSLAYRQAAIFPSMPLSPKPPGTIIPSIPLSISPAFSLVMFLLSIQLIFTFAPTSNPAWFKLSIMERYASWSCTYFPTMAMQTSLFLVATFCIIFCHSLKSGSGAVNFNSRQTTLSKPFLWSISGASYKVGRVMFSITQSGFTLQKRAIFSLMPLLIGSSALAIIMLGEIPILGRRR

SEQ ID NO: 4223 - DNA, 333 bp, Unknown
  Obtained from environmental sample
  misc_feature (1)..(333): n is a, c, g, or t
ttggttcagcgcgaggaaatgcttaacgccctgcaccgggttgcgcttatggtggaacaaaaatcacatagggtatatttgggaatttctcccgggaaaatggctgttttttctgaggaaagcgagatggggatagttaacgatgaaattccatgccaatatgacggcgaagaaataaccattgcgcttaattatcgttatattgaagaacccttcaaggtaataaacgataaagagattaatattcgatttaccggagcgacaaaagcgatcacggttgagccggttccggctaaagactttttccatattgtgatgcccatgcaatcctga

SEQ ID NO: 4224 - protein, 110 aa, Unknown
  Obtained from environmental sample
  DOMAIN (1)...(109): DNA polymerase III beta subunit, C-terminal domain
  misc_feature (1)..(110): Xaa is any amino acid
MVQREEMLNALHRVALMVEQKSHRVYLGISPGKMAVFSEESEMGIVNDEIPCQYDGEEITIALNYRYIEEPFKVINDKEINIRFTGATKAITVEPVPAKDFFHIVMPMQS

SEQ ID NO: 4225 - DNA, 783 bp, Unknown
  Obtained from environmental sample
  misc_feature (1)..(783): n is a, c, g, or t
atgggtgggacgatactaactggaaaaagtgtggtacgcattgagcgtgatgtagaggggggcatacgcgaagtggtatgcgccgacggctcccagttcccatgtgacatgctgatttcttccatgccggtcaaagaccttattggcgcgatggacaaccctgcactgaacattacgcgtatagctgaaggactaccataccgggatttccaaactgttggtgtgttattgccggtagataaatttctattgcgcaatattggcaaaacgccgacagttggcggtattgccccagactgttggatttatgtacaagatacatcagtcaaattagggcgtattcaagtgttcaataattggtcgccgtacatggtaaaagattttgaaaatacagtttggatcgggcttgaatatttctgcgaagagggcgacgagtcctggcaaatgtctgatgctgaatacatctcgtttgcgaaggccgagctagtcaaaatcgggatcatcaaatcggtatccgatgttttgtttacacacagggagaaggtaaagaaagcgtacccggcgtattttgatacctacgtggaattttcaaaactgcgtttgtttctagattctattccgaacctctactgtgtcggccgtaacgggcagcatcgctataacaacatggatcactcaatggttacagcgtttgaagcggtcggcaatatcatttccggcagaaaagacaaagagaacatttggaatgtcaatactgagaaggagtaccatgaagaaaagtaa

SEQ ID NO: 4226 - protein, 260 aa, Unknown
  Obtained from environmental sample
  misc_feature (1)..(260): Xaa is any amino acid
MGGTILTGKSVVRIERDVEGGIREVVCADGSQFPCDMLISSMPVKDLIGAMDNPALNITRIAEGLPYRDFQTVGVLLPVDKFLLRNIGKTPTVGGIAPDCWIYVQDTSVKLGRIQVFNNWSPYMVKDFENTVWIGLEYFCEEGDESWQMSDAEYISFAKAELVKIGIIKSVSDVLFTHREKVKKAYPAYFDTYVEFSKLRLFLDSIPNLYCVGRNGQHRYNNMDHSMVTAFEAVGNIISGRKDKENIWNVNTEKEYHEEK

SEQ ID NO: 4227 - DNA, 858 bp, Unknown
  Obtained from environmental sample
  misc_feature (1)..(858): n is a, c, g, or t
gtggaaaaattccgctacggaagcggcgcggagccgcagacttttgatgttgaatttacgagggacagcggcggcgcgtttattgtatccggcggcccgcgaaacatgctccggctgcgggtggatcatgacggcaatttttacgcgggactttccagcccctccccggtgcgggggacggccatcggcaatatcagcgacaatactattaacgcctcctgtaacgacctgtatattgacatggcggggctgttcgaactcctgcccaaaaacaacgacatctacctgacaggcggctatgtgaacgcgtcgctggatataaggggttccctcaccgatcccgaattcttcggacaggcaaaggggaacagcctccgtttcatggttccgtctttcatacctgttgaattgcggccgatcccgtttaacatcgccatagagggcaacgagatacgattcggcccggtctcggcatctgtcgggaaaggcgctggatcggtaagcggcctgttccagattgagcgctggatacccgacatgttcagcatcgacatcacggttccccgcgaaaccccgattccatacaagttcgagctgacaggttttacggccggaggcgacgcctcgggcaaactgaacgtgtcaagggaaaatgctaccctcggtgtttcaggcgatctgtacgtgaacaatactacgcttggcataaattccgacgatcttaacaaatcgcgcggacaggaagtttttcccgactctttcgcttccgttgtgaaccttacggtcagcaccgggcccgttgtggaattcatatacccggattcaaaatggcccatactcagggcaaacccggaatag

SEQ ID NO: 4228 - protein, 285 aa, Unknown
  Obtained from environmental sample
  misc_feature (1)..(285): Xaa is any amino acid
MEKFRYGSGAEPQTFDVEFTRDSGGAFIVSGGPRNMLRLRVDHDGNFYAGLSSPSPVRGTAIGNISDNTINASCNDLYIDMAGLFELLPKNNDIYLTGGYVNASLDIRGSLTDPEFFGQAKGNSLRFMVPSFIPVELRPIPFNIAIEGNEIRFGPVSASVGKGAGSVSGLFQIERWIPDMFSIDITVPRETPIPYKFELTGFTAGGDASGKLNVSRENATLGVSGDLYVNNTTLGINSDDLNKSRGQEVFPDSFASVVNLTVSTGPVVEFIYPDSKWPILRANPE

SEQ ID NO: 4229 - DNA, 618 bp, Unknown
  Obtained from environmental sample
  misc_feature (1)..(618): n is a, c, g, or t
gtgggctacgagcagggcggccagcttaccgaagtcgtgcgccgccggccttacagcgtggttctttttgacgaaatagaaaaggctcacccggaagtgtttaatgtttttttgcagattctcgacgacggacggcttacagacggccagggccgcattgtggatttcaaaaatgttataatcattatgacaagtaatatcggatcggatttgattcttgaggaagaaaacaccggggcaataagggattcgcttttggaattgctcaagcggaatttcaggccggaattcctcaaccgtattgacgagacggtaatcttcaacaggcttggcaagaacgaaatcggcaaaatcgttgacattcagcttgagcgcctggcgcggcggctggccgaacgtaaaattacacttaacacctcacgcgcggcaaaagaattcctcgccgaacggggctatgaccccatgtacggggcgcgtcccctcaagcggacaatacaggcggaacttgaaaaccccctggcgaaattcgtcatctccggaaaaatccacgaaggcgacattgtcaccgcggacaaaaaaggcgaaggactggaatttaaggtaacaaaaaataagtaa

SEQ ID NO: 4230 - protein, 205 aa, Unknown
  Obtained from environmental sample
  DOMAIN (1)...(104): ATPase family associated with various cellular activities (AAA)
  misc_feature (1)..(205): Xaa is any amino acid
MGYEQGGQLTEVVRRRPYSVVLFDEIEKAHPEVFNVFLQILDDGRLTDGQGRIVDFKNVIIIMTSNIGSDLILEEENTGAIRDSLLELLKRNFRPEFLNRIDETVIFNRLGKNEIGKIVDIQLERLARRLAERKITLNTSRAAKEFLAERGYDPMYGARPLKRTIQAELENPLAKFVISGKIHEGDIVTADKKGEGLEFKVTKNK

SEQ ID NO: 4231 - DNA, 780 bp, Unknown
  Obtained from environmental sample
  misc_feature (1)..(780): n is a, c, g, or t
ttggccagggatacagagtacgtagataaattattggcgaaagcagtcgaacaggccggaaaaagggcggacaaaatggaagaagccgccgttgccaagctgaaagagcaggccgaagaccggatactcaaactaaaaactgccgaagaagaacgcctgcgctcttttcaggaaagcgccaaggcaagggttcttgaggttcaggctttgattaaaagcgtccgggaagactggcgtaccgaaagaagcgactgggagagcaaagacaaagctgtccgcgacgagcgaaagaaggatctggaagtttttgcctcaatgttcgatgcctccaaaaagcaaatggaagatttttccacacaggtaaatagcattataacttctcaaaaagctcttctgcttaaagctaccgaagaagcaaagcaggccctggttaagaatatccgggaagaatggcgaaccgaaagaaacgaatgggagacccaggacaaagctgtccgcgacgagcgaaagaaagacctggaagtttttaccgcaaagtttgacgcttccaaaaagcaaattgaagatttttccgcgcaggtaaatggcattataaactcccagaaagctctgcttgcaaaagaagccgaggaaatgaagcagactctggttaaaaacattcgggaagaatggcagaccgaaagaaacgactgggagaccaacgacaaggctatccgcaacgagcggaagaaagacatggaagtttttgccgcaatgtttagcgcttccaaaagcagatag

SEQ ID NO: 4232 - protein, 259 aa, Unknown
  Obtained from environmental sample
  misc_feature (1)..(259): Xaa is any amino acid
MARDTEYVDKLLAKAVEQAGKRADKMEEAAVAKLKEQAEDRILKLKTAEEERLRSFQESAKARVLEVQALIKSVREDWRTERSDWESKDKAVRDERKKDLEVFASMFDASKKQMEDFSTQVNSIITSQKALLLKATEEAKQALVKNIREEWRTERNEWETQDKAVRDERKKDLEVFTAKFDASKKQIEDFSAQVNGIINSQKALLAKEAEEMKQTLVKNIREEWQTERNDWETNDKAIRNERKKDMEVFAAMFSASKSR

SEQ ID NO: 4233 - DNA, 606 bp, Unknown
  Obtained from environmental sample
  misc_feature (1)..(606): n is a, c, g, or t
ttgaaccacgccgttcatcacattgacatgctgctctggatgctcgggccgccgaaaaaggttagcgcggtgataagcaacgctgcccacgacaacgccgaagtggaggatatttccgtcgcggttctgcactacggcggcggcctctgcgcggagggggcaatcgcccaggtgaccagttccgttatccaccacggcgaagagcagcagcttatttttcagggggaaaaggcccgcatttccatgccgtggaaagcggcggcaaacattgcccggcccaacggctttcccgccaaagagcagaacgaaacactcatcgctcagcttaacggttattatgaatccctgccggaacttgcccacaccctgcacacggggcaaattgacgacgtgcttaccgccgtcgagaccggctcaaaaccgcttgccggcggcgaagatggcagacgcgccatcgaacttatcacggcgatttacaaggcgggcaccgaggaacgggcggtaaaactgcccatacaaaccggcgatcctttctactcggtcaaaggcattatggagcgcgtcccccggttttacaaaaagagcgcttccgttgaaaaattgtga

SEQ ID NO: 4234 - protein, 201 aa, Unknown
  Obtained from environmental sample
  misc_feature (1)..(201): Xaa is any amino acid
MNHAVHHIDMLLWMLGPPKKVSAVISNAAHDNAEVEDISVAVLHYGGGLCAEGAIAQVTSSVIHHGEEQQLIFQGEKARISMPWKAAANIARPNGFPAKEQNETLIAQLNGYYESLPELAHTLHTGQIDDVLTAVETGSKPLAGGEDGRRAIELITAIYKAGTEERAVKLPIQTGDPFYSVKGIMERVPRFYKKSASVEKL

SEQ ID NO: 4235 - DNA, 348 bp, Unknown
  Obtained from environmental sample
  misc_feature (1)..(348): n is a, c, g, or t
atgggcgatttatatctaaatattgtggagagcaagaaccgagaaagcggtggttttgacagacagtctgttattctgtttgccgacgatttgcaggcgtttctgggcggctttgaagaatctcttaaagtgatggaaanagcggtgcgtgagaaaaaacatacaggctacgcaaaacgcgagggcggcaagcgcgacggtgaaaaacgcgaggggcaaaaacgcgacggcggcagagaggagagacctcgcagacacggacatgatcgcagacaggaaggcgataaacgcggcggcaggcgtgacggcgcaaagcgtgttgtggtgagacataagaaagaagaataa

SEQ ID NO: 4236 - protein, 115 aa, Unknown
  Obtained from environmental sample
  misc_feature (1)..(115): Xaa is any amino acid
MGDLYLNIVESKNRESGGFDRQSVILFADDLQAFLGGFEESLKVMEXAVREKKHTGYAKREGGKRDGEKREGQKRDGGREERPRRHGHDRRQEGDKRGGRRDGAKRVVVRHKKEE

SEQ ID NO: 4237 - DNA, 864 bp, Unknown
  Obtained from environmental sample
  misc_feature (1)..(864): n is a, c, g, or t
ttgcttcttgaggaagttcttaacctcgcgcaaaggcagtttgaaagaaacgaagtctctttccgcaacgggcttgtaagggagcttgcggtaattcaaagcaggctggccgtagaaaacgcgcgttataatctaagcgcggcaaaaacggcttacgcgaataacatgggagatttcctcgcggcgctcggcattaccgcggatgataatataacattgttaggtgaagtaataattacaaaaataaacgcaaacgctgataatcttataagcggttatcttccggaaaggccggatattgtaagcgcgaaacgtgagattgaaaggcttgaaaacgcgcaaaagcagtcgttttttcaaagccgcgcgccctccctcaacttgtcaatggactggaatacgtcaaagtttaacccttttacggattctttcagcgcctcggcgcgcctcagcattcccatagatccgtggataccgggctcttcaaaggaacagactgtccgcagggcggacgattccatagaaaagacaaaacttgacttgtcaattaccgaagattccgcaaaaacgcagattcgctctctttgctcccaacttgtaaattcatggaacagtatcgaaatcgcccgccttggccttgaagcggcggaggtcggctatcaactgactgaacaggggttcagaagcggaacggttgagtcccttgttcttgaagacgcgcgtaataatttggcaagcgcgagacagcgtttgctgcaaaccgaactttcctattttaatatgatacttgacctttctacggctantaatatggnattggaaaaacttatagaaacctttggagtgcccagtgaaaaagaataa

SEQ ID NO: 4238 - protein, 287 aa, Unknown
  Obtained from environmental sample
  DOMAIN (86)...(270): Outer membrane efflux protein
  misc_feature (1)..(287): Xaa is any amino acid
MLLEEVLNLAQRQFERNEVSFRNGLVRELAVIQSRLAVENARYNLSAAKTAYANNMGDFLAALGITADDNITLLGEVIITKINANADNLISGYLPERPDIVSAKREIERLENAQKQSFFQSRAPSLNLSMDWNTSKFNPFTDSFSASARLSIPIDPWIPGSSKEQTVRRADDSIEKTKLDLSITEDSAKTQIRSLCSQLVNSWNSIEIARLGLEAAEVGYQLTEQGFRSGTVESLVLEDARNNLASARQRLLQTELSYFNMILDLSTAXNMXLEKLIETFGVPSEKE

SEQ ID NO: 4239 - DNA, 453 bp, Unknown
  Obtained from environmental sample
  misc_feature (1)..(453): n is a, c, g, or t
atggaggcatctatgtccaggaagctgctttttgtgtgtgttgcgcttttggctgttgaaagcgcctttgcggacaatattcacgcgaccatagagattaacggagtagctgttaacggcggtttggtatacgcggctgtatactcaaatgaaaatgattataaagctgaaaccacttccataaaatttattcttgatcctgtaaataataaaatcacccataatctggaattacccgaaggtgaatacgtggtttccgtgtttcaggatattaattccaacgaaaaattggatgaaaatatttttggcataccgtcagaacctatcggtaaaacaaactacaacctcaggggagcgccgggtggttttaacaaattgaaagcgcctgtaaataaaaattcgacaaaactaattatcaacatgggaagagtaaaagcgttggggataatatag

SEQ ID NO: 4240 - protein, 150 aa, Unknown
  Obtained from environmental sample
  SIGNAL (1)...(24)
  misc_feature (1)..(150): Xaa is any amino acid
MEASMSRKLLFVCVALLAVESAFADNIHATIEINGVAVNGGLVYAAVYSNENDYKAETTSIKFILDPVNNKITHNLELPEGEYVVSVFQDINSNEKLDENIFGIPSEPIGKTNYNLRGAPGGFNKLKAPVNKNSTKLIINMGRVKALGII

SEQ ID NO: 4241 - DNA, 1020 bp, Unknown
  Obtained from environmental sample
  misc_feature (1)..(1020): n is a, c, g, or t
ttgtacggacaggataacgaaaaagattatccgatacggattatagcggatcatgtgcgttccgctgttttattcttaggggacccaaaagctgtgagcccctccaatgtgggggcgggttacgttcttcgccgcctgatacggcgcgccgtccgccacgggcgcaaacttaacggagggggcttaagcctgtcccccatcgcgcaggttgtggcagaacagctaaaaggcgcttatccggaacttgaacaaaaccgcgcttttattttaagcgaacttgacagagaagaggcgaaattcatggaaaccctgcaaaaaggcgagcatgaatttgaaaaacttctgcccaatttgctcaaagacccgcgaaaaatcatgtctgggcggctggccttcaaactttacgacacttacggctttcctatcgaacttaccgaggaacttgccgcagaatcgggaatgaaggtaaacagggaggaatttgacgaggcttttaagaaacatcaggaactgtcccggtctcagagcggctcatttaagggcgggcttggggatcaaggcgagatggcggtaaaataccacaccgcgacccaccttttacacaaggccttaaaaaccgtgcttggggatcatgtcgcccaaaaagggagcaatatcaccgctgaacgcctgcggtttgactttgcccacgactccccaatgacgccggaacaggttaaaaaagtgcaggatattgtcaatgaacagatagaaaaggactatcctgttttcatggaaacaatggggcttgatgaggctaaagcgcagggggcaatcgccctttttggagaaaagtacgaatccgtggtaaaagtatttacaataggcggttcaaaaacggactttttttcaaaagaagtctgcggcggcccgcatgtggaaaaaaccggaactttggggaaatttacaattcaaaaagagcagtcttcctcagccggagtgcgccgtatcagagcggtnttanctcgtgccgaattctga

SEQ ID NO: 4242 - protein, 339 aa, Unknown
  Obtained from environmental sample
  DOMAIN (2)...(254): tRNA synthetases class II (A)
  misc_feature (1)..(339): Xaa is any amino acid
MYGQDNEKDYPIRIIADHVRSAVLFLGDPKAVSPSNVGAGYVLRRLIRRAVRHGRKLNGGGLSLSPIAQVVAEQLKGAYPELEQNRAFILSELDREEAKFMETLQKGEHEFEKLLPNLLKDPRKIMSGRLAFKLYDTYGFPIELTEELAAESGMKVNREEFDEAFKKHQELSRSQSGSFKGGLGDQGEMAVKYHTATHLLHKALKTVLGDHVAQKGSNITAERLRFDFAHDSPMTPEQVKKVQDIVNEQIEKDYPVFMETMGLDEAKAQGAIALFGEKYESVVKVFTIGGSKTDFFSKEVCGGPHVEKTGTLGKFTIQKEQSSSAGVRRIRAVLXRAEF

SEQ ID NO: 4243 - DNA, 816 bp, Unknown
  Obtained from environmental sample
  misc_feature (1)..(816): n is a, c, g, or t
atgggaaaccagtccgtgcggattatctacaacaatttaaacaacaaaaaaaatattttctgcgaccgcgcttttgcccccgcgcctgattttgaaaaattgttacgcgaaaataatatccccatttacggacttgataccggtataagcgcaatgtctgtagatttgtttatgtttacgcttggttatgaacttggtttaaacggtatattaacaatgctcgacgtgtcaaagattccgcttcactgtgaagaaagaaccgctgctcacccgattgtcatcgccggaggtcccgcggtttccaatcctctgccgtattcgccgtttatcgacgctttttggataggggaggctgaagatgaatattttaaccttgcggaggaattatcggaattaaaaaaaggcgggaagggcagggcggagctgttaaaaaaaatcgctgaacatcccaatgtgtgggttaagggaaaacaaaaagcgacaagggcgattaccaaaagtttttcgaaagaatcaaatgtgtaccctattccaagtatgaaaattgtgcagcatcacggcgctgtggaaattatgcgaggctgtcctaacggctgccgtttttgccacgccggttactggtacagaccttgcaggcaaaagaatgaagaacttatagcaactcaggtagacgaaatggtaacaaaaggcggctggcaggaaatcagcctgtcctcgctgtcatcgggcgattatacgggaattgcggaattggtggaaaatcttaattcacgcttcagcgataagcacatttcattccaactgccctccgcttaa

SEQ ID NO: 4244 - protein, 271 aa, Unknown
  Obtained from environmental sample
  misc_feature (1)..(271): Xaa is any amino acid
MGNQSVRIIYNNLNNKKNIFCDRAFAPAPDFEKLLRENNIPIYGLDTGISAMSVDLFMFTLGYELGLNGILTMLDVSKIPLHCEERTAAHPIVIAGGPAVSNPLPYSPFIDAFWIGEAEDEYFNLAEELSELKKGGKGRAELLKKIAEHPNVWVKGKQKATRAITKSFSKESNVYPIPSMKIVQHHGAVEIMRGCPNGCRFCHAGYWYRPCRQKNEELIATQVDEMVTKGGWQEISLSSLSSGDYTGIAELVENLNSRFSDKHISFQLPSA

SEQ ID NO: 4245 - DNA, 1002 bp, Unknown
  Obtained from environmental sample
  misc_feature (1)..(1002): n is a, c, g, or t
gtgtgtgtatgcgtnngcgagggttgtgtaaaccctatcacagatgcataccacatagttcacggactatcgggctgcgctagctacacttgggacatacgcgggagcctcacctccggcgaagatacattccgcaacagtttttccacagatttaagagaaacagatatagtttttggaggagcgaaaaagctcactgcggctattgacgagttgatggaaaaagccgtgccttccccaaagctgatatttgtttttgccacttgcattgtgggtgttatcggtgatgatattgaagccgtgtgccgccttgcggaaaaaaaatatggcattcgagttattcctgtaaaagcccccggattttcgggaacaaaatctcaaggttataaactcgcctgcaatgccattatgagtttaattaaacctcacgcaaagcaaccgaaacgctttggcgtgaatattctcggcgactttaaccttgcaggcgaaatgtggattatcaagggctaccttgaaaaaatcggaattccagttatatccacaattaccggagattcctcatacaaaaccttgattcaagctccatctgcaatgctcaacattgtgcagtgcgcaggttcttctgcatatctctcggaacttatggaaacggagtttggaataccgagccttagagtgagtttttttggcattgaagatacaaccgcttcattgtttcgtgttgcagatttttttggcaaaatggaaatttccgaaaatgcgagaaagtttgcggcagaacaaacggcaaatataatgcctgttattgaaaaatacaaaccgcatttggaaggcaaaaaagccgcgatttttgtgggcggaggtttcaaagccatttcgcttattcgccaattcaacgaactcggcatggaagcggtggtggttggcactcaaaccggaaaaaaagaagattacgaagttatgggtacgctggaaatagcaatgcgggattctcggccataa

SEQ ID NO: 4246 - protein, 333 aa, Unknown
  Obtained from environmental sample
  DOMAIN (2)...(330): Nitrogenase component 1 type Oxidoreductase
  misc_feature (1)..(333): Xaa is any amino acid
MCVCVXEGCVNPITDAYHIVHGLSGCASYTWDIRGSLTSGEDTFRNSFSTDLRETDIVFGGAKKLTAAIDELMEKAVPSPKLIFVFATCIVGVIGDDIEAVCRLAEKKYGIRVIPVKAPGFSGTKSQGYKLACNAIMSLIKPHAKQPKRFGVNILGDFNLAGEMWIIKGYLEKIGIPVISTITGDSSYKTLIQAPSAMLNIVQCAGSSAYLSELMETEFGIPSLRVSFFGIEDTTASLFRVADFFGKMEISENARKFAAEQTANIMPVIEKYKPHLEGKKAAIFVGGGFKAISLIRQFNELGMEAVVVGTQTGKKEDYEVMGTLEIAMRDSRP

SEQ ID NO: 4247 - DNA, 540 bp, Unknown
  Obtained from environmental sample
  misc_feature (1)..(540): n is a, c, g, or t
atggccgaaacactttttttggtgaggcgtgagggggaacttcccgccggggtagccaccgcggcggtgctggaaggtacccggacaatactcgtggagattcaggcgctgaccatccccgccaaaggggcggtcagccgggttttttccgacaaaattgattccggcagggtttcccgcgtggcggcggctttggaaaaacatctgggcctgcggctttccgatcaggatttatacgttaatgtggcggggggaatccgcattaccgaggtaggggtggaacttgcccttgcctgcgccctgtattcggcgcgtaccggccttgctctgccctccggccttgccatagcgggggaactttccctgaccggggaactgcgtccggtcagccgtcttgcagggcggataaaaacagccggtaatttgggctttacggtctttctctgcccctccccggaaagcccgcctgaggttcaagggcaaactgcggcgctcaaacccgcccgcgacataaaatcagctattaagttgatttattag

SEQ ID NO: 4248 - protein, 179 aa, Unknown
  Obtained from environmental sample
  misc_feature (1)..(179): Xaa is any amino acid
MAETLFLVRREGELPAGVATAAVLEGTRTILVEIQALTIPAKGAVSRVFSDKIDSGRVSRVAAALEKHLGLRLSDQDLYVNVAGGIRITEVGVELALACALYSARTGLALPSGLAIAGELSLTGELRPVSRLAGRIKTAGNLGFTVFLCPSPESPPEVQGQTAALKPARDIKSAIKLIY

SEQ ID NO: 4249 - DNA, 702 bp, Unknown
  Obtained from environmental sample
  misc_feature (1)..(702): n is a, c, g, or t
atggccgagatatcgtccgatgaggtttacggttctttgggcgaaacaggatattttacagaagatactccctacgacccgcgttcgccctattcggcaagcaaagccgcgagcgatcacctcgcgatggcgtacagccacacctacggcttgccggtaaccctttccaactgttcgaacaattacggtccttatcaattccccgaaaaacttatccccctgatgatcctcaatatgctggaaggaaaaccgcttccggtttatggcgacggaaaaaatatccgcgactggctgtatgtggaagatcacaattcggcagtttgggctattatgcgtaacggcgtatcaggagaaacatataacattggcggtgaaaatgagtgggagaatataaaactgctgaatgtactgattgatattgtctgcgccaaagccagactggaccccgctaaagtccgcggtacagtaacatacgttaaagaccgcccgggtcatgaccgccgttacgcgatagactgttcaaagcttaaacacgaactaggctggaaacaggctgtaaattttgaagaagggctttcccgcaccgtagactggtatctggctaatccacaatggatagagagtatccgcagcggagaataccagcattgggtagagaagaattatggggatagaggacaggaaaagcaggcgcacatatga

SEQ ID NO: 4250 - protein, 233 aa, Unknown
  Obtained from environmental sample
  DOMAIN (2)...(123): NAD dependent epimerase/dehydratase family
  misc_feature (1)..(233): Xaa is any amino acid
MAEISSDEVYGSLGETGYFTEDTPYDPRSPYSASKAASDHLAMAYSHTYGLPVTLSNCSNNYGPYQFPEKLIPLMILNMLEGKPLPVYGDGKNIRDWLYVEDHNSAVWAIMRNGVSGETYNIGGENEWENIKLLNVLIDIVCAKARLDPAKVRGTVTYVKDRPGHDRRYAIDCSKLKHELGWKQAVNFEEGLSRTVDWYLANPQWIESIRSGEYQHWVEKNYGDRGQEKQAHI

SEQ ID NO: 4251 - DNA, 912 bp, Unknown
  Obtained from environmental sample
  misc_feature (1)..(912): n is a, c, g, or t
gtggaagttggttctctgggcccatttatatcggtagcggctaatcctaatatggtgaaccgtcaacccttattggcgtttttataccgaatcggcggctttcaagaaagacccaatagtgacgttgctttcttagtgtttctgggcattgtgatctttgttttgattatcgccgtaacagcgttcagaaccggcgctcaatacattgcttaccgttttacagcgaatcgccggtataccttgagtatacggttgttcaggcagtatttgttccaaccataccaattttttttaaatcataataccggagagttgtctaaaaaccttttatccgaagttgacatggttattaatgctgtcatgtggccgggaatagatgcctttacttccggaatgggggcgctggctatacttatttttctagttgtacttaaccctttggtagcaatccttgccgctgttatatttggcgtactgtatttgggaatgtatgcttttgtgcgtccccggttaaaacgccatggaaaggatgcgcgtgaggctaatcgattgcgttataaagcggctgccgaggcatttggcggagtcaaagagataaagattttggggaaagagcctttttttgttactacctatggtcagggagcccggcgattcgccgcttctcaggccgccaaacagattttatcaagccttcccggacgaattatgcattctctggcaatcggttttgctattgcattaatagtaatacttctggcagcgaatggttctttggcaggaattctccctctcgtatctatgtatgcttttgcggtgttacggttaatgccgaatttgcaacacatgtttcaaagtgcggcaagtattcgttattcctctcatgtcgttgatgcccgtatcaggacatga

SEQ ID NO: 4252 - protein, 303 aa, Unknown
  Obtained from environmental sample
  DOMAIN (9)...(278): ABC transporter transmembrane region
  misc_feature (1)..(303): Xaa is any amino acid
MEVGSLGPFISVAANPNMVNRQPLLAFLYRIGGFQERPNSDVAFLVFLGIVIFVLIIAVTAFRTGAQYIAYRFTANRRYTLSIRLFRQYLFQPYQFFLNHNTGELSKNLLSEVDMVINAVMWPGIDAFTSGMGALAILIFLVVLNPLVAILAAVIFGVLYLGMYAFVRPRLKRHGKDAREANRLRYKAAAEAFGGVKEIKILGKEPFFVTTYGQGARRFAASQAAKQILSSLPGRIMHSLAIGFAIALIVILLAANGSLAGILPLVSMYAFAVLRLMPNLQHMFQSAASIRYSSHVVDARIRT

SEQ ID NO: 4253 - DNA, 711 bp, Unknown
  Obtained from environmental sample
  misc_feature (1)..(711): n is a, c, g, or t
gtggaatggaaaatccaattcacgagtaaggataacgccaagggaatggcggttgcgtacctgaatagccgcgccatccaaacaaggcttgatgaggttatcggagccgccaactggaagaacgcctatataccgtggcaaaacaacgcgcagttatgcggactgtcgatttatgacagtgaacgcaacgagtgggtcactaaatatgacggggccgaaaacacggctattgaacccgtcaaaggaggcttgaccgattcgttcaaacgcgccgcctgtttgtggggcataggccggtacttgtacgagattgccggtatatgggttgaaattgagccgcgtggaaagagttcgggtatcaaacaagatcaatatgccaaacttgagactgaatacaacaaagccgtggcaatgatatgcaataccacaaaaggaaaaacttctgttgcatctgccgaacagaaaaccacaccggtatcacccacagttactgcgtcttccgattaccgggtacaatcggtaacaaccagcggcaaggaatcattaatagttgagcttgttaatccttccggcgaagttgtctccgcgtttatcaagaaaggcgacaatgctcccaagaccggttccagattgaaagaagtcaagcttgtggtaaaaaccggcagatacggcccgtacaacgtaatcgacgattataagatagccgcgtga

SEQ ID NO: 4254 - protein, 236 aa, Unknown
  Obtained from environmental sample
  DOMAIN (1)...(127): Rad52/22 family double-strand break repair protein
  misc_feature (1)..(236): Xaa is any amino acid
MEWKIQFTSKDNAKGMAVAYLNSRAIQTRLDEVIGAANWKNAYIPWQNNAQLCGLSIYDSERNEWVTKYDGAENTAIEPVKGGLTDSFKRAACLWGIGRYLYEIAGIWVEIEPRGKSSGIKQDQYAKLETEYNKAVAMICNTTKGKTSVASAEQKTTPVSPTVTASSDYRVQSVTTSGKESLIVELVNPSGEVVSAFIKKGDNAPKTGSRLKEVKLVVKTGRYGPYNVIDDYKIAA

SEQ ID NO: 4255 - DNA, 801 bp, Unknown
  Obtained from environmental sample
  misc_feature (1)..(801): n is a, c, g, or t
atgcagggcataggccagcccgtggttccctcggtaatcgcaaccgatacggaaaccgcggttaaattcgccgatgaactcgggtttccggtcattgtgcgcccggcattcacgctgggcggcacgggcggcggaattgccgccaacgaggaacagcttactgaaattgcgtctaacgggctgtccctctcgcccatacatcagattttggttgaaaaatcaatcgccggctggaaggagattgaatatgaggtgatgcgcgaccgcgccggaaacgttatcactgtctgttcaatggaaaatttcgatcctgtgggcatacacacgggcgacagcatcgtcatcgcgcccgccgtcaccctggctgacaaggaataccagatgctccgttcggcagccctgaacataattcaggccctgggcgtggaaggcggctgtaacgtccagttcgccctgcatccacggagttttgaatacgcggtcattgaggtaaacccccgcgtttcgcgttcctcagcgctcgccagcaaggctacaggctaccccatcgctaaagtcgcgacaaaaatcgccgttggttacaccctcgacgaaatagtgaacgccgtaaccggcaatactttcgcggcgtttgagccaacgcttgactatgtggcggtgaaattccccaaatggccttttgacaaattcgtgtacgcgcacaaggaactgggcacgcagatgaaagccaccggcgaggtcatggcaattgccgacacttttgaggaagcgcttttaaagccgtgcgcggcgcggagatag

SEQ ID NO: 4256 - protein, 266 aa, Unknown
  Obtained from environmental sample
  DOMAIN (1)...(227): Carbamoyl-phosphate synthase L chain, ATP binding domain
  misc_feature (1)..(266): Xaa is any amino acid
MQGIGQPVVPSVIATDTETAVKFADELGFPVIVRPAFTLGGTGGGIAANEEQLTEIASNGLSLSPIHQILVEKSIAGWKEIEYEVMRDRAGNVITVCSMENFDPVGIHTGDSIVIAPAVTLADKEYQMLRSAALNIIQALGVEGGCNVQFALHPRSFEYAVIEVNPRVSRSSALASKATGYPIAKVATKIAVGYTLDEIVNAVTGNTFAAFEPTLDYVAVKFPKWPFDKFVYAHKELGTQMKATGEVMAIADTFEEALLKPCAARR

SEQ ID NO: 4257 - DNA, 828 bp, Unknown
  Obtained from environmental sample
  misc_feature (1)..(828): n is a, c, g, or t
ttgnctaactacntaatgttttacagttatattgccaatgaccgcaaggcaggaacntacgactntgatatgccatgcgttgaaaagaacacagacgactaccgttattaccaaacgcagtacggtgcggtgcttgtaacatataaaggggattcgacccgagtccgcatccccacagagataggcggcgttgcggtaaaggcactgtataaaacttttgcgaataaatccctagtggcagtccaaattcccgaaggaataacatacataggtgataatgcattttccaataatcaactggcaagcgtaaccattccgaacggagttacgttcatcggcaatgatgcgtttgaaaaaaatcaactgactagcgtaaccatcccgaacggcgttacatacctaagcggatttaacaataatcaactgacaagcgtaaccatcccgaacagcgttacatacatcggcaatagggcgttctctagtaatcaactgacaaacataaccataccgaacggcgttacatacatcggcaatggggcgttctctagtaatcaactgacaagcgtaatcatacccaacagcgttacatacatcggcgaaagtgcgttctctagtaatcgactgacaagcgtaacaatcccaaacggcgttacggctataggcaatagggcgttctctagtaatcaactgacaagcgtaatcatacccaacagcgttacatacatcggcaatggggcgttctctgataatcaactgacaagcgtaacattccaaggtacaattactttgagtaattttggtaataacgccattcggagaatggaatga

SEQ ID NO: 4258 - protein, 275 aa, Unknown
  Obtained from environmental sample
  misc_feature (1)..(275): Xaa is any amino acid
MXNYXMFYSYIANDRKAGTYDXDMPCVEKNTDDYRYYQTQYGAVLVTYKGDSTRVRIPTEIGGVAVKALYKTFANKSLVAVQIPEGITYIGDNAFSNNQLASVTIPNGVTFIGNDAFEKNQLTSVTIPNGVTYLSGFNNNQLTSVTIPNSVTYIGNRAFSSNQLTNITIPNGVTYIGNGAFSSNQLTSVIIPNSVTYIGESAFSSNRLTSVTIPNGVTAIGNRAFSSNQLTSVIIPNSVTYIGNGAFSDNQLTSVTFQGTITLSNFGNNAIRRME

SEQ ID NO: 4259 - DNA, 612 bp, Unknown
  Obtained from environmental sample
  misc_feature (1)..(612): n is a, c, g, or t
ttggccgaactggcgagaggcgagggcctccccgtcgtgtacgccggtccccttggtgagtccaggctccaatgcggaggaagtcgccaggatgtgacgcagggaaggatacgcaccatcggtataatggttcttttgtgtgtccgcatgggcaagggtcctcagccactcgacgaagcgcgccggtacacgatgagccggataaagagcaaggacacgtccatcgaggtccagctcaggaaggccctgcgggcttccggaatccactacagaaaaaactactccatgctgccgggcatccccgatgtggccatccccagctgccgcatagcaattttctgcgacggcgagttctggcacggtaaggactgggacccgctggcgccgaaggtcctgcacaacagggacttctgggcggccaagatagagaggaacatcggccgcgacagggcagttgatagggacctgcgcgacatggattggacggtcctccgctattggggggcggacattgtgaaagaccccgcccgctgcgtcgaggaaattgaatacgcgatgttccaaagcttgatggaggcctcggccacggactgggactacgaggacctgtag

SEQ ID NO: 4260 - protein, 203 aa, Unknown
  Obtained from environmental sample
  DOMAIN (50)...(127): DNA mismatch endonuclease Vsr
  misc_feature (1)..(203): Xaa is any amino acid
MAELARGEGLPVVYAGPLGESRLQCGGSRQDVTQGRIRTIGIMVLLCVRMGKGPQPLDEARRYTMSRIKSKDTSIEVQLRKALRASGIHYRKNYSMLPGIPDVAIPSCRIAIFCDGEFWHGKDWDPLAPKVLHNRDFWAAKIERNIGRDRAVDRDLRDMDWTVLRYWGADIVKDPARCVEEIEYAMFQSLMEASATDWDYEDL

SEQ ID NO: 4261 - DNA, 618 bp, Unknown
  Obtained from environmental sample
  misc_feature (1)..(618): n is a, c, g, or t
ttgggactccgcctgaaaagggaaaacaacaatgttcccacaattttttcagttgtaaaagaatcattttctaccgctcaggaggattttgaaactcaacctgcttttttttatgaatggaaagatttagctaacatttgccctgatgaaacagcagaaaaatttgaaattttttctgattatgcatccgcctttaaaatagcgtcttatattatggcaaataaacctgtattcaccgcgatttcatttgatgaacctgataccacaggtcattcgttgggttggggctcaaaggcttattacgagaaacttacccttttggataatttcgttgctattattgaacaggcagttaaagattccgggatatacgacaacacggtatttgtcttttcagctgaccatggcggcagttttaaggggcacgggcttaacacttccaaacatcgaaaaattccattgatattttacggagtaggcataaaaaaaggctatgtcattccttttcccaccgatatttacgatatatcaccttccatagccacaatcctggggctccaggtgccccaggaatggactggaaggccaatatttgaaatttttgataatttgaaataa

SEQ ID NO: 4262 - protein, 205 aa, Unknown
  Obtained from environmental sample
  misc_feature (1)..(205): Xaa is any amino acid
MGLRLKRENNNVPTIFSVVKESFSTAQEDFETQPAFFYEWKDLANICPDETAEKFEIFSDYASAFKIASYIMANKPVFTAISFDEPDTTGHSLGWGSKAYYEKLTLLDNFVAIIEQAVKDSGIYDNTVFVFSADHGGSFKGHGLNTSKHRKIPLIFYGVGIKKGYVIPFPTDIYDISPSIATILGLQVPQEWTGRPIFEIFDNLK

SEQ ID NO: 4263 - DNA, 801 bp, Unknown
  Obtained from environmental sample
  misc_feature (1)..(801): n is a, c, g, or t
ttggcgttaaactttttaaatattttagttctaagaatgaggaaaaacatggttagtatgacaggttacgcataccgcgaaaaatcagggcaggaattatcggtctctgtggaaattaaaggctgtaacagccgctatctggaaatatccgtaaatcttccgccatggctttcaatgctggaaatgaagatccgcgaaaaaatttcatcggactgcggcagggggaaagttgatatttttgtccgtattagagagcataacgcgcctgtcaatatcagcgtgaataaaaacgcggcaaaggcttattacaatgcgattaatgaaatggcgaaagaactcggcataaaagaaaaacccgccctgtctgcaattttgggaatggaaaacgttttggagatagaaaaaaaccgcgatgaagaacgctactggcgggaaattgaaccgctgttgaatgaggctgttaaaagtttttgcgaggagcgggagagagagggcaagtatacgcaggacgatattatttctcatcttggagagatagaatcatcgttaaaaaaagtttcttcatttgctcccgtgattgagcaaactttaaaagataatattaaaacgcggtttgcggaattgcttgggaatcagattgatgaaaataggatacttgccgaaactgcgtctcagcttttaaagtatacaatttccgaggaaatctcccgtcttacatctcaccttgcggaattcagggcggagaccgaaaaaaatccgcgaccgggtaaaaaacntggattttctttgtcaggaaattaa

SEQ ID NO: 4264 - protein, 266 aa, Unknown
  Obtained from environmental sample
  DOMAIN (217)...(261): Domain of unknown function (DUF1732)
  misc_feature (1)..(266): Xaa is any amino acid
MALNFLNILVLRMRKNMVSMTGYAYREKSGQELSVSVEIKGCNSRYLEISVNLPPWLSMLEMKIREKISSDCGRGKVDIFVRIREHNAPVNISVNKNAAKAYYNAINEMAKELGIKEKPALSAILGMENVLEIEKNRDEERYWREIEPLLNEAVKSFCEEREREGKYTQDDIISHLGEIESSLKKVSSFAPVIEQTLKDNIKTRFAELLGNQIDENRILAETASQLLKYTISEEISRLTSHLAEFRAETEKNPRPGKKXGFSLSGN

SEQ ID NO: 4265 - DNA, 483 bp, Unknown
  Obtained from environmental sample
  misc_feature (1)..(483): n is a, c, g, or t
ttggacaacatgagctttcctatgcgtcgctttacatgggagccttcttttgggcccgcttttctgatatttatgagccagtggaagggagtaggctatggcacggttatttacctggccactattgcttctctggataaaaccatgtatgaagccgcgatcatagacggcgcaggtaaatggcagcaaatatggaagctcactattccaatgatgaagacggtcattgtgcttatgctcatcatgacagcgggcagaatattttattcggacttcggtcttttctatcaggttccgaggaattccagttcgctttataagacagtctataccctggatgtttatgtttacaacttgttaaaaacctcaaataccggtatggcggcggctgcggcgttaattcagagcgtagccgcctgtgtaacgatcctgatggtaaatcaaatcgtcaaaaaaattgatcccgactcggcaatgatatag

SEQ ID NO: 4266 - protein, 160 aa, Unknown
  Obtained from environmental sample
  misc_feature (1)..(160): Xaa is any amino acid
MDNMSFPMRRFTWEPSFGPAFLIFMSQWKGVGYGTVIYLATIASLDKTMYEAAIIDGAGKWQQIWKLTIPMMKTVIVLMLIMTAGRIFYSDFGLFYQVPRNSSSLYKTVYTLDVYVYNLLKTSNTGMAAAAALIQSVAACVTILMVNQIVKKIDPDSAMI

SEQ ID NO: 4267 - DNA, 654 bp, Unknown
  Obtained from environmental sample
  misc_feature (1)..(654): n is a, c, g, or t
gtgggcggagaaattttcatgggacgcgagcgccggaaaggtggaagagtggcttctgaaaaccgtgtgcggaaaatagcgacagacgcggccaagatcgtcaccacggcgctgatcatcgccgttctggtccgcaagctggggtgggggactatcgtcgacacggtgggcggttccgacccgctgtggctcgtcgccgcctttgtcgtatactttttgagcataatgctcggcgtggtgcagtggcgggtgattttggacaacagaggtttgagcctgccctttccgagggtcttcaagctgtactttgtggggatgtttttcaacagttttatggctggcgggattgtgggcgacatagtgaaagtcgcgtccatacgctctagggacggcagggggatggccgggctcgccgccaccgctctcgacaggttcgccgggctttgggcgctgtgcggtttcgcggtcatggggagcctgatccttctgaaccgcgggatgctcacccacggcagggtaacgaccgcggtcatagccctcttcgccgccttcgccctcttcgccggcataatgctcttcctcatgttcaagccgctccagaggctcttcttctcaatcatagaccgatacccctttttcgccaagctagaataa

SEQ ID NO: 4268 - protein, 217 aa, Unknown
  Obtained from environmental sample
  misc_feature (1)..(217): Xaa is any amino acid
MGGEIFMGRERRKGGRVASENRVRKIATDAAKIVTTALIIAVLVRKLGWGTIVDTVGGSDPLWLVAAFVVYFLSIMLGVVQWRVILDNRGLSLPFPRVFKLYFVGMFFNSFMAGGIVGDIVKVASIRSRDGRGMAGLAATALDRFAGLWALCGFAVMGSLILLNRGMLTHGRVTTAVIALFAAFALFAGIMLFLMFKPLQRLFFSIIDRYPFFAKLE

SEQ ID NO: 4269 - DNA, 369 bp, Unknown
  Obtained from environmental sample
  misc_feature (1)..(369): n is a, c, g, or t
gtggatttcgccggatttgtggatgaggataagaaaatagagtatttgagacgttcgactatctttgtcaacccnccggaaaaagaggggtgggggataacgaatatcgaggcgtcggcttgcgccttgccggttgcggccaacgacgcgcctgggttgcgcgattcggtggttgacggcgagacgggtctgctctataaagagaacgatgtgtcttcgcttacggagtctattaaaaagctgcttgacgacagggaactcagggtgcggatgggcgtgcgcgggcgcgagtgggcggagaaattttcatgggacgcgagcgccggaaaggtggaagagtggcttctgaaaaccgtgtgcggaaaatag

SEQ ID NO: 4270 - protein, 122 aa, Unknown
  Obtained from environmental sample
  DOMAIN (1)...(98): Glycosyl transferases group 1
  misc_feature (1)..(122): Xaa is any amino acid
MDFAGFVDEDKKIEYLRRSTIFVNPPEKEGWGITNIEASACALPVAANDAPGLRDSVVDGETGLLYKENDVSSLTESIKKLLDDRELRVRMGVRGREWAEKFSWDASAGKVEEWLLKTVCGK

SEQ ID NO: 4271 - DNA, 303 bp, Unknown
  Obtained from environmental sample
  misc_feature (1)..(303): n is a, c, g, or t
ttgattccctttttttggaaaacacgccgcaccgtatacggggaaaatttctttagaaggaaccatagcttcagaagacggccgcgcgaggtgcccgtgccctatctcgcgctttcctgtccccattctaccaacttcgcctaccgaatagggagggaagttgtaatgcagcatgaagttttcgcgcttgtcgccttctatgtcgtcgaagatctgctcgtcaaaaacggttccaagggttgtaacaaccagcgcctgtgtttcaccgcgcgtaaaaagagccgagccgtgcgtccgctgtaa

SEQ ID NO: 4272 - protein, 100 aa, Unknown
  Obtained from environmental sample
  misc_feature (1)..(100): Xaa is any amino acid
MIPFFWKTRRTVYGENFFRRNHSFRRRPREVPVPYLALSCPHSTNFAYRIGREVVMQHEVFALVAFYVVEDLLVKNGSKGCNNQRLCFTARKKSRAVRPL

SEQ ID NO: 4273 - DNA, 738 bp, Unknown
  Obtained from environmental sample
  misc_feature (1)..(738): n is a, c, g, or t
ttgtcagcttctcaccgttatcttaccgcgatgagcaatattatcatggaaaatctgggaaccattgacaaatacgaaggggacgcgattatcgcgtttttcggcgctcctgttttccgcgagaaccatccgtctcttgcctgccgcagcgcgcttgcgatgaaagcggcggaagaagaactgaacaaaaccgtgctggaagaaaaattaagcccatcgccgatttttacacgcattggaataaataccggagatatggtcgttggaaacatgggcgcggaaaacaaaatggactacacaataatgggcaacgccgtaaacctcgcagcccgtcttgaaggagtgaataagcagtaccacacaggcggtattctgataagcgaatacacccgtaataagttaggtgatgaattcctcctgcgccgtcttgatcgagtacgggtagtgggcattcacacgccgcttcgtttgtatgaactgctggcgaataacagtgaacagataacaaataacaatgaacagataaaaactgttaaagaaatgatagagaagtgggaaatggcgattgatttgtatgaaaagaagcaatttaaggaagcggcgaaaatatttacttccattaaacagcaaaaccccaacgacaaagtggcggaactatacgccgaacgctgcgtaaaatacgagacaaacccgccgccggaaaactgggacgctgtaaataacctgacggagaaataa

SEQ ID NO: 4274 - protein, 245 aa, Unknown
  Obtained from environmental sample
  DOMAIN (1)...(162): Adenylate and Guanylate cyclase catalytic domain
  misc_feature (1)..(245): Xaa is any amino acid
MSASHRYLTAMSNIIMENLGTIDKYEGDAIIAFFGAPVFRENHPSLACRSALAMKAAEEELNKTVLEEKLSPSPIFTRIGINTGDMVVGNMGAENKMDYTIMGNAVNLAARLEGVNKQYHTGGILISEYTRNKLGDEFLLRRLDRVRVVGIHTPLRLYELLANNSEQITNNNEQIKTVKEMIEKWEMAIDLYEKKQFKEAAKIFTSIKQQNPNDKVAELYAERCVKYETNPPPENWDAVNNLTEK

SEQ ID NO: 4275 - DNA, 327 bp, Unknown
  Obtained from environmental sample
  misc_feature (1)..(327): n is a, c, g, or t
atgactaatttaagaggtttactctccaaaaatataaagaaaagacgtaaatttttggggatttcacaggcaatattggctgaaaaagctgaaacctcaacccattatatcgcacaaatagagcaaaaaaagaaattcccttcttctgaaatgcttgaacgaatagcgactgcccttgatatagatagccctgaactatttgcctccaaaacgttcagagatgatgcaatcaatagggtacaagaatgtgttaatgccgatttagatgctgtaacgcatataatttttgaaagaatttcagaattaaaaaaatacaataatcaataa

SEQ ID NO: 4276 - protein, 108 aa, Unknown
  Obtained from environmental sample
  SIGNAL (1)...(29)
  DOMAIN (12)...(66): Helix-turn-helix
  misc_feature (1)..(108): Xaa is any amino acid
MTNLRGLLSKNIKKRRKFLGISQAILAEKAETSTHYIAQIEQKKKFPSSEMLERIATALDIDSPELFASKTFRDDAINRVQECVNADLDAVTHIIFERISELKKYNNQ

SEQ ID NO: 4277 - DNA, 744 bp, Unknown
  Obtained from environmental sample
  misc_feature (1)..(744): n is a, c, g, or t
atgaaagacgatgtaaattccgcgactttacaaaaattcgggaaacgctgggtcagaaatatactgcgaaacgcccgcgctataagagatctgccggggatttcccgctttgccggtcttgccggccctgccggcgatggcgctccccccctgcccgtattcatggcagcggccggaccggggctggatgaggtcgtttccttgctgcccgaaatccgcaagcgctgcgtcattgttgccgtggatacaagcctgcgttttctttcaaggaacggcgtagagccggacttcgctctgataatcgatccgcaattctggaacagccgccatcttgaccgctgccttgccgaaaatacaaggctgattattgaatcggcggtatacccgcccgtactgcggctcgcgtgcaagaggatgtacctctgcggatcgctttttcccctgggaaaattcattgaggaaagagtcgatccgaaaggatctcttgccacagggggatctgtcgcgacaagcgcgtgggatttctccaggctgttaggcgcaaggcagatatggatcgccggccttgaccttgccttccccggcaataaaacccattaccggggcgctcaatttgaagaaaaagcccttgccgaatcatggcgcctatggccgtctgaatcatggctggcccgcgccatgcgcgacggcataccgtgtaacggcccgagcctcggcggcggaacagtacctcgtgcgatctga

SEQ ID NO: 4278 - protein, 247 aa, Unknown
  Obtained from environmental sample
  DOMAIN (35)...(191): Protein of unknown function DUF115
  misc_feature (1)..(247): Xaa is any amino acid
MKDDVNSATLQKFGKRWVRNILRNARAIRDLPGISRFAGLAGPAGDGAPPLPVFMAAAGPGLDEVVSLLPEIRKRCVIVAVDTSLRFLSRNGVEPDFALIIDPQFWNSRHLDRCLAENTRLIIESAVYPPVLRLACKRMYLCGSLFPLGKFIEERVDPKGSLATGGSVATSAWDFSRLLGARQIWIAGLDLAFPGNKTHYRGAQFEEKALAESWRLWPSESWLARAMRDGIPCNGPSLGGGTVPRAI

SEQ ID NO: 4279 - DNA, 330 bp, Unknown
  Obtained from environmental sample
  misc_feature (1)..(330): n is a, c, g, or t
gtgagccacggcgatactttatggtcaatgtccagatactacggcgcttcactcgacttgattgaacagcacaatccgggaatttccaaccgttaccttaaaataggggagaccatcataattcccgcttttaaggacatagctccccctacccggcctgtgtcaaatgtccgttataacgcccaatatgtggtaaaaaaaggcgataccctctggtcccttgccagaatgtacggcgttgacccccaggatttggcccaagccaataatatgaccctaaatcagattttacgcgaaggaataaccctaaaagtaccgatattagagtag

SEQ ID NO: 4280 - protein, 109 aa, Unknown
  Obtained from environmental sample
  DOMAIN (4)...(42): LysM domain
  misc_feature (1)..(109): Xaa is any amino acid
MSHGDTLWSMSRYYGASLDLIEQHNPGISNRYLKIGETIIIPAFKDIAPPTRPVSNVRYNAQYVVKKGDTLWSLARMYGVDPQDLAQANNMTLNQILREGITLKVPILE

SEQ ID NO: 4281 - DNA, 681 bp, Unknown
  Obtained from environmental sample
  misc_feature (1)..(681): n is a, c, g, or t
gtgaaaatcttagctggggaaattcctcagaatgctattgaaatagaagaaaacgggcttaaaattttggttgatttgcatagcgggcacaaaactggctattatttagaccagagaaatgcgagaaaaagaattggcgaacttgccaaagacaaacgtgttttgaactgcttttgctataccggaggttttggtttatttgccgcaaagggtggtgcaaaatatgttaggcaggttgatgtttctgcctctgcgcttgagcttgcaaagcaaaatgccgcattgaacgacctaaaaaattcagaaattgaatatgcagaagcagatgtatttacctacttgcgcaaatgcagggacaaaggcgaaacatttgacctaataatcttagacccgcctaaatttgcggaatctgcgagccaagtggaaaaagctgcaaagggctacaaagatattaacctgctggcaattaaattgctagctccgggcggaatgcttgccacgtttagctgtagcgggcatataagcgccgaattattccaaaaaatagcggcggatgccgctgttgatgcaaaacgccaagtgcagattttggaaagctttaagcaagcacaagaccaccccgtgctgggttcattcccagagggaatgtatttgaagggattattgttattttgtttttaa

SEQ ID NO: 4282 - protein, 226 aa, Unknown
  Obtained from environmental sample
  misc_feature (1)..(226): Xaa is any amino acid
MKILAGEIPQNAIEIEENGLKILVDLHSGHKTGYYLDQRNARKRIGELAKDKRVLNCFCYTGGFGLFAAKGGAKYVRQVDVSASALELAKQNAALNDLKNSEIEYAEADVFTYLRKCRDKGETFDLIILDPPKFAESASQVEKAAKGYKDINLLAIKLLAPGGMLATFSCSGHISAELFQKIAADAAVDAKRQVQILESFKQAQDHPVLGSFPEGMYLKGLLLFCF

SEQ ID NO: 4283 - DNA, 489 bp, Unknown
  Obtained from environmental sample
  misc_feature (1)..(489): n is a, c, g, or t
atgagacacgcccccctctgcagggggagccgccttacagcctttgagctgtctgccgccggaatcgacaccacagtgatctgcgacaacatggcttcgcaggtgatgaagaacggctgggtcaacgctgtcttcaccggctgcgacaggatggcggctaacggggacgcttgcaataaaatcggcacttcaggcgtcgcgattctggcgaagcattacggcatcccgttttatgtatgccttccgtcttctaccgtagacttaaataccaaaaccggcgagggcattgttatcgaagagcgtgatccgaaagaagttaccgagatgtggtaccgcgagcctatggcccctgaaggtgttaaggtttttaaccccgcctttgacgtaaccagccatgaactaattaccgctatcgtaaccgagcggggaataatccgcccgccttatgatgagaatttaaagtcttatttttccagaacctcagaatag

SEQ ID NO: 4284 - protein, 162 aa, Unknown
  Obtained from environmental sample
  DOMAIN (1)...(149): Initiation factor 2 subunit family
  misc_feature (1)..(162): Xaa is any amino acid
MRHAPLCRGSRLTAFELSAAGIDTTVICDNMASQVMKNGWVNAVFTGCDRMAANGDACNKIGTSGVAILAKHYGIPFYVCLPSSTVDLNTKTGEGIVIEERDPKEVTEMWYREPMAPEGVKVFNPAFDVTSHELITAIVTERGIIRPPYDENLKSYFSRTSE

SEQ ID NO: 4285 - DNA, 480 bp, Unknown
  Obtained from environmental sample
  misc_feature (1)..(480): n is a, c, g, or t
gtggtttcccgtattaatttttatagtattaggagtgcttcttttgaggagcgcgaaaacctgatgcgttttagcgtaacgtcacgtgataactcttgcgctgcaaggacgggaatactgcaccttccccacggcgatgtgataactccggtttttatgcccgtgggtactaatggaaccgtaaaagcattaacgactgacgacttaaaagaaatcggctatgatttaattctttcaaatacgtatcatttatacttaaggcctggagaagaagttatcgaaaaagcgggaggacttcatcaatttattaattgggacaggaacatattaacggactcaggcggcttccagattttttcgctctccgcgttgcgaaaaatcaagccggaaggcgcgtggtttcaatcgcacattgacggctcaaaacattttatcagccccgagaaagccgtaactattcaagctactcggccgatctga

SEQ ID NO: 4286 - protein, 159 aa, Unknown
  Obtained from environmental sample
  misc_feature (1)..(159): Xaa is any amino acid
MVSRINFYSIRSASFEERENLMRFSVTSRDNSCAARTGILHLPHGDVITPVFMPVGTNGTVKALTTDDLKEIGYDLILSNTYHLYLRPGEEVIEKAGGLHQFINWDRNILTDSGGFQIFSLSALRKIKPEGAWFQSHIDGSKHFISPEKAVTIQATRPI

SEQ ID NO: 4287 - DNA, 423 bp, Unknown
  Obtained from environmental sample
  misc_feature (1)..(423): n is a, c, g, or t
ttgcgggtataccctttttccattgatgaatcatataacgaacatcccgatatattcagaagaaaagccgttaatgtggaagagttatccgcaaaaaacgcaggtctcctggtaaaggacttgcgttccgcagggcttccgtaccagcacacgcaggcgaattattatcaccgttattcgtttgccgctacctccctaattgtaatgatactctcaatctccatgggcggcaggttcagaaaaaatattttattgatgagtctttttacaagcctgtccgtcgccgtagtctactacattacggaaatgttaagcatgacgatggcggggctaaatatcatacatccgtttgtaggcgcgtggtttcccgtattaatttttatagtattaggagtgcttcttttgaggagcgcgaaaacctga

SEQ ID NO: 4288 - protein, 140 aa, Unknown
  Obtained from environmental sample
  misc_feature (1)..(140): Xaa is any amino acid
MRVYPFSIDESYNEHPDIFRRKAVNVEELSAKNAGLLVKDLRSAGLPYQHTQANYYHRYSFAATSLIVMILSISMGGRFRKNILLMSLFTSLSVAVVYYITEMLSMTMAGLNIIHPFVGAWFPVLIFIVLGVLLLRSAKT

SEQ ID NO: 4289 - DNA, 885 bp, Unknown
  Obtained from environmental sample
  misc_feature (1)..(885): n is a, c, g, or t
atggatcagatcggccgagtcgtgtctgtggcggtttgcgattcccccgccggggaatacaaatttcacggttatgtgcggtatcctgacggaaccatgcttggcaggcgcgaaggcgaccagccgcagttcgatcccggcgttttaactgaaggggaaaaaacatacctctataccggattttgcgggtatgacactaaaaccaggataggcgcgacagcggtaacgctggggccggatatgctgacagtgcttgatgagccggttcttgtcgctcccggagtatacaacagtaatggcacaggttttgaaggccatgaatttttcgaagctccgtccataagaaaacgcggcgacacatattattttatctattcatctatagcaatgaacgagctttgttacgcgacaagcaaaaacccattaaaagattttgtttatggcggcgttattataagcaatgccgatttgcatatcggttcatataaaccagtggggaaacccatgaactgcggcggcaacaaccacggaagcatcatagaaataaaaagaaaatggtatattttttatcacaggcataccaacgggaatgagttcagccgccaggaatgtcttgagccgatagaaataatggcggacggctctataccacaagtagagatgacttcatgcgggcctaacggcgggccgcttaacggcaaaggggaattcccggcgtatattgcgtgtaacatattttgtgttgataatatgagtcatccgctggaacggcgctggcctttgcacaatataaacctgcccagaatttcccaggatgggcgggacggcgatgaagaaacaggttatgtngacaatataaccgataattacggtattggcttttag

SEQ ID NO: 4290 - protein, 294 aa, Unknown
  Obtained from environmental sample
  misc_feature (1)..(294): Xaa is any amino acid
MDQIGRVVSVAVCDSPAGEYKFHGYVRYPDGTMLGRREGDQPQFDPGVLTEGEKTYLYTGFCGYDTKTRIGATAVTLGPDMLTVLDEPVLVAPGVYNSNGTGFEGHEFFEAPSIRKRGDTYYFIYSSIAMNELCYATSKNPLKDFVYGGVIISNADLHIGSYKPVGKPMNCGGNNHGSIIEIKRKWYIFYHRHTNGNEFSRQECLEPIEIMADGSIPQVEMTSCGPNGGPLNGKGEFPAYIACNIFCVDNMSHPLERRWPLHNINLPRISQDGRDGDEETGYVDNITDNYGIGF

SEQ ID NO: 4291 - DNA, 510 bp, Unknown
  Obtained from environmental sample
  misc_feature (1)..(510): n is a, c, g, or t
atggcgagggcgccctgcccgcctcctggccgccgccgacctgcgggaggccgcgacccgcttggccgcggcccggcaggccggtcggcccatcatcctgggcctgggcggccatgtggtcaaggtgggcctggggccggtcatcatcgaccttatggaacggggcttcatcagcggcctggccgccaacggctcggtcatggtccacgacgccgaggcggccctggccggggccaccagcgaagatgtggccgccaccctgggcgaaggccgcttcggggttacggcccacaccggggaactcatctaccgggccgcccgggccgccgccgcctatggccaagggttgggccgagtcctgggccaagccctcctggaagccgcccctccccaactgggtctgaggctatttgccgccgtcggctcgactggattttcccaacaccatatacactgacctcggcaccaatttttacaaaattcgccccacgttttagggatcagcgctag

SEQ ID NO: 4292 - protein, 169 aa, Unknown
  Obtained from environmental sample
  misc_feature (1)..(169): Xaa is any amino acid
MARAPCPPPGRRRPAGGRDPLGRGPAGRSAHHPGPGRPCGQGGPGAGHHRPYGTGLHQRPGRQRLGHGPRRRGGPGRGHQRRCGRHPGRRPLRGYGPHRGTHLPGRPGRRRLWPRVGPSPGPSPPGSRPSPTGSEAICRRRLDWIFPTPYTLTSAPIFTKFAPRFRDQR

SEQ ID NO: 4293 - DNA, 396 bp, Unknown
  Obtained from environmental sample
  misc_feature (1)..(396): n is a, c, g, or t
ttggccgcggcccggcaggccggtcggcccatcatcctgggcctgggcggccatgtggtcaaggtgggcctggggccggtcatcatcgaccttatggaacggggcttcatcagcggcctggccgccaacggctcggtcatggtccacgacgccgaggcggccctggccggggccaccagcgaagatgtggccgccaccctgggcgaaggccgcttcggggttacggcccacaccggggaactcatctaccgggccgcccgggccgccgccgcctatggccaagggttgggccgagtcctgggccaagccctcctggaagccgcccctccccaactgggtctgaggctatttgccgccgtcggctcgactggattttcccaacaccatatacactga

SEQ ID NO: 4294 - protein, 131 aa, Unknown
  Obtained from environmental sample
  misc_feature (1)..(131): Xaa is any amino acid
MAAARQAGRPIILGLGGHVVKVGLGPVIIDLMERGFISGLAANGSVMVHDAEAALAGATSEDVAATLGEGRFGVTAHTGELIYRAARAAAAYGQGLGRVLGQALLEAAPPQLGLRLFAAVGSTGFSQHHIH

SEQ ID NO: 4295 - DNA, 441 bp, Unknown
  Obtained from environmental sample
  misc_feature (1)..(441): n is a, c, g, or t
atggagttggggcatccacccgcttcgccatgtacgcataaaagcgcctgccccctatcaggtggcgcgacaaaaatgattaaaggacggaattggatcgatacaaaaaaacgatggtgccattttgcctatgaaaccgcagacgcgccaaaagagcttcgcaaactttccgccgccgctaaacttcccaaagagagattggtatttagttacctattaaccggcaaacccacggcaaaaacaggagaagcgcgaattatttccgacgcttttaccctgccatataaccgttttggccgctacgcttgttgcgagcgggggcttatactggttaccggagaaaaagaccgtattgaaaacgcggcttcgggcagtgttgtacacatttccgcaacagggcaatttgatgaaaaaagcggcgctatgattagcgcgttgtaa

SEQ ID NO: 4296 - protein, 146 aa, Unknown
  Obtained from environmental sample
  misc_feature (1)..(146): Xaa is any amino acid
MELGHPPASPCTHKSACPLSGGATKMIKGRNWIDTKKRWCHFAYETADAPKELRKLSAAAKLPKERLVFSYLLTGKPTAKTGEARIISDAFTLPYNRFGRYACCERGLILVTGEKDRIENAASGSVVHISATGQFDEKSGAMISAL

SEQ ID NO: 4297 - DNA, 789 bp, Unknown
  Obtained from environmental sample
  misc_feature (1)..(789): n is a, c, g, or t
ttgccattacatcttataagtcccangcttttaaatataaaagctataactatgaacaatatttacgccctcataaaagacgctattcttgtctttgacgaacagaaacgcataatggacgcaaactcagccgcgttatcggcgtttcccagtttttcatttgatgccggtcaaagcacactggaaaaatttttctcattcttacaggagcagaacgccgaatgtacgccgaatgatttttttgaacagcttaaaaaaggaaataccgaacaaagcggagagatcaaagtgcgccaaaaagacggacaaataaaaacttttatggtaacactaaaaactataatggttagaaaaaatcccaatggttacattattttcatgtccgatgtaagcgtttaccattccatgatcacggaaataaacatacagaacaaacgccttgcggaacttcgcaaagaagcggaagcggcgtcaatggcaaagggcgcgtttcttgcgaacatgagccatgaaatacgcaccccgcttaacgccgtaatcggcatggccctaatcgccagaaaaaacgccgagagtcaaaaaaccttgtccgcgattaaagagatagaaaccgcctccgtacatcttttgggactgctgaacaacgtgctggatatgtctaaaatcgagtctggaaaatttgagcttattaatgaatctttcgcttttaagaccgccatggacgaggtggtaaatcttataacgcttcgctgcgcggaaaaaaatatacgtcttgaaactaatttttga

SEQ ID NO: 4298 - protein, 262 aa, Unknown
  Obtained from environmental sample
  DOMAIN (160)...(225): His Kinase A (phosphoacceptor) domain
  misc_feature (1)..(262): Xaa is any amino acid
MPLHLISPXLLNIKAITMNNIYALIKDAILVFDEQKRIMDANSAALSAFPSFSFDAGQSTLEKFFSFLQEQNAECTPNDFFEQLKKGNTEQSGEIKVRQKDGQIKTFMVTLKTIMVRKNPNGYIIFMSDVSVYHSMITEINIQNKRLAELRKEAEAASMAKGAFLANMSHEIRTPLNAVIGMALIARKNAESQKTLSAIKEIETASVHLLGLLNNVLDMSKIESGKFELINESFAFKTAMDEVVNLITLRCAEKNIRLETNF

SEQ ID NO: 4299 - DNA, 681 bp, Unknown
  Obtained from environmental sample
  misc_feature (1)..(681): n is a, c, g, or t
atgggcttgatgattaaatacattgaatttcttaacgaatggaatagagatgaatccatagattttgaaattattgaaaatttttgggcttgccaggttcaggaatatttcaggaaccagccttttgttttaagcgcagactcttcccggacgataggcgcaagccttgacgagttattcactcaggtccgtactcgtcaaaagcagaaccctggaacacaatatttaggtacaatgcttcaacacttgatagcagccaaattgtcaataatcctccccaaaaactcttttgaaattcatggcgcttctgtcgccgactctccaacatctcgaaacggcgattttgtcatccacaaaaccatcattcattgcacgacagcccctggagaacccttaatggataaatgtcaagccaatattaaaaatggctacttaccgcttatcattactatctttgaccgtgtaaagactgcctgtgatttagccgctgattcaggcatatctgatagaattgaagtatgggacatacaacaatttttatcaactaacattaacgagcagtgccaatttgatgaaaaaaaccggaatgtaaaattggcggatattattgaaaactacaatcgcattattagcgagaaagaaactgaccccagtttaagaatcgaatttgaaacaaaatag

SEQ ID NO: 4300 - protein, 226 aa, Unknown
  Obtained from environmental sample
  misc_feature (1)..(226): Xaa is any amino acid
MGLMIKYIEFLNEWNRDESIDFEIIENFWACQVQEYFRNQPFVLSADSSRTIGASLDELFTQVRTRQKQNPGTQYLGTMLQHLIAAKLSIILPKNSFEIHGASVADSPTSRNGDFVIHKTIIHCTTAPGEPLMDKCQANIKNGYLPLIITIFDRVKTACDLAADSGISDRIEVWDIQQFLSTNINEQCQFDEKNRNVKLADIIENYNRIISEKETDPSLRIEFETK

SEQ ID NO: 4301 - DNA, 903 bp, Unknown
  Obtained from environmental sample
  misc_feature (1)..(903): n is a, c, g, or t
ttgcgatcaaaatgtacccaaatgacgggtgcaaaaaacgtgcttgcggatatttcttcaatggaagattggtcggtcgatcctgacgatattgaagctcggattacacntgcgacaaaagccgtgatgatagtccactatgccggttttgcctgtgatatggagcgtataaccgccctntgcaaaaaacacgaattgctccttatcgaagactgcgcccattcaccgggagccgattacaagggacagcctctcggcacttttggcgacatatcggctttcagtttttttgccaacaaaaacatcgcggttggcgaaggcggcatggttgttactcgcaacgcggacttgtacgaaaaactgcgccttttacgttctcacggaatgtccgtcccctcttttgaccgctacaagggcagggcagtctcctacgacgtacagtcgcccggattgaattaccgtattcacgaaataagttccgcccttgggcttgtccaacttaaaaaacttgaagacgcgaatgaaaaaagaaaaaaacttacagaacactactacagccgccttgataaaaatccctctgtctcaatccctttcagattcttctcacgtgggaagcctaattatcacataatgccaattttgctttcagagaaaatagacagggcggcggttatagaatcgatgaagcaggacggagttcaaaccagtattcattaccccgcaattcaaaatttcagcgcatacaaagacaaagtaaactccacgccgaaagccgaatatgtctgcgcccacgaattgactttgcctttgtatcccaccatgacgacggaagaagttgatattgtgtgtgatgcgttggttagcggaatgagaagagcaaataattattctcggccgatctga

SEQ ID NO: 4302 - protein, 300 aa, Unknown
  Obtained from environmental sample
  DOMAIN (1)...(287): DegT/DnrJ/EryC1/StrS aminotransferase family
  misc_feature (1)..(300): Xaa is any amino acid
MRSKCTQMTGAKNVLADISSMEDWSVDPDDIEARITXATKAVMIVHYAGFACDMERITALCKKHELLLIEDCAHSPGADYKGQPLGTFGDISAFSFFANKNIAVGEGGMVVTRNADLYEKLRLLRSHGMSVPSFDRYKGRAVSYDVQSPGLNYRIHEISSALGLVQLKKLEDANEKRKKLTEHYYSRLDKNPSVSIPFRFFSRGKPNYHIMPILLSEKIDRAAVIESMKQDGVQTSIHYPAIQNFSAYKDKVNSTPKAEYVCAHELTLPLYPTMTTEEVDIVCDALVSGMRRANNYSRPI

SEQ ID NO: 4303 - DNA, 477 bp, Unknown
  Obtained from environmental sample
  misc_feature (1)..(477): n is a, c, g, or t
atggaattaaacaaagagcaagaggaatggcttaaagaatttagaagtcactatttcaccggcaatagaaatgcaaacagagggcctattagggaagaaatgttttttgaagcgggctttgccgtgcagcatcttcccgttgaactaaaaaccgaaaccctctgccttgccgcagtacagcaagacggacaatcgcttcaatacgttcccgacgctcttaagactgaagccctctgccttgaagctgtacagcaagacggctgtgcgcttcaatatgttcccgacactctaagaaccgaggcaatttgccttatcgctgtgcggcaagacggctacacaatacaatttgtccctgactggcaaaagacggaagaaatttgccttgccgctgttcaacaaaacgacggagcgttggcatacatccccgacgagttacgggacaaagtgcaagatgcgttaaaaaaaatatctccctaa

SEQ ID NO: 4304 - protein, 158 aa, Unknown
  Obtained from environmental sample
  misc_feature (1)..(158): Xaa is any amino acid
MELNKEQEEWLKEFRSHYFTGNRNANRGPIREEMFFEAGFAVQHLPVELKTETLCLAAVQQDGQSLQYVPDALKTEALCLEAVQQDGCALQYVPDTLRTEAICLIAVRQDGYTIQFVPDWQKTEEICLAAVQQNDGALAYIPDELRDKVQDALKKISP

SEQ ID NO: 4305 - DNA, 438 bp, Unknown
  Obtained from environmental sample
  misc_feature (1)..(438): n is a, c, g, or t
gtgtcagaagaaaccaaagaagaaaaagcagctccggcaactgaagccgcagctcccgaagaggttaaggttaaaaaaagcaaaaagcgcatagatgtgcaaggaattgctcacatttacgcttcttttaacaataccataatttccataacggattccaaaggcaatttggtttctggcaattcccctgggcgttctggctacaaaggcagcaaaaaaagcacgccttatgcagcgcaggttgccgcagaggcagccgctttgcaggcatttgctcttggaatgcgcaaggttctggttcgcataaaaggtgcgggtccggctagggaatcggcagttcgcgccataaaaaacgcgggcttggaagtgttgcagatattggacgtaacgggcattcctcacaacggatgtcgcccaaagaagagaagaagaatttaa

SEQ ID NO: 4306 - protein, 145 aa, Unknown
  Obtained from environmental sample
  DOMAIN (35)...(144): Ribosomal protein S11
  misc_feature (1)..(145): Xaa is any amino acid
MSEETKEEKAAPATEAAAPEEVKVKKSKKRIDVQGIAHIYASFNNTIISITDSKGNLVSGNSPGRSGYKGSKKSTPYAAQVAAEAAALQAFALGMRKVLVRIKGAGPARESAVRAIKNAGLEVLQILDVTGIPHNGCRPKKRRRI

SEQ ID NO: 4307 - DNA, 699 bp, Unknown
  Obtained from environmental sample
  misc_feature (1)..(699): n is a, c, g, or t
atggcgactgaggagatggaaatgcaaaaatcaagattggagtatgattatggcagtagagaacgggcacacgctgaaatgcccgcacccgncgcaagcaccacttcaagcaatttagtaggcggcgttgtagatacggcagggggaaacactgcgggaggccaatttgaatttacaattaaaaatccggtaagcctaaaccgccgaatgagcgcgatgtttcctttggttgaatcaaccttggaagcaaaaaaactccttatctacagcggaaccggccgtttcccaagacttggcgcggaactgacaaacacaagcaaaatgaaattgcccgcaggaccgattaccgtctatgacggcggagtttacgccggggacgcattaattgaattctggaatgaaaatgaaaaaagactgatctcctttggtgaagacctttccgtaacagcgtctacaggcaacataagcgcgaatgttataagcaaggtaaatatttctcagggagctatgaccattacgcgccttatcaattatacaaaaacctacgcctttattaactcaagttccgagcaaaaacttcttgtaactgaacattcaaagaccgcaaataccgagcttgtctctccaaaagccgatgaacagacaacgtcagcgtaccgttttaacgttactctttctgcaaacaaacagacaatttaa

SEQ ID NO: 4308 - protein, 232 aa, Unknown
  Obtained from environmental sample
  misc_feature (1)..(232): Xaa is any amino acid
MATEEMEMQKSRLEYDYGSRERAHAEMPAPXASTTSSNLVGGVVDTAGGNTAGGQFEFTIKNPVSLNRRMSAMFPLVESTLEAKKLLIYSGTGRFPRLGAELTNTSKMKLPAGPITVYDGGVYAGDALIEFWNENEKRLISFGEDLSVTASTGNISANVISKVNISQGAMTITRLINYTKTYAFINSSSEQKLLVTEHSKTANTELVSPKADEQTTSAYRFNVTLSANKQTI

SEQ ID NO: 4309 - DNA, 732 bp, Unknown
  Obtained from environmental sample
  misc_feature (1)..(732): n is a, c, g, or t
ttgacgccaatactaaaactaatatcaccatacccaaacttgatgaaacagtttcatcgcctgatacattgttatctaattccagattatctattaattcaaaataattcatcatattcttttcagttacacaggggaaccagcattatatcacctgacaattcatcttccgcattggtaaacagcggggaacgggcgcagtatacaatcaacccgggagcggcttctccctatcaattattggtacgcgcggattacaaaacgttttccagttccattataagttttgaggcgggatgcgtgtaccgttttatttttgacggtactgtttcactaattacggaagttgaaataaaacttgaaaatgtcacaaggattcctcagaacagttcggggcctcctgttcccggcacaccggttatcaaagcggaagacagccttataaccctgcattggactgccgttcaaatgacagtaaattatgaggtgtatgtaagcacgacacaggaaccacctgcatcacctgtaaaaacagtagtgggaacaactacggtactgatcggacttaccaacaagaccgcttactatatatggataaaagcgcttaacggttcaagttcaagtgattatagcccccgtgtcaagggcattccctggccgagtaatgaagttccagccataccgcgaagtccggtaataacatcggggataaatcaacttacggtaaattga

SEQ ID NO: 4310 - protein, 243 aa, Unknown
  Obtained from environmental sample
  DOMAIN (133)...(211): Fibronectin type III domain
  misc_feature (1)..(243): Xaa is any amino acid
MTPILKLISPYPNLMKQFHRLIHCYLIPDYLLIQNNSSYSFQLHRGTSIISPDNSSSALVNSGERAQYTINPGAASPYQLLVRADYKTFSSSIISFEAGCVYRFIFDGTVSLITEVEIKLENVTRIPQNSSGPPVPGTPVIKAEDSLITLHWTAVQMTVNYEVYVSTTQEPPASPVKTVVGTTTVLIGLTNKTAYYIWIKALNGSSSSDYSPRVKGIPWPSNEVPAIPRSPVITSGINQLTVN

SEQ ID NO: 4311 - DNA, 534 bp, Unknown
  Obtained from environmental sample
  misc_feature (1)..(534): n is a, c, g, or t
ttgattttcaaaaacgaaattgactcaatggaaattttgccaaactacgttgttctgccaatgcgagcaatactgagggctgtgttcaaatacggaaccgccgcaagcgcatattccaaactagccatatcatattccggctcaaaatatccttaccccgcaatgggcaaaaccggaaccacaaacgaaaaccgcacagccgccttctgcggtgccgtgcccttagacacgctattaacaatatgcagctacataggttttgacgataacaacaagctcaaaggaaaatcgcgaaccctagcaggtgcttctggcgcattgcctcaatgggcaaactttgcagaatccgttctagccacaagcaaaagcgaaactattttcggcgaagcaatagactacataaacgcaattgcccacaacgaggttactctgccaaatatgccgcaaactattgagatagatagaaagggcgggttacccgtgggaacagatgattttggagcggggagtgcggcggtgttcccgaatttttag

SEQ ID NO: 4312 - protein, 177 aa, Unknown
  Obtained from environmental sample
  misc_feature (1)..(177): Xaa is any amino acid
MIFKNEIDSMEILPNYVVLPMRAILRAVFKYGTAASAYSKLAISYSGSKYPYPAMGKTGTTNENRTAAFCGAVPLDTLLTICSYIGFDDNNKLKGKSRTLAGASGALPQWANFAESVLATSKSETIFGEAIDYINAIAHNEVTLPNMPQTIEIDRKGGLPVGTDDFGAGSAAVFPNF

SEQ ID NO: 4313 - DNA, 624 bp, Unknown
  Obtained from environmental sample
  misc_feature (1)..(624): n is a, c, g, or t
ttggaagataacgccatatttcccggcaccatcatccacgccgtcctcgtttcccgtattgacacagattatcccggacccattcacgcccgggtcacggaaaacatttatgattccaaaaccggcaggcatttgttgattccgcagggcaccgttttacagggcaattattcaagcgccgccatcggggtttctaaagtacaaatagcttgggaagcgatggtcgtcaatttcaacggcgtcgcgtatcaggtttctctgggcggcatggccggcgtagacaagcgcggacgcaccggcatagcgggaaccctagatgatcattattttgagtggctcaaagccgcaggcgttatttcattgtttacaatgcttaattcggagattaattatcaggccaaggcccagaaatccgcgaacgtaaaagagcttattgatgttaatcagggcgtggtaaaccagttaggcgaccgtattttaagccgcgctatggacatacagccgacggtccgcgtagccaacggaaaggctgtcagcgtttccgttaacaaagcccttattttacggcccttcgccgcttttgaggctgagcagaggtacgtgcgccgcgaatcattcaggtag

SEQ ID NO: 4314 - protein, 207 aa, Unknown
  Obtained from environmental sample
  DOMAIN (6)...(192): Bacterial conjugation TrbI-like protein
  misc_feature (1)..(207): Xaa is any amino acid
MEDNAIFPGTIIHAVLVSRIDTDYPGPIHARVTENIYDSKTGRHLLIPQGTVLQGNYSSAAIGVSKVQIAWEAMVVNFNGVAYQVSLGGMAGVDKRGRTGIAGTLDDHYFEWLKAAGVISLFTMLNSEINYQAKAQKSANVKELIDVNQGVVNQLGDRILSRAMDIQPTVRVANGKAVSVSVNKALILRPFAAFEAEQRYVRRESFR

SEQ ID NO: 4315 - DNA, 702 bp, Unknown
  Obtained from environmental sample
  misc_feature (1)..(702): n is a, c, g, or t
atggccgagtccgttccccagcgtttcaagggaatgttggtaatccctacggttgagggaacagtgcttgtcggtcccaccgccgatgccgtcgaagacaaggatgatttttccaccacttcgcagcaccttgagcggatactcatttcgggaaagaccatgataccgtccttgagccagaacgatgttataacttcttttgcggggcttcgtccgtatttaggcgaagatttttacattgaggcttcggcgaaagttcccgctttcgttcaggtggcgggaattcaaagcccgggacttacagcgtcccccgccatcggcgaatatgtaaaaaatattttacttgaaatcgggcttgtactgacagaaaaaccgcattgggacccttatgttgaagaccgtccctgcgcgcgggaactcaactttaaccaactggacagcctgatcgcgaaagattccaaatggggcaacattgtctgccgctgtgaaaatgtcagcgaggcggaaatagtcgaggctgtaaaactcgggcatacaactttagacggagtaaaatactttacgcgcgcgcagatgggacgctgtcagggcggcttttgcacctacaagatcattaaaatcataatgagggaaaccggcctttcatgggacgagataacaaagcatggcggaaagagccgcctgttggaggccgcgctgtga

SEQ ID NO: 4316 - protein, 233 aa, Unknown
  Obtained from environmental sample
  DOMAIN (157)...(212): BFD-like [2Fe-2S] binding domain
  misc_feature (1)..(233): Xaa is any amino acid
MAESVPQRFKGMLVIPTVEGTVLVGPTADAVEDKDDFSTTSQHLERILISGKTMIPSLSQNDVITSFAGLRPYLGEDFYIEASAKVPAFVQVAGIQSPGLTASPAIGEYVKNILLEIGLVLTEKPHWDPYVEDRPCARELNFNQLDSLIAKDSKWGNIVCRCENVSEAEIVEAVKLGHTTLDGVKYFTRAQMGRCQGGFCTYKIIKIIMRETGLSWDEITKHGGKSRLLEAAL

SEQ ID NO: 4317 - DNA, 744 bp, Unknown
  Obtained from environmental sample
  misc_feature (1)..(744): n is a, c, g, or t
atgtacgatatgacacatcttgcggaacgcgatgaaattgcagctatgaaagatagtatgaagatcggtcttttcttcatagacagtaattttgttattcaggatcactattcaaggttcttggaagaaatgctgtcgcagactaatcttttcggaaagctttttaccgatataattgccgattcagttactcccagcgaactggaagcgataaaagattatttcattatgattatagaccgcacctatgatcaggaaatactcgaagacataaatccgttgaatgaattgcgctatgttaacgtcgaaaccggcgaaagaaaagtatttcaatgcgcatttaccacagtggaacgaggacacggagaggtctttattctggtaacagtctacgatataactgtcagggttgaactacagcaaaggctggctgaagaggaatcaagacggcaggaagaaatgcagtctgttttcgagcttattaatgttgaacaggatgttttttctgatttctcggaagacatggaacatgaattcggcactattgataaaacgctcaaaagtgatatgtcttcccatgatgtattggtaaaggtttatcaatccgttcacgcaatanagtccaatgcggtaattcttggattaaatgtttttggaaacaaactgcatgcccttgaatcaaaatcaagaaatacgcgaaacggagctgttcctttgctgaatgctgaccttactatggaatag

SEQ ID NO: 4318 - protein, 247 aa, Unknown
  Obtained from environmental sample
  misc_feature (1)..(247): Xaa is any amino acid
MYDMTHLAERDEIAAMKDSMKIGLFFIDSNFVIQDHYSRFLEEMLSQTNLFGKLFTDIIADSVTPSELEAIKDYFIMIIDRTYDQEILEDINPLNELRYVNVETGERKVFQCAFTTVERGHGEVFILVTVYDITVRVELQQRLAEEESRRQEEMQSVFELINVEQDVFSDFSEDMEHEFGTIDKTLKSDMSSHDVLVKVYQSVHAIXSNAVILGLNVFGNKLHALESKSRNTRNGAVPLLNADLTME

SEQ ID NO: 4319 - DNA, 348 bp, Unknown
  Obtained from environmental sample
  misc_feature (1)..(348): n is a, c, g, or t
gtgatagaactgtaccatggccatgccaccagcgaacagtttcacagcgaattaaaaaacgacatggacattgagagactgccgtccgggaaacttgcggtaaacaagatactgcttgcggtggcgatgaacgcgtataacgcgctgaggctgctcggccaaagctctgtagagcaaaaaagccctatgaagcaccggcgcaaacggctgggaaaagtaatccgcgatttgatatgcgtagcgggaaagctggtacaacatggccgggaactgatattcaaaatgaatgagaatgatccggtgctgccggtgtttttacggctgaatgcctcgttgggctgtccatag

SEQ ID NO: 4320 - protein, 115 aa, Unknown
  Obtained from environmental sample
  misc_feature (1)..(115): Xaa is any amino acid
MIELYHGHATSEQFHSELKNDMDIERLPSGKLAVNKILLAVAMNAYNALRLLGQSSVEQKSPMKHRRKRLGKVIRDLICVAGKLVQHGRELIFKMNENDPVLPVFLRLNASLGCP

SEQ ID NO: 4321 - DNA, 516 bp, Unknown
  Obtained from environmental sample
  misc_feature (1)..(516): n is a, c, g, or t
atgaagaagacggtttttcttgtagctgcgtgtttcctgacaacgtctctttattcgcagcagcttacgcgttttgcagttgttgacctgcccaaggtgtacaccgcttttttccgcgattcccgcaccgtgcgcgagttcgaggaacgctctgccttagtccaggctgaaatcgacaagatgacaagggaaatccaggagttaagatcaaaacggatcgatcttgtaaaccagggcgaccagaccggagccctcaggctggaaaatgaaatttaccgcaagtcggaattcttaagggaatactatacggtaaaaaccgccgagcttgaggatcagcgcagaaaactcgcgcaatcagacagcttcatggaacaggtgtacggcgagatacggtccatcgccgaaagcgaaggctacagcatggtgatgaacctgaaggacgcaatctggtacagccccacggtggacatcaccgacaaggttattcaaaatcttgttagcaaaacccgccgttaa

SEQ ID NO: 4322 - protein, 171 aa, Unknown
  Obtained from environmental sample
  SIGNAL (1)...(19)
  DOMAIN (7)...(166): Outer membrane protein (OmpH-like)
  misc_feature (1)..(171): Xaa is any amino acid
MKKTVFLVAACFLTTSLYSQQLTRFAVVDLPKVYTAFFRDSRTVREFEERSALVQAEIDKMTREIQELRSKRIDLVNQGDQTGALRLENEIYRKSEFLREYYTVKTAELEDQRRKLAQSDSFMEQVYGEIRSIAESEGYSMVMNLKDAIWYSPTVDITDKVIQNLVSKTRR

SEQ ID NO: 4323 - DNA, 927 bp, Unknown
  Obtained from environmental sample
  misc_feature (1)..(927): n is a, c, g, or t
atgcttgccagcaaagccgagcttaaattcgcaccagatgtgcttatggtaagttcgctaacccgtaccggttccgacatcaccttaaaagcccttgaatgtggtgcttttgattttatagcaaagccagcacccgaaattcccaattcgcaagaaagcctgcacaggatgctcaacacaaccatatctgcatgggtttctcgcaaaaacagagggatgatcacaccggctcgcagtactggtgccggcactgttcatccagtgactggaaccacggcaagcacgggtttcacattctctttggcaaaaccttctgtacacacaaagcaaatacaggcaatagttataggagtttccactggaggtccaaaatctttggcagatatgctcccaaagctctgctcaatgacaaccctgcccattttgcttgtgcaacacatgccaccaaatttcacaaaatctttagcagatagcttaaacgcaaaatgcaaccataccgtggtagaaggcttgcctggcaccgtggtagaagacaaaacagtttacattgctccaggtggttgccacatggttgtgaactctaaagggacaaagtatgttttagacaacaacaacaacccaccagaaaacggttgccgcccaagcgtagacgttcttttccgttctgcagctcaagcctaccctgcagattcccttgttggcgttatattaactggtatgggcaacgatggcacgccttctttgcaatatctgaaaaacaaaaatgcttacttaattgctcaagatgaagaatcttctgttgtgtttggtatgcctcgtgcagcagcggcaacaggcttattagataaggttgcaactttaacgcgcattcctgaagcgatacttgaacgtgtcaattttagtaaaaaaataggggagtttttatga

SEQ ID NO: 4324 - protein, 308 aa, Unknown
  Obtained from environmental sample
  DOMAIN (113)...(297): CheB methylesterase
  misc_feature (1)..(308): Xaa is any amino acid
MLASKAELKFAPDVLMVSSLTRTGSDITLKALECGAFDFIAKPAPEIPNSQESLHRMLNTTISAWVSRKNRGMITPARSTGAGTVHPVTGTTASTGFTFSLAKPSVHTKQIQAIVIGVSTGGPKSLADMLPKLCSMTTLPILLVQHMPPNFTKSLADSLNAKCNHTVVEGLPGTVVEDKTVYIAPGGCHMVVNSKGTKYVLDNNNNPPENGCRPSVDVLFRSAAQAYPADSLVGVILTGMGNDGTPSLQYLKNKNAYLIAQDEESSVVFGMPRAAAATGLLDKVATLTRIPEAILERVNFSKKIGEFL

SEQ ID NO: 4325 - DNA, 303 bp, Unknown
  Obtained from environmental sample
  misc_feature (1)..(303): n is a, c, g, or t
atgataatagctccaagcgttttaaatgccaactttctgaatttagaagcagacataaaagcaaccgaaaaaggtggcgcaaactggattcatctagatgtaatggatgggagctttgtccccaacatatcctttggctccggcattgccgcacaaattcgcagctgcacaaaactcccattggattgccacttgatgataaacaacccagagctgcacatagaggcattcgctcgtgctggagttcaatatataacagtacacgcagaggcaacaaatcatctagacctcgtgccgatctga

SEQ ID NO: 4326 - protein, 100 aa, Unknown
  Obtained from environmental sample
  DOMAIN (2)...(99): Ribulose-phosphate 3 epimerase family
  misc_feature (1)..(100): Xaa is any amino acid
MIIAPSVLNANFLNLEADIKATEKGGANWIHLDVMDGSFVPNISFGSGIAAQIRSCTKLPLDCHLMINNPELHIEAFARAGVQYITVHAEATNHLDLVPI

SEQ ID NO: 4327 - DNA, 579 bp, Unknown
  Obtained from environmental sample
  misc_feature (1)..(579): n is a, c, g, or t
gtgggcgcagttggctcttgtgtaaaaaaaaatgcggagaattttggaatgagacttttattgtgcgacccgccaaaaaacttgaacgacaacatttttgccgcagatataataacactccatacccctcttgaaacaggaggaaaatatccaaccaaatatcttgcaaacaaggaattttttggcaaaacaaaaaagggtacttggctcataaacgccgcgcgcggagcggtgtgcaacagcgaggctttgagggaggttctgcagtctgggcatttgggcggtgcagttatagacacttgggaaaacgaacctaacatagacacttctcttttgcccttgcttgaaatagcaacaccacacatagcaggccacagcgcagaggcaaaaataaacgcaagcaaaatgatagttagagccttgcttgaattttttggcattgaacaaaaagcccgctttgacacctgtcccaacaaaacaggagtttattcaattcgcacagacgatttggctttccgaaaaaatccaagccatttcacggaaataagaaacagctatgagagaatttatgtaaattag

SEQ ID NO: 4328 - protein, 192 aa, Unknown
  Obtained from environmental sample
  DOMAIN (1)...(123): D-isomer specific 2-hydroxyacid dehydrogenase, NAD binding domain
  misc_feature (1)..(192): Xaa is any amino acid
MGAVGSCVKKNAENFGMRLLLCDPPKNLNDNIFAADIITLHTPLETGGKYPTKYLANKEFFGKTKKGTWLINAARGAVCNSEALREVLQSGHLGGAVIDTWENEPNIDTSLLPLLEIATPHIAGHSAEAKINASKMIVRALLEFFGIEQKARFDTCPNKTGVYSIRTDDLAFRKNPSHFTEIRNSYERIYVN

SEQ ID NO: 4329 - DNA, 636 bp, Unknown
  Obtained from environmental sample
  misc_feature (1)..(636): n is a, c, g, or t
ttgccacattgtgggggaatgtatgaagtaccatccccacggagacgcgtccatcggcccggccctggtagtgctggcaaacaaggaactcttcatagacaagcaggggaatttcggcaatatctacaccggcgacgaggcctcggccccgcgttatatcgaatgccgggcgacggcgctgtcaaaagatattttttacaaccccaagttgaccgaatggacagattcctacgacggccgcaacagggaaccgttgctttttccggcgaaaattcccgtggtgctgattatgggggccgagggaatcgccgtaggcatgtccacaaaaatacttccgcacaacgccgtggaagtgctggaagcggagatcgcctgcctttcaggaaaaaaattcgagctgtatccggattttcccaccggcggccttatggacgtatccgagtaccgcgacggcaacgggaaggtgctggtcagggcgaaactcgacacctcagatccaaagcgcatactgatcaccgaacttccattcggatcaaacacggaaagccttataaacagcgtggaagccgccgcaaaaacgggcaggctgaaaatccaggggataaacgacttcacgacggacaaggtcgaaattga

SEQ ID NO: 4330 - protein, 211 aa, Unknown
  Obtained from environmental sample
  misc_feature (1)..(211): Xaa is any amino acid
MPHCGGMYEVPSPRRRVHRPGPGSAGKQGTLHRQAGEFRQYLHRRRGLGPALYRMPGDGAVKRYFLQPQVDRMDRFLRRPQQGTVAFSGENSRGADYGGRGNRRRHVHKNTSAQRRGSAGSGDRLPFRKKIRAVSGFSHRRPYGRIRVPRRQREGAGQGETRHLRSKAHTDHRTSIRIKHGKPYKQRGSRRKNGQAENPGDKRLHDGQGRN

SEQ ID NO: 4331 - DNA, 330 bp, Unknown
  Obtained from environmental sample
  misc_feature (1)..(330): n is a, c, g, or t
atgaccatacgcgaagccgccgccgctttgggggccgaaattcttcacgacaaatttactgatgccgatctttccggggcatacacatcggaccttctttccgatgtaatggcaaacgccaaagacggtggcgcacttataaccattcaagcccacaagaacacagtagccgtagccactttggtaaatatctccgtgatcatcgtatgcaattcccgtcccattccggaggactttctcgcgtctgccgaggatgagggaattgcgcttctgttgacaaaagagaatcagtttacggtgtcagggaaattatataagctgcttaattag

SEQ ID NO: 4332 - protein, 109 aa, Unknown
  Obtained from environmental sample
  misc_feature (1)..(109): Xaa is any amino acid
MTIREAAAALGAEILHDKFTDADLSGAYTSDLLSDVMANAKDGGALITIQAHKNTVAVATLVNISVIIVCNSRPIPEDFLASAEDEGIALLLTKENQFTVSGKLYKLLN

SEQ ID NO: 4333 - DNA, 744 bp, Unknown
  Obtained from environmental sample
  misc_feature (1)..(744): n is a, c, g, or t
atgatcgccgcagcctgcggggcagcggaactacagatatggaaggatgtggacggtattcttacagccgaccccaggatcgtgagcggcgcgagggtggtcgataccataacttacgaagcagcggcggaaatggcttactacggggctcaggtgcttcatccgcgggccatgcagccttgcatgaaaacaggcacccccgtactggttaaaaactcttacaaccccgaagcgccgggtacccggatcgtttcctccatcgttccttctttcgagggaaaaagaagccccatccagtcaataacttcccgcaagaacataacactggttgatattatttcatcccgcatggtaggccagcacgggtttttggccgaagtttttgcctgttttgccaggcatagcgtttcggtggacatggtagccacaagcgaggtatcaatttccctaactttggacgcttttcacgatctgacagaactgaaaaaagatctttcccgaatcgccggcgtggagatcaagaccggcaaagcaattgtttcgattatcggagacgtgggccgttcttcggagatactttcccgctcgttcaaaatctgcaagcttttgggtgtacaggttcaaatggtttcccagggggcaagcaagataaacataagcttcatagtggacgacaatgaagccacggatgtcatcaagggcctgcacgcggatttttttgatgagtttaagcctgctggttga

SEQ ID NO: 4334 - protein, 247 aa, Unknown
  Obtained from environmental sample
  DOMAIN (111)...(178): ACT domain
  misc_feature (1)..(247): Xaa is any amino acid
MIAAACGAAELQIWKDVDGILTADPRIVSGARVVDTITYEAAAEMAYYGAQVLHPRAMQPCMKTGTPVLVKNSYNPEAPGTRIVSSIVPSFEGKRSPIQSITSRKNITLVDIISSRMVGQHGFLAEVFACFARHSVSVDMVATSEVSISLTLDAFHDLTELKKDLSRIAGVEIKTGKAIVSIIGDVGRSSEILSRSFKICKLLGVQVQMVSQGASKINISFIVDDNEATDVIKGLHADFFDEFKPAG

SEQ ID NO: 4335 - DNA, 690 bp, Unknown
  Obtained from environmental sample
  misc_feature (1)..(690): n is a, c, g, or t
atgccttcgtgtgatgacgtggatgacaagttctgccgtcttgatattaatatgaaagtgaacggcgagttagtcaatttggaggtacaagtcaaggatgagcatgactacccggaacggtcgctatactattgggcacgtgcatactcaaacgcattacacgtcgctcaaaaatacgccgccttgccgcgtacgatccttataaacattatagggttcaaactcttcaaggatgtcaaagacgtccactcggagtttcgcccgatggaggtcaaccgccatacgttgctcacggataggatgtcgctacattacttcgagttgccgaaactgccaaaaatcgaggatattgacgcaaacgacgaagtagagttgtggcttgccgcgattaatgcgaaaaccgaagaacagctgtcaaccataaaaaccatagggggtgaggtcatggaacagttagtagaagcgtatcacgatgtggcggcgtcgcccgaatttcgggagatggtgcgtcaaagggaacgcgcaaggcacaacgaggcgtcggcgcttgctaatgcggagcaaaaaggaaagttaggggagcgccgagagaatgttaggcatatgtaccaagaaggctttgatcttaaaactattgctagggccttagggatccctgaacaggatgttaaagatatcctaggcgtataa

SEQ ID NO: 4336 - protein, 229 aa, Unknown
  Obtained from environmental sample
  misc_feature (1)..(229): Xaa is any amino acid
MPSCDDVDDKFCRLDINMKVNGELVNLEVQVKDEHDYPERSLYYWARAYSNALHVAQKYAALPRTILINIIGFKLFKDVKDVHSEFRPMEVNRHTLLTDRMSLHYFELPKLPKIEDIDANDEVELWLAAINAKTEEQLSTIKTIGGEVMEQLVEAYHDVAASPEFREMVRQRERARHNEASALANAEQKGKLGERRENVRHMYQEGFDLKTIARALGIPEQDVKDILGV

SEQ ID NO: 4337 - DNA, 888 bp, Unknown
  Obtained from environmental sample
  misc_feature (1)..(888): n is a, c, g, or t
ttgcataagtcgcaaggaatgacagtcgataaagtaatttggcacgccgacacatctaaagaagtatcgacaaatagtttttacgtcgcgattacgcgctgtaagcgcgatatagcggtctataccgacgatattgagcgtttgaagataaaggcggtcatagggcaagacaaatacagcacgattgacgttgacgaaacctacgacaaagcgtatcaaaaacaccttaaaacgatacaaaaacgcgaccaaaaggcaatacagcctgacatagcttccgcaaccgaccataaagcgcaagagaccgcgccgccgccgaccgtgcccgaagccacaccgccacctcaagagaccgcgccgcagttgccgactgtgcccgaagccgcaccgccgcctcaagagaccgcgccaccgccgccgaccatacccgccgccgctccatcaatacaggctgccaagccaaccgcgacagtcaaagcactgccgccgcctactccgcctacagccgccgcccctacggtacaggcggtcaagccgcgaccgaaatatcgtttaaagacaatagatggatataacgttatccctagctcaaacgaagatttacggacgttatctttgaatgatattgcaaaaatgacgttcccgccaaaagattgcgatacgattgaagcaataggtgcgaatattcaaaaaatgaatttggggggattattttctttggatcggataaatatttggaaacgcaaatttgataaaacagataataagtacgaagtgggtacgcaaacaatgcgtgatattattgcggtggcgcgtgagttgcaaattaatgaggttagtattgataaagaagctaaacagggnaatgtgtttatctgtgaattttag

SEQ ID NO: 4338 - protein, 295 aa, Unknown
  Obtained from environmental sample
  misc_feature (1)..(295): Xaa is any amino acid
MHKSQGMTVDKVIWHADTSKEVSTNSFYVAITRCKRDIAVYTDDIERLKIKAVIGQDKYSTIDVDETYDKAYQKHLKTIQKRDQKAIQPDIASATDHKAQETAPPPTVPEATPPPQETAPQLPTVPEAAPPPQETAPPPPTIPAAAPSIQAAKPTATVKALPPPTPPTAAAPTVQAVKPRPKYRLKTIDGYNVIPSSNEDLRTLSLNDIAKMTFPPKDCDTIEAIGANIQKMNLGGLFSLDRINIWKRKFDKTDNKYEVGTQTMRDIIAVARELQINEVSIDKEAKQGNVFICEF

SEQ ID NO: 4339 - DNA, 456 bp, Unknown
  Obtained from environmental sample
  misc_feature (1)..(456): n is a, c, g, or t
atgaataacgcagatctcggcctattaaaattcatcacctgcggaagcgtcgacgacggcaagtctacgcttatagggcatatattatacgattccaagttgctttacgccgaccaagagcgcgccttgattctagacagtcaggtaggctctcgcggcgggaagatagactattcgctcctattggacggcttaatggccgaacgggagcagggtataaccattgatgtcgcgtaccgttactttacaacggagaaacgcagtttcattgtagccgataccccagggcatgaggagtacacgcgcaatatggcggtgggcgcgtcgttcgccgatttggcggtgatcttggtggacgccaagcgcggcgtcttgccgcaaacgctccgccacgccagaatttgcgccttgatgggcatccgctattttgtcttcgcggtcaacaaaatggattga

SEQ ID NO: 4340 - protein, 151 aa, Unknown
  Obtained from environmental sample
  DOMAIN (9)...(151): GTPase of unknown function
  misc_feature (1)..(151): Xaa is any amino acid
MNNADLGLLKFITCGSVDDGKSTLIGHILYDSKLLYADQERALILDSQVGSRGGKIDYSLLLDGLMAEREQGITIDVAYRYFTTEKRSFIVADTPGHEEYTRNMAVGASFADLAVILVDAKRGVLPQTLRHARICALMGIRYFVFAVNKMD

SEQ ID NO: 4341 - DNA, 345 bp, Unknown
  Obtained from environmental sample
  misc_feature (1)..(345): n is a, c, g, or t
ttggnggaaaaggatatatggcagtatataaaacgcgagagcatacccatcgtcccgctctacttcgcggcggaacgtccggtggtttaccgtgacggcaatattatcatggcggacgacgaacggatgcgctttttgccgggggagacgccgcaaataaaaaaagtccgcttccgtactctgggatgctatccgttaaccggcggtgatgaatccgacgccgacacattggacgcggtcatcgcggagacgctggcgtccgtcacaagcgaacgcaccagcagggtcattgataacgaggcggccggcagtatggagcgccgcaaacgggagggatatttctaa

SEQ ID NO: 4342 - protein, 114 aa, Unknown
  Obtained from environmental sample
  misc_feature (1)..(114): Xaa is any amino acid
MXEKDIWQYIKRESIPIVPLYFAAERPVVYRDGNIIMADDERMRFLPGETPQIKKVRFRTLGCYPLTGGDESDADTLDAVIAETLASVTSERTSRVIDNEAAGSMERRKREGYF

SEQ ID NO: 4343 - DNA, 561 bp, Unknown
  Obtained from environmental sample
  misc_feature (1)..(561): n is a, c, g, or t
atgaagggcgcaatcgccaaggcggaagagcttgcggcggctactcccaactcattcattccccagcaattcaataaccccgccaatccggctgttcacgaaaaaaccacaggaccggaaatttggaacgataccgacggaaaagttgatatcgtggtcggcggagtcggaacaggcggaacactgacaggcgcgggaaaatttttaaaatcgaaaaaatcgagcgtgaagattgtcgcggtggaacctgcagcgtctcccgtgctttcaggcggttctcccggaccgcataaaattcagggtatcggagcgggttttaaacctcaggtttatgacgcggctgttatcgatgaaatttatcagaccgatgaaacaaaagccggaactgcggcgcgccgtcttgcgaaagaagaaggcattatcgtgggaatctcgtcaggctctgtccttgaagcggctttgactgtcgccaaacgaccggaaaacaacggtaaaaccatagtagccgtattaccggacaccggcgagcgttatttgtcaacatggctctgggaagaataa

SEQ ID NO: 4344 - protein, 186 aa, Unknown
  Obtained from environmental sample
  DOMAIN (1)...(174): Pyridoxal-phosphate dependent enzyme
  misc_feature (1)..(186): Xaa is any amino acid
MKGAIAKAEELAAATPNSFIPQQFNNPANPAVHEKTTGPEIWNDTDGKVDIVVGGVGTGGTLTGAGKFLKSKKSSVKIVAVEPAASPVLSGGSPGPHKIQGIGAGFKPQVYDAAVIDEIYQTDETKAGTAARRLAKEEGIIVGISSGSVLEAALTVAKRPENNGKTIVAVLPDTGERYLSTWLWEE

SEQ ID NO: 4345 - DNA, 951 bp, Unknown
  Obtained from environmental sample
  misc_feature (1)..(951): n is a, c, g, or t
atgctgcaaaggactgtggatgtggtgaatttccggatagatgagaaacatcaaaaactttcagttcatattgataaaaatatacccctgaccctgattggtgatgaacagcggttagcccaggttgtcgcgaatcttttatccaacgcgacaaagtttacccccgccgaaggcgccatcgcactcaacgcgtatttgcaagaaaaagaagatgacctctgcactattctggtagaggttattgataccggtataggactcagtgaggaacaaataccccgtctgtttcagttgtttgaacaggcggaacacagcacttcccgtaagtttggcggtaccgggctgggccttgccatttccaagcgtattgttgaaatgatggatggcagaatatgggttacatcggtggtaggaaaaggttctaattttagttttatcataaaagcaaaacaggctgaagaaagccgcgaaagcctcctggcccccggagtgaattggaaaaatatacgaatcctcatagtggatgacgagtcttatgttcaggaatatttccaaagtttcggcgagaagttagacatatcctgcgatgccgtctcctcaggagaagaggctgtcgcgaaaatcaaggaaaaaggtccttatgacctttactttatagactggaacatgcctctgatgaacgggattgaactgtcacggctcataaaaaaagagcgggtggggaacaatgtggtggtgatgatctcctcggtggaatggaacaccatcgaaaatgaagcaaaaaccgcgggggtagacaagtttgtaccaaaaccattgttcctttcgaccatcgtagattgtatcaatgactgtatggggagcaacggagaaaaaagaacagaagttaaaaccgacagctatgaaggttaccacatactgtggcggaagatgggactcggccgattctga

SEQ ID NO: 4346 - protein, 316 aa, Unknown
  Obtained from environmental sample
  DOMAIN (169)...(283): Response regulator receiver domain
  misc_feature (1)..(316): Xaa is any amino acid
MLQRTVDVVNFRIDEKHQKLSVHIDKNIPLTLIGDEQRLAQVVANLLSNATKFTPAEGAIALNAYLQEKEDDLCTILVEVIDTGIGLSEEQIPRLFQLFEQAEHSTSRKFGGTGLGLAISKRIVEMMDGRIWVTSVVGKGSNFSFIIKAKQAEESRESLLAPGVNWKNIRILIVDDESYVQEYFQSFGEKLDISCDAVSSGEEAVAKIKEKGPYDLYFIDWNMPLMNGIELSRLIKKERVGNNVVVMISSVEWNTIENEAKTAGVDKFVPKPLFLSTIVDCINDCMGSNGEKRTEVKTDSYEGYHILWRKMGLGRF

SEQ ID NO: 4347 - DNA, 741 bp, Unknown
  Obtained from environmental sample
  misc_feature (1)..(741): n is a, c, g, or t
ttgctgcattcggcggcgcgcatattcacgaacgccattatcagaacaggaattagcgatagagtcgaagaagccgttataacgctcgaacgccgcggggaaatgctggccgcgcttaaccgggcggctgtgaggttcatttcgcagagcgaggtgtcttttgaggacaccatgacgatgggcgtgaatgaaattgccgacgtcttcaacctggacagaatgtctcttttgcgtaactactacgtgaacaatgatttgtttggggggcagatttaccggtgggacagaaaatccagcggaacaacggagccgataaaaggtcttgaatctttccctatcagccattatgtgcctgaatgggagaaaattcttgcctccggcggaacaattaacagtccggtacggcttttgcccgaagcgcgcatcctgcaatcgttcggcctggtgtcgatatgtgtcgtgccggtgtttatcaacaacattttttggggtgttactttttttgaggatctccatgccgagcgcgtttttgatgaagacagcgtcgagatgatgcgctcggcggcctttctgtgcgcgaacacctttattcaggcggaaatggaacataagttaaccgccgctcatgaatttacccgcgctacgcttgacgcgtccccgatttgttttaccattttcgatgaaaacgcgcgcgttattgactgtaacgatgctatgttgaatatacttggaaccacntaa

SEQ ID NO: 4348 - protein, 246 aa, Unknown
  Obtained from environmental sample
  DOMAIN (53)...(196): GAF domain
  misc_feature (1)..(246): Xaa is any amino acid
MLHSAARIFTNAIIRTGISDRVEEAVITLERRGEMLAALNRAAVRFISQSEVSFEDTMTMGVNEIADVFNLDRMSLLRNYYVNNDLFGGQIYRWDRKSSGTTEPIKGLESFPISHYVPEWEKILASGGTINSPVRLLPEARILQSFGLVSICVVPVFINNIFWGVTFFEDLHAERVFDEDSVEMMRSAAFLCANTFIQAEMEHKLTAAHEFTRATLDASPICFTIFDENARVIDCNDAMLNILGTT

SEQ ID NO: 4349 - DNA, 852 bp, Unknown
  Obtained from environmental sample
  misc_feature (1)..(852): n is a, c, g, or t
ttgctgaatttccaacaggacatgcagaggaaatataagcggagcaacatggaggcgctgtttggggtgtataacatcccctgctcagaccagataacgaatatcgtagacggagtggcaagcggagggctttctggtgcatatgaacaggcgcatcaggtagcccaggaacagggaataatagactggtaccgaatattggacggcggggtattactggcgctggacggtacatggacatttagctcgggaaacatacattgcaaacactgtttaagcgtcacgaataaaaacaaaacgctgtattaccacagtatactggcgccggcgatagtcaggccgtccagcccggtggtattgccgcttgagcctgagcttatccggaacgaggacggcagcgagaagcaggattgtgagcggaatgcggcgaagcgctttctggagaggaaagcaggtctgttaaaggggctaaagcccacgtttttaggggatgatttgtatgcgtgccattcgatatgcgcgaagatactggatatggggatgagtttcatattcacatgcaaagatgaaagccatccgtggatagcggaacaggtgaagtacgcgcaggtggaaaagctcactcggggggaatggaacggaaggcaccatcttgaataccgatatgagtgggtaaacggcatagagaaccgagccgaaggggagcggatactggtgaattatctgagcctgcaaatatggaataaggagaagaaggaagcggtctatagccacagttggataacgaacaaactggtcactgccgatacgggtgcatttttggcaactgcggacgggacccgctggaaatag

SEQ ID NO: 4350 - protein, 283 aa, Unknown
  Obtained from environmental sample
  misc_feature (1)..(283): Xaa is any amino acid
MLNFQQDMQRKYKRSNMEALFGVYNIPCSDQITNIVDGVASGGLSGAYEQAHQVAQEQGIIDWYRILDGGVLLALDGTWTFSSGNIHCKHCLSVTNKNKTLYYHSILAPAIVRPSSPVVLPLEPELIRNEDGSEKQDCERNAAKRFLERKAGLLKGLKPTFLGDDLYACHSICAKILDMGMSFIFTCKDESHPWIAEQVKYAQVEKLTRGEWNGRHHLEYRYEWVNGIENRAEGERILVNYLSLQIWNKEKKEAVYSHSWITNKLVTADTGAFLATADGTRWK

SEQ ID NO: 4351 - DNA, 741 bp, Unknown
  Obtained from environmental sample
  misc_feature (1)..(741): n is a, c, g, or t
atgccggcccttggaaacataccttttaatacggcggggttggctgcggacttatcgataaaaagcgatgattacacccagcgctccgggggagtggtttttcccaatcccaacgcgcccacaggcagggcccttggccgggaacagatcaaagaaattgcccgggcacaagaaaaaaacaaaaaagtgtgtattgttgatgaggcgtatatcgcgtttgccgacgggcctgacatgggttccatgattccctttattaacgaacaccccaatctcctcgtggttcgtaccctttccaaagacgcttccctggcggggctccgcgttgggtacgcgtgtggcagtgacgcgctaatcgagggcctttgccgcatcagggattcttttaattcctacaccgtagaccgcctggcacaagccggcgctgtggcggcactcctggacagtgtttactatgacgaaattaattcccgggtgtgtgtcaccagagatcgcgtgcaagaagccctcagcggcttgggctttggcgttatcccttcccaggcgaacttcatctttgcgtcgccgccgggcgcctcaaaaagcgccgcggactttttgactgccctgagggacagaggtattctggtcaggcattttaagcagcccgagatacataattatctgcgcatcagtataggtactgatgaagacatggatacttttctggcagcctgcaaggaaatagcgatctctgcgtga

SEQ ID NO: 4352 - protein, 246 aa, Unknown
  Obtained from environmental sample
  DOMAIN (1)...(239): Aminotransferase class I and II
  misc_feature (1)..(246): Xaa is any amino acid
MPALGNIPFNTAGLAADLSIKSDDYTQRSGGVVFPNPNAPTGRALGREQIKEIARAQEKNKKVCIVDEAYIAFADGPDMGSMIPFINEHPNLLVVRTLSKDASLAGLRVGYACGSDALIEGLCRIRDSFNSYTVDRLAQAGAVAALLDSVYYDEINSRVCVTRDRVQEALSGLGFGVIPSQANFIFASPPGASKSAADFLTALRDRGILVRHFKQPEIHNYLRISIGTDEDMDTFLAACKEIAISA

SEQ ID NO: 4353 - DNA, 816 bp, Unknown
  Obtained from environmental sample
  misc_feature (1)..(816): n is a, c, g, or t
gtggacgggtggaaaacccccacgggtcttgagcttatcgaaacgagccggaaggcggaaaagtgggtgtccgagttcctctttacctgcgttgaccgggaaggcaccatgacgggtattgaccttgagcccgtgaaacgcctccgccaggccgtgtcctgccaagtcaccgcagccggaggcgtcaacaccctggaagaagttgaggccctggccgcgcttggctgcgacgttcagcttggcatggccttgtacacaggcaaaatcagcctttccgacacgtttgtccgttccctcaattggcaaaaagcggaggggaacttgcttcccgtaatagcccagtcaaccgacggccaggtgctcatgtgcgggtatgctgaccaaacggcatttcgagagacttttagccgggggaaactctgcttccacagccgcaccaggaacaagctctggatgaagggcgaaaattccgggaacactctcaaggtgatcaggatgcgcgccgactgcgacagggacacagttctcgcggtagtggaacccgcgggcccggtctgccataccggcgcctggtcctgctttggccttgaccggcgttacaccctggaataccttcagtcaatcatcagcgaccgtttcaagaatcccacacccggttcctataccgcaaccctggacaataaactggtcagggaaaaaatgatggaagaagcggaggaactctgcgaagccaaaacccacgatgagcttgtctgggaagccgcggacgtgttctttttcgcaccgccctcatcaccagggaaggcatcagggtga

SEQ ID NO: 4354 - protein, 271 aa, Unknown
  Obtained from environmental sample
  DOMAIN (202)...(270): Phosphoribosyl-ATP pyrophosphohydrolase
  misc_feature (1)..(271): Xaa is any amino acid
MDGWKTPTGLELIETSRKAEKWVSEFLFTCVDREGTMTGIDLEPVKRLRQAVSCQVTAAGGVNTLEEVEALAALGCDVQLGMALYTGKISLSDTFVRSLNWQKAEGNLLPVIAQSTDGQVLMCGYADQTAFRETFSRGKLCFHSRTRNKLWMKGENSGNTLKVIRMRADCDRDTVLAVVEPAGPVCHTGAWSCFGLDRRYTLEYLQSIISDRFKNPTPGSYTATLDNKLVREKMMEEAEELCEAKTHDELVWEAADVFFFAPPSSPGKASG

SEQ ID NO: 4355 - DNA, 951 bp, Unknown
  Obtained from environmental sample
  misc_feature (1)..(951): n is a, c, g, or t
gtgccccccccgattgaaggccccgcccttccaaagttcgggccgcggaattcccccggcccttgcgaagggcctgggtctgcccgatttgccgcccggactgcccaacatcttggccggtgccgactccgggaggcggcccgggcgcatcgcggccgcccggcgggcggggcggccgttgtttctggctctgggcggccacgtgatcaaggtgggcttggggccggtcatcatcgacctcttggagcgcggcctggtggacggcctggccggaaacggcgcggtcatggttcacgacgccgaggcggccctggtcggggccaccagcgaagacgtggccgcgaccctggggacgggccgcttcggcgtcaccgcccagaccggggaactcatcaaccgggccgcttgggccgccgccgaaagcgggcaagggctgggccgggctttgggcgagtccctgcggcgggcggccccgccccacttggaactgagccttctggccgccgccgcccgcctggacctgcccgcgaccatccatgtcgccatcggcaccgatgtttacaacatccaccccgaggccgacggcgcggccttgggcgcggcctccctgaccgacttccgccttttctgccgcctggcggccgacctggagggaggcgtcttcatcaacctcggctcggccgtcatcctgccggaagtctttctgaaagccctgaccctggcccgcaacctgggccgccaggtgcgcgacctcaccaccataaacctggatttcatccgccagtaccgcccctcggtcaacgtggtggaacggcccacccgggaaggcggacggggtttttatttcatcggccaccacgagataatgttccctctcctgatggccctggcgctggagcagatctaaggcgcggctttcccaaccctaaccgactaaggagtcttccatga

SEQ ID NO: 4356 - protein, 316 aa, Unknown
  Obtained from environmental sample
  misc_feature (1)..(316): Xaa is any amino acid
MPPPIEGPALPKFGPRNSPGPCEGPGSARFAARTAQHLGRCRLREAARAHRGRPAGGAAVVSGSGRPRDQGGLGAGHHRPLGARPGGRPGRKRRGHGSRRRGGPGRGHQRRRGRDPGDGPLRRHRPDRGTHQPGRLGRRRKRARAGPGFGRVPAAGGPAPLGTEPSGRRRPPGPARDHPCRHRHRCLQHPPRGRRRGLGRGLPDRLPPFLPPGGRPGGRRLHQPRLGRHPAGSLSESPDPGPQPGPPGARPHHHKPGFHPPVPPLGQRGGTAHPGRRTGFLFHRPPRDNVPSPDGPGAGADLRRGFPNPNRLRSLP

SEQ ID NO: 4357 - DNA, 894 bp, Unknown
  Obtained from environmental sample
  misc_feature (1)..(894): n is a, c, g, or t
ttgaaggccccgcccttccaaagttcgggccgcggaattcccccggcccttgcgaagggcctgggtctgcccgatttgccgcccggactgcccaacatcttggccggtgccgactccgggaggcggcccgggcgcatcgcggccgcccggcgggcggggcggccgttgtttctggctctgggcggccacgtgatcaaggtgggcttggggccggtcatcatcgacctcttggagcgcggcctggtggacggcctggccggaaacggcgcggtcatggttcacgacgccgaggcggccctggtcggggccaccagcgaagacgtggccgcgaccctggggacgggccgcttcggcgtcaccgcccagaccggggaactcatcaaccgggccgcttgggccgccgccgaaagcgggcaagggctgggccgggctttgggcgagtccctgcggcgggcggccccgccccacttggaactgagccttctggccgccgccgcccgcctggacctgcccgcgaccatccatgtcgccatcggcaccgatgtttacaacatccaccccgaggccgacggcgcggccttgggcgcggcctccctgaccgacttccgccttttctgccgcctggcggccgacctggagggaggcgtcttcatcaacctcggctcggccgtcatcctgccggaagtctttctgaaagccctgaccctggcccgcaacctgggccgccaggtgcgcgacctcaccaccataaacctggatttcatccgccagtaccgcccctcggtcaacgtggtggaacggcccacccgggaaggcggacggggtttttatttcatcggccaccacgagataatgttccctctcctgatggccctggcgctggagcagatctaa

SEQ ID NO: 4358 - protein, 297 aa, Unknown
  Obtained from environmental sample
  misc_feature (1)..(297): Xaa is any amino acid
MKAPPFQSSGRGIPPALAKGLGLPDLPPGLPNILAGADSGRRPGRIAAARRAGRPLFLALGGHVIKVGLGPVIIDLLERGLVDGLAGNGAVMVHDAEAALVGATSEDVAATLGTGRFGVTAQTGELINRAAWAAAESGQGLGRALGESLRRAAPPHLELSLLAAAARLDLPATIHVAIGTDVYNIHPEADGAALGAASLTDFRLFCRLAADLEGGVFINLGSAVILPEVFLKALTLARNLGRQVRDLTTINLDFIRQYRPSVNVVERPTREGGRGFYFIGHHEIMFPLLMALALEQI

SEQ ID NO: 4359 - DNA, 516 bp, Unknown
  Obtained from environmental sample
  misc_feature (1)..(516): n is a, c, g, or t
atggccatccagggggacggcttttttagaattcagatgtacgatggttcatgggcttatacaagaaacgggaattttaaaattgacgaaacaggccggatggttacaagcaacggttactggtttttacccgatataataatgcctgaaaattttcttcctgagtccgttaccgtatcccaggacggcaaagtttccgttgtcgtgccgcagattgacgatgagccaatccaggtcggccagattgaattgtaccgctttcctaacccggtgggccttaccgccatcggcgaaaacctttttaagataaccaacgcctcaggagatccgattccaggcaggcccggctacgaaggcatgggcaagattgctcacaaatttttagagatgtcgaatatctcggtagttcgtgaaatggttgaccttattgtcgcccagcgcgcgtatgagtttaattccagaaccatccagaccagcgataatatgctgggaacggcaacaagtttaaagaggtag

SEQ ID NO: 4360 - protein, 171 aa, Unknown
  Obtained from environmental sample
  DOMAIN (131)...(169): Domain of unknown function (DUF1078)
  misc_feature (1)..(171): Xaa is any amino acid
MAIQGDGFFRIQMYDGSWAYTRNGNFKIDETGRMVTSNGYWFLPDIIMPENFLPESVTVSQDGKVSVVVPQIDDEPIQVGQIELYRFPNPVGLTAIGENLFKITNASGDPIPGRPGYEGMGKIAHKFLEMSNISVVREMVDLIVAQRAYEFNSRTIQTSDNMLGTATSLKR

SEQ ID NO: 4361 - DNA, 393 bp, Unknown
  Obtained from environmental sample
  misc_feature (1)..(393): n is a, c, g, or t
gtggggaatatggatatcagcgctttagctagtcaatacatcaactcagaatatgttccattttcatctgcctctgtttcggagcttcaaaacggggaaacaagcgcatttgacaagcttttaaaaaaagctcaggggcagggggggagcaataatagcttttcctccgtaaaaaaactcctgtcgataaaaccgataaactctatgaagtctgtatggaaactggaaacctttttaatcaaaaacctgattaaaagcatgaggtctactgttcaaaaaaccggttttatcgacaccggttttgcagnggaagtttaccaggatatgctctatgacgaatacgcaaaaacattcgcgcaaaacgcgaatttgggttttgccgagatgccgtaa

SEQ ID NO: 4362 - protein, 130 aa, Unknown
  Obtained from environmental sample
  misc_feature (1)..(130): Xaa is any amino acid
MGNMDISALASQYINSEYVPFSSASVSELQNGETSAFDKLLKKAQGQGGSNNSFSSVKKLLSIKPINSMKSVWKLETFLIKNLIKSMRSTVQKTGFIDTGFAXEVYQDMLYDEYAKTFAQNANLGFAEMP

SEQ ID NO: 4363 - DNA, 777 bp, Unknown
  Obtained from environmental sample
  misc_feature (1)..(777): n is a, c, g, or t
gtgttgggcggccgcttctccggcctaatggacgaattccgcattcacaaaaactaccttgaaaaagccgagttgacccgctatggccgcagtggccgggtggaaacacggacgctggatttgggctacgccgacagccgtgtccttaaaatcgaggcttttggaggtcggacttccaattcctcagggaaggttcgtaacgaatatgccggaaacagttccttgaagttttctgatcactcggaaatcaaatttttcatccgccttagcaacagtccctatcgctggaacgaagttccctggattccaatcgatccgggaactgatttgcagcagttccggggcaggtatgtacagcttgcggtggatttttaccccggtactgacggagaaacctccccctacctgtcggagctcaggcttatttacaacgctgctgaaccgcctccccctccggcttatgtagccgctgtggcaaaggacggggcggtggaattgacctggagggccagcccttcaagggacgttggcggttattatgtttactatggtacggcaagcggtgattatttggaagcaaaatccccgttcgatgttggagacaggacttcaatcgttattaatggtttaaagaacgggactctttattattttgtcgtagcggcctacagcaaaccggaaagcggggaatatctttttgttcctgagccangtgaattttccagggaggtggcggcaaggccgctggttcaaacagtggcaaggatggcggaatga

SEQ ID NO: 4364 - protein, 258 aa, Unknown
  Obtained from environmental sample
  DOMAIN (148)...(228): Fibronectin type III domain
  misc_feature (1)..(258): Xaa is any amino acid
MLGGRFSGLMDEFRIHKNYLEKAELTRYGRSGRVETRTLDLGYADSRVLKIEAFGGRTSNSSGKVRNEYAGNSSLKFSDHSEIKFFIRLSNSPYRWNEVPWIPIDPGTDLQQFRGRYVQLAVDFYPGTDGETSPYLSELRLIYNAAEPPPPPAYVAAVAKDGAVELTWRASPSRDVGGYYVYYGTASGDYLEAKSPFDVGDRTSIVINGLKNGTLYYFVVAAYSKPESGEYLFVPEPXEFSREVAARPLVQTVARMAE

SEQ ID NO: 4365 - DNA, 591 bp, Unknown
  Obtained from environmental sample
  misc_feature (1)..(591): n is a, c, g, or t
ttgattgatacaatagcccgcttcccccgaaacaccctcaggctggaaatcggcatacagacgcttaacgccgaggttttagccagaataggcaggccctcaaacccggacaaagagcttgagaccctccgcgtcctgagggaaaaaaccaatgccattattcacgccgaccttatcgccgggctgcccggcgaggacatggattcctttggcaaaggctttgactcgctgtgggccgcgcttgcgggctgtggcagcagcggcggcagggttgaaatacaactgggtatattaaaaattctgcccggcgcgccaatcgcgcggcatatagaacccttcggcatgacgtttaaccccctgccgccttatgaactcatcgggagcgccgccattcccgcgtccggcatggaccggataaaaaacttcgcccgtttctgggaactgaccgtcaaccgcgggcttttggacataggcccggcccctgtttttgaccgtttcatgtctctttccgattctcttctgacccgtttcggacgcaactggggcatagacaaaaacgagttgttaaatacaattagaaataacaaataa

SEQ ID NO: 4366 - protein, 196 aa, Unknown
  Obtained from environmental sample
  misc_feature (1)..(196): Xaa is any amino acid
MIDTIARFPRNTLRLEIGIQTLNAEVLARIGRPSNPDKELETLRVLREKTNAIIHADLIAGLPGEDMDSFGKGFDSLWAALAGCGSSGGRVEIQLGILKILPGAPIARHIEPFGMTFNPLPPYELIGSAAIPASGMDRIKNFARFWELTVNRGLLDIGPAPVFDRFMSLSDSLLTRFGRNWGIDKNELLNTIRNNK

SEQ ID NO: 4367 - DNA, 735 bp, Unknown
  Obtained from environmental sample
  misc_feature (1)..(735): n is a, c, g, or t
atgatcagatcggccgagtgcacagcccttgccgcttcgattctcggctcgcttttactttcctcgttcatggcattctcaaccctgaaactgcgttccaatgtgtttattgccggccttgcggtaaacctgcttgccgccggtttaacggttgtcctttcgcactacttttttaatacaaaaggcgttatcatttttcagtctgataaaaacattccgattgtgaatattccgtttgtgaaacatatacctgtaatcggcgaattgttttccggtcatagcgtgtacgtttacgcaagctggctgttattggtaatttcatggatcgcgatttacaaaacggcttttggttaccgtttgcgggcctgcgccaattattcaatggcattggcctctctgggactcaagccggacacataccgttatgcggcttttcttgtctcggggcttttctgcggaatcggcggctcgttcctcagcctgaacctcggcgcctttgttcccaacatgaccgccggcaagggctggattgccctcgttgttatctttctcggcggccgcaagccgcagggtcttttggcagccgcttttgtcttcggccttgccgaggccttgtcaaattacgcccagggccttcgcaacatacccgccgattttatccttgccatgccgtatctattaactctgttggcaatggttcttgtctcggtttgnggaanatcaaataacaaataa

SEQ ID NO: 4368 - protein, 244 aa, Unknown
  Obtained from environmental sample
  SIGNAL (1)...(27)
  DOMAIN (1)...(232): Branched-chain amino acid transport system / permease component
  misc_feature (1)..(244): Xaa is any amino acid
MIRSAECTALAASILGSLLLSSFMAFSTLKLRSNVFIAGLAVNLLAAGLTVVLSHYFFNTKGVIIFQSDKNIPIVNIPFVKHIPVIGELFSGHSVYVYASWLLLVISWIAIYKTAFGYRLRACANYSMALASLGLKPDTYRYAAFLVSGLFCGIGGSFLSLNLGAFVPNMTAGKGWIALVVIFLGGRKPQGLLAAAFVFGLAEALSNYAQGLRNIPADFILAMPYLLTLLAMVLVSVXGXSNNK

SEQ ID NO: 4369 - DNA, 753 bp, Unknown
  Obtained from environmental sample
  misc_feature (1)..(753): n is a, c, g, or t
ttggtcgggttcggaacatatttatgggaaaacggtgatatgtgttacagtagttggagaaacggaaatatggatggtaaaggtatttactcttggtacaatgagacgtggcaggtcatgaattgcaatgggactgtttgctggaatatttcctcttttgatgaggccgctgtaagcatcgatgggaacaagaatgcggtaccggtcgggacagcggcggcgcggacagagtcgttcacagatattagagacggtcaaacgtacaaaacagtaaagataggacggcagacatggatggcacagaatttgaattatcagatgggcaaatcttggtgttataaaaacaacgcggataattgtgagaaatacgggcggttgtacaattgggatacggcaaaaatggcgtgccctaccggatggaagttgcctactaatcaggattgggataaattggcggcgacagcgggcggttcgaaggttgcgggcaagaagttgaaatctgagagcggttggaacaacgacggcaacggaacggatgaatatggattttctgccctgccgggcggatactatttctttggcgatgagttcgaggaagtcggcaacataggtttctggtggtcggccacggagaacgtcggcgcctacccaagcaccaaatccatgcgccacggcgccgacgacatggacggaaacaaccaactcagggccttaggtttatccgtacgttgcctgcaagacgcgcgcaaatga

SEQ ID NO: 4370 - protein, 250 aa, Unknown
  Obtained from environmental sample
  misc_feature (1)..(250): Xaa is any amino acid
MVGFGTYLWENGDMCYSSWRNGNMDGKGIYSWYNETWQVMNCNGTVCWNISSFDEAAVSIDGNKNAVPVGTAAARTESFTDIRDGQTYKTVKIGRQTWMAQNLNYQMGKSWCYKNNADNCEKYGRLYNWDTAKMACPTGWKLPTNQDWDKLAATAGGSKVAGKKLKSESGWNNDGNGTDEYGFSALPGGYYFFGDEFEEVGNIGFWWSATENVGAYPSTKSMRHGADDMDGNNQLRALGLSVRCLQDARK

SEQ ID NO: 4371 - DNA, 594 bp, Unknown
  Obtained from environmental sample
  misc_feature (1)..(594): n is a, c, g, or t
ttgaatattccgtggaagaaaaacgccgccctattcatatccggtcaagccttgtcgtatttcggtacgatggtcgtccagtacgccatcttttggcatatcaccctgaagagcaagtccggcggcatgatgacgctcttcgcgcttatcggcctcctgccgatgtgcgtaatcgccccgtttgcgggggtatgggccgataggtacagccgcaagcgcataatcaacatcgcggacgcgtcggtcgccctcttcagtctgatcgccgccgttgcgctgatgttcgggatagacagttacgccatgctcttcgtctgcgccctcgtccgcgccttggggaccggcgtgcagaatccggcggtcaacgccttcatcccgcagatcgtacctaaagaacacctaacgcggataaacggaatacaaggcggcatacagtcgttcgtggccttagccaccccgatgatcgccgccgcgctgatggcgaccgctccgttgcaaacgctttttctcctcgacgtagccaccgccatcgtcggtataagtatcgttctcttttttgtaaaatccccaagtgggggccgaccccgtcgttga

SEQ ID NO: 4372 - protein, 197 aa, Unknown
  Obtained from environmental sample
  misc_feature (1)..(197): Xaa is any amino acid
MNIPWKKNAALFISGQALSYFGTMVVQYAIFWHITLKSKSGGMMTLFALIGLLPMCVIAPFAGVWADRYSRKRIINIADASVALFSLIAAVALMFGIDSYAMLFVCALVRALGTGVQNPAVNAFIPQIVPKEHLTRINGIQGGIQSFVALATPMIAAALMATAPLQTLFLLDVATAIVGISIVLFFVKSPSGGRPRR

SEQ ID NO: 4373 - DNA, 870 bp, Unknown
  Obtained from environmental sample
  misc_feature (1)..(870): n is a, c, g, or t
ttggccgaggggcgagagttggaagttggtaataccggccgggccgggaaacccgcccggcagttcaaactgatgaaagactttggtacaacggtacttcacgccacgcccagcttccttttgcaccttgaaaccagaatgagggaagccggcgttcagcgggaaagcctgtcattgaagcgggcctttgccggcgcggagccgtactccgaggatacccgccgccgcattgaagcgctcctgaaaattgacgtgtacaattcctatggcctttcggaaatgaacggccccggcgttgcctttgagtgccagtgcaaagacgggctgcacatttgggaagacggctacatcgccgaaattgtcaatcccgaaacgctggaaccggtgagggacggtgaaattggcgaactggtgcttacgattctgtgcagggaggcgacaccgattctccgctaccgcacccgcgacctgacggccttttacaccgaaccctgtccctgcggcagaacccaccgccgcctgcgccgcattaccgggcgcagcgacgacatgcttatcattaacggtgtaaacgtcttccccagccagattgaggaagtgattatgggcatgaaggaagtgggcaacaactaccttatcgtcgttgaaaaagaaggcgcccttgaccgcctgaccattaaaactgaaattggcccggacatttttatggacgatgcgaggccgcttaacgccctgcgggagaagatcatcgaaacgctacaggtttccatttccataaaagcgagggtggaactccacgaaaggggcagcctgcccatttccgaaggcaaagcggtccgcgtgcaggacttgcggccaaaggatgcgtag

SEQ ID NO: 4374 - protein, 289 aa, Unknown
  Obtained from environmental sample
  misc_feature (1)..(289): Xaa is any amino acid
MAEGRELEVGNTGRAGKPARQFKLMKDFGTTVLHATPSFLLHLETRMREAGVQRESLSLKRAFAGAEPYSEDTRRRIEALLKIDVYNSYGLSEMNGPGVAFECQCKDGLHIWEDGYIAEIVNPETLEPVRDGEIGELVLTILCREATPILRYRTRDLTAFYTEPCPCGRTHRRLRRITGRSDDMLIINGVNVFPSQIEEVIMGMKEVGNNYLIVVEKEGALDRLTIKTEIGPDIFMDDARPLNALREKIIETLQVSISIKARVELHERGSLPISEGKAVRVQDLRPKDA

SEQ ID NO: 4375 - DNA, 534 bp, Unknown
  Obtained from environmental sample
  misc_feature (1)..(534): n is a, c, g, or t
gtggctcaccanccgttgaggtttttagggaacccgctttttgcggtgttttatatatccactatgctgattttgggcttccacctatggcatgccatntccagcgcattccaaacaatgggcataaaccaccataaatggacccncattatagacaagctcgcaattctctattgcgttgtggttgcgtgtggctttggagccaccgccgtaggctcttttgttgttgtaaacatggataataaggcaaaagcgataatggagcaggctaaaaacccaagctatcaggaggctttggaaattttaaaacagcggcctcttgatgagcaaaagaaaaaagcccatataatttcaaagttccccgaaagagccaacctcatcgtggaaagcataatggaaaaaagaggcctgcttggcggcgaaaaaagcgaagagtttatgaagttcaaggaaaaaatcaaaaaggggaaaaagcagcgtctaaacgatgaaggtcaacagtcagaagaagattcagaaggagacgatctatga

SEQ ID NO: 4376 - protein, 177 aa, Unknown
  Obtained from environmental sample
  misc_feature (1)..(177): Xaa is any amino acid
MAHXPLRFLGNPLFAVFYISTMLILGFHLWHAXSSAFQTMGINHHKWTXIIDKLAILYCVVVACGFGATAVGSFVVVNMDNKAKAIMEQAKNPSYQEALEILKQRPLDEQKKKAHIISKFPERANLIVESIMEKRGLLGGEKSEEFMKFKEKIKKGKKQRLNDEGQQSEEDSEGDDL

SEQ ID NO: 4377 - DNA, 864 bp, Unknown
  Obtained from environmental sample
  misc_feature (1)..(864): n is a, c, g, or t
ttgggaacagggctctccctcaatttcgccgaccttttcaaaggcattaataatgttcccgacctttacgaaaaccttaaagacggaaaattcaaatcggaattcctgcgcaatgtgcggctatatatacccgaatggcccaatatttatgtgcagcttttcccctatgcgcttgacccctcaattatcgcccagcttgaaaaagagggctatacccaaaagctggtttccatgtgctcaggctgctttgaatatttccgcgataaccgggaagcggtggtctggatcttcaagaacgccagggataccgaatggtttaaggcggcgaatattccttttgaaaaacagcttatcaccctgattcatattctggacctaagctacagggatattgagaatcacaaagacactactgataaccgcaaaatcaacaagcaggtatacgggatactattcaaggaaagcaaccttaactcgtttctcgacggggccgatgaagataccattacccggatattcacttttattaatggcgtaaaggatttggatccgcaggacaaactcaacctgcgcagcagaattctggacaagcatcctgattttaaatttctcggcgcggcggaaaagaaagtctcgcggggccttatggttaccgccgccaagtacgaggaaaagaaaaagcagcttacccatattattgacgaggaaattccggcaaattccaaggaaatcgagtacgcgttgtccctgggcgaccttcgggaaaacgcggagtacaaggccgcanaggaaaaacaggaacagcttaatagccggggtggcgaaactcaagngaggagattgagcgggccccagctcctttga

SEQ ID NO: 4378 - protein, 287 aa, Unknown
  Obtained from environmental sample
  DOMAIN (216)...(286): Prokaryotic transcription elongation factor, GreA/GreB, N-terminal domain
  misc_feature (1)..(287): Xaa is any amino acid
MGTGLSLNFADLFKGINNVPDLYENLKDGKFKSEFLRNVRLYIPEWPNIYVQLFPYALDPSIIAQLEKEGYTQKLVSMCSGCFEYFRDNREAVVWIFKNARDTEWFKAANIPFEKQLITLIHILDLSYRDIENHKDTTDNRKINKQVYGILFKESNLNSFLDGADEDTITRIFTFINGVKDLDPQDKLNLRSRILDKHPDFKFLGAAEKKVSRGLMVTAAKYEEKKKQLTHIIDEEIPANSKEIEYALSLGDLRENAEYKAAXEKQEQLNSRGGETQXRRLSGPQLL

SEQ ID NO: 4379 - DNA, 783 bp, Unknown
  Obtained from environmental sample
  misc_feature (1)..(783): n is a, c, g, or t
ttgattaatcctatatgtaaaaaatacaacatagacgaaaagatagttttggcgttttttgtttcgtcttccgaacaaaagcctgtatatttcaattctttaaaaaatacatttattagaaccgcaagcggtgaccagcgcgcaacagattcagaaattaacgcgttatttcgtgagcagtcatttggtatacgttccgatttgattatagatggcttcagttttgatgatttaaatacaggctcattgaatacttaccgaaacagagttaaaaaccagaatccacaaatgctttataatgatctttctgacatagagttttgtgaaaagttgggtgttataaaaaacggtgtgccaacctatggcggtttattagttcttggaaaagcagattctatacgacggaaattcaacgatttttgggttgattatctggaaatcccgggtgtttcatattcggatgctcaaacaagatatacatttcgtattcaagagcaggaaaatttatgggaatactataatgttcttattcaaagacttagaaattatgctgataatccttttaggatgggagataacggatttgcttacgaagacgatactcaactggctgccttgcgggaagggcttgtaaatatgttaatgcacgctgattattttggaataatgcactcaacaataagagtttttagtaacagaaatgtttttcaaaatcccggaagatttgatataaatataaaggaatggcataaaacagctgtttccaaccgcgnaaatctgtga

SEQ ID NO: 4380 - protein, 260 aa, Unknown
  Obtained from environmental sample
  misc_feature (1)..(260): Xaa is any amino acid
MINPICKKYNIDEKIVLAFFVSSSEQKPVYFNSLKNTFIRTASGDQRATDSEINALFREQSFGIRSDLIIDGFSFDDLNTGSLNTYRNRVKNQNPQMLYNDLSDIEFCEKLGVIKNGVPTYGGLLVLGKADSIRRKFNDFWVDYLEIPGVSYSDAQTRYTFRIQEQENLWEYYNVLIQRLRNYADNPFRMGDNGFAYEDDTQLAALREGLVNMLMHADYFGIMHSTIRVFSNRNVFQNPGRFDINIKEWHKTAVSNRXNL

SEQ ID NO: 4381 - DNA, 657 bp, Unknown
  Obtained from environmental sample
  misc_feature (1)..(657): n is a, c, g, or t
gtggctcgcagcatgaggagcaatgggttaagcgatttgcgtattgttcgtaaatctaagcctttgcccaaaaaatgctacgacactgcacattcaagcgcagaaattttggataacgcaaaaattttcccaaccctgaaagaagccatagcggattgctcatacaccgttgcttttagccgcaggctttttgacacagttgttccgcattgctcgcttcccgaactgccgccgcatttcaaaggcaaaacgggaacaatggctcttatctttggcagggaatctcgcgggctttgttttgaagaagtggaaatatgcgccgcccaatgcgaaataccagttgctgggcaaatgagcataaatttatctcacgctgttagcgtggcgagctacgagctttgccgcgctggcttgcttggggaaggccttgcgcccagaaacaaattgccgatgacccacagaaagccggcaactatggagcaaatgcagagcattgaaaattttgtatgcgaaaatttaaccgacaaatataaaaacctcccctggctaaaagcctcccttgcgatatggctccaaaaactgaacccaagccaagcggaattatctgcgctgtttggggtattgagggcattgactaagaaaaatgcgagaggttaa

SEQ ID NO: 4382 - protein, 218 aa, Unknown
  Obtained from environmental sample
  DOMAIN (1)...(131): SpoU rRNA Methylase family
  misc_feature (1)..(218): Xaa is any amino acid
MARSMRSNGLSDLRIVRKSKPLPKKCYDTAHSSAEILDNAKIFPTLKEAIADCSYTVAFSRRLFDTVVPHCSLPELPPHFKGKTGTMALIFGRESRGLCFEEVEICAAQCEIPVAGQMSINLSHAVSVASYELCRAGLLGEGLAPRNKLPMTHRKPATMEQMQSIENFVCENLTDKYKNLPWLKASLAIWLQKLNPSQAELSALFGVLRALTKKNARG

SEQ ID NO: 4383 - DNA, 504 bp, Unknown
  Obtained from environmental sample
  misc_feature (1)..(504): n is a, c, g, or t
gtgtcagacaatccaaaggcttatgcgctggaacgggcaaagacaagcggagtcagcgtggctgtagaggagccagacagaaacattcccagagatgagcgccggcaggagttgtctgatcgcattctgatgttagctgaaacttataatattgatcttattgttctggcagggtttctttcgatactgaaaggggatatcgttaggcgctattcaggcaggatcatcaacctgcacccaagcctgctgcctaaattcgggggcgacggaatgtacggcgggcgtgtgcaccgcgccgtgctggacgccggagaaaaagaatccggatgtacggtgcatcttgtggatgccggtgtggataccggcccgatacttttacagcgcagggtcccggtgttgtcaggcgacacgccggatactcttgcggaaaggatccatgaacaagaacatattgcaattgtggaagcggtaaagctgatggttgagcgaataaaaaacaattaa

SEQ ID NO: 4384 - protein, 167 aa, Unknown
  Obtained from environmental sample
  DOMAIN (2)...(157): Formyl transferase
  misc_feature (1)..(167): Xaa is any amino acid
MSDNPKAYALERAKTSGVSVAVEEPDRNIPRDERRQELSDRILMLAETYNIDLIVLAGFLSILKGDIVRRYSGRIINLHPSLLPKFGGDGMYGGRVHRAVLDAGEKESGCTVHLVDAGVDTGPILLQRRVPVLSGDTPDTLAERIHEQEHIAIVEAVKLMVERIKNN

SEQ ID NO: 4385 - DNA, 351 bp, Unknown
  Obtained from environmental sample
  misc_feature (1)..(351): n is a, c, g, or t
atggagggagagatgaaaagaagggcacttatcagtgttttttacaaagacggagttttggaattggcttcatacctgaacggggcagggtgggagattctttcaaccggcggtacttcaaagtatttaaaggaaaataatatccccgtaaccgatgtttcttcggtaacgggttttcctgaatgtcttgacggcagggtaaagaccctgcaccccgcaatccacgccggccttctggcgcgccgcgatgaaaaaacccatatggatacgctgcaggcgctggggcttgaaacatcgatcttgtcagcgttaacctgtatcccttttttgaaaagtacaggcaagccttag

SEQ ID NO: 4386 - protein, 116 aa, Unknown
  Obtained from environmental sample
  DOMAIN (18)...(113): MGS-like domain
  misc_feature (1)..(116): Xaa is any amino acid
MEGEMKRRALISVFYKDGVLELASYLNGAGWEILSTGGTSKYLKENNIPVTDVSSVTGFPECLDGRVKTLHPAIHAGLLARRDEKTHMDTLQALGLETSILSALTCIPFLKSTGKP

SEQ ID NO: 4387 - DNA, 792 bp, Unknown
  Obtained from environmental sample
  misc_feature (1)..(792): n is a, c, g, or t
ttgattccgcaggccgcgggcggcggcagagcatgttgtgtcgcggttaagcataacacgccatgcggaatagccatgggaaacactttactggaagcatatcaaaaaacttatgcctgcgatccggtttcgatattcgggggcatagtggcaagcactgtgacagttgatgctccaacggcagcgaagctgggagaactgtttttggagatcgtagccgccccggactntgagccgcaggcgctggaaatacttatgaagaaaaaaaatcttcgcataataaaactttcaaaatcccctgttgaaacccacgaatatatcgcggttgacggcggccttttggttcagcagagcgaccgccggcttcttgacaaatgggaggtcgtgacaaaaaccgcgcccgacgcccatgatctgcgggacatgatcttcggcatgagggccgtaacctttgttaaatcaaacgcgataatgattgtcaaagacgaggctgccaccggaatagggggagggcaggtcaaccggatatggcctacagtgcagtcgctggaacggagcgcggatgccataaagaaagcggcggacaacccgtggaaggatgataaaccggcgagggtgcttgcctccgacgcgtttttcccgtttgccgatgttgtggaagcagccgcggcggcgggcatcaaagcgataatccagcccggcggctcggttaacgacaaaatgtcaatcgaggcctgtgacaagcacggcatagcgatggtctttaccggcatacggcactttaagcactaa

SEQ ID NO: 4388 - protein, 263 aa, Unknown
  Obtained from environmental sample
  DOMAIN (1)...(193): AICARFT/IMPCHase bienzyme
  misc_feature (1)..(263): Xaa is any amino acid
MIPQAAGGGRACCVAVKHNTPCGIAMGNTLLEAYQKTYACDPVSIFGGIVASTVTVDAPTAAKLGELFLEIVAAPDXEPQALEILMKKKNLRIIKLSKSPVETHEYIAVDGGLLVQQSDRRLLDKWEVVTKTAPDAHDLRDMIFGMRAVTFVKSNAIMIVKDEAATGIGGGQVNRIWPTVQSLERSADAIKKAADNPWKDDKPARVLASDAFFPFADVVEAAAAAGIKAIIQPGGSVNDKMSIEACDKHGIAMVFTGIRHFKH

SEQ ID NO: 4389 - DNA, 456 bp, Unknown
  Obtained from environmental sample
  misc_feature (1)..(456): n is a, c, g, or t
ttgccctgtaaagggaaaaggaaacaaacagaggtttgcggtttttgcggagaagccgcggcgaggttaaaacgttaccttgaggaatcaaggccccttctggctaaaggaaaaacggccgccgttggctgccaggccctttttgtcacaagaaacggtaagaggctttcgcgcaaggggatatggaaaaattattccaagtatgccacactggcaggaaccggtacaaaagtccacacccttcgtcacagttttgccaccgggcttctgaaaggcggagccgatttaaggacagtgcaggccctgttgggacacgctgaccttggaaccacgcaagtttacacccatgtagacgcgggtttgctcaaggaaagccaccggaagtatcttcccaagcttgaaaagcccggcatgcaaaaaatcaggcttgataaagcaaggagcggtcagtgttaa

SEQ ID NO: 4390 - protein, 151 aa, Unknown
  Obtained from environmental sample
  DOMAIN (1)...(124): Phage integrase family
  misc_feature (1)..(151): Xaa is any amino acid
MPCKGKRKQTEVCGFCGEAAARLKRYLEESRPLLAKGKTAAVGCQALFVTRNGKRLSRKGIWKNYSKYATLAGTGTKVHTLRHSFATGLLKGGADLRTVQALLGHADLGTTQVYTHVDAGLLKESHRKYLPKLEKPGMQKIRLDKARSGQC

SEQ ID NO: 4391 - DNA, 615 bp, Unknown
  Obtained from environmental sample
  misc_feature (1)..(615): n is a, c, g, or t
atgtatgtcgcgctgaacggtaatgcttcaggtgttgtggccgtcgccgatgtgctgaaacctcccagcaaggcggccattgagagctttcataaaatgggaatcgaagtcgccatgatcaccggggacaataaaaaaaccgcgaacgccatagcaagacaggtggggattgaccgtgtgcttgcggaagtcctgccgcaagacaaatccgccgaggtaaagaaactgcaaagtgaagggcgtaaagtagcaatggtcggggacggcataaacgacgctccggcgctggcacaggcggacatcggaatcgccataggaagcgggacggacgtggcgatggagtccgccgacattgtgcttatgcgttccgaccttattgatgttccaactgcaatcaatttgagcaagcggacaatccgcaatatcaagcaaaatctgttctgggcttttggctacaacgtactgggcattcccattgccgccggagttttgtatctctttggcgggccgctcttaagcccggttttcgccgcagccgccatgagcctgagttccgtatcggttttgacaaacgcgctaaggctgaaaaggtttaaggggccgcctcaggcatag

SEQ ID NO: 4392 - protein, 204 aa, Unknown
  Obtained from environmental sample
  misc_feature (1)..(204): Xaa is any amino acid
MYVALNGNASGVVAVADVLKPPSKAAIESFHKMGIEVAMITGDNKKTANAIARQVGIDRVLAEVLPQDKSAEVKKLQSEGRKVAMVGDGINDAPALAQADIGIAIGSGTDVAMESADIVLMRSDLIDVPTAINLSKRTIRNIKQNLFWAFGYNVLGIPIAAGVLYLFGGPLLSPVFAAAAMSLSSVSVLTNALRLKRFKGPPQA

SEQ ID NO: 4393 - DNA, 807 bp, Unknown
  Obtained from environmental sample
  misc_feature (1)..(807): n is a, c, g, or t
ttgggccagcttaaggaaagcatggcggaaataaaaacctggatgccccatactcagcgcctgggtgacgtgtttaaatccggttatggaaccttccttgcggcagaggttatcgaagcctgtaagtacgttaaaaacccggagccttataacggcgagtaccacggccatctttcggacgcggaagtccgggaactgggggtgcccctggtaaccggggatctgccgggctttacggttatcatcgggcccgcgccctcggacgaggaagccatggagcttatcaagggctaccagtccagggcaatctttgtctttctgatcggcggcatcatcgatcaggcaaaacggatgaagctcaacatgggcttccctgtgcgggtcgttcccgtggggccggatatctgggcggtggcccacatcatttcctttgtgaaccgggccgccatgatcttcggcgcggtacagcccggggatcaggaagaacttaacgattataccttccgcagaatacgggcctttgtgaacgcctttgaccctgtggcggacattgtggtcggcgcgggcgcgggggcaatcgccatgggtttcccggttatcaccaatgacaccaaggatatgtggaaagttcccaagagcatcatcattcaggaaaacaccaaggactttatcgatacttccctagaggccagggacatcaaactcaaaatcacaaagatcgatattcccgtttcgttttcactgcctttgaaggggagattatacgccgggcggatatgcaggttgacatggacgggtcccgcttga

SEQ ID NO: 4394 - protein, 268 aa, Unknown
  Obtained from environmental sample
  misc_feature (1)..(268): Xaa is any amino acid
MGQLKESMAEIKTWMPHTQRLGDVFKSGYGTFLAAEVIEACKYVKNPEPYNGEYHGHLSDAEVRELGVPLVTGDLPGFTVIIGPAPSDEEAMELIKGYQSRAIFVFLIGGIIDQAKRMKLNMGFPVRVVPVGPDIWAVAHIISFVNRAAMIFGAVQPGDQEELNDYTFRRIRAFVNAFDPVADIVVGAGAGAIAMGFPVITNDTKDMWKVPKSIIIQENTKDFIDTSLEARDIKLKITKIDIPVSFSLPLKGRLYAGRICRLTWTGPA

SEQ ID NO: 4395 - DNA, 600 bp, Unknown
  Obtained from environmental sample
  misc_feature (1)..(600): n is a, c, g, or t
atgaaaattgtgcgagcggcgatgatcggcgatgtggttggcgagccggggctgaaagcgctggaagacaagctgcctgatataattaaggagaatgcggtagattttaccgtggtgaacggcgaaaactcggcggacggtttcggcatgacagaagccgctttgaagcggatcataacttcaggcgcggatgtggtaacgtcggggaatcatgtctgggaaaaacgggaattctggaatgtacttgaaaccgatgagcgcatactgcgccccgcgaattatcccgccggctgcgtgggcaaaggctggcttcgcgtcgaaaagaccggacttaactggcttgtgattaatttgcagggcagggaattgatgacacccattgactgccccttccgctgttttgataatattgttaaagatattgacaacctgcctctcgtcattgttgatttccatgccgaatcaagccgtgaaaaagaagtgatgggctattacattgacggccgcgccgcgctggtagcgggtactcatactcatgtccaaactgcggacgagcgtattctgcccaatgaaaccgcctatatcaccgactgggaatga

SEQ ID NO: 4396 - protein, 199 aa, Unknown
  Obtained from environmental sample
  misc_feature (1)..(199): Xaa is any amino acid
MKIVRAAMIGDVVGEPGLKALEDKLPDIIKENAVDFTVVNGENSADGFGMTEAALKRIITSGADVVTSGNHVWEKREFWNVLETDERILRPANYPAGCVGKGWLRVEKTGLNWLVINLQGRELMTPIDCPFRCFDNIVKDIDNLPLVIVDFHAESSREKEVMGYYIDGRAALVAGTHTHVQTADERILPNETAYITDWE

SEQ ID NO: 4397 - DNA, 600 bp, Unknown
  Obtained from environmental sample
  misc_feature (1)..(600): n is a, c, g, or t
ttgcaggatttgaactacacgtacgaccagatggggaacattgccaaaataacggataacgcacagcagacgatatttttcaacgggcaggtagtaaaccccagccaaaccttcgaatacgatgccctgtacaggctgaccaaggcaacaggaagggagcatatcggaaacggagcggacgccgaaccagaagaaaacggataccataacgctcatacttctataccaaatgatgcaacagccttgcgcaattacatgcggcagtgggaatacgaccaggtagggaacatcttgagcctgatacacaccgcaaacaacggaaactggaaccgtcagtataattacgctgccgcgaataaccgtttgttgtcaaccaccgctggcaatagcactgtaaactatgcttacaaccagcacggctccatggcttccatgccccatctgcaggcgatggaatgggattttatggaaagattgtcccatatcacgagaggaacaacagaggcgtattataattatgacggaagcgggcagagaacaaggaaagttgtagaaaagaataatgttgttgaggaaagngctgtatctgggtggatttga

SEQ ID NO: 4398 - protein, 199 aa, Unknown
  Obtained from environmental sample
  misc_feature (1)..(199): Xaa is any amino acid
MQDLNYTYDQMGNIAKITDNAQQTIFFNGQVVNPSQTFEYDALYRLTKATGREHIGNGADAEPEENGYHNAHTSIPNDATALRNYMRQWEYDQVGNILSLIHTANNGNWNRQYNYAAANNRLLSTTAGNSTVNYAYNQHGSMASMPHLQAMEWDFMERLSHITRGTTEAYYNYDGSGQRTRKVVEKNNVVEEXAVSGWI

SEQ ID NO: 4399 - DNA, 834 bp, Unknown
  Obtained from environmental sample
  misc_feature (1)..(834): n is a, c, g, or t
atgatcgacatgaagcgcctggaagccctgggagcggaaatgctgggcaaagaggccgccctctttgttccttccggaacatttgggaatcaactggctctttttacctggtgcccacgggggaccgaggttgtcctgggggaagagagccacattgtggttcacgaggcgggcgctcccgcgattattgccggagtgcagcttcgctgtgcgcctgccccggacggcgttcttaagcccgcggacctgcgaaagcggctgcggaaacaggaccttcacgcgccagctacttcgttgatctgtctggagaacgcccattccgcgggaagggcggtaacgcttgcggacatggacgcggtaaagtccgttgccgaggagtggggcctgccggtgcatttggacggcgcacggatctttaacgccgcactcgcgctcggatgtacagcccgtgagattgccgccagggcggattcggtcatgctctgcctttccaagggtttgtgcgctcctgtcggctccctccttgtcgggccaaaggattttgtggatagagcgcggctgaaacggaagatcatgggcggcggcatgaggcaggccgggattcttgccgcggcgggcatcatcgccctgaacgagcatacgaccttgcttgcggcggaccacgagcgggcaaaaaagctggctcgcggccttgcggaaatcaagggcgttcaggttgatcagggcgcggttgatattaatatggtttttttccaatacgatatggcgggcgcgaaggaatcccggcaaattgtctgtcaaattgtcgagggttttgccaacagggtatattga

SEQ ID NO: 4400 - protein, 277 aa, Unknown
  Obtained from environmental sample
  DOMAIN (1)...(254): Beta-eliminating lyase
  misc_feature (1)..(277): Xaa is any amino acid
MIDMKRLEALGAEMLGKEAALFVPSGTFGNQLALFTWCPRGTEVVLGEESHIVVHEAGAPAIIAGVQLRCAPAPDGVLKPADLRKRLRKQDLHAPATSLICLENAHSAGRAVTLADMDAVKSVAEEWGLPVHLDGARIFNAALALGCTAREIAARADSVMLCLSKGLCAPVGSLLVGPKDFVDRARLKRKIMGGGMRQAGILAAAGIIALNEHTTLLAADHERAKKLARGLAEIKGVQVDQGAVDINMVFFQYDMAGAKESRQIVCQIVEGFANRVY

SEQ ID NO: 4401 - DNA, 429 bp, Unknown
  Obtained from environmental sample
  misc_feature (1)..(429): n is a, c, g, or t
ttgatttccgcaaggccgcgagccagcttttttgcccgctcgtggtccgccgcaagcaaggtcgtatgctcgttcagggcgatgatgcccgccgcggcaagaatcccggcctgcctcatgccgccgcccatgatcttccgtttcagccgcgctctatccacaaaatcctttggcccgacaaggagggagccgacaggagcgcacaaacccttggaaaggcagagcatgaccgaatccgccctggcggcaatctcacgggctgtacatccgagcgcgagtgcggcgttaaagatccgtgcgccgtccaaatgcaccggcaggccccactcctcggcaacggactttaccgcgtccatgtccgcaagcgttaccgcccttcccgcggaatgggcgttctccagacagatcaacgaagtagctggcgcgtga

SEQ ID NO: 4402 - protein, 142 aa, Unknown
  Obtained from environmental sample
  misc_feature (1)..(142): Xaa is any amino acid
MISARPRASFFARSWSAASKVVCSFRAMMPAAARIPACLMPPPMIFRFSRALSTKSFGPTRREPTGAHKPLERQSMTESALAAISRAVHPSASAALKIRAPSKCTGRPHSSATDFTASMSASVTALPAEWAFSRQINEVAGA

SEQ ID NO: 4403 - DNA, 468 bp, Unknown
  Obtained from environmental sample
  misc_feature (1)..(468): n is a, c, g, or t
atgaatgcggtaaagacaatagcgctgattgcggcggtcgcgtgggcggcgcctacgcaatcgggaacgtttatagatatcagagggaagatgtccgcgccgtcaaatcatcagtctggtaaagcaacggatgtgcccgaggcaaaacaaggcgctaggaaaggaccgcctaccggcggcagaagccgcgaaaacatcgagaacattgtattgcaaaacgcggcctccctgcgctacgtgtacaaccaacgcaagcgcgataaaccggggttaaccggtaaggtcacggtcgagttcgccgtcaacgaattcggaaaggtaatcttcgccaaagcaattgaatctacgacatctgacgccgaatttgacgcgacggtgatctcatgtgtgagaagttttgatttcgggaagatagactgcccgggcgatgtgacggaagttacttatccgtttgtcttttcggaatag

SEQ ID NO: 4404 - protein, 155 aa, Unknown
  Obtained from environmental sample
  SIGNAL (1)...(21)
  misc_feature (1)..(155): Xaa is any amino acid
MNAVKTIALIAAVAWAAPTQSGTFIDIRGKMSAPSNHQSGKATDVPEAKQGARKGPPTGGRSRENIENIVLQNAASLRYVYNQRKRDKPGLTGKVTVEFAVNEFGKVIFAKAIESTTSDAEFDATVISCVRSFDFGKIDCPGDVTEVTYPFVFSE

SEQ ID NO: 4405 - DNA, 582 bp, Unknown
  Obtained from environmental sample
  misc_feature (1)..(582): n is a, c, g, or t
atgaaggattatacggcggatatttgcggctacattgaaaaagtaaaaaaggttatagacacactcgacacgggtgaaattaaccggtttattaaccttctatgtgaagcccgtgaaaagggaaaacagatttttattatgggcaatggaggcagttcagcaaccgcctcccatttctgcaatgactttaacaaaggggtcagctgcgaactacaatcccaaaatcgttttaagtttatatgtcttaacgacaatgtttcgaccattacggcctatgcaaatgatgtttcctacggcgatatatttgtggagcagcttaaaaatttttacaatcccggtgatgttgtaattggtatctccggaagcggcaattcggaaaatgtaattaaagcgctggagtacgccaacgctaacgaaggaacaaccgtagcccttaccgggtataatggcggcaaattaaaaaagattgccatgtattcagttcatgtaaacgttgatgacatgcagattgtggaagacctgcacatgatgatggatcacctttccatgaaggttatttcaaacgtgacgggtaaagcatga

SEQ ID NO: 4406 - protein, 193 aa, Unknown
  Obtained from environmental sample
  misc_feature (1)..(193): Xaa is any amino acid
MKDYTADICGYIEKVKKVIDTLDTGEINRFINLLCEAREKGKQIFIMGNGGSSATASHFCNDFNKGVSCELQSQNRFKFICLNDNVSTITAYANDVSYGDIFVEQLKNFYNPGDVVIGISGSGNSENVIKALEYANANEGTTVALTGYNGGKLKKIAMYSVHVNVDDMQIVEDLHMMMDHLSMKVISNVTGKA

SEQ ID NO: 4407 - DNA, 813 bp, Unknown
  Obtained from environmental sample
  misc_feature (1)..(813): n is a, c, g, or t
ttgtggataaggagccgtttttggcgagcgcgattcggaactgccaaaatgatagcgggcttttctttttgcggcccgggtcaaggccttcaggcgatgatcccgtctggtaaacgtgcggcggacttttcctccctgggcggagaggaggaaatcaccgccagtcccctttccatgtcggaagagcagcagcgggcgttggacgccattatcaaaatggaaacgcctgagacttccggtgcggcccggctgttctatctttttggaatcacaggctcgggaaaaaccgaagtatttcttcgggccgcagaagccatgctaaaggaaggaaaatcggttatttatttggtgccggaaatttcccttacccatcaaacggcggatgtaatatggaaacgttttggaaacaccgccgcaacgattcattcggggatgagccctgccgctagactttccgagtggatgagaatcagaacaggacaggtcaaaatcgtggtgggaccgaggtcggcggtattcgcgccggtacttaacttgggcttgatcataattgatgaagagcacgacggttcctacaaatcgggaaacactcccagataccacgcccggcaaacggccatgagaagatgcgctgcggaaggagcgcgccttctcatgggttccgcaaccccttcggccgaggcgtggaagctcatgaaggatggggttataaaacgccttgacctttcccgccgcctttcgggtgggcaggtaccggatataattccggtaagccttgaaaaaacacgacggctgccttacccgcgagcttaa

SEQ ID NO: 4408 - protein, 270 aa, Unknown
  Obtained from environmental sample
  DOMAIN (56)...(226): Type III restriction enzyme, res subunit
  misc_feature (1)..(270): Xaa is any amino acid
MWIRSRFWRARFGTAKMIAGFSFCGPGQGLQAMIPSGKRAADFSSLGGEEEITASPLSMSEEQQRALDAIIKMETPETSGAARLFYLFGITGSGKTEVFLRAAEAMLKEGKSVIYLVPEISLTHQTADVIWKRFGNTAATIHSGMSPAARLSEWMRIRTGQVKIVVGPRSAVFAPVLNLGLIIIDEEHDGSYKSGNTPRYHARQTAMRRCAAEGARLLMGSATPSAEAWKLMKDGVIKRLDLSRRLSGGQVPDIIPVSLEKTRRLPYPRA

SEQ ID NO: 4409 - DNA, 384 bp, Unknown
  Obtained from environmental sample
  misc_feature (1)..(384): n is a, c, g, or t
atggttggcggtgtttcaagcattaatgtacccaccctcagctacacgtcaggacaatatgggaaaatggctcttcccgtcgattcttcctggcttatttactcccactttgaacatgtttccggtattcccgccccggacggaacccagggaatatcgatcaataagttaaaccttctggacgtacttatcgggctggtcaaccagatcaataaaactcccgccgctcagactccggcaaacctgaatcctacaaacggtgttgatgccttaatcgagaatatgcaaaatctaatccggcaggcccagatcgccagcgaggcaataccatactccccctcacccaacgtggatagtggtttgctgtttagcctgtttagctag

SEQ ID NO: 4410 - protein, 127 aa, Unknown
  Obtained from environmental sample
  misc_feature (1)..(127): Xaa is any amino acid
MVGGVSSINVPTLSYTSGQYGKMALPVDSSWLIYSHFEHVSGIPAPDGTQGISINKLNLLDVLIGLVNQINKTPAAQTPANLNPTNGVDALIENMQNLIRQAQIASEAIPYSPSPNVDSGLLFSLFS

SEQ ID NO: 4411 - DNA, 639 bp, Unknown
  Obtained from environmental sample
  misc_feature (1)..(639): n is a, c, g, or t
atgccgcaaaacaaactcacagatatcgacgagcaaatacaagaggccgccgccgtcatccgccgcggcggagtggtcgcttttcccaccgagacggtgtacgggcttggcgccaacgcttttgacgccaaggctgtggcgcgcgtctttgaggttaagcggcggccctattttgatccgttgatactgcacgtctgcgaaaaagattggctcggtgacttggcggttgatgtcccgaaggacgccgaaaagttgatcgacgcgctttggcccgggccgctgaccgtcgtccttcccaagaagcccgttgttcccgacatcgcgacctccggtctgccgggcgtcgcgctgcgtctgccgtcaaacgagatcgcccgtgagctgatacgcgccgccggcgttcccatagccgctcccagcgcgaatctgttcggctccgtgagccccactgcggcggagcatgttagggcgcagctcggcggggcggtggatatgattatcgacgggggggagtgctcggtggggatagagtccaccatcatctcgtttatgggcgatcagcctatgctgttgcgtccgggcggtgtggcgcttgaggatatagaggcggttttggggaaaggtggcgataccggataa

SEQ ID NO: 4412 - protein, 212 aa, Unknown
  Obtained from environmental sample
  DOMAIN (17)...(194): yrdC domain
  misc_feature (1)..(212): Xaa is any amino acid
MPQNKLTDIDEQIQEAAAVIRRGGVVAFPTETVYGLGANAFDAKAVARVFEVKRRPYFDPLILHVCEKDWLGDLAVDVPKDAEKLIDALWPGPLTVVLPKKPVVPDIATSGLPGVALRLPSNEIARELIRAAGVPIAAPSANLFGSVSPTAAEHVRAQLGGAVDMIIDGGECSVGIESTIISFMGDQPMLLRPGGVALEDIEAVLGKGGDTG

SEQ ID NO: 4413 - DNA, 375 bp, Unknown
  Obtained from environmental sample
  misc_feature (1)..(375): n is a, c, g, or t
atgatggtggactctatccccaccgagcactcccccccgtcgataatcatatccaccgccccgccgagctgcgccctaacatgctccgccgcagtggggctcacggagccgaacagattcgcgctgggagcggctatgggaacgccggcggcgcgtatcagctcacgggcgatctcgtttgacggcagacgcagcgcgacgcccggcagaccggaggtcgcgatgtcgggaacaacgggcttcttgggaaggacgacggtcagcggcccgggccaaagcgcgtcgatcaacttttcggcgtccttcgggacatcaaccgccaagtcaccgagccaatctttttcgcagacgtgcagtatcaacggatcaaaatag

SEQ ID NO: 4414 - protein, 124 aa, Unknown
  Obtained from environmental sample
  misc_feature (1)..(124): Xaa is any amino acid
MMVDSIPTEHSPPSIIISTAPPSCALTCSAAVGLTEPNRFALGAAMGTPAARISSRAISFDGRRSATPGRPEVAMSGTTGFLGRTTVSGPGQSASINFSASFGTSTAKSPSQSFSQTCSINGSK

SEQ ID NO: 4415 - DNA, 417 bp, Unknown
  Obtained from environmental sample
  misc_feature (1)..(417): n is a, c, g, or t
atggctttcgtcttttacaacacgcttggccgtgaaaaacagccttttttgcccctgcaagaaggaaaagtcggattttacggctgcggacctacagtttataatttcgcccatataggcaatttacgcgcctatgtgcaccatgatattctggtccgctcgctgcgcagagcgggttttgacgtaaaccatgtaatgaacattaccgatgtaggccatctttccgacgacgcggacgaaggcgaagataaaatggtaacaagcgcgcaagagcgcggcaagagcgttcttgaaatcgctgatttttacacaaaggttttttttaacgacacggacagaatgaacattacgcgcccgacggttatctgtaaagctaccgagcatataggcgaaatgatttctcttattcacggatag

SEQ ID NO: 4416 - protein, 138 aa, Unknown
  Obtained from environmental sample
  DOMAIN (15)...(138): tRNA synthetases class I (C) catalytic domain
  misc_feature (1)..(138): Xaa is any amino acid
MAFVFYNTLGREKQPFLPLQEGKVGFYGCGPTVYNFAHIGNLRAYVHHDILVRSLRRAGFDVNHVMNITDVGHLSDDADEGEDKMVTSAQERGKSVLEIADFYTKVFFNDTDRMNITRPTVICKATEHIGEMISLIHG

SEQ ID NO: 4417 - DNA, 918 bp, Unknown
  Obtained from environmental sample
  misc_feature (1)..(918): n is a, c, g, or t
ttgatggcgagcgaccctcttacggacttgatgtattcaatggctgtccttgatatgattcataaccagtctccggacatatcacaaggcgtttcaggcacaggactgaaaaaatttaaaggacagcagggagccggggatcagggaatgatgttcggttatgcgtgcaatgaaacaaaagagcttatgcccatgccgataatgcttgcccacaaaatacttcttaacgcctcaaaactgcgtaaaaacaaaaccattaaatggctgcgtccggactcaaaaagccaggtaacaatagaatatgaagggtttaaacccgtgcgcattgacacggttgttgtctctcatcaacatgatccggatgtttcctatagtgaaattgaaaaaactgttatagaaaaaattattacccctgtacttgaacctacggggttgctcgataaaaaaacaaaatactttgtgaaccccacaggacggtttgtaatcggcggtccgttcggggattcggggcttaccggacgaaaaattatcgtagacacctacggcggcatgggacgccacggcggcggcgctttttcgggcaaagacccaaccaaagttgaccgttccgccgcctacgccgctcgttacgtcgccaaaaacattgtcgccgccaaacttgccgaccgctgtgaaatccagcttgcctacgccattggagttcctttccctgtctcagtaatggtagatacattcgggactgcgaaagtggaagaaaaacaaatagaaaaagctataggaaaagttttcgatttaagcccctcgggaatatcaagatgcttgatctgcgcaagccgatctatcttaaaaccgcttcttacggtcatttcggcagatcggaattctcatgggaaaagaccgataaaggtgaggaactaa

SEQ ID NO: 4418 - protein, 305 aa, Unknown
  Obtained from environmental sample
  DOMAIN (162)...(300): S-adenosylmethionine synthetase, C-terminal domain
  misc_feature (1)..(305): Xaa is any amino acid
MMASDPLTDLMYSMAVLDMIHNQSPDISQGVSGTGLKKFKGQQGAGDQGMMFGYACNETKELMPMPIMLAHKILLNASKLRKNKTIKWLRPDSKSQVTIEYEGFKPVRIDTVVVSHQHDPDVSYSEIEKTVIEKIITPVLEPTGLLDKKTKYFVNPTGRFVIGGPFGDSGLTGRKIIVDTYGGMGRHGGGAFSGKDPTKVDRSAAYAARYVAKNIVAAKLADRCEIQLAYAIGVPFPVSVMVDTFGTAKVEEKQIEKAIGKVFDLSPSGISRCLICASRSILKPLLTVISADRNSHGKRPIKVRN

SEQ ID NO: 4419 - DNA, 813 bp, Unknown
  Obtained from environmental sample
  misc_feature (1)..(813): n is a, c, g, or t
atggcggttttatctattcaatctcatgtggtttacggatacgcgggaaataccgcagcggttttccctttgcagcggcttggacgcgaagtttgggcaattaacacggttgagttttccaaccatacgggttacggctcttggaaaggaaaagttctgggagcggaattggcggcggaacttgtcgcagggcttgaagaacgaaacgcgcttaaccgctgcgaggcggttctttcaggctacttgggcgacgcttccgtcgccatggctattgtggatgcggttaaaaaagtgcgaagccaatcacccggcgcgctttacacctgcgatcccgtaatgggcgacgtggggcgcggtttttatgtaaaacccgatattcccgatatttttaaaaaagaacttataccgcttgcggatattgttacgccgaaccagtttgagcttgaggctataacaggattaaatacgcaaaaattagacgacgcgttaaaagcggtaaagctcctgcacgaaatgggaccttccattatccttgtgacaagttacaaggaaaaagaaggcgagctttccatgattgcatcggataaaaaagaaatttataaaattacaacgcctgaattgccgctcggcaagggcgtggcgggaacaggagacatgaccacggcggtttttttatcgcgctatttggaaaccaaaaaccttaaaaaaacgctggaactgtgcaccgcctctgttttcggcattttagacgccagttttaaagcgtcggataaaaacgaaaaattgatagaactgaaactcgtgccgatctga

SEQ ID NO: 4420 - protein, 270 aa, Unknown
  Obtained from environmental sample
  DOMAIN (39)...(259): Phosphomethylpyrimidine kinase
  misc_feature (1)..(270): Xaa is any amino acid
MAVLSIQSHVVYGYAGNTAAVFPLQRLGREVWAINTVEFSNHTGYGSWKGKVLGAELAAELVAGLEERNALNRCEAVLSGYLGDASVAMAIVDAVKKVRSQSPGALYTCDPVMGDVGRGFYVKPDIPDIFKKELIPLADIVTPNQFELEAITGLNTQKLDDALKAVKLLHEMGPSIILVTSYKEKEGELSMIASDKKEIYKITTPELPLGKGVAGTGDMTTAVFLSRYLETKNLKKTLELCTASVFGILDASFKASDKNEKLIELKLVPI

SEQ ID NO: 4421 - DNA, 897 bp, Unknown
  Obtained from environmental sample
  misc_feature (1)..(897): n is a, c, g, or t
atggtcagaatcggccgagggactgctggacaaaacccgctggaggacgcgcagatagggctgtacacgggggacacaaaggaaataaggcccgtgaccatagccacctaccagatactgacctaccgcaaatccaaggacgggccgttcgagcatttcaaacttttcgaggcggccaactggggcctggtcatctacgacgaagtccacatgctgccggcccccgtgttccgtgcggtggcggagctgcaggccaagcgccgcttgggcctcaccgccacgctggtcagggaggacggcaaagaagaggacgtgttcagcctgataggcccaaagcgggtggacatcccatggaaagtgctcgaaaaggacggctacatcgcctccgcccactgcctggaaatccgcgtgcccctgcccaccaacgagcgcatggactatgccgtggcggacaacaggggacgtttcaggatagcctccgaaaacaccctgaagcacgccatcatcgacgagctgctttcaaagcacacaaaggacagcgtgctgataatcggccagtacctcagccagctccgcgccataggcaagcgccttggcgccccggtgctgaccggccagacaccggagaaggagagggaggtcctctacggaaagttcaggcggggcgagctgcgcgtgctgatagtcagcaaagtggccaactttgccatagacctgcccgacgccagcgtggccatacaggtcagcggcacattcggcagccgccaggaggaggcccagaggctgggccgcatcctgcgccccaagcccggcagcaacatctcgttcttttacagccttgtctctagggacacgtcccagcaggagttcgccaggaaccgcccagttgttttttga

SEQ ID NO: 4422 - protein, 298 aa, Unknown
  Obtained from environmental sample
  DOMAIN (197)...(269): Helicase conserved C-terminal domain
  misc_feature (1)..(298): Xaa is any amino acid
MVRIGRGTAGQNPLEDAQIGLYTGDTKEIRPVTIATYQILTYRKSKDGPFEHFKLFEAANWGLVIYDEVHMLPAPVFRAVAELQAKRRLGLTATLVREDGKEEDVFSLIGPKRVDIPWKVLEKDGYIASAHCLEIRVPLPTNERMDYAVADNRGRFRIASENTLKHAIIDELLSKHTKDSVLIIGQYLSQLRAIGKRLGAPVLTGQTPEKEREVLYGKFRRGELRVLIVSKVANFAIDLPDASVAIQVSGTFGSRQEEAQRLGRILRPKPGSNISFFYSLVSRDTSQQEFARNRPVVF

SEQ ID NO: 4423 - DNA, 513 bp, Unknown
  Obtained from environmental sample
  misc_feature (1)..(513): n is a, c, g, or t
atgacaaaagttcccgcttataatgataaaaatcttatctatacatttcacttttacgatcctcatatttttacacatcaaggcgcgacatggaataagccttctctggcgcctttatccggccttccgttcccgtttgataaaaacaaaatgccgaaaccgcatgaaacatttatcggaacatgggtggaagcctcgcttaactcttacgaagaggattctaaattaacaaaattaagctctacgctggataaggcggaaaaattttcaaaagagaggaacattcccgttttttgcggcgaattcggcgtgtttatgaagcagagtcctcatgaagaccgcgtcaaatggtataagtttatctgcggtgagcttgaaaaaagaaatatcccgtgggcctgctgggattatttcggaggtttcggtattttcaaaactgaaaaaaggggggatttcccttccgatttggatattgatgtggttaacgccattggattaaaagtaaaagagtga

SEQ ID NO: 4424 - protein, 170 aa, Unknown
  Obtained from environmental sample
  misc_feature (1)..(170): Xaa is any amino acid
MTKVPAYNDKNLIYTFHFYDPHIFTHQGATWNKPSLAPLSGLPFPFDKNKMPKPHETFIGTWVEASLNSYEEDSKLTKLSSTLDKAEKFSKERNIPVFCGEFGVFMKQSPHEDRVKWYKFICGELEKRNIPWACWDYFGGFGIFKTEKRGDFPSDLDIDVVNAIGLKVKE

SEQ ID NO: 4425 - DNA, 504 bp, Unknown
  Obtained from environmental sample
  misc_feature (1)..(504): n is a, c, g, or t
ttgtctgtgtccaaagaacccctttcccccaaaaatgactttgttttcaagctgcttttcggtgagtggacgcgcttggacatcttgcgggcttttcttcaggccgtcctggatctgccggctgaagaatacgcgcggctgagtattgtcgatccacatttacaaagagaatccccggatgacaagctcggagtgctggacgttaaaatccataccaccacgggcaaggtcatcgacgtggagatacaagtcgaaccccaaggccatatttgggaacgggtcttgttttacgccgcccgcctgaccacggagcagatgaaaatcggccagccttataaagaaatcaagaaagccgtcagcataataattgtggattgggacattactccgaaagacccggagcattaccaccaccgcttccggctgttcgatgaacggacggggtatcgcttcccggacctgtttgaaatcaataccctggaactgccgaaactgcccgggtga

SEQ ID NO: 4426 - protein, 167 aa, Unknown
  Obtained from environmental sample
  misc_feature (1)..(167): Xaa is any amino acid
MSVSKEPLSPKNDFVFKLLFGEWTRLDILRAFLQAVLDLPAEEYARLSIVDPHLQRESPDDKLGVLDVKIHTTTGKVIDVEIQVEPQGHIWERVLFYAARLTTEQMKIGQPYKEIKKAVSIIIVDWDITPKDPEHYHHRFRLFDERTGYRFPDLFEINTLELPKLPG

SEQ ID NO: 4427 - DNA, 636 bp, Unknown
  Obtained from environmental sample
  misc_feature (1)..(636): n is a, c, g, or t
gtgggggggaaaggtttggaacggctgatgcgggggcagggattatgcgccagggagaggaggaaggccgtatatacgaccgattcccgccaccggctgccattggcggagaatatcctgaaccgggatttccgggcgtcgcttcccggggagaaatgggtatcggacataacgtattgcgggacaaaggaaggctggctttatttgacggtggtagtcgatctttacgacaggaaggttgtcggctggtcgatgtccgacggccttacggccgggcagacgtgcctcgcgttggaaatggcggtggggaaccgccccccgcgggaagggctcatatttcattccgaccgcggcgtgcaatactgcagcgacgaatttcgttccacgttaaaacggctttgccccacggccgtccagagcatgagccggaaagggaactgctgggacaacgcctgcgcggagagttttttcaagacattgaaagctgagcttgacattctggaaaaaggaggcagcgcgaaacaaattaaaacagcggtatttgaatatatcgaggcttattataacaggtgtcgtagacattctgctcttggatatgctataccaatagcattagcacctaacgatgcggcttaa

SEQ ID NO: 4428 - protein, 211 aa, Unknown
  Obtained from environmental sample
  DOMAIN (45)...(207): Integrase core domain
  misc_feature (1)..(211): Xaa is any amino acid
MGGKGLERLMRGQGLCARERRKAVYTTDSRHRLPLAENILNRDFRASLPGEKWVSDITYCGTKEGWLYLTVVVDLYDRKVVGWSMSDGLTAGQTCLALEMAVGNRPPREGLIFHSDRGVQYCSDEFRSTLKRLCPTAVQSMSRKGNCWDNACAESFFKTLKAELDILEKGGSAKQIKTAVFEYIEAYYNRCRRHSALGYAIPIALAPNDAA

SEQ ID NO: 4429 - DNA, 357 bp, Unknown
  Obtained from environmental sample
  misc_feature (1)..(357): n is a, c, g, or t
ttgaaactttcggcgggacagatgcagcggcttatgattgcccgtatctttatgctaaaaccaaaactgctgattgccgacgaaccgacctcgatgattgacgcctgttcacgtgctactattctggaaatgctgttgaaacttcgtgaagaggtaaacatgaccattgtgtttatcacccatgatatgggcctggcttactatatttccgatacgatttacatcatggaaaagggaatcattgtagaacaggggacggccgacgaagccatcctcaatccgaaatcggattataccaaacggcttttgagcgatgtcccaaaaatataccagccctgggattttagttctaaataa

SEQ ID NO: 4430 - protein, 118 aa, Unknown
  Obtained from environmental sample
  DOMAIN (1)...(79): ABC transporter
  misc_feature (1)..(118): Xaa is any amino acid
MKLSAGQMQRLMIARIFMLKPKLLIADEPTSMIDACSRATILEMLLKLREEVNMTIVFITHDMGLAYYISDTIYIMEKGIIVEQGTADEAILNPKSDYTKRLLSDVPKIYQPWDFSSK

SEQ ID NO: 4431 - DNA, 888 bp, Unknown
  Obtained from environmental sample
  misc_feature (1)..(888): n is a, c, g, or t
ttggccgagttcaacgcaaatgtaaaaataattatatgtgatataaaacctttttccctaaaggaactttttttctttccgcttaaaacagcgcggcaaattaatcgcgctgacctttttttctcgccgtatttcaatatcccgcgctctgtaacaattccaatttttaccgcaattcacgacattatttttcctgacatgccggaactaacgtctaaaatcggtcttgccgcgcgtatgtggttttaccgccgcgcttacaaaaaatcacaaaaaatatttaccgtttccgaattttcaaggtcaagaatacaacatcaccttggaacaaaaaaacccgttatagtcacccattcggcgatacagccgatatttcttgaataccgcgctaacattaaaaatgtaaataaaacacaaacgcttgtttttattggcaatataaaaaaacacaagggacttgatattctgcttgacgcttttagtctggcaaaaaaagaaggactgccccaccgattagtcgttatcggcgcaaaagagaattttcgcacttcggacaatacggtattacaaaaaatcgaatcccttggcggcgaagccgtaacatttacgggttttatttcagatgaacaagttatggagtatctttcaaaagccgctcttcttgtacaaccttcattatatgagggtttttgcctgccgccgcttgaggctatggtcttgggcactaatgcgctgatttccgatattctcgtactaaaagagatttattcaggctatcctgtaacattcttccgcagcggggacccatcggacttaaaagaaaaattgatgtatctattgtttataaaaaaacatcttccattgttttatcagatgatttattattaa

SEQ ID NO: 4432 - protein, 295 aa, Unknown
  Obtained from environmental sample
  DOMAIN (125)...(294): Glycosyl transferases group 1
  misc_feature (1)..(295): Xaa is any amino acid
MAEFNANVKIIICDIKPFSLKELFFFPLKTARQINRADLFFSPYFNIPRSVTIPIFTAIHDIIFPDMPELTSKIGLAARMWFYRRAYKKSQKIFTVSEFSRSRIQHHLGTKKPVIVTHSAIQPIFLEYRANIKNVNKTQTLVFIGNIKKHKGLDILLDAFSLAKKEGLPHRLVVIGAKENFRTSDNTVLQKIESLGGEAVTFTGFISDEQVMEYLSKAALLVQPSLYEGFCLPPLEAMVLGTNALISDILVLKEIYSGYPVTFFRSGDPSDLKEKLMYLLFIKKHLPLFYQMIYY

SEQ ID NO: 4433 - DNA, 414 bp, Unknown
  Obtained from environmental sample
  misc_feature (1)..(414): n is a, c, g, or t
atgaataatctaaaagaatctttcggaaaagattccaagtggaaatggatctttgtagaactggaaggacgttatgccaccgtcgcgaaaaatctgattgacctgcgcgattattttgttaacagcgattttgaatcgccgcattacgagtctaccgtccgtcacgtaagaaaggttagggagcttctggagcaatccgcggacgggtaccggaaaaaatatgaactttccacaaaatccattgatgattttcaaaagggcataaacttcctttcagccttaaaacggctggatatttttaccagggatcatgattcggctgtgaccacgaaaaagaaaattgaaacatggacggccaagatgactgctgacgcggccgcgcaaaagaaagagcaggcggacgccagaaggtaa

SEQ ID NO: 4434 - protein, 137 aa, Unknown
  Obtained from environmental sample
  misc_feature (1)..(137): Xaa is any amino acid
MNNLKESFGKDSKWKWIFVELEGRYATVAKNLIDLRDYFVNSDFESPHYESTVRHVRKVRELLEQSADGYRKKYELSTKSIDDFQKGINFLSALKRLDIFTRDHDSAVTTKKKIETWTAKMTADAAAQKKEQADARR

SEQ ID NO: 4435 - DNA, 363 bp, Unknown
  Obtained from environmental sample
  misc_feature (1)..(363): n is a, c, g, or t
gtgggccctactttcggatcaaaatccaaaatggaacttcagaccctcagttttgaaaccgctaaagtactttcagacgccggcttcaaggtctccatcatcaccgacgcgcctgtaatcccccagcagagcctttcgctctgtgccggattcgcggtcaaagccggaatgaacgaagaaaaggcatggagagcgatcacgatcacgccagccgaagcgatgggcgtttctgacagggttggcagccttgaaatcggcaaggacgccgacatcgtcatttttaacggagacccgcttaaagacataggaagtacggtcgcgtacacgataatcgacgggaacatagtgtataagggggaatag

SEQ ID NO: 4436 - protein, 120 aa, Unknown
  Obtained from environmental sample
  misc_feature (1)..(120): Xaa is any amino acid
MGPTFGSKSKMELQTLSFETAKVLSDAGFKVSIITDAPVIPQQSLSLCAGFAVKAGMNEEKAWRAITITPAEAMGVSDRVGSLEIGKDADIVIFNGDPLKDIGSTVAYTIIDGNIVYKGE

SEQ ID NO: 4437 - DNA, 798 bp, Unknown
  Obtained from environmental sample
  misc_feature (1)..(798): n is a, c, g, or t
atgactattggcttgccggagatcatcgaaggagcaccggcggaacggctggagggcttttacaaaaaatggtacaaggcggataacatggctctaatccttgtgggcgattttaacggagccgcgcttgaggtatcgttagtcgatcattttatgatagagaaaccgtcccagccgacgaaccggcctttatacgatctgcctcttccccaaaaagggaatgtggaaatacttagccttaccgactctgaactgaccgccgcctatataaacctttattttaaacgcagcccgcaggcgaggcggggcgacctggcgtattatcgcagcgaaataatcgactaccttatcgacaccatgcttgagttgcgttttgaagaggcgctcctgaaacctgaaacccctcatgtaagcgttaatgcgggaaccgccagttatgcgacaacttcgcggttttatgttttgatgtcccaggcaaaaacaggcagtgccgaggcatgccttgaggatctgctgaaaataaaagaaactatgctccgttacggctttaccgattcggagatggcgacagcggcggaaatgctggtttcggatttgcagaaactggtacaggaaaaggacaagcagcaatcgcaaaaatacattaactcgctgactgattattatcttaaaggcggaaattacgcggatgctgaatgggagttgaacacagtctcgcagatgctgcctcatatcaaagcaaaagaccttaacgcggctgtaaaaactattttgcgtcacgcgacattcaggtgttaa

SEQ ID NO: 4438 - protein, 265 aa, Unknown
  Obtained from environmental sample
  DOMAIN (11)...(195): Peptidase M16 inactive domain
  misc_feature (1)..(265): Xaa is any amino acid
MTIGLPEIIEGAPAERLEGFYKKWYKADNMALILVGDFNGAALEVSLVDHFMIEKPSQPTNRPLYDLPLPQKGNVEILSLTDSELTAAYINLYFKRSPQARRGDLAYYRSEIIDYLIDTMLELRFEEALLKPETPHVSVNAGTASYATTSRFYVLMSQAKTGSAEACLEDLLKIKETMLRYGFTDSEMATAAEMLVSDLQKLVQEKDKQQSQKYINSLTDYYLKGGNYADAEWELNTVSQMLPHIKAKDLNAAVKTILRHATFRC

SEQ ID NO: 4439 - DNA, 582 bp, Unknown
  Obtained from environmental sample
  misc_feature (1)..(582): n is a, c, g, or t
atggaggttggttcctttatcggacttgccgccgtcaccggaggggatctccacatcgaagggacatgtccccaggatttgcgcccggcgaaaatcgcctttggcaagctgggcatttcatgggcgcatgagggaacaaccatacatgtcccccagaaacagccaatggaggttaactgcgatatcggcggcatggttcccaagatcgacgacgcgccatggcccggctttccccccgatcttaccagcattatcaccgttgtagctacgcaggtaaaaggaacagtgttgatccacgaaaaaatgtttgaatcacggatgttctttgtggacaaactcatcggcatgggggcgcgaatagtgttatgcgatccccatcgggctgttgtttccggccccgcaaaactacacggctcggaacttaccagccccgatgtccgcgccggcatggcgatgctcatagccgccctctgcgccgagggcaaaagcgttatacgcaacgtctaccagattgaacgcggctacgaaagcctcgtggaaagactttccggtttgggagcccttgtaacaaagaacaattaa

SEQ ID NO: 4440 - protein, 193 aa, Unknown
  Obtained from environmental sample
  misc_feature (1)..(193): Xaa is any amino acid
MEVGSFIGLAAVTGGDLHIEGTCPQDLRPAKIAFGKLGISWAHEGTTIHVPQKQPMEVNCDIGGMVPKIDDAPWPGFPPDLTSIITVVATQVKGTVLIHEKMFESRMFFVDKLIGMGARIVLCDPHRAVVSGPAKLHGSELTSPDVRAGMAMLIAALCAEGKSVIRNVYQIERGYESLVERLSGLGALVTKNN

SEQ ID NO: 4441 - DNA, 891 bp, Unknown
  Obtained from environmental sample
  misc_feature (1)..(891): n is a, c, g, or t
atgcccggtggtttaaaggaatgtgttgagcattatgttggaagaaaactaagagttgataaatcggaaggaccgaaaattgtgtacggtgccttgaatgaatacgccaagcaaccggtgtcaaaacttcccgttctgttcgatgtgttgaactgcgctgaaggttgcaatgctggaactggttgcttgcatgagattgatatttttgagattaatactaaaatggatgccttgcgccaagccgcaattagagaagataacctgaaatatatggaagatttattcaaaaaatttgatgaaactttgcacttggaagattttatcagaagttatgttccaactacagtaaggtctattcctattaaccgagaaaaaatagatgcagcttttatggctatgaacaaagtagatgacgcatctagaaatttcaactgcgcggcttgcggttgcgaaacttgtttggaaatggctgagaaaatagcaaaaggcataaatgttcccgaaaactgcgtgcaaaaaatgcacagcgaggttattcagaaacacgaagaagcgaagaccattttaagcagctctataaatagctatgaaaatattttcaacgaaactgcccaaatcagaaaaatgactgaaaatatcaccgcaagcatgaccgaagtgaccgatgccgttgctcagtacaatcaaatggtaacagatatagagagaatatccgaaaaagtcaacatcttttctcttaatgcatctgtagaagctgcaaaagctgggcagcacgggcttgcctttggcgtggttgcaaaagaaataagaagcctcgcccagagttcggcagattcagcaatgccaacaaaagaaacggcagaacaagcaaaacgtgcattaccacagtaa

SEQ ID NO: 4442 - protein, 296 aa, Unknown
  Obtained from environmental sample
  DOMAIN (142)...(173): Putative Fe-S cluster
  misc_feature (1)..(296): Xaa is any amino acid
MPGGLKECVEHYVGRKLRVDKSEGPKIVYGALNEYAKQPVSKLPVLFDVLNCAEGCNAGTGCLHEIDIFEINTKMDALRQAAIREDNLKYMEDLFKKFDETLHLEDFIRSYVPTTVRSIPINREKIDAAFMAMNKVDDASRNFNCAACGCETCLEMAEKIAKGINVPENCVQKMHSEVIQKHEEAKTILSSSINSYENIFNETAQIRKMTENITASMTEVTDAVAQYNQMVTDIERISEKVNIFSLNASVEAAKAGQHGLAFGVVAKEIRSLAQSSADSAMPTKETAEQAKRALPQ

SEQ ID NO: 4443 - DNA, 705 bp, Unknown
  Obtained from environmental sample
  misc_feature (1)..(705): n is a, c, g, or t
ttgttttttgatgaaattcaaagctctatacaggcaatttcctctctgcgttttttttacgaggaatacggtgaactgcacgttattgccgcaggctctcttttggaatttgcttttcaggagataccgtcattcggagtagggcgtgtgcgttctatgtttatgtatccaatgagtttttttgaatttttaaatgcctgtaatcatcaattacttctgcaagctattcaaaaagcggattgtaaaaatcctttgtcagacgccgttcataaaaaagcggttgaacttttaagaatattttttattcttggcggaatgcctgaggcggtgtccgcttatgttaatggcagcgatttgctttcctgtcagcgaattttagacgatttgataatttcattgaggtcggattttgctaaatacaaaaaaaaagtttctacgtcgcaattatcagttgtgtttgattcagttacggcgcanatgggaaagaaatttgtatatacgaatatatcanatgattacaatagcaggcaattaaaagaaagtatggaacttttaataatgtcggggctggtaattcctgttgttcattcagcggcaaacggtatatcgcttggggcggaaattgacaataaaaagaaaaaactccttttattggatacgggcgtttccaaagattattggggttaccgttatctgatttactga

SEQ ID NO: 4444 - protein, 234 aa, Unknown
  Obtained from environmental sample
  misc_feature (1)..(234): Xaa is any amino acid
MFFDEIQSSIQAISSLRFFYEEYGELHVIAAGSLLEFAFQEIPSFGVGRVRSMFMYPMSFFEFLNACNHQLLLQAIQKADCKNPLSDAVHKKAVELLRIFFILGGMPEAVSAYVNGSDLLSCQRILDDLIISLRSDFAKYKKKVSTSQLSVVFDSVTAXMGKKFVYTNISXDYNSRQLKESMELLIMSGLVIPVVHSAANGISLGAEIDNKKKKLLLLDTGVSKDYWGYRYLIY

SEQ ID NO: 4445 - DNA, 723 bp, Unknown
  Obtained from environmental sample
  misc_feature (1)..(723): n is a, c, g, or t
atgcatgatgataatccgcgttgtcctctaacaacgacccctactccccactccccactccctactccctatcttgacataggcgttaatctgatgagtcccgcttttgaccatgaccgtgaagaggttattgccagggcggaagccgcgggggtaaagacgcttatcatcacaggcagcgacattgaaagcagcatcagggcggcggcatttgtcagagaaaatgcccgtctgaattgtaagtcaacagccggggtgcatccccacaacgcgaaagactggaatgacaatatccttgtccggctggaagagattgccacccatgaacctccgcaaaatggagtaattgctgctatcggggaatgtggcctcgattacaaccggaacttttccccacaagacgcccagcgaaaatgttttgaggaccaacttaaacttgcggtcagaattggtaagccggtgtttctccatgaacgggacgcttttgacgatttcttttctatattaatgatttaccgcaccggtttgcccggcgctgtggttcattgttttacaggcgggacgcgggaactggaagcctatctttccattgactgttacatcggcatcaccggctgggtctgcgacgagaggcggggcagccatcttgtccccctggctaggcatatccccgccgaccgtctgcttctggaaaccgacgcccccttatcggttgccacgtag

SEQ ID NO: 4446 - protein, 240 aa, Unknown
  Obtained from environmental sample
  DOMAIN (21)...(237): TatD related DNase
  misc_feature (1)..(240): Xaa is any amino acid
MHDDNPRCPLTTTPTPHSPLPTPYLDIGVNLMSPAFDHDREEVIARAEAAGVKTLIITGSDIESSIRAAAFVRENARLNCKSTAGVHPHNAKDWNDNILVRLEEIATHEPPQNGVIAAIGECGLDYNRNFSPQDAQRKCFEDQLKLAVRIGKPVFLHERDAFDDFFSILMIYRTGLPGAVVHCFTGGTRELEAYLSIDCYIGITGWVCDERRGSHLVPLARHIPADRLLLETDAPLSVAT

SEQ ID NO: 4447 - DNA, 372 bp, Unknown
  Obtained from environmental sample
  misc_feature (1)..(372): n is a, c, g, or t
gtgagcgcatgggaaataattaccagtgaaaattacgatgactggtttcaagaacaaacagaggacgataaagtaataattcgttcaaaagtttatttgctcagcgagtatgggccgaatttgaatcgtccccatgcggatacactcaaaggaagcaaagaactggctaatctcaaggagcttcgggctaaaacagatgcccatgagttcagagttgcttatatttttgatcctgaacgaaaaggactgctccttatcggcggggataaaaaaggcaaaaaccagaaaaagttttataaggatctgataagggaggcggagcaaatctacgctgcttatctgaaaaagcgcactaaagaaaaggagaagtaa

SEQ ID NO: 4448 - protein, 123 aa, Unknown
  Obtained from environmental sample
  misc_feature (1)..(123): Xaa is any amino acid
MSAWEIITSENYDDWFQEQTEDDKVIIRSKVYLLSEYGPNLNRPHADTLKGSKELANLKELRAKTDAHEFRVAYIFDPERKGLLLIGGDKKGKNQKKFYKDLIREAEQIYAAYLKKRTKEKEK

SEQ ID NO: 4449 - DNA, 723 bp, Unknown
  Obtained from environmental sample
  misc_feature (1)..(723): n is a, c, g, or t
ttgatcggcgagaactatgcgggcagttccggcagtgggactttcatcattaacaaagctcccggagcggcggttgacgccccatcaggcacatcgtctgtaaccagcagcagtattacgatcaatgccgttgccgcgccaggtaatgggcagagcgttgagtacgcaataaatacaataaacattgctccttcgtcaggctggcaggatagctcaacattcaacggattgaacgcaaataccacctactacatattcgcccgatcgaaagaaaacgctaattacaatgtaggtataccaagcacaagcctgcaggttactagtgttttattcgatattgaatggacgcaacagattaaaaattatcaggaatcaagattccggtcagtagctgttgataattacggtaatgtatatgtagtggggactcaggcttcagaccacaccatcactttcgcccccggagttaccgcaaatggtactactgtgctggtaaaatataattcaagtggtacggcgcaatgggcgcggacggttaatggagcatatttcaactcagttgttgttgataatttcggtaatatatatacagcgggttatcagtctggcacgggcatctgtatttacgcccccggagtaaccgcacagggtagtggtacaacaaatactttggttgttaaatatgactccagcggtacggcggaatgggcacggacggattag

SEQ ID NO: 4450 - protein, 240 aa, Unknown
  Obtained from environmental sample
  misc_feature (1)..(240): Xaa is any amino acid
MIGENYAGSSGSGTFIINKAPGAAVDAPSGTSSVTSSSITINAVAAPGNGQSVEYAINTINIAPSSGWQDSSTFNGLNANTTYYIFARSKENANYNVGIPSTSLQVTSVLFDIEWTQQIKNYQESRFRSVAVDNYGNVYVVGTQASDHTITFAPGVTANGTTVLVKYNSSGTAQWARTVNGAYFNSVVVDNFGNIYTAGYQSGTGICIYAPGVTAQGSGTTNTLVVKYDSSGTAEWARTD

SEQ ID NO: 4451 - DNA, 630 bp, Unknown
  Obtained from environmental sample
  misc_feature (1)..(630): n is a, c, g, or t
gtgtttttatgggacatcatgatgccggttatgacgggcatagaagcgaccaacnagatacgatctctgggaacggaatacgcaggcaacgttccgattatagcccttacggcaatgccggccgacgatgccgccgagaaagaaaaagagtttttggacagcggttttcagaaggttatgtacaaacccttcacccttgaaactgtagatgcctttattaaaggctggatgattgataaaataaaaccacatggaggagaggagaaaattatggaagtagacataccccaggttgacaatgaaaaggtaaagaaaatttacggcgaaaaatttaacatttatttggatgttttgcgttcatatctggacgttgtgcccaattctcttgaagagatgagccatgttaccaaggaaacattgccgaattacgttaccaccgtgcacggcgtaaaaagcgtcagcgacttcatcggcgcggaagaagcgcggaagatggcccttgaactggagatgctgagcagggccggagacctttccggcgtattggcaaagaacgacacgttcattcaatacgcgaaagagcttattgtcaatgtagaaaaatatctggcaaagactgacgcaaaatag

SEQ ID NO: 4452 - protein, 209 aa, Unknown
  Obtained from environmental sample
  misc_feature (1)..(209): Xaa is any amino acid
MFLWDIMMPVMTGIEATNXIRSLGTEYAGNVPIIALTAMPADDAAEKEKEFLDSGFQKVMYKPFTLETVDAFIKGWMIDKIKPHGGEEKIMEVDIPQVDNEKVKKIYGEKFNIYLDVLRSYLDVVPNSLEEMSHVTKETLPNYVTTVHGVKSVSDFIGAEEARKMALELEMLSRAGDLSGVLAKNDTFIQYAKELIVNVEKYLAKTDAK

SEQ ID NO: 4453 - DNA, 807 bp, Unknown
  Obtained from environmental sample
  misc_feature (1)..(807): n is a, c, g, or t
atggagataaaaaaactcggttcctttgagcatattcttttggtgacgggcgaaagcccaaagaacgcgggttttgaatatataaagaatgcggttaaactttgccacgagcatttttccgcggtttcaatagaggttcagccgcttggcatggaagaatacgccgagcttgctaaatgtggagtgagcgcggtttatgtctatcaagaaacttacagggaagagacttataagcagcaccatcccggtggcaaaaagagcatttttgaatatcgcttgcattgtccggatagggttggaattgcaggggttaggaaaattggcattggggcattgctcggtttggagaattggcgagcggatagcttttttaccgctgtgcatttgagctatttgcaggagacatattggcaaagcaaattttcaatttcattcccaaggctacgcccttttgaagggcaaacttttgaactgcatacaccaagcgacagggagctgattcaacttatgtgcgcttataggatgtgtttccctgatgtggaaatttcgcttagcacaagggagtccgcgaatttcagggacagggctatgatgcttgggctaaccaccatgagcgcaggcagccgcacagaccctggcggctatgcggtttccaaaaatgagcttacgcaatgggaaataaacgattccagaagccccgccgaaattgagcaaaagataagaaagaacggctatgaccctgtttggaaagactgggacgcggtgctgggaatgagagtaaattttgtatcttctaaaaaagaatga

SEQ ID NO: 4454 - protein, 268 aa, Unknown
  Obtained from environmental sample
  DOMAIN (142)...(247): Biotin and Thiamin Synthesis associated domain
  misc_feature (1)..(268): Xaa is any amino acid
MEIKKLGSFEHILLVTGESPKNAGFEYIKNAVKLCHEHFSAVSIEVQPLGMEEYAELAKCGVSAVYVYQETYREETYKQHHPGGKKSIFEYRLHCPDRVGIAGVRKIGIGALLGLENWRADSFFTAVHLSYLQETYWQSKFSISFPRLRPFEGQTFELHTPSDRELIQLMCAYRMCFPDVEISLSTRESANFRDRAMMLGLTTMSAGSRTDPGGYAVSKNELTQWEINDSRSPAEIEQKIRKNGYDPVWKDWDAVLGMRVNFVSSKKE

SEQ ID NO: 4455 - DNA, 585 bp, Unknown
  Obtained from environmental sample
  misc_feature (1)..(585): n is a, c, g, or t
ttgcctttcctggctttttcatcagtgaaaatcagttataccaggatcaatccctattgttatacgcataaccgtaatatcaatccttggtatggcagccttctgatggagacctcgtacaccaacaacggcgtatgcctgggttattacctgcctccgaattctgatgaattattgttcaggttcgagaccatgccggtcaaaaacctggttacgtttctgcaataccagatgatccgccacggcgcgaattacggttcaagcgcggtagacggcagttccctgctttcggagcttgatccctttggcagacacggggacaatccgatgtcaaaaagatactttcttcatgacggggcataccagtggatgcatatcgtcaaagcgggcgttgaatggaatttgcccaagctgccaattgcgctgtatggcgaggcgggggtaaattattcgttctttaccaatattgaagaaaaagccaatgttaccggagctgcgtatccctattttgtgatcaacacggacgaatatccaatcaccaccagctatatcattgtaatcggcgttaaggtatatcccaggtaa

SEQ ID NO: 4456 - protein, 194 aa, Unknown
  Obtained from environmental sample
  misc_feature (1)..(194): Xaa is any amino acid
MPFLAFSSVKISYTRINPYCYTHNRNINPWYGSLLMETSYTNNGVCLGYYLPPNSDELLFRFETMPVKNLVTFLQYQMIRHGANYGSSAVDGSSLLSELDPFGRHGDNPMSKRYFLHDGAYQWMHIVKAGVEWNLPKLPIALYGEAGVNYSFFTNIEEKANVTGAAYPYFVINTDEYPITTSYIIVIGVKVYPR

SEQ ID NO: 4457 - DNA, 624 bp, Unknown
  Obtained from environmental sample
  misc_feature (1)..(624): n is a, c, g, or t
ttgagtancaagcccaatgacagtttcaggagatttgatgaagtttttattgaatcatntacggaacgcggcgggcggattatcgcgatagaaccgtattcgtcaaaggacgattttaaaggtattttaggcaaatatgccgccaaccctcccgatgttattttttgcccggaagattatgtccctgccgcaaaattgattaataccgtatacgaagtcggctttatcaatacgcacatattgggctcggacgcatgggacggacttttggcttacataaactaccctgaagcgatgaaaaatgtttattattcggcgcctttttcatttgatgatcaggacgcggatgtggtgcaatttgtcagaaaatattttgactgcttctctcaaatgccgctgtccggttcggcgaccgcttacacctgcgtatacattttatcggaagcgataaaaaaaacgggaagcgtcgataaggaagctttagtttccgccattaaggaaaatgaacttgattcaataacaggacatatacggtttgacgaaaacaacaaccctcataccaatgtatatattattcatttaaaaggcggagaatactccacctatgaaaaattgaacttataa

SEQ ID NO: 4458 - protein, 207 aa, Unknown
  Obtained from environmental sample
  misc_feature (1)..(207): Xaa is any amino acid
MSXKPNDSFRRFDEVFIESXTERGGRIIAIEPYSSKDDFKGILGKYAANPPDVIFCPEDYVPAAKLINTVYEVGFINTHILGSDAWDGLLAYINYPEAMKNVYYSAPFSFDDQDADVVQFVRKYFDCFSQMPLSGSATAYTCVYILSEAIKKTGSVDKEALVSAIKENELDSITGHIRFDENNNPHTNVYIIHLKGGEYSTYEKLNL

SEQ ID NO: 4459 - DNA, 360 bp, Unknown
  Obtained from environmental sample
  misc_feature (1)..(360): n is a, c, g, or t
gtgcgggtggagctgaaagtcggcaagttcctgccccagtacgccggccagatggacttctacctaaagtggctgaacaggtacgagcggcgggagggcgaaaacgagccgataggcctgatactctgcacgaaggcgagccgcaaccagattgaattgatggagctgaacaagtcggggatagcagtcgcggagtactggactgacctgccgccaaaggcggtactcgaagagaagctaaaggcgatcctgctggaggcgcgtgagcgcttggggcgccgcatgccaatacccaaaggcgctgtccagaaacaaatcgagtacttccacgaaggcgacgacgagcaggatggcgagtag

SEQ ID NO: 4460 - protein, 119 aa, Unknown
  Obtained from environmental sample
  misc_feature (1)..(119): Xaa is any amino acid
MRVELKVGKFLPQYAGQMDFYLKWLNRYERREGENEPIGLILCTKASRNQIELMELNKSGIAVAEYWTDLPPKAVLEEKLKAILLEARERLGRRMPIPKGAVQKQIEYFHEGDDEQDGE

SEQ ID NO: 4461 - DNA, 843 bp, Unknown
  Obtained from environmental sample
  misc_feature (1)..(843): n is a, c, g, or t
gtgcttctggagcatatccaaaatctcgggcttaattccctggtcatttctatagaagaaaaccgccactttttcatctttcccaaaggaataaatctgaaactatccccaggcgatgcgtttccgttcaatggggaaagcccggtcgtactgaccgcgcattatgaccgggtgccaggcagcccgggggcaaacgacaacagcgccgcggttttccaactgctcaagaccgcccttaaacttgacgaaatggacattgaccgctggataattatttttaccgacaaggaagaactgcaaaacggcgagggttttaaggaacagggctcctacggcctggcaaaaaaactccgccagctgggtcttttaaacgcccaaatcttcaattttgacgcatgcggttcaggcgaagtttttttgttctccggcacaaccgactatcttctggacaaaaacgaaaagcccggtttccgccgggtcagccaaagggttaaaaaactaaggaaaaaagtccttgaaaccgcccgcaggctcaacatcagtcacgtgctgtctgtccccacgcctttttccgatgatgccggttttttgcagggggggcttcccgcccaaactatcacaatgctccctgaaaaagaagccagccatttcgcgtccctgcttcgcaatcaccccgactttgttgatatgctcatttctggctcgataaataaccctgccagccgccataatatccctgaaacatggcgcgccatcaacggcccggaagacacccatacgcgcctgacgcccgaacactacgaccgcattgtccgctttgcgngggaactttgcaaaaactag

SEQ ID NO: 4462 - protein, 280 aa, Unknown
  Obtained from environmental sample
  DOMAIN (47)...(226): Peptidase family M28
  misc_feature (1)..(280): Xaa is any amino acid
MLLEHIQNLGLNSLVISIEENRHFFIFPKGINLKLSPGDAFPFNGESPVVLTAHYDRVPGSPGANDNSAAVFQLLKTALKLDEMDIDRWIIIFTDKEELQNGEGFKEQGSYGLAKKLRQLGLLNAQIFNFDACGSGEVFLFSGTTDYLLDKNEKPGFRRVSQRVKKLRKKVLETARRLNISHVLSVPTPFSDDAGFLQGGLPAQTITMLPEKEASHFASLLRNHPDFVDMLISGSINNPASRHNIPETWRAINGPEDTHTRLTPEHYDRIVRFAXELCKN

SEQ ID NO: 4463 - DNA, 342 bp, Unknown
  Obtained from environmental sample
  misc_feature (1)..(342): n is a, c, g, or t
atggcaaagaaaaacgaaattgatgaaaaacatgtatttaaattggtaagcaacaacattaaacgccttcgtgctttacagaatatgtctcagctagatcttgctctcagtaccgggcttactcataattttattaatgatattgaaaactgtaagaagggaatatcggcaaagtcggtggcaaaactttcaatcgcgctgaatgccgaaccgtatcagctctttctgcccaatacgatggcaaacaatgaaattattagctatgtaaaagattttaatgattctttacagaaggttgtgggcgagttaactcaacattatttaaccggggataaaaaatag

SEQ ID NO: 4464 - protein, 113 aa, Unknown
  Obtained from environmental sample
  DOMAIN (20)...(74): Helix-turn-helix
  misc_feature (1)..(113): Xaa is any amino acid
MAKKNEIDEKHVFKLVSNNIKRLRALQNMSQLDLALSTGLTHNFINDIENCKKGISAKSVAKLSIALNAEPYQLFLPNTMANNEIISYVKDFNDSLQKVVGELTQHYLTGDKK

SEQ ID NO: 4465 - DNA, 597 bp, Unknown
  Obtained from environmental sample
  misc_feature (1)..(597): n is a, c, g, or t
atgaaagaactaaaacaaatatacaattcaaataaatcaatgtttgaagaacgcttgtcttctttcaaaaaagtttggacacaaggaagcgatataaaaatatttgcggagttatgttattgtctgtgtacagcgagagaaaaagcaaaaaatgccttaaacgccgttgattcattatcaaaaaacaattatgatattttgattaacggtgataagaaaaaaatagataaagttttatgcgagaataatattgcattacatcctgataaagcggatcgaataattaaaaatagaaaaatattttatccaaataccaaaaatattttgcagtctaaatattgttttgatgatattaagaaagcccgtgaagaacttgtgcgtgatgtagtcggatttgggtttaaggaggcgtcccattttttaagaaatatcgggtttggctgtaatttagctataattgacaggcatattaaaaaccaattagtaaaatacggagttatagcggatgatgtaaaatctacatccattaccaaaaagcggtattacgaaattgaggaaaaaacgattcaatttgcccataaaataaaatacctgtag

SEQ ID NO: 4466 - protein, 198 aa, Unknown
  Obtained from environmental sample
  misc_feature (1)..(198): Xaa is any amino acid
MKELKQIYNSNKSMFEERLSSFKKVWTQGSDIKIFAELCYCLCTAREKAKNALNAVDSLSKNNYDILINGDKKKIDKVLCENNIALHPDKADRIIKNRKIFYPNTKNILQSKYCFDDIKKAREELVRDVVGFGFKEASHFLRNIGFGCNLAIIDRHIKNQLVKYGVIADDVKSTSITKKRYYEIEEKTIQFAHKIKYL

SEQ ID NO: 4467 - DNA, 879 bp, Unknown
  Obtained from environmental sample
  misc_feature (1)..(879): n is a, c, g, or t
ttgctttacagcggtcaagatgtgcgcacaaatttatggcttattgaaaacagtcgcgatgtgcaatacccagacaaagaaacggaagaattgctcaaagaacgcgatcgcaaacgattacgtgagataactttttactgttccacaaatgattgcctgcgtggctatatccttaaatattttggggaaaagccgccgaattactgtggcaactgcggcaattgcaatacgaattttgaaatggttgatataacaattgaagcgcaaaaaatcctctcttgcgtagcaaggatgaatgagagatatgggcagaaaatgctaatagatgtgcttcgcggtagcaaaagcgaaaaagtgctgcgtttggggctagacaaactctcaacttacggcataagcgaaaaaaacgaaaaacagttgtacgaaataatcaaccatttaatattaaccgaccatcttttaaaaacagatgacgaataccctgttctcaaattgggaaattgcgcaaacgacgttttgcgaaacggcaaaaccgtgcaaatgaaactgttaaaagacaaaccaaaaccggaaattacaaccgctaaaaagcaaaccagacctattgacaataaactgtttgccattttgcgcgaacttcggctaacaatagcaaaagaacaaaatgttccagcatttgtaattttcccagacagcaccttagtagatatgtgcatgaaaatccctgtgacagatgcggaatttttgaatgtatcaggtgttggtcgtgtaaagttggagaggtatggcgaaaaatttttaaagaccattgcggaattcttgaataacaatagcggattaaaaccgcaagaaccaaaagtttttgagcttcgtccatag

SEQ ID NO: 4468 - protein, 292 aa, Unknown
  Obtained from environmental sample
  DOMAIN (200)...(278): HRDC domain
  misc_feature (1)..(292): Xaa is any amino acid
MLYSGQDVRTNLWLIENSRDVQYPDKETEELLKERDRKRLREITFYCSTNDCLRGYILKYFGEKPPNYCGNCGNCNTNFEMVDITIEAQKILSCVARMNERYGQKMLIDVLRGSKSEKVLRLGLDKLSTYGISEKNEKQLYEIINHLILTDHLLKTDDEYPVLKLGNCANDVLRNGKTVQMKLLKDKPKPEITTAKKQTRPIDNKLFAILRELRLTIAKEQNVPAFVIFPDSTLVDMCMKIPVTDAEFLNVSGVGRVKLERYGEKFLKTIAEFLNNNSGLKPQEPKVFELRP

SEQ ID NO: 4469 - DNA, 768 bp, Unknown
  Obtained from environmental sample
  misc_feature (1)..(768): n is a, c, g, or t
atgttaccgccgttgaaaaagtggaagttacaatttccggcaagctgtcgggaaatgttacggctcctgaaatctacatggaaacagggtgtatattcaacggcagatgtacaatggttggaagagtataatatgaaaaaaagcgttagttttttattagttgggtttcttttatttcttactattaatgtttacgctcaagacaatagtcccgatgcgttagctgagtaccgcgccggtaattttgaaagggcagtccttatttgccgcgaagaattagccgagaacccgaataatcttgaatcgcatgttgttatctgttggtcgttaatccggctgaaccggttggaagaagccatgcgctatgcccgcgccggcagggctttataccgttttgatgttagaataactcaaattatgggagagatcagttattatcagggaagaaacgacgaagcgttgcaatattttcaggagtacgccagcgccgcgcccgaaggacagcgcattgatcaggtttattatttgatgggagaagtatatatccgtcagggaaaattccgtcatgccgacatagctctttcaaccgccgttcactgggttccgaataacgcggcgtggtgggtcaggcttgcgtatacgcgtgagaacgccggcgatttgtccagcgcgatagaagcttacgagcgcgctctttcccttaactctcagttgtctgacgcccagcgcggcattgaacgaatcaggcggactatgagcgctccatag

SEQ ID NO: 4470 - protein, 255 aa, Unknown
  Obtained from environmental sample
  DOMAIN (205)...(238): Tetratricopeptide repeat
  misc_feature (1)..(255): Xaa is any amino acid
MLPPLKKWKLQFPASCREMLRLLKSTWKQGVYSTADVQWLEEYNMKKSVSFLLVGFLLFLTINVYAQDNSPDALAEYRAGNFERAVLICREELAENPNNLESHVVICWSLIRLNRLEEAMRYARAGRALYRFDVRITQIMGEISYYQGRNDEALQYFQEYASAAPEGQRIDQVYYLMGEVYIRQGKFRHADIALSTAVHWVPNNAAWWVRLAYTRENAGDLSSAIEAYERALSLNSQLSDAQRGIERIRRTMSAP

SEQ ID NO: 4471 - DNA, 558 bp, Unknown
  Obtained from environmental sample
  misc_feature (1)..(558): n is a, c, g, or t
atgaaacgcctcatcgcccaacacaggacgaatatttaccagatctgcaagtgtttcaggaacggggaatcttcggggcgtcagcacagcccggagttcaccatgctggagtactacaccatgggggcggactacctcgattcgcttaaactgaccgaagaactgtttaattatgtcggcgcgagagacgatctctccccgcctttcatcagaatcaccatggaagaagctttcgatagatgggcaggcttcgatctgtacgaggcggcccgttcgcccggcgccatggaagaagaggcgaagaagctgggcctcaacccgccagccgggctttccgttcccgaactgtacgatctgattttcatccacgcggtagagccaaacatccggatggaaaggcccgtcgctattctggattaccccgcctttgtcccctgtctggcgaagaaaagccccggcggtaacaccgtggaacgctgggagctctatgcccgggggacagagctggccaattgttataccgaagaaaccgcgcggagaagtgcggcgtttttttga

SEQ ID NO: 4472 - protein, 185 aa, Unknown
  Obtained from environmental sample
  DOMAIN (1)...(185): tRNA synthetases class II (D, K and N)
  misc_feature (1)..(185): Xaa is any amino acid
MKRLIAQHRTNIYQICKCFRNGESSGRQHSPEFTMLEYYTMGADYLDSLKLTEELFNYVGARDDLSPPFIRITMEEAFDRWAGFDLYEAARSPGAMEEEAKKLGLNPPAGLSVPELYDLIFIHAVEPNIRMERPVAILDYPAFVPCLAKKSPGGNTVERWELYARGTELANCYTEETARRSAAFF

SEQ ID NO: 4473 - DNA, 639 bp, Unknown
  Obtained from environmental sample
  misc_feature (1)..(639): n is a, c, g, or t
atgccgaatttccagttgtatatgttatatattttcctatccattctgacagtcaaggcgctgtatacaaacacccgtgtcaattcatgcgtcaacgcattcaaaatcaacgaattgaacagtaacctggagtttttatcaaagaccgacgaactcaccaaactggataaccgccgctcattcctcgaatatatgaactttttatggagtcaatgcagccgcttgcggcttccgctgaatttactgatgatcgacattgattatttcaaaaaatacaacgattcgctgggacacatagaaggcgaccacgcgcttgtcgccgtcgcccaatgcctgaaacaacagaccagaagggaaacggattttgtcgccagatacggcggcgaggaatttgtctgtctgcttccctacatcacgaaagacgacgcatttaatctggcaaataagctgatacatgccgtggagggcatgaaaatcccccatccaatgtcagaacaatcacagtatgtgaccgtcagcataggcgtggcaggcatcctgccggctgaaaacaattcgcagacacagctcctggacgaggccgacaaagctctctacacggccaaaagctcggggagaaaccgggctgtcatggtttag

SEQ ID NO: 4474 - protein, 212 aa, Unknown
  Obtained from environmental sample
  DOMAIN (43)...(208): GGDEF domain
  misc_feature (1)..(212): Xaa is any amino acid
MPNFQLYMLYIFLSILTVKALYTNTRVNSCVNAFKINELNSNLEFLSKTDELTKLDNRRSFLEYMNFLWSQCSRLRLPLNLLMIDIDYFKKYNDSLGHIEGDHALVAVAQCLKQQTRRETDFVARYGGEEFVCLLPYITKDDAFNLANKLIHAVEGMKIPHPMSEQSQYVTVSIGVAGILPAENNSQTQLLDEADKALYTAKSSGRNRAVMV

SEQ ID NO: 4475 - DNA, 309 bp, Unknown
  Obtained from environmental sample
  misc_feature (1)..(309): n is a, c, g, or t
gtgaaagagggtatctgtgtggtgtttgtgccgcataccaccgcggctgtcacgataaacgaaaatgccgatcctgacgtgccccatgacgtgggtctggcgctggacaaaatatcccctgaccggcatgaattccagcacagcgagggtaattcggcggctcataccaagacaagcctggttggaccctccattacattgattgttacaggcggcagactgcttttgggcacatggcagggcgtctggttcaacgaatacgacggcccccgcagcagaaaggtacatgtgagggttttgggcgactga

SEQ ID NO: 4476 - protein, 102 aa, Unknown
  Obtained from environmental sample
  DOMAIN (2)...(100): Uncharacterised protein family UPF0047
  misc_feature (1)..(102): Xaa is any amino acid
MKEGICVVFVPHTTAAVTINENADPDVPHDVGLALDKISPDRHEFQHSEGNSAAHTKTSLVGPSITLIVTGGRLLLGTWQGVWFNEYDGPRSRKVHVRVLGD

SEQ ID NO: 4477 - DNA, 582 bp, Unknown
  Obtained from environmental sample
  misc_feature (1)..(582): n is a, c, g, or t
gtgcgggctatcacaatacctgaagctgataaggcatacctgactgtacaagaaatacagctgttggcagatactcccctgggcggaaagctggggggcatggtaaagcaggcttttcttttcgcgtgttttaccggcatacgaatatcagaccttagaacgcttgaatggggcgacatcaatattgaatccaagcaaataagcaagcggcaggaaaaaacggagcgcaaggttttcattccgcttcattccgtggcgtggggaataataaatgacggggcaatccacaactacaaagagcttgtattcccaaggcttacgcaatcgaaaacagatactgggcaatacattgtcgcatgggcaaaaaaagcagggattgaaaagaatgtcggctggcacacggcccggcatacgtttgcggttttgtctctggaatccggggccgagatttacacggtttcaaaactgctggggcatacgaacctgaaaaacacccaggtctacgcaaaggcgacagacaagatgaagcgggaagcggtggatgcgctgccggttattgaaatagcgaaggggaaaatatga

SEQ ID NO: 4478 - protein, 193 aa, Unknown
  Obtained from environmental sample
  DOMAIN (19)...(178): Phage integrase family
  misc_feature (1)..(193): Xaa is any amino acid
MRAITIPEADKAYLTVQEIQLLADTPLGGKLGGMVKQAFLFACFTGIRISDLRTLEWGDINIESKQISKRQEKTERKVFIPLHSVAWGIINDGAIHNYKELVFPRLTQSKTDTGQYIVAWAKKAGIEKNVGWHTARHTFAVLSLESGAEIYTVSKLLGHTNLKNTQVYAKATDKMKREAVDALPVIEIAKGKI

SEQ ID NO: 4479 - DNA, 471 bp, Unknown
  Obtained from environmental sample
  misc_feature (1)..(471): n is a, c, g, or t
atgctcaacacaatcaaaaaatgctattatgtggcaaaacaacttacgcaggatttaggacgcgaccccaacgaagatgaactgtccgagtatttggatgttcctgtttctaaagttaaagaaatagtgaagttgtcccaggagacgacaagtttggacaccattgttgacgacggaaaccttacgcgccttgccgatttaattaaagacgacgcgagagccgaaccttttgaaatggttttttccatgacattacaggaaaccatcggcggaattctttcccagttatccgaaagggagatgaaaataatccaactgcgttttggtctgaccggggaaaatccccttactctggaagaaaccggaaaatatctcggcatcacccgcgagcgcgtccgtcaaattcaagaaaaagcagtttggaaactccgcaccttgcacgaactgcgcgaattaagggaaaactcttag

SEQ ID NO: 4480 - protein, 156 aa, Unknown
  Obtained from environmental sample
  DOMAIN (1)...(80): Sigma-70 region 3
  misc_feature (1)..(156): Xaa is any amino acid
MLNTIKKCYYVAKQLTQDLGRDPNEDELSEYLDVPVSKVKEIVKLSQETTSLDTIVDDGNLTRLADLIKDDARAEPFEMVFSMTLQETIGGILSQLSEREMKIIQLRFGLTGENPLTLEETGKYLGITRERVRQIQEKAVWKLRTLHELRELRENS

SEQ ID NO: 4481 - DNA, 609 bp, Unknown
  Obtained from environmental sample
  misc_feature (1)..(609): n is a, c, g, or t
atgttttggatgttcgcaactgaagtttgcaaaagcttcggagagagaaatttcaccaccctttacntgctatctgccatattcgcaggcctcttcagcatacccttctatgcctttggcttaatgggaaatcacgctgttataggagcctccggtgcgttgtttggtgtaatggcagcttatgcctttttgtttccagagcaaattattttgatgttcttcatagttcccatgaaaataaaacatgctatatggatattcatagctatagacttatttatggcaaatagctcagatggcattgctcattttgctcatttgggcggtgtgctttcgggttatttatttatgctgttttggtctaaaagtatctctttggaatctttttttgcaaaatccaaaggtcccgaaagatattcaagggaatttttcaaagaacacgcaaaacaagctccgccattggaaggcgagctatacaagggcagctcaagcgcaaaagaagagcgtttaaacgaaattttagaaaaaataaaccgcaccggacttcaatcgttaagccaagaagagagagattatctgcaatggtttggaaaacagaataagaagtga

SEQ ID NO: 4482 - protein, 202 aa, Unknown
  Obtained from environmental sample
  DOMAIN (1)...(125): Rhomboid family
  misc_feature (1)..(202): Xaa is any amino acid
MFWMFATEVCKSFGERNFTTLYXLSAIFAGLFSIPFYAFGLMGNHAVIGASGALFGVMAAYAFLFPEQIILMFFIVPMKIKHAIWIFIAIDLFMANSSDGIAHFAHLGGVLSGYLFMLFWSKSISLESFFAKSKGPERYSREFFKEHAKQAPPLEGELYKGSSSAKEERLNEILEKINRTGLQSLSQEERDYLQWFGKQNKK

SEQ ID NO: 4483 - DNA, 576 bp, Unknown
  Obtained from environmental sample
  misc_feature (1)..(576): n is a, c, g, or t
atgaccaatattatgccgcatatccccgttaaaggttccgcgtttgaggaccttgaccgtatgacgaataaagaaatcgaagctttgcgcacacagtgcggcgtaaatatcaagcagatgagtcattgccgccaatgccgttccgatgcggcgggaacgctgaccgaagacatatcgcttgactttcgggaaacaactccgccggctgccgcaaaaacaacaacccgcaggtttgccgcggcgactaaaaccggcgcaattgtggatctgcattttggtcacgcgcaggaattttatatttacgagagcgacggcgagcaggttaagtttatcgaaaagcgcggcgtactcaattattgtaacggccccggccgtgaagacgacaaagaagaccggtgggaatcggttataaacgctctaggtgactgcgcggcggtgctggcgctcagaaccggcatgacgccggagaaaagactgaaagaaaacggaattgacgtaataacaacctatgaacgggttgaaactgccgtcttattggcggcaaaaaaaaggagtgaagtatatggtacagcctaa

SEQ ID NO: 4484 - protein, 191 aa, Unknown
  Obtained from environmental sample
  DOMAIN (84)...(182): Dinitrogenase iron-molybdenum cofactor
  misc_feature (1)..(191): Xaa is any amino acid
MTNIMPHIPVKGSAFEDLDRMTNKEIEALRTQCGVNIKQMSHCRQCRSDAAGTLTEDISLDFRETTPPAAAKTTTRRFAAATKTGAIVDLHFGHAQEFYIYESDGEQVKFIEKRGVLNYCNGPGREDDKEDRWESVINALGDCAAVLALRTGMTPEKRLKENGIDVITTYERVETAVLLAAKKRSEVYGTA

SEQ ID NO: 4485 - DNA, 798 bp, Unknown
  Obtained from environmental sample
  misc_feature (1)..(798): n is a, c, g, or t
atgctggggaacatagtacgcgtgacaagcgagacagggacgatcagatacaagtacgacgcaggcggaaaactgatagaacagaatgacgagggcgctggggaaataacccgttacgtttataacaaaacagggcagcgtatcaggatgcaaagcggaaacagggatataatatacaggtatgggaagaccggggaactcctgaaggtaactgacaacagccaacggttagaagcaagttatgagtacgatgtgcgcggcagggaaatacgccggacatatgggaatggggtacgtcaggaaacgctttatgaccagataggcaggattatcctgataagggagtcagattcaaggggcggcttgctccgcgccgaaggctatttatatgacgagaagggaagaaggagccacagcgtggacgaagaagggcgcataacaaaatacgagtacgacaagcagtcgcggctttcagcagtgctatacccctggacaaaagaaaaggctgaagcagaccgcagggaggctgaagaagcggggctatactttacccccgataaaggcaacggcgaacgttacagctttagcgctgcagaacagacctcgttacgggaaatccttaacaaagcgggcaccatgcgcgggaacgccgtagcaagcagccagatgatgtggcgtgaatcgtatacctacgacaggaacgggaaccgcgcaagcaaggcaacaccctggggcataatcaaatacgtgtacgacgccgaaaaccggctgattaagaaaggtgacatgcatacataa

SEQ ID NO: 4486 - protein, 265 aa, Unknown
  Obtained from environmental sample
  DOMAIN (19)...(57): RHS Repeat
  misc_feature (1)..(265): Xaa is any amino acid
MLGNIVRVTSETGTIRYKYDAGGKLIEQNDEGAGEITRYVYNKTGQRIRMQSGNRDIIYRYGKTGELLKVTDNSQRLEASYEYDVRGREIRRTYGNGVRQETLYDQIGRIILIRESDSRGGLLRAEGYLYDEKGRRSHSVDEEGRITKYEYDKQSRLSAVLYPWTKEKAEADRREAEEAGLYFTPDKGNGERYSFSAAEQTSLREILNKAGTMRGNAVASSQMMWRESYTYDRNGNRASKATPWGIIKYVYDAENRLIKKGDMHT

SEQ ID NO: 4487 - DNA, 693 bp, Unknown
  Obtained from environmental sample
  misc_feature (1)..(693): n is a, c, g, or t
ttggaaaactacaatcggaaattgccgggattgcggctattacaacagaagcttgtcgacaaccgcaggccgtcctatacggttgaaacacccattgtatacaacggcgccattgacgatatacaacaggacagcgatatacgcctgatacttgtcgccgacaacccgggccgccgtgaacaggcggctgaaaaccgccgctaccttgtgggcccttcaggaaagatcgccgaaaaattctttcgtgataatcctgcgctgaaaatagaatttcggaaaaatgttattatccttaacaagacgcctgtccacactccccgcaccattgagctgaaagagctttgcgtattgggcggagtcgccctggaaaaggcccttgacgagtcccagcggctgatggcccggctgctttttgaatttcataaggccctcagttacgggaaggagaagcccgtccccgtatggataaccggctattccgaaatgaagaaaacaggggtatttgccgcatatacaaatgagcttaaaacgatatataataaatccgaactggttaaagcgctttttctgtaccgccatttttccatgaaccagttcacgatagacctgaagcaacagactgctcccggcgaatccaccgcgaaggcccttaaacgcataggagctgcctacaggcggaagtttttaatataa

SEQ ID NO: 4488 - protein, 230 aa, Unknown
  Obtained from environmental sample
  misc_feature (1)..(230): Xaa is any amino acid
MENYNRKLPGLRLLQQKLVDNRRPSYTVETPIVYNGAIDDIQQDSDIRLILVADNPGRREQAAENRRYLVGPSGKIAEKFFRDNPALKIEFRKNVIILNKTPVHTPRTIELKELCVLGGVALEKALDESQRLMARLLFEFHKALSYGKEKPVPVWITGYSEMKKTGVFAAYTNELKTIYNKSELVKALFLYRHFSMNQFTIDLKQQTAPGESTAKALKRIGAAYRRKFLI

SEQ ID NO: 4489 - DNA, 849 bp, Unknown
  Obtained from environmental sample
  misc_feature (1)..(849): n is a, c, g, or t
gtgctgggctcgacgggctgccgctctttctccgatgaaatctccccgtccatcacgcggaccggccagcatatactaaaactgtccatcgagcgcatagagaagacttacggcaaaaaggtcatatacggcgacaccgactccatcttcgtcgaccttggggccggctcggaggggcgagcggcggaattgggcgcgaagatttccaaggagacgggcgcttggctgcgcgacacgctcatggagcgatacggggcggactccgcgctggagctcaaatacgaggagcactacaaccgcttcttcatacccccgctgcgcggcggcgacgccggacaggggaccaagaaacactactgcggagcggtgataaaggacgggcggatagaactcaccttcaagggcatggaatcggcccgcagcgactggaccgacctcgccaaggagttccaacgcgacctgttcattatgttcttctccgaaaaaaagcccttagactccgctcatggcccgctggagacctacatcgcgacgacggccgaacgcctgaaacgcggcgagttcgacgacaaactcgtctacagaaaacacgtgagaaaagagctcgacgcctacacgtcaagcatccccccgcacgtgcaggcggcaaagctcttagatacacctgtgcgagtagtcaagtattacataactaaaaacggcccgcagccggtagaaaagctgtcggcgccgatagactatcaacactatatggacagccagctgagaccgatcgcggattctatattagtatggatgggaagcgatttcgaccgagcggtctccggacagttggaattgttcgcttaa

SEQ ID NO: 4490 - protein, 282 aa, Unknown
  Obtained from environmental sample
  misc_feature (1)..(282): Xaa is any amino acid
MLGSTGCRSFSDEISPSITRTGQHILKLSIERIEKTYGKKVIYGDTDSIFVDLGAGSEGRAAELGAKISKETGAWLRDTLMERYGADSALELKYEEHYNRFFIPPLRGGDAGQGTKKHYCGAVIKDGRIELTFKGMESARSDWTDLAKEFQRDLFIMFFSEKKPLDSAHGPLETYIATTAERLKRGEFDDKLVYRKHVRKELDAYTSSIPPHVQAAKLLDTPVRVVKYYITKNGPQPVEKLSAPIDYQHYMDSQLRPIADSILVWMGSDFDRAVSGQLELFA

SEQ ID NO: 4491 - DNA, 384 bp, Unknown
  Obtained from environmental sample
  misc_feature (1)..(384): n is a, c, g, or t
atgtttgaagaagcagggcgcgcatacgtttaccttatttacggtatgtaccattgcctgaacatcgtaagcggcaaaaaaggcgaaggcgaagctgtacttatccgcgcccttgaaccggtttcaggcatagagattatgcaaagaagacgcaaaacaaaaaaaactgaaaacctgtgcaacggacccggaaaattaactcaggcattcggcataacgcgcaaacaaaacaataaaagcctcttaaccggagatttccgcatttacaacagcaaaataaaacccgaaattacaacaactacgagaataggcctaactttaggaaaagaactcccgttgcgcttttatataaccggcaaccgctttgtatctaaaactttttaa

SEQ ID NO: 4492 - protein, 127 aa, Unknown
  Obtained from environmental sample
  DOMAIN (1)...(122): Methylpurine-DNA glycosylase (MPG)
  misc_feature (1)..(127): Xaa is any amino acid
MFEEAGRAYVYLIYGMYHCLNIVSGKKGEGEAVLIRALEPVSGIEIMQRRRKTKKTENLCNGPGKLTQAFGITRKQNNKSLLTGDFRIYNSKIKPEITTTTRIGLTLGKELPLRFYITGNRFVSKTF

SEQ ID NO: 4493 - DNA, 423 bp, Unknown
  Obtained from environmental sample
  misc_feature (1)..(423): n is a, c, g, or t
ttggcctgcgtctgcggcgacggatctctggcggccgcaccaaagcgctctgtgntgtatataggcagcggcaatgtcggggatcttgcgtttgaacagtacagcctttcggaactttcaaattatcttgcgaataacagcattgtatttaacgccgtaatagtgggtacgggccagccttccgccgcgattgagtatctttgcagggaaacaggcggaaagattgcgcggctttatcagccgcaggggataggaccgctaatcaagagcgttgccgaacttccttccggattgtacagctattcgtttacttcccgtcttcccacagattttggaagggcatggcttcccgtcgagatagaagttaaactgatggaaagatccggccttgacagcacaggctattacccgccgttggaataa

SEQ ID NO: 4494 - protein, 140 aa, Unknown
  Obtained from environmental sample
  misc_feature (1)..(140): Xaa is any amino acid
MACVCGDGSLAAAPKRSVXYIGSGNVGDLAFEQYSLSELSNYLANNSIVFNAVIVGTGQPSAAIEYLCRETGGKIARLYQPQGIGPLIKSVAELPSGLYSYSFTSRLPTDFGRAWLPVEIEVKLMERSGLDSTGYYPPLE

SEQ ID NO: 4495 - DNA, 438 bp, Unknown
  Obtained from environmental sample
  misc_feature (1)..(438): n is a, c, g, or t
atggagagacatttaatgctgcatctttcttctgaattagacaacaatataaggaaagctggcgaagccacctaccccaatgagtgttgcggaatccttttgggtgaaattaaagacgatggaaccaaaaacgccaaacgcactgtggatatagataattccagcgaaaacgacgagcaatatcacagatttctcataactccagaggatatgttcaaagcggagaaaattgcaagagcggaaaaattggaaattatcggcttttaccactcgcaccccgaccatccctcaaaaccctccggctatgataaagaccacgccctgcctttttattcatatattattgtatcggtggacaagggcaaagcccaaattctcaccagttgggaactcaccgataatagagatgattttgtgcaggaaaaaattgtggagtga

SEQ ID NO: 4496 - protein, 145 aa, Unknown
  Obtained from environmental sample
  DOMAIN (2)...(117): Mov34/MPN/PAD-1 family
  misc_feature (1)..(145): Xaa is any amino acid
MERHLMLHLSSELDNNIRKAGEATYPNECCGILLGEIKDDGTKNAKRTVDIDNSSENDEQYHRFLITPEDMFKAEKIARAEKLEIIGFYHSHPDHPSKPSGYDKDHALPFYSYIIVSVDKGKAQILTSWELTDNRDDFVQEKIVE

SEQ ID NO: 4497 - DNA, 675 bp, Unknown
  Obtained from environmental sample
  misc_feature (1)..(675): n is a, c, g, or t
ttgtacgcattcggtgcaaccttcgaaaatttatacaccaacccacgacttctcgaactcacagccgagaataacggtgacgcttttgggtcgatggggccgttgatacgcgaagcagctgagaagttgggtgcttatacaacgaaccaagtggaaaatcccgataatcccaaggcgcactatacaaccacgggtcccgaaatatgggaagacactgacggcaaggttgatttctttatctctggtgctggaaccggcggaacactgatcggtgcgggcaagtatctgcgcgaaaaaaatccaaacatcaaaattattgcgtatcaacccggtataaattcgcgcccgttcgagaatcaaaactttgaacagttagaaatgcacggcgttcatccaatttcgggcgtaccgttcgtcgtaccgtttttgcgaaccaaagacaaaatttgggacgaagtcatagatgttgagtcacctactggttatgaagcagcccgtgccgtggcaaaacacgaaggcatattagttggcgaatcatccggagcggcaatacataccgcaatacaaatcgcaaagcgccctgaaaacaaaggcaaacgcatagttgcgatggtacctgactccggcacgcactatctgaccacaggactgtttgaattaccggaaataaaatag

SEQ ID NO: 4498 - protein, 224 aa, Unknown
  Obtained from environmental sample
  DOMAIN (1)...(208): Pyridoxal-phosphate dependent enzyme
  misc_feature (1)..(224): Xaa is any amino acid
MYAFGATFENLYTNPRLLELTAENNGDAFGSMGPLIREAAEKLGAYTTNQVENPDNPKAHYTTTGPEIWEDTDGKVDFFISGAGTGGTLIGAGKYLREKNPNIKIIAYQPGINSRPFENQNFEQLEMHGVHPISGVPFVVPFLRTKDKIWDEVIDVESPTGYEAARAVAKHEGILVGESSGAAIHTAIQIAKRPENKGKRIVAMVPDSGTHYLTTGLFELPEIK

SEQ ID NO: 4499 - DNA, 678 bp, Unknown
  Obtained from environmental sample
  misc_feature (1)..(678): n is a, c, g, or t
atgaaagccctggaactggtaaattacagggattgcgaaatcaacagggaagagagcaccgtatttctgaaacgcgccggtatggcgcttgatctgggagcgattgccaaaggctacgcggcggatgaagcaggcaggcttcttgcaaaggaaggcgtggacagcgggataattgacctgggaggcaacattttcgccatgggagaaaagaaagaaagcggaggtaggggcgcgtattggcgcataggcgttcaggacccaagagcagacaggggaaactatatcggtgtcctaagcgtaaaaaacaaaagcgtggtaacatcaggggtttacgaaaggttttttgagaaagacgggaaacgctaccaccatattctttcgatcggacttcagtccgcagaaaacgggtttccggtggacaacagccttctttcggtaactatcgcggcagatgattccatcgacgccgatgccctgtctactgccgcctttgcccttggatgggaaaaagggcgggaactaattgccggcgttaaaggcgcaggcggaatttttgtgtatgacgacctaagcgtgtgtgttacagaaaacctaaaagaggttttttcgcttaccgccgcggaatacaatcttattttatctccacaagctccagttcaaaaatcagataactattag

SEQ ID NO: 4500 - protein, 225 aa, Unknown
  Obtained from environmental sample
  DOMAIN (1)...(191): ApbE family
  misc_feature (1)..(225): Xaa is any amino acid
MKALELVNYRDCEINREESTVFLKRAGMALDLGAIAKGYAADEAGRLLAKEGVDSGIIDLGGNIFAMGEKKESGGRGAYWRIGVQDPRADRGNYIGVLSVKNKSVVTSGVYERFFEKDGKRYHHILSIGLQSAENGFPVDNSLLSVTIAADDSIDADALSTAAFALGWEKGRELIAGVKGAGGIFVYDDLSVCVTENLKEVFSLTAAEYNLILSPQAPVQKSDNY

SEQ ID NO: 4501 - DNA, 600 bp, Unknown
  Obtained from environmental sample
  misc_feature (1)..(600): n is a, c, g, or t
gtgtccgttggtttcaagcttttttttaccggtttttgccgcgtctttcaattcgtgttcaattttggcgccagatgccttccgtggagaaaagctattccggttgaagggaatggagctattggtcaaatcctgaggcttcttaaagaaaacggcggaaaaaagcccatgcttgttacttcccctgggcgtgttaaagcgggaactatttcaataataacggacgctcttgaaaaagccggcattccttatgctatttacagcgaggttgaggcaaacccttcggtaaaaacggtggagatgatcttcgagctttactgccgtgaaggctgcgatagctttatcgcgcttggcgggggctctccaatagatgccgcaaaagccgccgccgcaagaacagtcagaaagcggaagagcgttaaccagctggggggccttttaaaggtaatgaggaagctgcctctttttattgccgtgccgactaccgccggaaccggcagcgagaccacaattgccgccattatcaccgacacggaaaccagccataagtacgctataatggatctctgcctgattccaaaattcgccgtatggatctga

SEQ ID NO: 4502 - protein, 199 aa, Unknown
  Obtained from environmental sample
  DOMAIN (32)...(199): Iron-containing alcohol dehydrogenase
  misc_feature (1)..(199): Xaa is any amino acid
MSVGFKLFFTGFCRVFQFVFNFGARCLPWRKAIPVEGNGAIGQILRLLKENGGKKPMLVTSPGRVKAGTISIITDALEKAGIPYAIYSEVEANPSVKTVEMIFELYCREGCDSFIALGGGSPIDAAKAAAARTVRKRKSVNQLGGLLKVMRKLPLFIAVPTTAGTGSETTIAAIITDTETSHKYAIMDLCLIPKFAVWI

SEQ ID NO: 4503 - DNA, 477 bp, Unknown
  Obtained from environmental sample
  misc_feature (1)..(477): n is a, c, g, or t
atgaagtacatatatttttacaaatatcagatgaataataaattcgtcataaaactgggaattgcggaagacggcggcaacgatacttccggcaaggccggcggcaaaaccgcgatttgcggagttttcttaaatgccgtcaatgcgcctaacggttatgaaaagaaagaaactccgttgataaaaaaagcggcactgcagttcggcgaatatttcaaaggtaaacgaaaaagttttaatctgcccttaactatgcaaggaacggattttcaaatgaaggtatggaacgcgctaaaaagggtcccctacggaaaaaccatcagttacggagaattagccgcgacgatcggtaatccaaaagcatgcagagcagtaggcatggcgaacaaccgcaacccaattgcgattattgtcccctgccacagagtaattggccgcgacggaagcttaaccggtacggaggcgggctttgaataa

SEQ ID NO: 4504 - protein, 158 aa, Unknown
  Obtained from environmental sample
  DOMAIN (87)...(158): 6-O-methylguanine DNA methyltransferase, DNA binding domain
  misc_feature (1)..(158): Xaa is any amino acid
MKYIYFYKYQMNNKFVIKLGIAEDGGNDTSGKAGGKTAICGVFLNAVNAPNGYEKKETPLIKKAALQFGEYFKGKRKSFNLPLTMQGTDFQMKVWNALKRVPYGKTISYGELAATIGNPKACRAVGMANNRNPIAIIVPCHRVIGRDGSLTGTEAGFE

SEQ ID NO: 4505 - DNA, 495 bp, Unknown
  Obtained from environmental sample
  misc_feature (1)..(495): n is a, c, g, or t
atggtggacaggctctgcacgcaggcggacaggcggctggacttggtcatcatcgactacctgcagctcatctccagcccggcggacagcaggggcgcgaaactgacggaggctgtccgcatcggtgagataagcagggcgctcaagctgctggccaaagaccgggggattcccgtggtggtgctgtcgcagctcaaccgcgaggtggagcacaggcagtccagcaggcagagcagcaggccgcagttgtccgacctgcgggactccggtgccatagagcaggatgcggacattgtgatgttcatccaccgaaggaagaaactggtcaacgccactggcgccgacgacgaggacgccgacgccgacaagcgtgcggagcttgtggtggccaagcaccgcaatgggccgacggagattatcccactgtggttcgagggggcgttctcgctgttcaaggaaattgacatgtccaacgcgccgccgcgctacgtgtaa

SEQ ID NO: 4506 - protein, 164 aa, Unknown
  Obtained from environmental sample
  DOMAIN (1)...(86): DnaB-like helicase C terminal domain
  misc_feature (1)..(164): Xaa is any amino acid
MVDRLCTQADRRLDLVIIDYLQLISSPADSRGAKLTEAVRIGEISRALKLLAKDRGIPVVVLSQLNREVEHRQSSRQSSRPQLSDLRDSGAIEQDADIVMFIHRRKKLVNATGADDEDADADKRAELVVAKHRNGPTEIIPLWFEGAFSLFKEIDMSNAPPRYV

SEQ ID NO: 4507 - DNA, 597 bp, Unknown
  Obtained from environmental sample
  misc_feature (1)..(597): n is a, c, g, or t
atggttttaaaattttttctactcttcggtgcgttccttttaatatcctgcgggacaattgaacgcaacaatccaaacgaccctggtagcggtaattatcgcgggtatcagattataagtttactgcccgttgagccaagctcaaactctgcggcattgtcttcgtctagctcaaagccgagcagttcgtccgttgcttccagttcttcggcggcatcttcgtctagttcaaagccgagtagttcgagtagtaacttgtctagcagttcgtctgttgtttctagttcttcgatagcatcctcgtcaagttcaaagccgagtagctcatccattgcatcaagctcttcgaggacatcttcgtctagttcaaagccaagcagctcgtctgttgcgtcaagctctgcggttgtatcttcatccagttcaaagccaagcagttcctcgtctgctattgttggtactggtttatgtgcgggttttgtagatggcacaaagagagagcattacggaaaaagtaaagcccagttttgcgatccccgcgatggcaaaaaatatgtttatgtgaccataggcacacaaacttctcggccgatctga

SEQ ID NO: 4508 - protein, 198 aa, Unknown
  Obtained from environmental sample
  SIGNAL (1)...(22)
  misc_feature (1)..(198): Xaa is any amino acid
MVLKFFLLFGAFLLISCGTIERNNPNDPGSGNYRGYQIISLLPVEPSSNSAALSSSSSKPSSSSVASSSSAASSSSSKPSSSSSNLSSSSSVVSSSSIASSSSSKPSSSSIASSSSRTSSSSSKPSSSSVASSSAVVSSSSSKPSSSSSAIVGTGLCAGFVDGTKREHYGKSKAQFCDPRDGKKYVYVTIGTQTSRPI

SEQ ID NO: 4509 - DNA, 759 bp, Unknown
  Obtained from environmental sample
  misc_feature (1)..(759): n is a, c, g, or t
ttgtgcgtatcgttatggacgattccagtaccgctgactggccactttcacgtaaattcnggttgtcaccccgatatggcgtatgaccttcttattatggcgtgttcgcttggtttaaccccctacggtatatcttttcatgtgggaagccagcagagggatattggccagtggaacgaggcaatcgcgaaaacaaagtatcttttttcttctctggaaaaagatgaaaatatacgcctggcgatgatcaatatgggcggtggtttccctgcgtcatatattcagccgaccaatgatttaaccgaatacgcttcggaaatatacaaatacctaaccgatgattttggccctgatatacctttcattgtgcttgaacccggacgttctttggtaggcgacagcggcattttgatagcggaagttgttttaatttcaagaaaaaatcgtacggcgcttaaccgctgggtgtatcttgataccggaaaatttaacgggcttatagaaacgttaaatgaattaacaaaatatcctattgttatagaacatgaggacgatgaagcggaggaagaagaagtaattatcgccgggcctacctgcgacggtcttgatattctgtacgaagaccacaaataccggcttccgatgaacctcaaaacaggcgacaaactctattttctttccgccggagcgtatactgcaagttacgcttctgtctgttttaacggtttcccgccgattaaaacgtatattatggaataa

SEQ ID NO: 4510 - protein, 252 aa, Unknown
  Obtained from environmental sample
  DOMAIN (136)...(251): Pyridoxal-dependent decarboxylase, C-terminal sheet domain
  misc_feature (1)..(252): Xaa is any amino acid
MCVSLWTIPVPLTGHFHVNSGCHPDMAYDLLIMACSLGLTPYGISFHVGSQQRDIGQWNEAIAKTKYLFSSLEKDENIRLAMINMGGGFPASYIQPTNDLTEYASEIYKYLTDDFGPDIPFIVLEPGRSLVGDSGILIAEVVLISRKNRTALNRWVYLDTGKFNGLIETLNELTKYPIVIEHEDDEAEEEEVIIAGPTCDGLDILYEDHKYRLPMNLKTGDKLYFLSAGAYTASYASVCFNGFPPIKTYIME

SEQ ID NO: 4511 - DNA, 492 bp, Unknown
  Obtained from environmental sample
  misc_feature (1)..(492): n is a, c, g, or t
atggatgatttcagcagtggagagataaaaattcttgccgcgacaagtgtagtagaggtaggagtggatgtccccaacgcggcctgtatggttgtcgaacacgcggagcgtttcggcctttccgccctgcatcagcttcgcgggcgcgtaggcagaggacaggatcaatcgtattgttttcttgtctattctgacgaactgacagaagacggaaaaacgcgcttaaaggtaatgcttgaaaaccatgacggttttgttattgcggaggaagacctgaaactgcggggaccgggacagatagcgggtactgaacagtcggggtatttacttctcgggattgcaaatcctgtccgcgatactgaagaacttgaacgcgcccgctcggatgcgttcggcatacttgaaaacgatcccgatcttctgcttgcaggacaccgcgttattgccagagttctggaagaagcgccgcctttttcagaggtagcgttttag

SEQ ID NO: 4512 - protein, 163 aa, Unknown
  Obtained from environmental sample
  misc_feature (1)..(163): Xaa is any amino acid
MDDFSSGEIKILAATSVVEVGVDVPNAACMVVEHAERFGLSALHQLRGRVGRGQDQSYCFLVYSDELTEDGKTRLKVMLENHDGFVIAEEDLKLRGPGQIAGTEQSGYLLLGIANPVRDTEELERARSDAFGILENDPDLLLAGHRVIARVLEEAPPFSEVAF

SEQ ID NO: 4513 - DNA, 783 bp, Unknown
  Obtained from environmental sample
  misc_feature (1)..(783): n is a, c, g, or t
atgtgctgtatgtctaggatcgtcgtgaagaacgccaccaccggcgcggaactgatctggcggcacattgtcataaaaaaatcccttgacgacatttgccatacccttgaaatggaaatcgcgtcaagcgaaaaagggaaggtacgccggcacaacaaaatcgaagtgcggtacgcgaaccctttggtaaaggactcgcaagctgcaggcggccgccgcgttacaacagtgctggttgacgaggtaaccggcagtgccgacagccggaagcatagcattaccgttacaggccgttccccggcgcgggacatcatcgactcaacctggtcagaggattttgacgacatgacggtcctcgatttggccaaaaccatcgggaaaaggttcggcatacagtgccatgcgcttccgccgtccatcgccggcaaaatgcagcctatctacgccttccgcatagagaacgaaagcccgtgggtaaagctggtaagcgaggcggacaacgaagggtacatcctcaccagcaacgaggcgggggatttgtatttctgggaagtctccgcggccgtgcgcgacgagggctttaagctggcagaaggcgccaacatcaagtcgatcgactttgttgaaaacggggcggagcagttccatgagtatgtcgtaacggggtgcggggaagaggcccgggcaattgacgacagctgcccgggcggccggattttaaccatggacataaccgactgggatttcccggcggcaaagctccagcgccggcgctcgcgataa

SEQ ID NO: 4514 - protein, 260 aa, Unknown
  Obtained from environmental sample
  misc_feature (1)..(260): Xaa is any amino acid
MCCMSRIVVKNATTGAELIWRHIVIKKSLDDICHTLEMEIASSEKGKVRRHNKIEVRYANPLVKDSQAAGGRRVTTVLVDEVTGSADSRKHSITVTGRSPARDIIDSTWSEDFDDMTVLDLAKTIGKRFGIQCHALPPSIAGKMQPIYAFRIENESPWVKLVSEADNEGYILTSNEAGDLYFWEVSAAVRDEGFKLAEGANIKSIDFVENGAEQFHEYVVTGCGEEARAIDDSCPGGRILTMDITDWDFPAAKLQRRRSR

SEQ ID NO: 4515 - DNA, 798 bp, Unknown
  Obtained from environmental sample
  misc_feature (1)..(798): n is a, c, g, or t
atgagcaatgaggagttggcaatgagcaatgaacatttggcgttattgggggatgaggcggttgcgttaggggcaattcatgcgggtgtcagcgccgcttacggttatccgggtacgccctcaacggagatacttcaatacctcattgacgaatatgaaaagggaggcccgaacgttagttcgccgaactttagttcgccgatcgcccgctggtgttccaatgagaaaaccgcgcttgaagcggggcttggcgtttcattcgcggggcggcgggctataattaccatgaagcatgtcgggcttaatgtgtcggcggatccttttatcaacgcggctcttttgggcattaaaggcgggtttgttgtcgccgttgccgatgatccgggcatgcacagttcccagaacgaacaggattcccgcttctacgctgcgttcgcgatggttccctgccttgagccgcgcagccagcaggaagcctatgatatgacacgcgaggcatttgaggtttcagagcgttttcaggttccggtactgctgcgcctggctacccgtctttctcacgcgcgggccgcaatcactacgcgggacattgagtcgcaaaaacctgtttccaaaacaacggaaaaaaccgctggatgctgctccccgctatggcccgcaagaactattctattcttatcgaaaaacaaaaggaaatccgggaatggtcggcgggacatcccgcgaataaacttgaatttcccaagcacattccgatttggctgtaatcacctcggggctggncggggactactatga

SEQ ID NO: 4516 - protein, 265 aa, Unknown
  Obtained from environmental sample
  DOMAIN (23)...(248): Pyruvate flavodoxin/ferredoxin oxidoreductase, thiamine diP-binding domain
  misc_feature (1)..(265): Xaa is any amino acid
MSNEELAMSNEHLALLGDEAVALGAIHAGVSAAYGYPGTPSTEILQYLIDEYEKGGPNVSSPNFSSPIARWCSNEKTALEAGLGVSFAGRRAIITMKHVGLNVSADPFINAALLGIKGGFVVAVADDPGMHSSQNEQDSRFYAAFAMVPCLEPRSQQEAYDMTREAFEVSERFQVPVLLRLATRLSHARAAITTRDIESQKPVSKTTEKTAGCCSPLWPARTILFLSKNKRKSGNGRRDIPRINLNFPSTFRFGCNHLGAGRGLL

SEQ ID NO: 4517 - DNA, 828 bp, Unknown
  Obtained from environmental sample
  misc_feature (1)..(828): n is a, c, g, or t
atgctaaaaacgctgaagcttggccgaactatgactttcagaaatttcgtcctgtccacaggcgaaagcgattttcaatttgaactggagcggcagaaactacactgcgatggcgggctggacgtgcgcatcactagcattaatgcggagcgctggacttatggcgtcttcaatgacttgcacgggatggcgagcggcgcagacttcgcagaaagcatcaagagggccgcttgcgccaatcacggctgggctgggcgggacttcctagagaggctgtgcagcgagttggagagcgaccgcgatggcttcatcgcaaaattgcgtgggcggcatgcggactggataaaatcattctgccccagcgggtgcgatgggcaagttcggcgggtcgcggaaaggttcgcccttgtttcagtcgcaggtgggctggcttccgaatggggcatactcccctatgggccaactgagacgaccatcgcggcagttcacatctttaaggcatggttccgggacaggggtggcgcgggatcgcaggagagcctagcgatattggagaacaccaggaacttcttcaatacgaagggcccgatatacttccccaccccggatgacaaaaacccaaggcacacggacaccctaggcttccgggtacagcgtgagcagtgcaaagacgacaaagggaaagtcgcttgccagcggtgccgctgtgatgttcccaacgaagtgaatggcacttgcagctattgcggcaagcctatggcctgcccaaaaacaaaggcaactcccgcaaaagctccgactggtgtacgtatttcgactggtgggtga

SEQ ID NO: 4518 - protein, 275 aa, Unknown
  Obtained from environmental sample
  misc_feature (1)..(275): Xaa is any amino acid
MLKTLKLGRTMTFRNFVLSTGESDFQFELERQKLHCDGGLDVRITSINAERWTYGVFNDLHGMASGADFAESIKRAACANHGWAGRDFLERLCSELESDRDGFIAKLRGRHADWIKSFCPSGCDGQVRRVAERFALVSVAGGLASEWGILPYGPTETTIAAVHIFKAWFRDRGGAGSQESLAILENTRNFFNTKGPIYFPTPDDKNPRHTDTLGFRVQREQCKDDKGKVACQRCRCDVPNEVNGTCSYCGKPMACPKTKATPAKAPTGVRISTGG

SEQ ID NO: 4519 - DNA, 597 bp, Unknown
  Obtained from environmental sample
  misc_feature (1)..(597): n is a, c, g, or t
ttgggatggaaatcagaattggattcgtggcttagggcttataatttcggctatacaatcgtggacacccacgctctggcttttgcaaagccctctgcggaaaagggaagcttttacccggccaaaacgccccaggggattattgtttttggacgcgatttttattcagccgaagatatggcaaaaataatgcgggacccggtttaccggtttaatttccgggatcagggctttgagcttccggcaaaaaggttaggcccttttcttgggccgcagggcaatcgtaacagcacaggatataagtattgggccttaggggaggatggttcgggcggcgttctttacgacagcgaaaaggcttgccggaaagccgagagccatgcccgcttttttcttgacgagcgcctttcgcggcttagaacggcgtccggccttatggacgggcctgtcataagcctttgcgcttttgaggccgatagctttggccgctattggcatgaaggaagcggctttatcgagaccatttttagggaaggggcaaaaatcgaaggacttcagttcatgacgcctcgctcgtgccgatctgtcttcttttaa

SEQ ID NO: 4520 - protein, 198 aa, Unknown
  Obtained from environmental sample
  misc_feature (1)..(198): Xaa is any amino acid
MGWKSELDSWLRAYNFGYTIVDTHALAFAKPSAEKGSFYPAKTPQGIIVFGRDFYSAEDMAKIMRDPVYRFNFRDQGFELPAKRLGPFLGPQGNRNSTGYKYWALGEDGSGGVLYDSEKACRKAESHARFFLDERLSRLRTASGLMDGPVISLCAFEADSFGRYWHEGSGFIETIFREGAKIEGLQFMTPRSCRSVFF

SEQ ID NO: 4521 - DNA, 369 bp, Unknown
  Obtained from environmental sample
  misc_feature (1)..(369): n is a, c, g, or t
atgcgaagtttaacatgtattgtttgtccgatgggatgttctcttgaagttgacgactcaggcggtaaggacgctatctatgtaaagggaaataaatgtcaacgtggcaaggattatgctgtggaagaaattcgcgcgccaaaacgcgttgtaaccgcaacttgtatcattaatgggcaggcgcacgtttcttctgtaaaacgtgtgccggtaaagaccgctaccccctgcccaaaggaaaaaatccccgcccttttacaagatatttacaaggcaaaaataacccttcctgtaaaaatgggcgacattgtaattgcggactggaatggcagtaagatagacatagtagcgacaaggacgttaagttaa

SEQ ID NO: 4522 - protein, 122 aa, Unknown
  Obtained from environmental sample
  DOMAIN (2)...(119): Protein of unknown function (DUF1667)
  misc_feature (1)..(122): Xaa is any amino acid
MRSLTCIVCPMGCSLEVDDSGGKDAIYVKGNKCQRGKDYAVEEIRAPKRVVTATCIINGQAHVSSVKRVPVKTATPCPKEKIPALLQDIYKAKITLPVKMGDIVIADWNGSKIDIVATRTLS

SEQ ID NO: 4523 - DNA, 888 bp, Unknown
  Obtained from environmental sample
  misc_feature (1)..(888): n is a, c, g, or t
atgacagatcggccgagtttgggagataacgccttcacttccacttatccgaccgataacggcgtggtattttatctggcggttcctatccccgaattgcgggggcacattctggttgtaacaatttccggcaaatatttcagcgaacgggttaacacgtttaccgtctggaaaacagggcatatttttattgatgatgccgaagggacgataatcgccaatatccgcgatgaatgggtacaggctcgcgcgaattttatccgcatgggggaaactgacagtcaatacgcggagattggcagcgtgataaaactggcgtcgctgggcaatataggcataggctatttctcgatctccggcatcccgcggatgtgcgcgtacagacccataagcggctcgaaagaaggctggttccttggaataatatcgccgcttccggaaagcccggtaaaaaaccttgacagagggttcttagctgtcgggcttgtcgcgtttttattcagcctcctgggggcaattatagcgtcttattttattaaaaaaccttttgaagaaaccgccaagttaaaagaagaagctgagtttcaattaagaaccaaatccgattttcttgccaatatgagtcatgaaatccgcacgccgcttaatgtgataatcggccttacggatttagtgctggaagacgacactctcgataaaacagtcaccgaaaacctgataaaaataaacaacgccggcgacacgctcttaagcattgtaaacgatattttggacttctcaaaaattgagtcgggcaagctggcaataacaccggttgaatattatatgaccagcttgttaaacgacgttgtcaccctgggtattacccgtcttggggaaaaacggtaa

SEQ ID NO: 4524 - protein, 295 aa, Unknown
  Obtained from environmental sample
  DOMAIN (199)...(265): His Kinase A (phosphoacceptor) domain
  misc_feature (1)..(295): Xaa is any amino acid
MTDRPSLGDNAFTSTYPTDNGVVFYLAVPIPELRGHILVVTISGKYFSERVNTFTVWKTGHIFIDDAEGTIIANIRDEWVQARANFIRMGETDSQYAEIGSVIKLASLGNIGIGYFSISGIPRMCAYRPISGSKEGWFLGIISPLPESPVKNLDRGFLAVGLVAFLFSLLGAIIASYFIKKPFEETAKLKEEAEFQLRTKSDFLANMSHEIRTPLNVIIGLTDLVLEDDTLDKTVTENLIKINNAGDTLLSIVNDILDFSKIESGKLAITPVEYYMTSLLNDVVTLGITRLGEKR

SEQ ID NO: 4525 - DNA, 855 bp, Unknown
  Obtained from environmental sample
  misc_feature (1)..(855): n is a, c, g, or t
gtggaaggcgcggaaaattttgattttttccggcagcctgattttgtgaaagaacctttattgaaagggagttatgcggtttataaaaaagaaactttaattggggagggtacagggaaactatgccatatccataggccggaaataatagacgcgcttgggcggcggtgttggggcgatttgacggttgcaggcaacgaattacgcataacaatacccgaaaactggcttgccgcggcgaaataccctgtcattgttgaccccaatgtagggactacaacggtggggagccaatatttagttgaatatgacccgccggagcagccgtggaagcaactattgttcgagggcatgatacctgtaaaccgggtttttttagaggaaccgataaacggtttatgtacgggctttatgtatactaatgcaagcaggtttgaagagagcgggggccgcccggttctttattccgacagcggcggctgccctttaacaagaatatcaagggatgaagtgtttactaaatttacagtgagcagcacaaaccctgccggctggcgccccgcaatgtttttaactaacggttctgttccaggcggctcattttactggttcggcgtgtttaccgatttcttttgggaaaccagatttgactacggggaaaaatgttattgcgacgatttttggtatttagattatgaagtgcccgataagtaccccatatacaatgttaattggtacagcaattacaagctgtcaatgtattttaaatatacggcaaattatgaacggactttaacccagggggtaaccataaaagacagcaccaactgcccggaaattacttacggagtttga

SEQ ID NO: 4526 - protein, 284 aa, Unknown
  Obtained from environmental sample
  misc_feature (1)..(284): Xaa is any amino acid
MEGAENFDFFRQPDFVKEPLLKGSYAVYKKETLIGEGTGKLCHIHRPEIIDALGRRCWGDLTVAGNELRITIPENWLAAAKYPVIVDPNVGTTTVGSQYLVEYDPPEQPWKQLLFEGMIPVNRVFLEEPINGLCTGFMYTNASRFEESGGRPVLYSDSGGCPLTRISRDEVFTKFTVSSTNPAGWRPAMFLTNGSVPGGSFYWFGVFTDFFWETRFDYGEKCYCDDFWYLDYEVPDKYPIYNVNWYSNYKLSMYFKYTANYERTLTQGVTIKDSTNCPEITYGV

SEQ ID NO: 4527 - DNA, 453 bp, Unknown
  Obtained from environmental sample
  misc_feature (1)..(453): n is a, c, g, or t
gtgaattgccggaaacgacgaaagaaaacgcatttgacattttgcgtttcaggtacaaaacctacgcaaaaattttgcagaccggagggtatgatgggcgagaagattggcgatgaaagcgtgtatctgcgtatcatggaactgaaaaaaggaaaggtgcagtatacggacgcgactaacgctgcgcggctggttaatgaattcgggcgggacattcggtattttccggcgtggaaaaaatggattgtctggaacggcaagtattgggaaacggacgaaagcggcgcgttggtgcatgagaaggggcttgaaaccgtgcggaatatttatgacgaactcttgaacactaacgactaccgtgaaaggaacgaaattgagaatttcggcaagataagcgaaagcgtccggcggcgcgaggcaatgattaaggcggcgcaatacatcaaagagtga

SEQ ID NO: 4528 - protein, 150 aa, Unknown
  Obtained from environmental sample
  misc_feature (1)..(150): Xaa is any amino acid
MNCRKRRKKTHLTFCVSGTKPTQKFCRPEGMMGEKIGDESVYLRIMELKKGKVQYTDATNAARLVNEFGRDIRYFPAWKKWIVWNGKYWETDESGALVHEKGLETVRNIYDELLNTNDYRERNEIENFGKISESVRRREAMIKAAQYIKE

SEQ ID NO: 4529 - DNA, 429 bp, Unknown
  Obtained from environmental sample
  misc_feature (1)..(429): n is a, c, g, or t
ttgtcttcttcgctcattaaaagagattttctctccgcacccatccaaagcttatcgcgagcctcttcaaagtctaactgcgtaaccgttggatttccaaatctggcagccataagagccgcttcgttcacaaggttttccaaatctgcgccagcaagcccaggcgttccttttgcaacgtctttcacattaacttctttgtccagcggaactttgcgtttttccagatgcactctcaaaattgcctcgcgtccaaccaaatctggaagacccacaacaacctgcctatcaaagcgaccaggccttagcaaggctttatccaaaacatcggggcgatttgtggctgcaactaanataactccttcgtttggagcaaaaccatccatttcaacaagcaattggttcaaggtttgctcgcgttcatcgtga

SEQ ID NO: 4530 - protein, 142 aa, Unknown
  Obtained from environmental sample
  misc_feature (1)..(142): Xaa is any amino acid
MSSSLIKRDFLSAPIQSLSRASSKSNCVTVGFPNLAAIRAASFTRFSKSAPASPGVPFATSFTLTSLSSGTLRFSRCTLKIASRPTKSGRPTTTCLSKRPGLSKALSKTSGRFVAATXITPSFGAKPSISTSNWFKVCSRSS

SEQ ID NO: 4531 - DNA, 642 bp, Unknown
  Obtained from environmental sample
  misc_feature (1)..(642): n is a, c, g, or t
gtggagcttcttctgcgacttcttctttcggagcttcctgtggagcttcttccgcaactttttcttgcggagcttcctgtggaacttcttttgcaactttttcttgcggagcttcctgtggagcttcttccacaacttcttcttgtggagcttcctgtggagcttcttccacaacttcttcttgtggaacttccgttatcactctcagttttcccgttaacctttccttttcggcttttaacttttgttcttcagctattattttttgatgttcttcttttaatctctgctcttccctttgcctttcctcttcttttaatctctgcgcttcttttaatctttctttttcttcttttaacttttgctcctcagctattagctttagctcttcttcttttagcctttgcacttctcttaatctttcttcttctcttaatctctcttcttcttttaatctctgctcttcccttaaccttttttcttcttttaatctttctttttctgctattagcttttgctcctcttcttttagccttttttcttcagccattatccttttttcttcagcacattatcttttcttcttcttctttttttagccttagtcgttcttcttcttcgagcctctctcggccgatctga

SEQ ID NO: 4532 - protein, 213 aa, Unknown
  Obtained from environmental sample
  misc_feature (1)..(213): Xaa is any amino acid
MELLLRLLLSELPVELLPQLFLAELPVELLLQLFLAELPVELLPQLLLVELPVELLPQLLLVELPLSLSVFPLTFPFRLLTFVLQLLFFDVLLLISALPFAFPLLLISALLLIFLFLLLTFAPQLLALALLLLAFALLLIFLLLLISLLLLISALPLTFFLLLIFLFLLLAFAPLLLAFFLQPLSFFLQHIIFSSSSFFSLSRSSSSSLSRPI

SEQ ID NO: 4533 - DNA, 405 bp, Unknown
  Obtained from environmental sample
  misc_feature (1)..(405): n is a, c, g, or t
ttgtcttgcggagcttcctgtggagcttcttccgcaactttttcttgcggagcttcctgtggaacttcttttgcaactttttctttcggagcttcctgtggagcttcttctgcgacttcttctttaggagcttcctgtggagcttcttctgcgacttcttctttcggagcttcctgtggagcttcttccgcaactttttcttgcggagcttcctgtggaacttcttttgcaactttttcttgcggagcttcctgtggagcttcttccacaacttcttcttgtggagcttcctgtggagcttcttccacaacttcttcttgtggaacttccgttatcactctcagttttcccgttaacctttccttttcggcttttaacttttgttcttcagctattattttttga

SEQ ID NO: 4534 - protein, 134 aa, Unknown
  Obtained from environmental sample
  SIGNAL (1)...(25)
  misc_feature (1)..(134): Xaa is any amino acid
MSCGASCGASSATFSCGASCGTSFATFSFGASCGASSATSSLGASCGASSATSSFGASCGASSATFSCGASCGTSFATFSCGASCGASSTTSSCGASCGASSTTSSCGTSVITLSFPVNLSFSAFNFCSSAIIF

SEQ ID NO: 4535 - DNA, 390 bp, Unknown
  Obtained from environmental sample
  misc_feature (1)..(390): n is a, c, g, or t
ttgtggaactttttgaggaacttcttccgcaactttgtcttgcggagcttcctgtggagcttcttccgcaactttttcttgcggagcttcctgtggaacttcttttgcaactttttctttcggagcttcctgtggagcttcttctgcgacttcttctttaggagcttcctgtggagcttcttctgcgacttcttctttcggagcttcctgtggagcttcttccgcaactttttcttgcggagcttcctgtggaacttcttttgcaactttttcttgcggagcttcctgtggagcttcttccacaacttcttcttgtggagcttcctgtggagcttcttccacaacttcttcttgtggaacttccgttatcactctcagttttcccgttaa

SEQ ID NO: 4536 - protein, 129 aa, Unknown
  Obtained from environmental sample
  misc_feature (1)..(129): Xaa is any amino acid
MWNFLRNFFRNFVLRSFLWSFFRNFFLRSFLWNFFCNFFFRSFLWSFFCDFFFRSFLWSFFCDFFFRSFLWSFFRNFFLRSFLWNFFCNFFLRSFLWSFFHNFFLWSFLWSFFHNFFLWNFRYHSQFSR

SEQ ID NO: 4537 - DNA, 354 bp, Unknown
  Obtained from environmental sample
  misc_feature (1)..(354): n is a, c, g, or t
ttgtggaagaagctccacaggaagctccacaagaagaagttgtggaagaagctccacaggaagctccgcaagaaaaagttgcaaaagaagttccacaggaagctccgcaagaaaaagttgcggaagaagctccacaggaagctccgaaagaagaagtcgcagaagaagctccacaggaagctcctaaagaagaagtcgcagaagaagctccacaggaagctccgaaagaaaaagttgcaaaagaagttccacaggaagctccgcaagaaaaagttgcggaagaagctccacaggaagctccgcaagacaaagttgcggaagaagttcctcaaaaagttccacaaaaaattgtag

SEQ ID NO: 4538 - protein, 117 aa, Unknown
  Obtained from environmental sample
  misc_feature (1)..(117): Xaa is any amino acid
MWKKLHRKLHKKKLWKKLHRKLRKKKLQKKFHRKLRKKKLRKKLHRKLRKKKSQKKLHRKLLKKKSQKKLHRKLRKKKLQKKFHRKLRKKKLRKKLHRKLRKTKLRKKFLKKFHKKL

SEQ ID NO: 4539 - DNA, 309 bp, Unknown
  Obtained from environmental sample
  misc_feature (1)..(309): n is a, c, g, or t
atgcttttggggatagaaacagaaaaaactactgtatgggatatggcggatcatatcaacactaaagaagatgctatcgcttatattgaagcggctcttgaagaaaatgacaccgcttttttattatctgttcttggtgatattgccagatcaaagggtatgtcccagatagcaaaagacttaaaccttgcgcgtgaaagcctttatcgttccctttcgcaagacggtaatccctcgtttagtaccgttgccaaagtcttggacaatctggggttccagttaagcgttaagcagaaagttccggcataa

SEQ ID NO: 4540 - protein, 102 aa, Unknown
  Obtained from environmental sample
  misc_feature (1)..(102): Xaa is any amino acid
MLLGIETEKTTVWDMADHINTKEDAIAYIEAALEENDTAFLLSVLGDIARSKGMSQIAKDLNLARESLYRSLSQDGNPSFSTVAKVLDNLGFQLSVKQKVPA

SEQ ID NO: 4541 - DNA, 468 bp, Unknown
  Obtained from environmental sample
  misc_feature (1)..(468): n is a, c, g, or t
ttggccgaatccgtggtctgtgtggatgtttccgccgccgncctggagaccctcaagataaacgccactctcaacggcgtgagcgacaggatcaaaacagtagaagccgatgtctttgaatatttaagggcggcggaacgcagaaaagaacgctacgatctaataatcctggatcccccggctttcgcgaaaagcaggctgtccctggaaggcgcaatccggggctacaaagaaatcaacctccgggcaatttccatgctttcaaagggcggtgtccttgttacttcttcctgcagtcaggcggtggacgaggctaatttcagaaagatggtcaccgaagcggcggcggacgccggtagacggcttgtcgagacagacttccgccgccaatcggtggatcacccaattctggtgggctacgatgaatctttctaccttaaatgcgggttttatagggtggtggattag

SEQ ID NO: 4542 - protein, 155 aa, Unknown
  Obtained from environmental sample
  misc_feature (1)..(155): Xaa is any amino acid
MAESVVCVDVSAAXLETLKINATLNGVSDRIKTVEADVFEYLRAAERRKERYDLIILDPPAFAKSRLSLEGAIRGYKEINLRAISMLSKGGVLVTSSCSQAVDEANFRKMVTEAAADAGRRLVETDFRRQSVDHPILVGYDESFYLKCGFYRVVD

SEQ ID NO: 4543 - DNA, 807 bp, Unknown
  Obtained from environmental sample
  misc_feature (1)..(807): n is a, c, g, or t
atggatataggccgctatgcccgcgatacgctgaaccagcggcccgagtacctgtacgagctttttggaaaaatatcggcttttatccgtgatgtttccgccgggcaaatcatcattaccgccgatgatattaacagccagcttaaagcctttataaccaacgagctgctcggcaacaagcagatggtttttcttagcggcaatattgtcaggataatcggcactcttgcgataaatatgctggtaatggtgttttcgctgtttttcttttatgctgacgggccgtatctttcacggctggtactccacgccattccaattagaacagaatacatcagcacccttacaagaaaatttctggacattacacggaatcttttttccggctatattatcgtagcattgctgcaggcggtagtggcgtttatcatttttactatatttaaaataaacggatcgctggttcttgcggtagtgacgtttctctttgtctttatccccgtgcttggagccacagttgtatatatacccctggctatcctgaaaatcgcaagcgggaatatagcgggcggggtggttttctttattgtgtcggcggtttttatttccggcattgacaatgttctaaggccggtgtttctgagagaccggatacagcttcatccattgataatattttttgctattctcggcggattggccgtttttggctttaacgggtttattcttggtccggtactggtaattctgtttctcaccgttctggatctgttcttgactgaacacaaaatcggcgctcatgaataa

SEQ ID NO: 4544 - protein, 268 aa, Unknown
  Obtained from environmental sample
  DOMAIN (3)...(259): Domain of unknown function DUF20
  misc_feature (1)..(268): Xaa is any amino acid
MDIGRYARDTLNQRPEYLYELFGKISAFIRDVSAGQIIITADDINSQLKAFITNELLGNKQMVFLSGNIVRIIGTLAINMLVMVFSLFFFYADGPYLSRLVLHAIPIRTEYISTLTRKFLDITRNLFSGYIIVALLQAVVAFIIFTIFKINGSLVLAVVTFLFVFIPVLGATVVYIPLAILKIASGNIAGGVVFFIVSAVFISGIDNVLRPVFLRDRIQLHPLIIFFAILGGLAVFGFNGFILGPVLVILFLTVLDLFLTEHKIGAHE

SEQ ID NO: 4545 - DNA, 654 bp, Unknown
  Obtained from environmental sample
  misc_feature (1)..(654): n is a, c, g, or t
atgcagaggggaactttagtagttagcagggcggttaataaccactcgtactacaaaaagcgttttgaagctctgggatttcctgacgtaacggttacggctcttgataaagatgccttatcctctcttatccgtaaacaaaaaccaaaacaattatttatgggggcaagattttatcaatgctgtacgccttttttaatggggcaattacataaagattttcctaaaataaatatgactgctgtttgtatcggcgaataccctgccgaacttggtatgtattttattgtaaacggaattaaatcatactttacaagttttgagggtcttgaccaattctatatcggaattgacgaggtaagaaaaggcaatggttatatttcccctgcggcaatggctcgtatggatttgaggcaaactttcataatgcctgccggggatataactggcagagaaagggaagtgatacggcttatttgctgcggctataaggatttagaaattggcgataccctgcacatttcanaaaagacagtggctattcataaaacgcatatttttacttccttaaatgtccgcaatcctatagaaatggttattgccgctctgacgcttcaattgtacaccttgatgaactttctttccacccaatga

SEQ ID NO: 4546 - protein, 217 aa, Unknown
  Obtained from environmental sample
  DOMAIN (145)...(202): Bacterial regulatory proteins, luxR family
  misc_feature (1)..(217): Xaa is any amino acid
MQRGTLVVSRAVNNHSYYKKRFEALGFPDVTVTALDKDALSSLIRKQKPKQLFMGARFYQCCTPFLMGQLHKDFPKINMTAVCIGEYPAELGMYFIVNGIKSYFTSFEGLDQFYIGIDEVRKGNGYISPAAMARMDLRQTFIMPAGDITGREREVIRLICCGYKDLEIGDTLHISXKTVAIHKTHIFTSLNVRNPIEMVIAALTLQLYTLMNFLSTQ

SEQ ID NO: 4547 - DNA, 864 bp, Unknown
  Obtained from environmental sample
  misc_feature (1)..(864): n is a, c, g, or t
gtgcttttcacaacggcggcaggctgtaaatctggtacggattcgaacccggacgaagcgacagtaaagactatcaggctgttgtacggcggaggcgcgataactgattcgcttacggaaagtttgtcggcaggtacaatgaataaatttaccgcgaatgttcaggtaaccggcggagcttccaaagatttcacgcttacaagctctattcccgcagtcgcgtccgtatcgggaaaaactgttactttgattgcgatgggtgaaacgatcctaacggcaacttccacagacgattcgaccaaaacacattccgttaagttgtatgtcgtagaggataatccggctgattatcctgctccgtattatatcaccaacaattttggcgaggatgcgtcttccgagttattggcgcagtggcacaacgcctcttctgtagcttcacagaaactgcaaattgtgccggaatcaggcgactttgcaaatgcaaagactataacggtaacgggtacggagtttaatacagcaggaaccgcccgcggagagtatacggcaagaaatgtcttcagagcacatgtgagcggtcttaacccaaatacccgttataaataccgtataggcgattggggaaagtggtcgccggaatttaaacatttaacatcgggcggacgtaataccgattttagttttactgtagtagctgacccgcaaagcagttcgttggccgataatgattatatgcgcgtggcattgcaaaaagcgaatgaatttgacgcagataacagattctttcttaactgcggcgacattgtgaacaatacgtccagaccgggcgaacttaacgattatacaaccgtagcaaagtga

SEQ ID NO: 4548 - protein, 287 aa, Unknown
  Obtained from environmental sample
  misc_feature (1)..(287): Xaa is any amino acid
MLFTTAAGCKSGTDSNPDEATVKTIRLLYGGGAITDSLTESLSAGTMNKFTANVQVTGGASKDFTLTSSIPAVASVSGKTVTLIAMGETILTATSTDDSTKTHSVKLYVVEDNPADYPAPYYITNNFGEDASSELLAQWHNASSVASQKLQIVPESGDFANAKTITVTGTEFNTAGTARGEYTARNVFRAHVSGLNPNTRYKYRIGDWGKWSPEFKHLTSGGRNTDFSFTVVADPQSSSLADNDYMRVALQKANEFDADNRFFLNCGDIVNNTSRPGELNDYTTVAK

SEQ ID NO: 4549 - DNA, 396 bp, Unknown
  Obtained from environmental sample
  misc_feature (1)..(396): n is a, c, g, or t
ttgcttggaggcgatatggcgagagaggcgaaaccaccggcctgcgacgcggaggcgctcgggaggctgacgcgcatggcgcggagccgcaagggcgagcggcgcatgtggctgagggcggagatagtcctgcggtggctggacggcgagacttacgcggagaccatggaagccctcggcgtgagcgcggtgacggtggcccggtggaggaagaggttcggcgaggggggcgccgcggggctgtccgacaggcccaggggcggccgccccgccacgcacggcgtggagttcaggaagagggtgctggacaggctcgggcagccgccgcccgacgggttcgggcagtgggacggcgccctgctggcgggcgagctgggctgctccagcccgcgataa

SEQ ID NO: 4550 - protein, 131 aa, Unknown
  Obtained from environmental sample
  misc_feature (1)..(131): Xaa is any amino acid
MLGGDMAREAKPPACDAEALGRLTRMARSRKGERRMWLRAEIVLRWLDGETYAETMEALGVSAVTVARWRKRFGEGGAAGLSDRPRGGRPATHGVEFRKRVLDRLGQPPPDGFGQWDGALLAGELGCSSPR

SEQ ID NO: 4551 - DNA, 405 bp, Unknown
  Obtained from environmental sample
  misc_feature (1)..(405): n is a, c, g, or t
gtgatggccgaaatactcaaagaccgaatcttttatgaccagtcgggtggaggggtgactttctcgggcggcgagccaatggcacagccacaatttttgggggaactgctttcggaatgcaaaaaatcgggcatctccactgcattagacacctgcggttacacagacatggagaatctgctcaacctagcttgccaagccgacttagtactgtacgacctcaaaggccacgacgacgagcaccacataaccaacactggcgtccccgccgcgcccatcttgaacaatctggaagagttggcccaaactcacaaaaacatctggataaggctgccaatcatcccagggacacaccgacgacgaaagcgaaatggaaattgttggcggtgcgcttttgtaagttaa

SEQ ID NO: 4552 - protein, 134 aa, Unknown
  Obtained from environmental sample
  misc_feature (1)..(134): Xaa is any amino acid
MMAEILKDRIFYDQSGGGVTFSGGEPMAQPQFLGELLSECKKSGISTALDTCGYTDMENLLNLACQADLVLYDLKGHDDEHHITNTGVPAAPILNNLEELAQTHKNIWIRLPIIPGTHRRRKRNGNCWRCAFVS

SEQ ID NO: 4553 - DNA, 762 bp, Unknown
  Obtained from environmental sample
  misc_feature (1)..(762): n is a, c, g, or t
atggaaactcaggctattgccggccttgccccagtcgaacttgaaaaggttctttctcccctgccccgttttcgcgccgtacaaatttacaaatggataataagaggcgtttctgattttgagcaaatgacaaacatcccgaattccatgcgaaagaaattaaaggaacatttccgccttttttcaggcagtatcgttagctgtcataaagataccggtacaataaaaatagcaatatctctggaagacggcaaaaaaatagaagccgtccttttaagagacgggaaaaaccgcctcacagcctgcctttctactcaatgcggatgtccggcagggtgtgttttctgcagaacaggcgctcttggctttaaacgcaatcttgaatcaggtgaaattgtagaacagttttttttattagcagctttagccgctgcaaatgaaaaactacaaaaaaaagatgaacacttaaaagaaaaacatataatagacaacattgtcattatgggaatgggcgaacctctccttaatttggcgcatcttagaaaagctatctcgatttttaacgatccttccggcttgaatttttccaaacgtaggattaccgtctctacctgcggaatatgcggcagcctgtttgaccttgcggaaaacggcccctttgtacggctcgccctttcattaaccacggctgatgagatgctgcgccaaaaactgatgcccgttactgcggcaaatcctcttcaaaanataaagaagctctaa

SEQ ID NO: 4554 - protein, 253 aa, Unknown
  Obtained from environmental sample
  misc_feature (1)..(253): Xaa is any amino acid
METQAIAGLAPVELEKVLSPLPRFRAVQIYKWIIRGVSDFEQMTNIPNSMRKKLKEHFRLFSGSIVSCHKDTGTIKIAISLEDGKKIEAVLLRDGKNRLTACLSTQCGCPAGCVFCRTGALGFKRNLESGEIVEQFFLLAALAAANEKLQKKDEHLKEKHIIDNIVIMGMGEPLLNLAHLRKAISIFNDPSGLNFSKRRITVSTCGICGSLFDLAENGPFVRLALSLTTADEMLRQKLMPVTAANPLQXIKKL

SEQ ID NO: 4555 - DNA, 897 bp, Unknown
  Obtained from environmental sample
  misc_feature (1)..(897): n is a, c, g, or t
ttgttctacgaatcacnatcagcaaaaagagagtgtgagcagttccttgaagaacattttgatattatcaatctttctaaaatacccacaaaaaaaataaaagaaattaccgacgaaccccttatctggcgttactttgtaatcccattgcctacaaaacttgcggacagccagcttgacgaaagggaatttaccgcaaaatgcgtgttccgcgttaatacaaaaattgagggcgcttatgttttttcaagcgggaaaaatatgggcgtgttcaaggctgtcggttttcccgaagatgtcgggcgcttttacaaacttgaagaatacgagggctggtgctttacggcgcacggacgctacccgacaaatacgccgggctggtggggcggcgcccatccgttcgcgcttcttgattattctgtggtgcataacggcgaaatatcttcctacgataccaaccggcgcgccattgaaatgtacggctacaaatgcaccttgcagaccgacacggaagttattacctatataatagattatcttcacagaaaacaaaaacttacttttgatgaaatcgcttccgtcatcgccgcgtctttttggcagaccattgaaaaacagcagcccaaagagcgggaaatacatgaatatttgcgcgtaatgttcagcgcgcagttgataacaggtcctttttcaatccttgttggctttgacggcgggcttatggcgttaaacgacaggctcaaactgcgcagtatggtggtcggtgaaaaggacgatcttgtttacatttcaagcgaggaagcggctatccgcatcattcagcctgaccttgacaatgtgtgggctcccagaggcggccagcctgtaatcgtcaacataaacagaggtaaagcgtaa

SEQ ID NO: 4556 - protein, 298 aa, Unknown
  Obtained from environmental sample
  DOMAIN (94)...(267): Glutamine amidotransferases class-II
  misc_feature (1)..(298): Xaa is any amino acid
MFYESXSAKRECEQFLEEHFDIINLSKIPTKKIKEITDEPLIWRYFVIPLPTKLADSQLDEREFTAKCVFRVNTKIEGAYVFSSGKNMGVFKAVGFPEDVGRFYKLEEYEGWCFTAHGRYPTNTPGWWGGAHPFALLDYSVVHNGEISSYDTNRRAIEMYGYKCTLQTDTEVITYIIDYLHRKQKLTFDEIASVIAASFWQTIEKQQPKEREIHEYLRVMFSAQLITGPFSILVGFDGGLMALNDRLKLRSMVVGEKDDLVYISSEEAAIRIIQPDLDNVWAPRGGQPVIVNINRGKA

SEQ ID NO: 4557 - DNA, 753 bp, Unknown
  Obtained from environmental sample
  misc_feature (1)..(753): n is a, c, g, or t
ttgttgctgccaaatcagattcatcctgtttatgccgcgttgngagcggcattcgcgattgttatcgttaagtacagttttggcggacttggctcaaactggcttaatccggctcttggaggctggcttnttatacgcttctcatggccttccgtttttgtaaaggcgattgagaataatgtctcggaaatgatcgtttccggtttaagctccattgacaactccgttacaacgttttttaatgatacgattttatctgctacaggggttcaacttccgtccgggtatattaatcttttgttttttaacaactccggtcttattgtcgacagagggctttttacgcttttgcttggaactataattattacggcgttggggattaaccgagggtgggtgccgctggtttttctttcggtatatggctttttaatccgtcttgcgggagacgcgcccggaatattctggaacggggatttattgtacggtcttttttccggcggcactgtcgcggcggcttttattcttgccgcggaaccggcaagcggcgccaagttatggcagggagttttattctccgttgttttgggagctgttctttcatggtttttccgttaccgctgcatggattattcaggatgtataatcgctttggctcttgtaaattgctttacgcctctgatacgtcttcttgaagacagaattttcttttcacataaaaaaagcggcgtgctcccggagaatctgttatga

SEQ ID NO: 4558 - protein, 250 aa, Unknown
  Obtained from environmental sample
  misc_feature (1)..(250): Xaa is any amino acid
MLLPNQIHPVYAALXAAFAIVIVKYSFGGLGSNWLNPALGGWLXIRFSWPSVFVKAIENNVSEMIVSGLSSIDNSVTTFFNDTILSATGVQLPSGYINLLFFNNSGLIVDRGLFTLLLGTIIITALGINRGWVPLVFLSVYGFLIRLAGDAPGIFWNGDLLYGLFSGGTVAAAFILAAEPASGAKLWQGVLFSVVLGAVLSWFFRYRCMDYSGCIIALALVNCFTPLIRLLEDRIFFSHKKSGVLPENLL

SEQ ID NO: 4559 - DNA, 777 bp, Unknown
  Obtained from environmental sample
  misc_feature (1)..(777): n is a, c, g, or t
atgcgtaacaaattaacagacgagcttgctatttgcgggatgaatgcggtgcttgctgcggcggagtttcatccgctggagataaacaggctctttcttcgggaggacaggcttaaatcttttaccggtgtctgcaagcagcttgcggaacgtaagcggccttacaaaatttgcgaagacgaggaacttgagcgtgtctgcaaaagcgtccaccatcagggcgttgtcgctatgattaatgagcccgttatcgaggctttgagcgaggaagaccttgcgctgtggataaacgagaaaaagaccggcgttattcttgactctgtcgggaacgaccataatttgggcgctatcgcaagggcggcggctttttttgacgtaagttttctggtactgaacgaaaaggacgcggcttttaacggcgaagaaacgcggcttaccaccagcgcttaccgcgtcgcggagggcggttttgagcatataaccgtaaggaaaataatgaataccgccgccttcctgaaagacgcgtctaaatcgcttttgacaatagggacggatacaagggcaagacggcgtatcagcgacttgaagagcattgtatcaacagggaaaagcagaaaggggaccgtgcttgttcttggtaacgaggaaaccggcctgccgcaaaacgtgaaggatcaatgttcctgcctgctccgtattccgggaacaggcaatatcaacagcttaaatgtctctcaggcggcggcgctcttccttcacgctatttttgagacttag

SEQ ID NO: 4560 - protein, 258 aa, Unknown
  Obtained from environmental sample
  DOMAIN (10)...(85): RNA 2'-O ribose methyltransferase substrate binding
  misc_feature (1)..(258): Xaa is any amino acid
MRNKLTDELAICGMNAVLAAAEFHPLEINRLFLREDRLKSFTGVCKQLAERKRPYKICEDEELERVCKSVHHQGVVAMINEPVIEALSEEDLALWINEKKTGVILDSVGNDHNLGAIARAAAFFDVSFLVLNEKDAAFNGEETRLTTSAYRVAEGGFEHITVRKIMNTAAFLKDASKSLLTIGTDTRARRRISDLKSIVSTGKSRKGTVLVLGNEETGLPQNVKDQCSCLLRIPGTGNINSLNVSQAAALFLHAIFET

SEQ ID NO: 4561 - DNA, 816 bp, Unknown
  Obtained from environmental sample
  misc_feature (1)..(816): n is a, c, g, or t
atgaaaaaccgtattgttgttttattatatcttctggcgcttatttcccggccgttatttgcaaacggcatcacagaagagaacgcgcggaacgaccagggacaggcaaagtatgtgttcctgttcattggggacggtatgtcaatgccgcagatcctctccgccgaagtgttttcttccgcccgctcatcaaaggacataaatattacgcgcttacgattcagccaatttcccgtaatgggactggccgcaactcatgacacgggatctttcattaccgattcggcttcggcggcgacagcgattgcttccggtaacaagacattaagcggcgttattaacatggacgcgggcaggaagcggaaattcaaacccatcaccgaatacgtccatgaggcgggaatgaaggtcggcatagtgtcctctgtcacgctgaatcacgcaacgccggcggctttctacgcaaaggccgcgtcgcgaaacgactactacgatattgccgtacaacttgccgaaagttcttttgatttttttggcggcggctcaatttctcaaaggaccggaaaaaacagaaatcaacaagacgcggttacgattgcggcagacaacggttttatctatgtcaatacaaaagacgggtttaacgcgctcaagcccggcgcaggcaaggtcattgctgtcagcccgggtttgcaggatggcggcgcgatgccgtatgaaattgaccgcaagccggaagagctttctcttgccgattttaccaggaaggggattgaacttctgacaacccgctcggccgatctgatccttgtttaa

SEQ ID NO: 4562 - protein, 271 aa, Unknown
  Obtained from environmental sample
  SIGNAL (1)...(21)
  DOMAIN (30)...(271): Alkaline phosphatase
  misc_feature (1)..(271): Xaa is any amino acid
MKNRIVVLLYLLALISRPLFANGITEENARNDQGQAKYVFLFIGDGMSMPQILSAEVFSSARSSKDINITRLRFSQFPVMGLAATHDTGSFITDSASAATAIASGNKTLSGVINMDAGRKRKFKPITEYVHEAGMKVGIVSSVTLNHATPAAFYAKAASRNDYYDIAVQLAESSFDFFGGGSISQRTGKNRNQQDAVTIAADNGFIYVNTKDGFNALKPGAGKVIAVSPGLQDGGAMPYEIDRKPEELSLADFTRKGIELLTTRSADLILV

SEQ ID NO: 4563 - DNA, 876 bp, Unknown
  Obtained from environmental sample
  misc_feature (1)..(876): n is a, c, g, or t
ttggcttctaccgcgccggttttcggagcgggcttgcgcgacccggatctggtcaaagccgacaaacttatagacgaaaaaaaacacgatgaagccatccttgtattaaccgactatataaggcgcaatcccgaacgtttcgacaatgcccaaaaacgccttaaaaggatttatcaggaaagagaaaattttgacaaaacggcggaggaattgattaattcgcttttgaacgatccggaaaatcaggaaaaaatttacagcttgtcgacaaagttaaaatccatggaaaacgagtcaagtcccctcctgtcatcgtttgtatcaagaacgcatgaaatcgccgagtttaacgtattcagaaacagactaatcaatattctggaaacaggcagagcccagcttgacaagggcgaatgtgaagccgccctgcaaacttacgcaagcggaatggacttaatgcgcgatgagtttttcaacgaagggtacggtataaccgtagaaaataatatcaggcgcgagacggaaagggttaacgcggtcataggcgcgttccgcgcggcaagtaccggctttggagccccggccgcggaactggcgcgcgcgataacttccggcaatctgaacacaacttctgagattataaaccgcctgactccggcaatggacaggtttatcgcgcaaaaacaggaactgtacacggcgttaaatgcttttgacagcgctcttgacaggataagaagcgccaatcccgaaacggctgaccgcaaccacctttcgttcctgtcaatattgattaacgggcggcagggagaatcaatacaggaagggatgttaggcgcctttgaaactactggaaaaattcgattaatccgataa

SEQ ID NO: 4564 - protein, 291 aa, Unknown
  Obtained from environmental sample
  misc_feature (1)..(291): Xaa is any amino acid
MASTAPVFGAGLRDPDLVKADKLIDEKKHDEAILVLTDYIRRNPERFDNAQKRLKRIYQERENFDKTAEELINSLLNDPENQEKIYSLSTKLKSMENESSPLLSSFVSRTHEIAEFNVFRNRLINILETGRAQLDKGECEAALQTYASGMDLMRDEFFNEGYGITVENNIRRETERVNAVIGAFRAASTGFGAPAAELARAITSGNLNTTSEIINRLTPAMDRFIAQKQELYTALNAFDSALDRIRSANPETADRNHLSFLSILINGRQGESIQEGMLGAFETTGKIRLIR

SEQ ID NO: 4565 - DNA, 378 bp, Unknown
  Obtained from environmental sample
  misc_feature (1)..(378): n is a, c, g, or t
gtgcgcgtaaaaggctcggaagaagatactgaaaagttttaccgttactggaaagattcaaacgttattattcaaaaatatgatgatttttgcggtgcgcttgttaaaaaacaggcttcggacatatctccggttatccgaaaaccatgctggcacataatgagggatatgccggtattaattgacgggaccgtgcccctttgcagagaagacttaagcgcgtttaaacggcaaagtaaacgtgtaattgggaatgtttttaacgattctcttgaaaatatctggaaagaaggagatacttattacagagaacaatgctcaaaaaactattcaggactttgcaaagactgcgatgaacactacaccttcaatttttaa

SEQ ID NO: 4566 - protein, 125 aa, Unknown
  Obtained from environmental sample
  misc_feature (1)..(125): Xaa is any amino acid
MRVKGSEEDTEKFYRYWKDSNVIIQKYDDFCGALVKKQASDISPVIRKPCWHIMRDMPVLIDGTVPLCREDLSAFKRQSKRVIGNVFNDSLENIWKEGDTYYREQCSKNYSGLCKDCDEHYTFNF

SEQ ID NO: 4567 - DNA, 435 bp, Unknown
  Obtained from environmental sample
  misc_feature (1)..(435): n is a, c, g, or t
atggcaattgacccgctcaatcccctgataattcagagcgataaaaccttgctattggatgtccattccgcgcgggccgaagaagccagggcggcgattttgccttttgccgagcttgaaaaatcgccggaacatatccacacgtaccacataacacctctttcgctctggaacgccgccagcgccggttatacacccgccaacgtgacgcaggttttgaacgagtacacgcgctacagcattccctcgggcattacagagagttttgcggacacaatgtccagatacggcaaaatccgcatcgtggccgcggtcgaggggaagatggatctgctctttttaaccgcccaggacaaagctgtgctggctgaaatcggtgcggcaaaatccctggaaaagtacctgggaaaaacagcttcggggatcaccccttaa

SEQ ID NO: 4568 - protein, 144 aa, Unknown
  Obtained from environmental sample
  misc_feature (1)..(144): Xaa is any amino acid
MAIDPLNPLIIQSDKTLLLDVHSARAEEARAAILPFAELEKSPEHIHTYHITPLSLWNAASAGYTPANVTQVLNEYTRYSIPSGITESFADTMSRYGKIRIVAAVEGKMDLLFLTAQDKAVLAEIGAAKSLEKYLGKTASGITP

SEQ ID NO: 4569 - DNA, 522 bp, Unknown
  Obtained from environmental sample
  misc_feature (1)..(522): n is a, c, g, or t
gtgggtgtattgaccactatggatgatccggaagggcgtcccacggttgcggactatctgcgcgattttccttttcgtgtttttccggtgggacgccttgatatggacagcgccggtttgctcctgtttacgaacgacggcaagctcgcgcaccgcctggcgcatccccgctacggcgtagagaaggagtaccgcgtactcgtggcaggccggatcacccccgacagcatccgcgcgctggaggaaggggtagagctggaagagggcgttacgtcgcccgcgcgtgtgcgtattccggatgcgcgtgtttcgccgccggcagggcggaatattctgcacatcgttttgcatgagggatggaagcgcgaggtgcggcgtatgtgtgccgctgtcggtcttgaggttctggaactcacccggctgcgctatggctccgtgcggcttgatgatctcgctccgggggctttccggcggcttgatgagcgggagtacgcggagctcgcgtcgcggctcggactgtag

SEQ ID NO: 4570 - protein, 173 aa, Unknown
  Obtained from environmental sample
  DOMAIN (2)...(130): RNA pseudouridylate synthase
  misc_feature (1)..(173): Xaa is any amino acid
MGVLTTMDDPEGRPTVADYLRDFPFRVFPVGRLDMDSAGLLLFTNDGKLAHRLAHPRYGVEKEYRVLVAGRITPDSIRALEEGVELEEGVTSPARVRIPDARVSPPAGRNILHIVLHEGWKREVRRMCAAVGLEVLELTRLRYGSVRLDDLAPGAFRRLDEREYAELASRLGL

SEQ ID NO: 4571 - DNA, 564 bp, Unknown
  Obtained from environmental sample
  misc_feature (1)..(564): n is a, c, g, or t
atggcattttttgattttttttggaaaaaagtaaagtattataccgatacaagcgctcaaaacgccgtttccggaattattgaatatcttgcggaaacaagcgagcgtttgcgcaaaattgaaacaaggcaaaaagaaaccggcatccaacttgaagaaatcgaagattttctgcaaaacaacggcaatgaaaccgcacttgttgaaacgttgattgcgcttgccgacactatcggggatttttatttttttgccgccgaagacaggaactcgccgctttttgaacaggcatacatgatgtggaacagggcaaaaagcgcagtagaagccgcggggcttgagataattgacgcggacaacgcggtttttgattttcgtcttcattcggcggaaggcgccgaacagaatattaatatgccaaacggctatgtaatcaaaaccctgaaattcggctatatttataaggatgaagttatacggcgggcggctgtaatagttaataaaacagacaataagccagagaatgaaaccggcgaaccggataacaacataatttatttgtaa

SEQ ID NO: 4572 - protein, 187 aa, Unknown
  Obtained from environmental sample
  DOMAIN (10)...(168): GrpE
  misc_feature (1)..(187): Xaa is any amino acid
MAFFDFFWKKVKYYTDTSAQNAVSGIIEYLAETSERLRKIETRQKETGIQLEEIEDFLQNNGNETALVETLIALADTIGDFYFFAAEDRNSPLFEQAYMMWNRAKSAVEAAGLEIIDADNAVFDFRLHSAEGAEQNINMPNGYVIKTLKFGYIYKDEVIRRAAVIVNKTDNKPENETGEPDNNIIYL

SEQ ID NO: 4573 - DNA, 798 bp, Unknown
  Obtained from environmental sample
  misc_feature (1)..(798): n is a, c, g, or t
atgatcagatcggccgaggcttgtaaggtgcactgcgccgcgctttcttccactcttctggaaagcgagctcttcggccatgaaaaaggagcgtttacgggcgcgatttcccaaaggcacgggcgttttgagcttgcctcgggcggaaccctcttccttgacgaaatcggcgaaattgaccagaacattcagataaaacttctgcgcgtattgcaggaaaagaaatttgagcgcgtcggcggggagaaaacagttgaggttgacgtgcgcattgtcgccgccacaaacaaggatttaaaggccgagattgaaaaaggcaatttccgcgaagatttgtacttccgcttgaatgtggtaaacatattggtgccgccgttacgcgaaagaaaagacgacatcccgcttttggcggcttctttcttaaaagaattctctcaggaaaacggaaaaaatatcgagggcatacacgagaaagcgcgttcccgtctttattcctacgaatggccgggaaacatccgcgaacttcgcaactgtatcgagagcgctgttgttatgtgccagtcaaacatgataaccgtagacgatctgccccccggtctgcgggacgcggcggacgacggctggataaacatcaggctgggagcgagcatggaagagtgcgaacaaattattatccgcgataccctttcccactgcaaaggaaacaaaacaaaagccgccgacatgctcggtataggaagaaagacgcttcttcgcaaacttgacggcggcgagggcaaggaagattcgcaggaataa

SEQ ID NO: 4574 - protein, 265 aa, Unknown
  Obtained from environmental sample
  DOMAIN (217)...(254): Bacterial regulatory protein, Fis family
  misc_feature (1)..(265): Xaa is any amino acid
MIRSAEACKVHCAALSSTLLESELFGHEKGAFTGAISQRHGRFELASGGTLFLDEIGEIDQNIQIKLLRVLQEKKFERVGGEKTVEVDVRIVAATNKDLKAEIEKGNFREDLYFRLNVVNILVPPLRERKDDIPLLAASFLKEFSQENGKNIEGIHEKARSRLYSYEWPGNIRELRNCIESAVVMCQSNMITVDDLPPGLRDAADDGWINIRLGASMEECEQIIIRDTLSHCKGNKTKAADMLGIGRKTLLRKLDGGEGKEDSQE

SEQ ID NO: 4575 - DNA, 423 bp, Unknown
  Obtained from environmental sample
  misc_feature (1)..(423): n is a, c, g, or t
ttggaaaataagaaaactcgcctgatttacgagttcctgaagtttggcgtaacaggcggtctgggaacaataactaaccttctcattttctttctgctggttgatttaaacggattgcctgcaacacctgtcagtatcggctgttttattatcgccggaacccaaaattattttttaaatcatttatggtcattcagggaatataccggaaatacgcgtgtatccataaaaagatgggcgatgttcctggtgggctcattagccggacttggcatcaacattcttgtaatgaatttggtcttagcatcttttgctctgccatggaaatttatagcgcaggcctgcggaatcgcagccggaatgattatcaattttatcatttctaaatttgttattttccgaaggagaaaaaatgtcgtttaa

SEQ ID NO: 4576 - protein, 140 aa, Unknown
  Obtained from environmental sample
  DOMAIN (14)...(133): GtrA-like protein
  misc_feature (1)..(140): Xaa is any amino acid
MENKKTRLIYEFLKFGVTGGLGTITNLLIFFLLVDLNGLPATPVSIGCFIIAGTQNYFLNHLWSFREYTGNTRVSIKRWAMFLVGSLAGLGINILVMNLVLASFALPWKFIAQACGIAAGMIINFIISKFVIFRRRKNVV

SEQ ID NO: 4577 - DNA, 738 bp, Unknown
  Obtained from environmental sample
  misc_feature (1)..(738): n is a, c, g, or t
ttgaacggcgggaagggcgttttgcaaagggcgattatcgcgcctcatgggggcttggaagatttccggaagccctggcccggggccgcatttgcttcggcaggaggcagggttgcaaaaaaaaacccctcagnagtgataattatggggccaatccacgaaaacagcgaagaagggattttccttaccaattcacatttatatcaaactccattgggagatataatggttgatcaagaggcgtccggatggctcgaatcatacagccccctgatcaaagtaaatgatattccccatttatatgaacattccatagaggttttgctgccctttgttaagtattgtttcccgcagacccctgttgtcccgatattaatgggtgggcagaaaaagcagcatatccgcgtccttgccaatgcgctgcaggcaatctttaagccggaaatggaaaataccttactggtaatttcattcaacttgggtgttcattccaaagaatcaacagcattgaatatggcaaaggagtgccaacaacttttcagggatggaagacatgacgatctgcgcgcggcatttcaggacgggcggattacaggctgcggaggcgctttggttgccgctcttctgcaaagcggtttggttggtacggctcatccggctcttgcgtcggatttgctgcttaacgcaaagggagagaaggacagtaccgtctattacggcgccttctcgtttgaataa

SEQ ID NO: 4578 - protein, 245 aa, Unknown
  Obtained from environmental sample
  DOMAIN (2)...(243): Protein of unknown function DUF52
  misc_feature (1)..(245): Xaa is any amino acid
MNGGKGVLQRAIIAPHGGLEDFRKPWPGAAFASAGGRVAKKNPSXVIIMGPIHENSEEGIFLTNSHLYQTPLGDIMVDQEASGWLESYSPLIKVNDIPHLYEHSIEVLLPFVKYCFPQTPVVPILMGGQKKQHIRVLANALQAIFKPEMENTLLVISFNLGVHSKESTALNMAKECQQLFRDGRHDDLRAAFQDGRITGCGGALVAALLQSGLVGTAHPALASDLLLNAKGEKDSTVYYGAFSFE

SEQ ID NO: 4579 - DNA, 345 bp, Unknown
  Obtained from environmental sample
  misc_feature (1)..(345): n is a, c, g, or t
ttgcagatccgcgcggttttgcgaggcgaaacccctcttggcgccgatgaaatctccgccagaatgaacgccggggaagcggcgatatccgccatcaatcaggcggaacgcgcatcaagaagccattggactatggtctaccttgcaaataaaaaagattctgtatgggacgcaatcgctcttgaaaaaaaagggagccgctggacggtaataattccgtccctcgccctggaaacacaggttcccctgcgaaaagagctgtcgcctaacgacccgctgaagctggttctgaaatcggtgaatatcccgacaggcgaggcggtctttgcctcagccgccgagtag

SEQ ID NO: 4580 - protein, 114 aa, Unknown
  Obtained from environmental sample
  misc_feature (1)..(114): Xaa is any amino acid
MQIRAVLRGETPLGADEISARMNAGEAAISAINQAERASRSHWTMVYLANKKDSVWDAIALEKKGSRWTVIIPSLALETQVPLRKELSPNDPLKLVLKSVNIPTGEAVFASAAE

SEQ ID NO: 4581 - DNA, 861 bp, Unknown
  Obtained from environmental sample
  misc_feature (1)..(861): n is a, c, g, or t
ttgcctgctgggttcagcacaatagctcgtaccagcgactgcgaatttgccggagtggaaaacgcagaaaagaaaatttacggaatacaatttcaccccgaagttaggcacaccgaatttggcgacaaatttttggaaaattttgttcttgatatatgcggttgcaaaaaatcttggagcataaaaagttatgtgccgcagataagcgaaaaaataacaaaggcggcagagggcaaaaaaatatttttgctagtttccggtggggtagattccacagtggcatttgtgcttttgaataaggttttggggcaagaaagggttttgggtttgcatatagacaacggcttgatgcggctaaacgaaagccagcaagttatgaattttttgaaaaaagagggcatcaacaatttgcaaatttgcgatgctggaaaagattttttgcacgagttgcaaggcgtttctgagccggaaaaaaaacgaaacattataggcgaaacttttttaaaaattaaagacagcgaaatggcaaggctatcgctaaacgcaaacgattggataatggctcaaggcaccatttatcccgataccatagaaagcggcggcacagaaaatgcagattcaataaaaacacatcacaaccgtgtgcaaggcgttttagatttgcaagaaaaaggtttgcttttggaaccgcttgcggatttatataaagacgaggtgcgaattttgggcgaggaactcggcattccaaaggagctcatttggcggcatccttttccgggtcctggtcttggcgttaggcttttgtgcagcgatggaaaagcctctggaaaatccgagattcccgaattgaaaaagccatag

SEQ ID NO: 4582 - protein, 286 aa, Unknown
  Obtained from environmental sample
  misc_feature (1)..(286): Xaa is any amino acid
MPAGFSTIARTSDCEFAGVENAEKKIYGIQFHPEVRHTEFGDKFLENFVLDICGCKKSWSIKSYVPQISEKITKAAEGKKIFLLVSGGVDSTVAFVLLNKVLGQERVLGLHIDNGLMRLNESQQVMNFLKKEGINNLQICDAGKDFLHELQGVSEPEKKRNIIGETFLKIKDSEMARLSLNANDWIMAQGTIYPDTIESGGTENADSIKTHHNRVQGVLDLQEKGLLLEPLADLYKDEVRILGEELGIPKELIWRHPFPGPGLGVRLLCSDGKASGKSEIPELKKP

SEQ ID NO: 4583 - DNA, 840 bp, Unknown
  Obtained from environmental sample
  misc_feature (1)..(840): n is a, c, g, or t
ttgctctgcatagacgaacctgcaagtggcttgcacgaaaaagatattgaaaaattatggagcgtattgctccggttaaaagagagaggcaatactcttgccattatagaacaccacccgatgcttattaggcgagcggacaatgttattgaaatggggcctggcgcaggcgaggaaggcggcgaaatattgaattttgttcctgagagaaaaatagatttagatttgccaaaaaataacgttaaaaaatatttgaaaatttcaaaaatcaatttcaataatttgaagaatttaaaaattgaaattccaatgggagcgatgagcgttatatgcggagttagcggttcgggaaaaagctctcttttgtggggagttattgaaccatacgcaagaaagcatactgacttggctgttctagcggcaagaacgggccgagcctttgcgcaaaagcgaagcacaatagcgacagccattgacattatgcaagttatcaaaaatctttttgcgagcttgccggagagcaaaatcagaggttatttagcaccaaaattcggcacagacaaacccggaggccgctgcgaaacctgcaaaggagacggctatttgctagacccaagcggctacgaagaaagcgagtgcccaatatgtcaaggaaaaagatacagagacgaaattttggaaattcgttttaaactgatgtccatagccgatgttttggatttatccgtttcanaagccttggaaattttcgcgaattttgaaaatctaacaagcaaattaaaaccgctcgcagacacgggcctgcactatttgcggcttgggcaccaaccacgcatttaa

SEQ ID NO: 4584 - protein, 279 aa, Unknown
  Obtained from environmental sample
  misc_feature (1)..(279): Xaa is any amino acid
MLCIDEPASGLHEKDIEKLWSVLLRLKERGNTLAIIEHHPMLIRRADNVIEMGPGAGEEGGEILNFVPERKIDLDLPKNNVKKYLKISKINFNNLKNLKIEIPMGAMSVICGVSGSGKSSLLWGVIEPYARKHTDLAVLAARTGRAFAQKRSTIATAIDIMQVIKNLFASLPESKIRGYLAPKFGTDKPGGRCETCKGDGYLLDPSGYEESECPICQGKRYRDEILEIRFKLMSIADVLDLSVSXALEIFANFENLTSKLKPLADTGLHYLRLGHQPRI

SEQ ID NO: 4585 - DNA, 861 bp, Unknown
  Obtained from environmental sample
  misc_feature (1)..(861): n is a, c, g, or t
gtgctccatgcccctcgccagacggggaagacgacgtttttgcagaattgggcgagggagatgaactctgccgatgaggttgcggcttgttatgtaactattgagcgatgtcaattaatgtccgatccggagcggtgctttccaaatctatgcgcggcgattaaggaacatgcgcataaatccgatttaccggttccggatgtgaaggatgctccggcgggaagtatgttgtctcaaattttgagaaatttttctgaaatcgtcgcgccgaagccgcttgttttgttgtttgatgaggttgacgctttggaaggtcctgccctgatcggttttctacgtcagttgcgcgatggatttatggggcgcggcgttggaacgtttccggtgtccatcgccctggtaggcatgagggatttgaaggattacatctccgccgctaaagacggtcttcctcccagcccgatgtcgcctttcaacataaagacagattctattctattgggtaatttttcccgggacgacgtgcaaaagctcttcgcccagcgtaccgaagaaacaggtcaacaaatcacgggagacgcccttgaatatgtgtggaaccaatcacagggacagccgtggattgtcaattcgctgtttagacgcgctaccatgcgcgtattgcgggaagacgattacagcgacgtaacgttggagcacgtagaatcggcccgtgaacagatgaccctcgctcgtgaaacccatcttgattctcttgccgtaaggcttagggacgcaaagatcaaaaaaatcattgaaccgataataatcggcgaaattaatccggatttgggtcgtgaaaatccggatttcaatacgtga

SEQ ID NO: 4586 - protein, 286 aa, Unknown
  Obtained from environmental sample
  misc_feature (1)..(286): Xaa is any amino acid
MLHAPRQTGKTTFLQNWAREMNSADEVAACYVTIERCQLMSDPERCFPNLCAAIKEHAHKSDLPVPDVKDAPAGSMLSQILRNFSEIVAPKPLVLLFDEVDALEGPALIGFLRQLRDGFMGRGVGTFPVSIALVGMRDLKDYISAAKDGLPPSPMSPFNIKTDSILLGNFSRDDVQKLFAQRTEETGQQITGDALEYVWNQSQGQPWIVNSLFRRATMRVLREDDYSDVTLEHVESAREQMTLARETHLDSLAVRLRDAKIKKIIEPIIIGEINPDLGRENPDFNT

SEQ ID NO: 4587 - DNA, 456 bp, Unknown
  Obtained from environmental sample
  misc_feature (1)..(456): n is a, c, g, or t
atgctcagacatctgagagataccaagaagtatagcgctgaacagctaaacgcattaatacaaaaacatccaaatgtggttaactcggaaagcggcgcgtacaatgtatcgtcttatgaaaaattaaaaaccgctaaaacaattgatgttgattgcgccataaaatcttgttcttggggacggtttcaggtgatgggagaaaactttcgttggggcaaatattcttctccacaagagttggagttggcaatgaacgcctgtgacttacaccaatttaagtattttgtcgcgtttttagagaaaaagcctgaaatgctagatgcgcttctatccaaaaattgggaaaaaatcgccgattgttataatggtaaagcatggagaactaaaaatcccacgtatgcgggagatatagagaaatattactatcaattcaaaaacaattcgacaaaaacataa

SEQ ID NO: 4588 - protein, 151 aa, Unknown
  Obtained from environmental sample
  misc_feature (1)..(151): Xaa is any amino acid
MLRHLRDTKKYSAEQLNALIQKHPNVVNSESGAYNVSSYEKLKTAKTIDVDCAIKSCSWGRFQVMGENFRWGKYSSPQELELAMNACDLHQFKYFVAFLEKKPEMLDALLSKNWEKIADCYNGKAWRTKNPTYAGDIEKYYYQFKNNSTKT

SEQ ID NO: 4589 - DNA, 843 bp, Unknown
  Obtained from environmental sample
  misc_feature (1)..(843): n is a, c, g, or t
gtgacgattaaaaaacaaattaaccgcgttgtttccaccgcgccgccaaatacggagataatagccgatttgggcatagcccataaactcgttgccatagacgtccattcggcgaatgtcgcgggaattcccgatgaccttccacaactggattttttctaccccgacgccgaggtgatagtcaagcttgaacccgatataatcattgccaatgggcataatcccacaggcacgggcgaagatcccttccggcttctgcgtgaaatggggatccctgtggtgtatattcccatgagtgtgagcattaatgaaatttatactgatattgcgtttgtagcgaatattttacaagcgccgaaagagggataccaactgataaatacaatgaaagcgcaaattgatgaaattgcgcaggcagcggctaacatagaaaaaaagaaaaccgtttattttgaaatttccgctgcgccggatatgatgacttttgggaaaggaagctatattaacgatatgatttccgttattggggcgcgcaatgttgttgaaaatgagaattggctggtaatgcccggcgcggagtcaatcattaagcgtaatcccgatgttatcctgaccaatgtgaattacatacccgacccaatcggcgagataaagagcaggtccgggtttaagcatattaacgctgttatcaataattgcgtttgtcaaatagacaccgattcctcggtacggccctcaacccgcattattttagctttgcggcaaatgtctcaggcggactatccggagttgtttgagtattacgaagcgcgttatcacaggattatttatcttcgtgtttaa

SEQ ID NO: 4590 - protein, 280 aa, Unknown
  Obtained from environmental sample
  DOMAIN (7)...(241): Periplasmic binding protein
  misc_feature (1)..(280): Xaa is any amino acid
MTIKKQINRVVSTAPPNTEIIADLGIAHKLVAIDVHSANVAGIPDDLPQLDFFYPDAEVIVKLEPDIIIANGHNPTGTGEDPFRLLREMGIPVVYIPMSVSINEIYTDIAFVANILQAPKEGYQLINTMKAQIDEIAQAAANIEKKKTVYFEISAAPDMMTFGKGSYINDMISVIGARNVVENENWLVMPGAESIIKRNPDVILTNVNYIPDPIGEIKSRSGFKHINAVINNCVCQIDTDSSVRPSTRIILALRQMSQADYPELFEYYEARYHRIIYLRV

SEQ ID NO: 4591 - DNA, 714 bp, Unknown
  Obtained from environmental sample
  misc_feature (1)..(714): n is a, c, g, or t
atggacaaagaaaagaaaaaattactgttagttgcggtatctgtcggagtatttttactggtaacaattactgtcgccattatcattctaacaccaaaaacacaggaagctcaattttccacttcagttccttattcaaacggaagagtgcaagtaacccaacaggacgataatttttcccaaactacaccatcagagccagtagtcgtcagtacagaggttgacagaaaagacggcgacaatctgacaatcacaatacccagcccaaccacggcagcagttcccgaaatcgcgcaaattagcgacacaaaaaaaagcaatgaacggcccacaaccgtgacagttaaaccagctgaacctgcctctgcggcaaaacccaccactcaacccgccgcgccaaaaaccacaactacacccaaatcaaaaccatcagcggttgcaaaacctaccacaccaaccaaaacaataaatgacttctgggtacaaacaggcgctttttccgcgctagtaagagccgaagacgccaaagaaacactcgccgccaagggcattacctcaattgtagaaaaccgtgaaattaacggaaaaatctggtatcgggtacgcttaggcccctacacttccgaaagggaagccaaccactggcttgaaatagttaagttaattgacggcttcagcgacagtcagatacgacagacggttaggacaaattaa

SEQ ID NO: 4592 - protein, 237 aa, Unknown
  Obtained from environmental sample
  SIGNAL (1)...(26)
  DOMAIN (155)...(232): Sporulation related domain
  misc_feature (1)..(237): Xaa is any amino acid
MDKEKKKLLLVAVSVGVFLLVTITVAIIILTPKTQEAQFSTSVPYSNGRVQVTQQDDNFSQTTPSEPVVVSTEVDRKDGDNLTITIPSPTTAAVPEIAQISDTKKSNERPTTVTVKPAEPASAAKPTTQPAAPKTTTTPKSKPSAVAKPTTPTKTINDFWVQTGAFSALVRAEDAKETLAAKGITSIVENREINGKIWYRVRLGPYTSEREANHWLEIVKLIDGFSDSQIRQTVRTN

SEQ ID NO: 4593 - DNA, 906 bp, Unknown
  Obtained from environmental sample
  misc_feature (1)..(906): n is a, c, g, or t
atgatcagatcggccgagggtgtatgtgcaatgagcagtgagaatgactatctcacccaacagcttatcacatatatcggaaataaacgcgcgttattgggatttattggggatggaataagaaaagtacaagaaaaattgaacaaagaaaaattaagaatgtttgatgtttttagcggatcgggcattgttgcaagatattttaaacaattttcagagttattactcgtaaatgacctcgagaaatattcaacattaataaatgaatgctatttgtcgaatgataatgaaagaaatgaatttattttgcgtaaatattattatgaattaatcgaaggggcaaaaaatggccttgttaagggtattatttccgaattatacgctccaaaaaatgacaaggatataaagcagaacgaacgtgtgttttatacaacaagaaacgcgatgtatatagataccatgcggcaattaattgataatattcccaaagaatatcaaaaattttttcttgctcccctgttgtcagaagcgtcaatacacgcaaatacttccggtgtttttaagggattttacaagaacagggaaaccggcattggtcaattcggcggaattaacaaagacgcgttattcagaataaccggcgatataacattgccatttcctgtttttagtaattttaattgtgaaacaatgatttataacggagattcaaatgagatcattcattcatcgcctgaaacggatatagcgtatttggaccctccctataatcaacatccttacggttccaattactttatgcttaatttaattttagattataaatatcccgggaattccagcaaaatatccggtataccggtgaattgggacaggtcggattatataaaaggaatcgcgcgttaa

SEQ ID NO: 4594 - protein, 301 aa, Unknown
  Obtained from environmental sample
  DOMAIN (25)...(299): D12 class N6 adenine-specific DNA methyltransferase
  misc_feature (1)..(301): Xaa is any amino acid
MIRSAEGVCAMSSENDYLTQQLITYIGNKRALLGFIGDGIRKVQEKLNKEKLRMFDVFSGSGIVARYFKQFSELLLVNDLEKYSTLINECYLSNDNERNEFILRKYYYELIEGAKNGLVKGIISELYAPKNDKDIKQNERVFYTTRNAMYIDTMRQLIDNIPKEYQKFFLAPLLSEASIHANTSGVFKGFYKNRETGIGQFGGINKDALFRITGDITLPFPVFSNFNCETMIYNGDSNEIIHSSPETDIAYLDPPYNQHPYGSNYFMLNLILDYKYPGNSSKISGIPVNWDRSDYIKGIAR

SEQ ID NO: 4595 - DNA, 612 bp, Unknown
  Obtained from environmental sample
  misc_feature (1)..(612): n is a, c, g, or t
atgggatgctgcaaacccagtgcagtttggagtggcaaaggtggcttgcaagccaatagctgcaatatgacaggcaccaacatcgggcataacgatggcgacagaagcgcatgtgatggtggaagtgcatttatgtgcatgaacaacgctccttggaaagttggcaatgttagctttggttatgttgcggctggtattggcaattgtggtgattgctatcaatttgatttccccaatggtcaagttatggttgttatggcaaacaatcacggagacataaaggaaggtgctaaatttgaccttatgattccaggtggcggagttggagattttgatgctttaacaaggcaagtcacaaatagcggcgtgagcaacccggatatgggtgtacgttatggtggatttagaggcgcatgtggctggagttacagtgcgtctaatatcaattgcgtaaagcagaagtgcgaatctgttttcaaaaatcttccaagcttgaaagaaggctgcctctggtggacaaatactttgggaactaatgaggagaattggaacaacccaaccgttagatataaaaaggtaacttgcccatcggaattaacaagcagatattaa

SEQ ID NO: 4596 - protein, 203 aa, Unknown
  Obtained from environmental sample
  DOMAIN (3)...(203): Glycosyl hydrolase family 45
  misc_feature (1)..(203): Xaa is any amino acid
MGCCKPSAVWSGKGGLQANSCNMTGTNIGHNDGDRSACDGGSAFMCMNNAPWKVGNVSFGYVAAGIGNCGDCYQFDFPNGQVMVVMANNHGDIKEGAKFDLMIPGGGVGDFDALTRQVTNSGVSNPDMGVRYGGFRGACGWSYSASNINCVKQKCESVFKNLPSLKEGCLWWTNTLGTNEENWNNPTVRYKKVTCPSELTSRY

SEQ ID NO: 4597 - DNA, 681 bp, Unknown
  Obtained from environmental sample
  misc_feature (1)..(681): n is a, c, g, or t
atgaagcacggaaaaaaataccgggaaagcctgaaaaaatacaactccgccaatacctatgatcttaatgaagcgatggggctggttaaatccctggccttcgccaaatttgacgagaccgtagacctttcagtcaaactcagcctgaaaaaaagtcagactgtacgcgataccgttgttcttccccaccaattccggggcgagaaaaaaatactggtattctgcaagcctgaaaaggaaaaagaagcccaggaggccggcgcggcgtttgtgggagccgatgatcttatcgaaaaggtaaaaggcggctggactgattttgatgttgccgttgcaactcccgacatgatgaaggacgttggtaaactgggtatggtgctgggacgcaagggtttgatgcccaatcccaaaaccggcacggtaaccttcgacttaaagggtacgctggcggaactgaaaaaaggacgcaccgaattccgcgccgataaaaccggcgttgtgcatcttgccatcggtaaggtttctatggaagcggcacagcttgccgaaaacatcaaaacggtcattgaggaaatcaaacggaaacgtcccgcggacgccaaaggtgattttatcaggaccatttcccgtagcttcaccatggggcccggcgtatgggttgccgttggggaacaggaataa

SEQ ID NO: 4598 - protein, 226 aa, Unknown
  Obtained from environmental sample
  DOMAIN (16)...(217): Ribosomal protein L1p/L10e family
  misc_feature (1)..(226): Xaa is any amino acid
MKHGKKYRESLKKYNSANTYDLNEAMGLVKSLAFAKFDETVDLSVKLSLKKSQTVRDTVVLPHQFRGEKKILVFCKPEKEKEAQEAGAAFVGADDLIEKVKGGWTDFDVAVATPDMMKDVGKLGMVLGRKGLMPNPKTGTVTFDLKGTLAELKKGRTEFRADKTGVVHLAIGKVSMEAAQLAENIKTVIEEIKRKRPADAKGDFIRTISRSFTMGPGVWVAVGEQE

SEQ ID NO: 4599 - DNA, 642 bp, Unknown
  Obtained from environmental sample
  misc_feature (1)..(642): n is a, c, g, or t
atgcggccttttgaaacggcaaaatcgccgcttgtaatggacggcagcataatcgggattgtggccgtggcgcacgacatttcagagcacagagcaatggaggaggaactccgctcggcatcgcgcgccaagtcaacttttcttgccaacatgagccacgaactcagaactcctcttaacgtagtcattggcctgacagatttgatactggaggaaagcggccttgccaaacatattaaggataatctctcaaagataagcaatgccggcaatatgctccttagcattgtaaacgacattcttgatttctcaaaaattgaatcgggcaaaatagaattaatgcccattgaatatcatatgccaagcctgcttaatgatgtgcttaccatggtcttcacacgcctcggcgaaaaacccattattttcaatttgaacatcagcgacgatctgccaaacaagctttacggcgacgatctgcgtgtaaagcagattttcaataatttattgagcaacgccatcaaatacactcaaaggggaactatcgggttaaacgtgaactgcagacgcgaaggcaatgatgtgtggatggaagcgtccgtcagcgacaccggaatcggtataagcgaagagaacttannataa

SEQ ID NO: 4600 - protein, 213 aa, Unknown
  Obtained from environmental sample
  DOMAIN (43)...(109): His Kinase A (phosphoacceptor) domain
  misc_feature (1)..(213): Xaa is any amino acid
MRPFETAKSPLVMDGSIIGIVAVAHDISEHRAMEEELRSASRAKSTFLANMSHELRTPLNVVIGLTDLILEESGLAKHIKDNLSKISNAGNMLLSIVNDILDFSKIESGKIELMPIEYHMPSLLNDVLTMVFTRLGEKPIIFNLNISDDLPNKLYGDDLRVKQIFNNLLSNAIKYTQRGTIGLNVNCRREGNDVWMEASVSDTGIGISEENLX

SEQ ID NO: 4601 - DNA, 894 bp, Unknown
  Obtained from environmental sample
  misc_feature (1)..(894): n is a, c, g, or t
gtgactgttgaagatttccttccgttgatctttagttcggtttccatggcgacaagaaattacgaacttgcccctattatntcagttatacaaaaggcgctgaaaaacggcggcgctcaatatgctaacaggctattcaatgaaggtcattataattacataaaaaataaattactgaaaagtttaaataccgaagaaaaggcgtatttgcagaatacctccgttgtaccggtgtcggctgcaccctggttttaccctcttgactattacaacaagtatgaaaagaaatgggagggaatcgccttcgacgtccttgacgaggttacaaacattaccgggcttacttttgagctggtcaatagtccggacgcatcctgggccgaggtgttccaaatatttaatgacggaaaggccgcaatatgtctcgatctaattccttcaccggaacggctcaaccgttatttatggtcaaaatacatctacctgtcggaaaattacgcgctcgtatccaaacatgattttccgaatatcagcatcggcgaaattcaatacgcgaaaatcggtcttattaaaagcacggcctgggctgatgtatttcagagctggtttcctgaagccgcaaatgtaactatgtttgattcccaggacgacgctttcctggccctggaccgcggtataattgatttggttatggcgggtacaaatgccctttccagcgtaaccaactattatgagctttcaaattataaagccaattatttatttaacagtaccattgattatgttatcgcctacaataaaaccgagcatgttctttggtctattattgacaaggcgcttaagtacgttgatataggaatcatttcaaagcggtgggaaaatanaaacttttaa

SEQ ID NO: 4602 - protein, 297 aa, Unknown
  Obtained from environmental sample
  DOMAIN (76)...(295): Bacterial extracellular solute-binding proteins, family 3
  misc_feature (1)..(297): Xaa is any amino acid
MTVEDFLPLIFSSVSMATRNYELAPIXSVIQKALKNGGAQYANRLFNEGHYNYIKNKLLKSLNTEEKAYLQNTSVVPVSAAPWFYPLDYYNKYEKKWEGIAFDVLDEVTNITGLTFELVNSPDASWAEVFQIFNDGKAAICLDLIPSPERLNRYLWSKYIYLSENYALVSKHDFPNISIGEIQYAKIGLIKSTAWADVFQSWFPEAANVTMFDSQDDAFLALDRGIIDLVMAGTNALSSVTNYYELSNYKANYLFNSTIDYVIAYNKTEHVLWSIIDKALKYVDIGIISKRWENXNF

SEQ ID NO: 4603 - DNA, 648 bp, Unknown
  Obtained from environmental sample
  misc_feature (1)..(648): n is a, c, g, or t
atgatttgtaggggcgcgcattgcgcgtccgcggacggccgatggcaaaaatgctatagacgcagaaggtggcagtttatgatttgcaacggacgcggcgcaaaggcgagtgccgaagcaaggccaaaatgggtgaacagaaaaataatagccggtattacagccggcatgttcacgttgtttgtaattgttggcctgtcattttttattttgaataaaaacgcgggcgaagaagtgtcagcaagcaaagcggtgccagcaaacacagcggcaaatcgtacgaaaaatcagtatacttatttgaagaaaacggatgttgaaccaactaaagaaaaagtattcgaaaggtatacgggaacggacagtgtttttaagataccggatggatatacggcaataggagatatggcgttttgggtttgcagcggcttaacaagcataacaataccgaacagcgtcacttctatcggaagtagtgcgttttttaactgcagcggcttaaaatctgtttatttccgaggcagcaaagcgccagacatagaaaacagcgcttttaggtattgcagcgatgaacttgtaatctactataaatccggcgcgtccggctgggatgatgttttaacagaatataaaaaatccccttattga

SEQ ID NO: 4604 - protein, 215 aa, Unknown
  Obtained from environmental sample
  misc_feature (1)..(215): Xaa is any amino acid
MICRGAHCASADGRWQKCYRRRRWQFMICNGRGAKASAEARPKWVNRKIIAGITAGMFTLFVIVGLSFFILNKNAGEEVSASKAVPANTAANRTKNQYTYLKKTDVEPTKEKVFERYTGTDSVFKIPDGYTAIGDMAFWVCSGLTSITIPNSVTSIGSSAFFNCSGLKSVYFRGSKAPDIENSAFRYCSDELVIYYKSGASGWDDVLTEYKKSPY

SEQ ID NO: 4605 - DNA, 603 bp, Unknown
  Obtained from environmental sample
  misc_feature (1)..(603): n is a, c, g, or t
atgcttgacgaaaacaccataacaaaactgcatgaaatccgtctgggcgttatggccgatcatttccgccagcaaacgcttgaccctgccatgaacgccatggcttttgaggaacggttcggcttgttagtcgatgccgaatggtctgcccgtaagtcaaaccgtctgaaacggatcgttaagaatgccaattacgccatttcaggcgcctgtgttgaggatattgcctatcattctgacaggaagctggacaaaaccatgattgcaaggcttgcaggctgctcctatatccatgaaaaccataacgtcattattatgggggccaccggtgttgggaaaacctatcttgcctgtgcgttgggcatggcggcaaaccgcaatttttttgcatcaaggtatgcgaggcttccggatctttttagcgacttggcaatcgcccgggcagacggaacgtaccgaanagtgataaagcaatatacccaggtaaagcttctaattctggatgaatggctcttatttactcttacggaaatagaaagccgtgaccttctggaaatatcgaggcaggagcacccaggttcacggtcttctgttccaatttga

SEQ ID NO: 4606 - protein, 200 aa, Unknown
  Obtained from environmental sample
  DOMAIN (23)...(52): IstB-like ATP binding N-terminal
  misc_feature (1)..(200): Xaa is any amino acid
MLDENTITKLHEIRLGVMADHFRQQTLDPAMNAMAFEERFGLLVDAEWSARKSNRLKRIVKNANYAISGACVEDIAYHSDRKLDKTMIARLAGCSYIHENHNVIIMGATGVGKTYLACALGMAANRNFFASRYARLPDLFSDLAIARADGTYRXVIKQYTQVKLLILDEWLLFTLTEIESRDLLEISRQEHPGSRSSVPI

SEQ ID NO: 4607 - DNA, 396 bp, Unknown
  Obtained from environmental sample
  misc_feature (1)..(396): n is a, c, g, or t
atggaaaccgcctgcggcatgagaccggaagtacagattttcgggaatgattatgacacgccggacggaacctgcatacgcgactatattcatgtcagcgaccttgccatcggccatgccgtcgcgctggactatatccgcgcaaacgacgcaagccttaccgtgaatctcggcagcgaaacaggcagttccgtaacggaagtgattgaaaccgcacggaaggtaaccggcagacccattcccgcgagagttgttggcaggcggcccggcgattcggcaaagctgtacgcgtcttccgcccgtgcccgtgaattacttggctggcaggcccgctattcagacatggaaacgctgataaaaacaagctggcaagtgtatcaggagcataaaaaatga

SEQ ID NO: 4608 - protein, 131 aa, Unknown
  Obtained from environmental sample
  misc_feature (1)..(131): Xaa is any amino acid
METACGMRPEVQIFGNDYDTPDGTCIRDYIHVSDLAIGHAVALDYIRANDASLTVNLGSETGSSVTEVIETARKVTGRPIPARVVGRRPGDSAKLYASSARARELLGWQARYSDMETLIKTSWQVYQEHKK

SEQ ID NO: 4609 - DNA, 339 bp, Unknown
  Obtained from environmental sample
  misc_feature (1)..(339): n is a, c, g, or t
atgaaagaaaaattatttacctggatagacaatgcttccccccttgctgtggaactggaaaccggattgaccaaatggcccgctatctctcccgattcagggggagagggtgaactggaaaagtgcgtctttctggaaacctggctgaaagcgcagggtattactcaactggaacgctatgacgctcctgatgaacgggcaaaaggcggagtgcggcccaaccttatcgccaccataccgggtgagacaaaaaattgcctgtgggttataagccacactgatgtagtgccgcccggcgagatttcgctctggaataccgatcccctggacgggcggtag

SEQ ID NO: 4610 - protein, 112 aa, Unknown
  Obtained from environmental sample
  misc_feature (1)..(112): Xaa is any amino acid
MKEKLFTWIDNASPLAVELETGLTKWPAISPDSGGEGELEKCVFLETWLKAQGITQLERYDAPDERAKGGVRPNLIATIPGETKNCLWVISHTDVVPPGEISLWNTDPLDGR

SEQ ID NO: 4611 - DNA, 519 bp, Unknown
  Obtained from environmental sample
  misc_feature (1)..(519): n is a, c, g, or t
atgatcaatactcgtatgcgcacagtacttgatgaagccaccgacccctggggcatcaaggtaaaccgcgttgaagttaaaaatatcgccccgcccaagagcattcaagaagctatggaaaagcagatgagggccgaacgcgaaagaagggaatcaatcctgaaagccgaaggcgaaaaacagtctgccattcttgtcgccgaaggccagaaagcgtcggcaattttaaaagccgaggcggaaaaagccgctgttatcttgcaggcggaagccgccaaagaagcgcaaatccgcgaagccgaaggcgaagcgcaggcaatccttaacgtgcaaaaagccactgcggacggccttaacatgataaagagcgtaaacgccgacgacccgcttataaaactgaaaagcctggaagcccttcaaaaagtagccgacggccaagcgacaaagataataattccttctgaaatacaaaatttagccggtcttgttaccagcgtggtggagctagttaagaaatag

SEQ ID NO: 4612 - protein, 172 aa, Unknown
  Obtained from environmental sample
  misc_feature (1)..(172): Xaa is any amino acid
MINTRMRTVLDEATDPWGIKVNRVEVKNIAPPKSIQEAMEKQMRAERERRESILKAEGEKQSAILVAEGQKASAILKAEAEKAAVILQAEAAKEAQIREAEGEAQAILNVQKATADGLNMIKSVNADDPLIKLKSLEALQKVADGQATKIIIPSEIQNLAGLVTSVVELVKK

SEQ ID NO: 4613 - DNA, 300 bp, Unknown
  Obtained from environmental sample
  misc_feature (1)..(300): n is a, c, g, or t
atgggcaacgatcatttgtttcatgtcatacgcaacaccataaaaggttacggcatctattccgaccgttcggatagcctgccctttgccgcccggtttacggaaaacgagatagccgtaatccggcttgtatgccagggcaaggaacgggacgaaatagcggcaaaacttggcatatcggaatcaatgataggaaagcacataacctcaatattggataaaacaggctttgacagcatttcaaaattcgcaatctatgcggtaagcgaaggcctaatagtgccggagccaactgtctaa

SEQ ID NO: 4614 - protein, 99 aa, Unknown
  Obtained from environmental sample
  DOMAIN (30)...(87): Bacterial regulatory proteins, luxR family
  misc_feature (1)..(99): Xaa is any amino acid
MGNDHLFHVIRNTIKGYGIYSDRSDSLPFAARFTENEIAVIRLVCQGKERDEIAAKLGISESMIGKHITSILDKTGFDSISKFAIYAVSEGLIVPEPTV

SEQ ID NO: 4615 - DNA, 540 bp, Unknown
  Obtained from environmental sample
  misc_feature (1)..(540): n is a, c, g, or t
atgaaaaaggcgcttattgttctttttgcattgtttgtctgcacggggcttttcgcccagcagcagtacaagataggggacaccggccctgcggggggcattgtgttttacgacaagggctttgcctcggacggctggcggtatctggaggctgcgcccgccgagacggaattcaccgccgattgggggtggtatgaaacgaatgtcgccggaacggggacagaggtcggaagcggaaggcggaacacccggcttattgtcgcggctttgggagcaaacgaaagcgcggcgcggaaatgtgccaacctgaatgtcaacgaatacgcagactggtttttgcccagcattgaagagctggatttgatatacaaaaaccttaagcataatgggcttggcggctttaaggacggattttactggtcttcgtcgcaggacaccggcaactacagcctcgcattgaacaggtcgttcagcgacggcaaacagtacatgggctacaaagactacgccaacaacgtgccggcagtgcgggccgtctga

SEQ ID NO: 4616 - protein, 179 aa, Unknown
  Obtained from environmental sample
  SIGNAL (1)...(19)
  misc_feature (1)..(179): Xaa is any amino acid
MKKALIVLFALFVCTGLFAQQQYKIGDTGPAGGIVFYDKGFASDGWRYLEAAPAETEFTADWGWYETNVAGTGTEVGSGRRNTRLIVAALGANESAARKCANLNVNEYADWFLPSIEELDLIYKNLKHNGLGGFKDGFYWSSSQDTGNYSLALNRSFSDGKQYMGYKDYANNVPAVRAV

SEQ ID NO: 4617 - DNA, 507 bp, Unknown
  Obtained from environmental sample
  misc_feature (1)..(507): n is a, c, g, or t
gtgaactttatccgctcgcgggtaanccgtattgaagacgcggaagacattttacaggacgtgttctatcaattcagtagtgtgaataatttgattaacccgatagaaaacatttctgcatggctctatcgagtcgctcgcaataaaataaccgatcattataaaaagaagaaagatgaaccattaccggcatcatacgatgaagacaacgaagattacatttttgacgagctaactgacattatctacggcgaagagtctacgcctgaaattgaaatgttacgttcactggtttttgaggaaatacaaacagcccttgccgatttaccgaaagaacagcgtgaagtttttgagatgactgaactgcttggtttttctgtaaaagaaactgcggaaaaaacccatacgcctgttaatactgttctttcgcgcaagcattacgcagtaaagtttctgcgaaaaagactggaagaattatacagcgatgttatgggagaaaacaaatag

SEQ ID NO: 4618 - protein, 168 aa, Unknown
  Obtained from environmental sample
  DOMAIN (105)...(154): Sigma-70, region 4
  misc_feature (1)..(168): Xaa is any amino acid
MNFIRSRVXRIEDAEDILQDVFYQFSSVNNLINPIENISAWLYRVARNKITDHYKKKKDEPLPASYDEDNEDYIFDELTDIIYGEESTPEIEMLRSLVFEEIQTALADLPKEQREVFEMTELLGFSVKETAEKTHTPVNTVLSRKHYAVKFLRKRLEELYSDVMGENK

SEQ ID NO: 4619 - DNA, 714 bp, Unknown
  Obtained from environmental sample
  misc_feature (1)..(714): n is a, c, g, or t
atgcaatatcttggatttaaagcttttgaaaactctataaataaaattaattcaaccgttgtttttatggcagaggaaaacgaacaaacgtttattataatcgcatgtaagaacggagacccacagttgtctgtagacggtatttttggatttaacgccgttgatcttggcggcggaatatataaagcggctctgacccatgaaaacgcctgtgttttacgaaaactttttccttttaccgcccctgtccgaggcttaaaaaacccgataagtttcgggcttggggatcgattgggtattgctacgccagggcatatcgatctttttaaaaacaaagatattttccctgtctttgcccagcagtcaatcagagagttgaaccttaccaaccgcacatacgaggacgtattggacgctgtatccttcgccgtgtttcgagaaggatacaaaaaaggatttggcgcggatggagatcatctaaaaaccgtaaaagacattgaatacgccctctcgctcaattttacaatgataactttggattgctccgaacatattaagaatgaagaaataaataatttcgcattacctgaatattataaaaagaaatatattgataaaacttttaatgtagaagatatttctcttgttttctcggaagatgatcttaaagaatgtgttgctattacgggaagcgaaatttatatctcgccataa

SEQ ID NO: 4620 - protein, 237 aa, Unknown
  Obtained from environmental sample
  misc_feature (1)..(237): Xaa is any amino acid
MQYLGFKAFENSINKINSTVVFMAEENEQTFIIIACKNGDPQLSVDGIFGFNAVDLGGGIYKAALTHENACVLRKLFPFTAPVRGLKNPISFGLGDRLGIATPGHIDLFKNKDIFPVFAQQSIRELNLTNRTYEDVLDAVSFAVFREGYKKGFGADGDHLKTVKDIEYALSLNFTMITLDCSEHIKNEEINNFALPEYYKKKYIDKTFNVEDISLVFSEDDLKECVAITGSEIYISP

SEQ ID NO: 4621 - DNA, 684 bp, Unknown
  Obtained from environmental sample
  misc_feature (1)..(684): n is a, c, g, or t
atgatagaccgcaaagcagtattacagcggcataatcctcattataaaacattgaaaaaatctgcgccgctttccatagggaacggcgttttctgctttaccgccgacttcacaggtttgcaaactttttttgacgactattctgcggcgcaagacgccttccctctctgtacaatggctgaatggggctggcattcgtatcctcaaaccaatgacgaagctcctttgaggttaacgccctatgatacctacggcagaactgtttattacgctacagacgacaaagggcaggaggaactttttaagcggattagagtcaacgcgcataaatttaacttaggtgtaatcggttttgaattacagggagaaaaacttgcgcttgaaaattgcgaacctgtcagccaactgctctctttatgggagggggctttattctcagaggttaagattgacggcaatattgttaaaactgaaacttttgtccacccgaaagaagacacattgtatgtccgctctacatcgtctttactaaggaagaaagaattgcgcataacaattaatttcccttatggcagtcataaaaaaaacggagcagacttctccgctcctcatttacataaaagtaaggttttaacaacaaggatggttcaatttaatagaaagagaacttctcggccgatctga

SEQ ID NO: 4622 - protein, 227 aa, Unknown
  Obtained from environmental sample
  misc_feature (1)..(227): Xaa is any amino acid
MIDRKAVLQRHNPHYKTLKKSAPLSIGNGVFCFTADFTGLQTFFDDYSAAQDAFPLCTMAEWGWHSYPQTNDEAPLRLTPYDTYGRTVYYATDDKGQEELFKRIRVNAHKFNLGVIGFELQGEKLALENCEPVSQLLSLWEGALFSEVKIDGNIVKTETFVHPKEDTLYVRSTSSLLRKKELRITINFPYGSHKKNGADFSAPHLHKSKVLTTRMVQFNRKRTSRPI

SEQ ID NO: 4623 - DNA, 537 bp, Unknown
  Obtained from environmental sample
  misc_feature (1)..(537): n is a, c, g, or t
atggcttatgtaatcagcgatagctgtacaggctgtacagcctgcgcccgcagttgcccggtgttcgccatctctggcgaaaaagggaaacgccacgagataaataatttgcgctgcgtggactgcggggtctgcgggaggatctgtccctcaggagcggtaagcggcgccgggggaaaaccctgcatccgggctgcgcgttctctctggagaaaaccgcgcatagatacggaactctgcagcgcctgcggtatctgcgttcaggactgttctctaaacgccctcagtatctccatgccggctttccgcggagatatcagggtgcacgcggaactgtccaaaccggaaaaatgcgtgggctgcgggatctgcgaaaggcactgcccgcttggggccgtggccatggcagcgcctaacgccgggccggaagacgcgcaaaacgcttttgacagcgtgggaccggttaaggaagaaaagcggggatcttttccgctgcccctgtacgcccgcattaatttatcactcggccgattctga

SEQ ID NO: 4624 - protein, 178 aa, Unknown
  Obtained from environmental sample
  SIGNAL (1)...(23)
  DOMAIN (73)...(96): 4Fe-4S binding domain
  misc_feature (1)..(178): Xaa is any amino acid
MAYVISDSCTGCTACARSCPVFAISGEKGKRHEINNLRCVDCGVCGRICPSGAVSGAGGKPCIRAARSLWRKPRIDTELCSACGICVQDCSLNALSISMPAFRGDIRVHAELSKPEKCVGCGICERHCPLGAVAMAAPNAGPEDAQNAFDSVGPVKEEKRGSFPLPLYARINLSLGRF

SEQ ID NO: 4625 - DNA, 432 bp, Unknown
  Obtained from environmental sample
  misc_feature (1)..(432): n is a, c, g, or t
ttgcttcttacaaggcgggcttgcttttaccaggacagggtgggtaatatccacgcgatagcccacactctgggaggcttttacaacacgcctcatgggctgnccaacgcggtgatccttcccattgtgctggaagattacggcagcaaggtttggaaaaagcttgcccgccttgcggaagccgcgggcgtttgccctgccagctcttcgacggacgaagaaaaagcgaaagctttcattgccgctatttacagcatgaacgccaagatgggaattcctcgtggctttgatttcataaaaaaagacgacataccgcgcatgatcaaatgggccgcaaaagaaagcaatcccctttacccggttccggtaatatataatcacgcccggttcaggaaggttatagagcaggtagtgaaaaacggggatcgttaa

SEQ ID NO: 4626 - protein, 143 aa, Unknown
  Obtained from environmental sample
  misc_feature (1)..(143): Xaa is any amino acid
MLLTRRACFYQDRVGNIHAIAHTLGGFYNTPHGLXNAVILPIVLEDYGSKVWKKLARLAEAAGVCPASSSTDEEKAKAFIAAIYSMNAKMGIPRGFDFIKKDDIPRMIKWAAKESNPLYPVPVIYNHARFRKVIEQVVKNGDR

SEQ ID NO: 4627 - DNA, 378 bp, Unknown
  Obtained from environmental sample
  misc_feature (1)..(378): n is a, c, g, or t
atgaaagaagattaccgcgaatggctaaagccggaatacggaaaaaagcgggcttccgaaataggagaaaaagcntgcatgcccgggcctttgcgtccaccaaaagaaggcacagtttatcttgccacagccgacggtgacggaaacatggtctcgtacatacaaagcaactacatgggttttggcagcggcgttgtaatccgaggaacaggtatttcccttcaaaactgcggagcggatttttcccttgatgccagtgcgcctaacacgctggctccgggcaaaaagagctaccacactatcatccccggttttcttaccaaagacgggaaagccgttggtccctttggggtcatggggggatatatgcagcactag

SEQ ID NO: 4628 - protein, 125 aa, Unknown
  Obtained from environmental sample
  misc_feature (1)..(125): Xaa is any amino acid
MKEDYREWLKPEYGKKRASEIGEKACMPGPLRPPKEGTVYLATADGDGNMVSYIQSNYMGFGSGVVIRGTGISLQNCGADFSLDASAPNTLAPGKKSYHTIIPGFLTKDGKAVGPFGVMGGYMQH

SEQ ID NO: 4629 - DNA, 846 bp, Unknown
  Obtained from environmental sample
  misc_feature (1)..(846): n is a, c, g, or t
atgtgggttgccgacatggattttgttacgccgccctgcgtgcaagaagcgctaatccgccgcatcagacacggaattttcggatactccgaaccggatcccgcatattttgatgttgttggcaaatggtttaaagaacgctttaattgggatacccagtgcgactggcttttaataactccgggagtagtaaatgcgctgtatatcgctgtctgcgctttaaccaggcagggcgatggcgttgttatacaacagcctgtgtataatccctttgaggcggccattaggcaaaccgggcggcgactgctggtcaatgagcttgtgtacggcgagggacattacagtatagattttcaggattttgaagaaaaaatcaagcaggcaaaattgttcattatgtgcaatccgcacaatccggtcgggcgcgtctggagcaaagatgaacttatgcgcatgggcgaaatatgtctgcgccatggcgtgatggttatcgccgatgagatccacgaggactttgtattccccggaaacaagcaccttgtattcgccgcccttggcgatgattttgccgatataaccgttacatgcacatccctgtcaaaaacctttaaccttgctggtctgattcacgccaatatttttatttccaacaagattatgcgtgataaattcaaagaagagtatgtgcatttcggtctaagccagccgggtgtaatgggattggaagcctgcaaagcggcgtatgaaggcggcgccgagtggctggaacagcttctggactatctcgctgggaatatgctgcatctaaaaacatatctttcaaaacacattccnaaaataaattaa

SEQ ID NO: 4630 - protein, 281 aa, Unknown
  Obtained from environmental sample
  DOMAIN (7)...(272): Beta-eliminating lyase
  misc_feature (1)..(281): Xaa is any amino acid
MWVADMDFVTPPCVQEALIRRIRHGIFGYSEPDPAYFDVVGKWFKERFNWDTQCDWLLITPGVVNALYIAVCALTRQGDGVVIQQPVYNPFEAAIRQTGRRLLVNELVYGEGHYSIDFQDFEEKIKQAKLFIMCNPHNPVGRVWSKDELMRMGEICLRHGVMVIADEIHEDFVFPGNKHLVFAALGDDFADITVTCTSLSKTFNLAGLIHANIFISNKIMRDKFKEEYVHFGLSQPGVMGLEACKAAYEGGAEWLEQLLDYLAGNMLHLKTYLSKHIPKIN

SEQ ID NO: 4631 - DNA, 795 bp, Unknown
  Obtained from environmental sample
  misc_feature (1)..(795): n is a, c, g, or t
atgggaagggcgatggaagatggcgccttgagcctcttgatcttcttcccggaacccagccgggttgtgttcagggcgacgtttgagaacgacgagcaggcggtgcggcgcgtccttctgtttgtcgatgtcgagcatccgcaggttgaaaccatttccccggaggcgaagagcgtccatcgtgacgagctctatgtttacggggacgcgagtgacaatttcgagcttaccgacgtgaatatcagcctgcgtccctttggtaaattctggtattcggttcccgaggcaatccgcggtctgtactttgacgtgaagactctgggggccgtttattttgacgcaggcgtcggcttgagtctctttgataacaatgtgcgcatccagggacagttcggtcttgcgcctccggggagtgatatctcactcctggttgacagcggtcggtataccggtgaagtttggggccttaaactggttgccaatatccttgacataccctttgactggctttttaaggatcgggactgggcatactataaaatgaagatcggcgttggggcaattttcgcctggttttcgatggaaggcatgcgtgaacccctgtatatgggcgcggtaatagcgcaagtcgatatcgctaatattgattttaaattaatttatcctaattggaaccgcttccatgtttgggctctgtacctgcagccggaattttggtttacctcaacagacgctatagatagtgccaaagttatcccgcgtattggcattggtatacgtgttaatgtattctag

SEQ ID NO: 4632 - protein, 264 aa, Unknown
  Obtained from environmental sample
  misc_feature (1)..(264): Xaa is any amino acid
MGRAMEDGALSLLIFFPEPSRVVFRATFENDEQAVRRVLLFVDVEHPQVETISPEAKSVHRDELYVYGDASDNFELTDVNISLRPFGKFWYSVPEAIRGLYFDVKTLGAVYFDAGVGLSLFDNNVRIQGQFGLAPPGSDISLLVDSGRYTGEVWGLKLVANILDIPFDWLFKDRDWAYYKMKIGVGAIFAWFSMEGMREPLYMGAVIAQVDIANIDFKLIYPNWNRFHVWALYLQPEFWFTSTDAIDSAKVIPRIGIGIRVNVF

SEQ ID NO: 4633 - DNA, 891 bp, Unknown
  Obtained from environmental sample
  misc_feature (1)..(891): n is a, c, g, or t
ttggattgcgtcggcttttatacaagtttgacaggcgacgtggtactggaagcgaaagccgatgtcaccatgaacctctttggcgcgaacacccccattatcgacactttttttacaattcctccccttccggcttacgacgcggttatggatattgtccgcgcgcaagaaggcgttgccggtttaacaagccaggtgtccggcaaggcgtatctggacttgttggatgtccgcgaacctgtcctgttatgcggcatagacgcggacagctattttccgcttttcccgggaattaatatcgaagaaggccgctttttagtttcgggtgaatatggcgccatgattactgtcgaacgcgcaaaaaggctcgaagcccaaagcggacagtatccgcggattggcgttcctttgctgtttacatccggaggcgcggttggttttaagatacgcgaagttccgcttgtggggatttattcttatgccaaccccggacaatttatgaacgaaattgtaattatagacccgcagacagtccgcgttcttaattccatacaggtggcaagttctcaggatattgagttaggcgaaaatgcccttgccctgttaaatgccgacactgatgatattttcagtgatatttttacggtaaatgaaaacgatacaacggaagaattttcagcagatatacttcaaacatatttatcgcaaaccaaaacagaagaaacaattaatctttcgggcggcgattggaattttataattcttaagctggaaaaaaataagaacgcccgttcttttatatcgtcctttaataaaaaacttgggccttacggcgttactgcggtagactggcgtactgccgccggtacttccgcgattttatgcttttaa

SEQ ID NO: 4634 - protein, 296 aa, Unknown
  Obtained from environmental sample
  misc_feature (1)..(296): Xaa is any amino acid
MDCVGFYTSLTGDVVLEAKADVTMNLFGANTPIIDTFFTIPPLPAYDAVMDIVRAQEGVAGLTSQVSGKAYLDLLDVREPVLLCGIDADSYFPLFPGINIEEGRFLVSGEYGAMITVERAKRLEAQSGQYPRIGVPLLFTSGGAVGFKIREVPLVGIYSYANPGQFMNEIVIIDPQTVRVLNSIQVASSQDIELGENALALLNADTDDIFSDIFTVNENDTTEEFSADILQTYLSQTKTEETINLSGGDWNFIILKLEKNKNARSFISSFNKKLGPYGVTAVDWRTAAGTSAILCF

SEQ ID NO: 4635 - DNA, 906 bp, Unknown
  Obtained from environmental sample
  misc_feature (1)..(906): n is a, c, g, or t
atgaaatttgccgtaccgcccgaaatggtttacggtgacgaccgaattatcctgtctgaacccgtcgcgcgtaaattgggcgccgtaatgggggacagtgtcattctggaagtcgatacgcgctgggggcagaaaaacacaggcgtattcattgtaaggggcatagtgaaagattcgtctatttttggttattataaagtttatatttcaaggttaacccttaaccgtttgttactttttaatgacgccgattgttcttctgttgggttcttttttagttctatatcgaatattgagcataaaaggcttcgtttgcagaatgccttgattgacaatattcaaatgggacctttggtctatgacagggaaggattattgcgtgaaacaggtcaatgggagggtgtggatggaatcagaatttttctttatacaatgcctgtctatctttcggaaatttccaatttattgggagctatgaacatccttacatattttttatacggaatgatgttgttaataatttttgtcagcgcggctgtaacataccggctgatacttcacgaacgggcaagggagatgggcattatgagggctattggtttttacggcggcgatttaaggcttgttctgtggacggaaatcattgccctgggaataatctccctgtgcgccggctttctgcttgcggttgttttaagcggcctggcttcgtttgtatctttttcatggtttccaagttttgaaatattccagaaaaacggaaagttgtccgttctttatctgcccaagacggttttaattaatgtggttctcgtgtttatagtgcttatttgcgccgcgtttttcccgtcgttaaaggcttcaaaaagaaatttaccggcgttattatcaggagaggctttatga

SEQ ID NO: 4636 - protein, 301 aa, Unknown
  Obtained from environmental sample
  DOMAIN (135)...(292): Predicted permease
  misc_feature (1)..(301): Xaa is any amino acid
MKFAVPPEMVYGDDRIILSEPVARKLGAVMGDSVILEVDTRWGQKNTGVFIVRGIVKDSSIFGYYKVYISRLTLNRLLLFNDADCSSVGFFFSSISNIEHKRLRLQNALIDNIQMGPLVYDREGLLRETGQWEGVDGIRIFLYTMPVYLSEISNLLGAMNILTYFLYGMMLLIIFVSAAVTYRLILHERAREMGIMRAIGFYGGDLRLVLWTEIIALGIISLCAGFLLAVVLSGLASFVSFSWFPSFEIFQKNGKLSVLYLPKTVLINVVLVFIVLICAAFFPSLKASKRNLPALLSGEAL

SEQ ID NO: 4637 - DNA, 576 bp, Unknown
  Obtained from environmental sample
  misc_feature (1)..(576): n is a, c, g, or t
atgcttgaagagctttcgattagaaattacgcgctgattgattccatcactctttctttccgcccggggtttaacgtcctgtcgggagagacaggcgctggcaagtcgataattgtcggctctttgagttttttattgggcggaaaagcggaaacagacgttatccgcacaggctgcgatgaagcgggcgtatcggcggttatttccgttaaaaaaaataacgccgaggttacggactggcttaaagggcgcgacattgaatgtgaggaagatactgttatcgtaagaagaaatatcaaaacgtcgggcagaggttccgcctatattcagaatgttcccgtaacaaggcaggacttggccgaatttacggcgtttttatttgatcttcacggacagcataaccatgaatctcttttaaaaaaagaaaaccaccgccgctaccttgaccgttttgccggtatagaggacgaggttcttgccttttacagggtgtttctggagttgacggacaagcgcaaatctttggaagcgtcttttgaaagcgacagggaaagggagaaaggctggaaattctga

SEQ ID NO: 4638 - protein, 191 aa, Unknown
  Obtained from environmental sample
  DOMAIN (1)...(186): RecF/RecN/SMC N terminal domain
  misc_feature (1)..(191): Xaa is any amino acid
MLEELSIRNYALIDSITLSFRPGFNVLSGETGAGKSIIVGSLSFLLGGKAETDVIRTGCDEAGVSAVISVKKNNAEVTDWLKGRDIECEEDTVIVRRNIKTSGRGSAYIQNVPVTRQDLAEFTAFLFDLHGQHNHESLLKKENHRRYLDRFAGIEDEVLAFYRVFLELTDKRKSLEASFESDREREKGWKF

SEQ ID NO: 4639 - DNA, 717 bp, Unknown
  Obtained from environmental sample
  misc_feature (1)..(717): n is a, c, g, or t
gtgtgggcaatcggatcccctgtaggactggaaaaaaccgtaacttcgggaattgtttccgcccttagcaggcgttttttgcaaataggggatgtttatcagattgatgccgcagtaaacggaggtaattcaggcggtcctttagtagacgttgaaggtcggcttgtgggaattgtttttgccggtatcgcatatcatcagggactgaactttgctatcccagcggaaacgcttgccgcagcccttcccgcgatgataaagggcggaaaagcgcagcgtccgtggcttggtcttacgttatgcgaaacattacagggagccgagatcatctacacagcgcctaatacccctgccgcgcgtcatcttattcgcgaaggttcttatataaaaacaattaacggaaaggtaataacggcacagcagggcgtgctaataccggcgatgcagaacgcgatttttccggcggggcctggagaacttgtcgcgctggaaacagttgatgccgaaggcgtagtanagaagaatattattatgactgttcgccgtcccgatcttccgttgtcggaagcggcaaaggtgngacagcgcgaaagaaatgcggcccctctggtcggtatggttctttctccgtatatggaaattattttcatcaaaccttgtcgtaagaaaaatagtgcgtgggttcagttgccgacaaaccgggaatatcgaagatga

SEQ ID NO: 4640 - protein, 238 aa, Unknown
  Obtained from environmental sample
  misc_feature (1)..(238): Xaa is any amino acid
MWAIGSPVGLEKTVTSGIVSALSRRFLQIGDVYQIDAAVNGGNSGGPLVDVEGRLVGIVFAGIAYHQGLNFAIPAETLAAALPAMIKGGKAQRPWLGLTLCETLQGAEIIYTAPNTPAARHLIREGSYIKTINGKVITAQQGVLIPAMQNAIFPAGPGELVALETVDAEGVVXKNIIMTVRRPDLPLSEAAKVXQRERNAAPLVGMVLSPYMEIIFIKPCRKKNSAWVQLPTNREYRR

SEQ ID NO: 4641 - DNA, 945 bp, Unknown
  Obtained from environmental sample
  misc_feature (1)..(945): n is a, c, g, or t
ttgtatcccctactattgcgtttacggccgaagaatttgccccctcagtatatcgcaagggacaatcctgaaaatgaagaatcgttcaacgccgatccttacgaagatccaccggaagtatcgatacatactttggatatgcgcggcatatatcgtgaatgttcgtttgtgccgggtgatttatttattgtccgtaccattaactggaatgaatgtcattttgaattggaaaaagtacagaaggataattggtcacacgccgatttagacaagtggcaggaagccgccgaaattggttttgaaagcagttttgccctgcttggtccgggcgcaagtacggaagagcagattgctttcgcgtactggtacggcggaaaacgcatgagggagatacccgcttattctttggaagaatttttatatgagaaaacaaaccgcgtagataccgtgccttatggcatagaaacgcgtttttggttcgcgggaaaagaaattcccgacagcacgaatcttcaaaattatacggttccgcctgacaggacgtttattgaagatttgctctacgaaaaaaacatacccatttctgaatttgtgattctttcgtatatcagagattctttttaccgtaacgaaaaatatgttgaccttgtaattaaccgtttggtgcctcccgttatccatcttgatgaaatcgagtgggatttgttagctgattatatcagtgaaagcatggaagatttttacaagggatactcgctctttttggatcagggcgcgggtcccgtccgtcaacgggtcgcggaacttcacaccgccgttgttgaactttccgcaaaattgcaaaaaggcgagattgaagccgcatggcttcctcggcacactttcattgtgctttcacaaatccagggacacgcggctgctttattggaagacccttgcttttga

SEQ ID NO: 4642 - protein, 314 aa, Unknown
  Obtained from environmental sample
  misc_feature (1)..(314): Xaa is any amino acid
MYPLLLRLRPKNLPPQYIARDNPENEESFNADPYEDPPEVSIHTLDMRGIYRECSFVPGDLFIVRTINWNECHFELEKVQKDNWSHADLDKWQEAAEIGFESSFALLGPGASTEEQIAFAYWYGGKRMREIPAYSLEEFLYEKTNRVDTVPYGIETRFWFAGKEIPDSTNLQNYTVPPDRTFIEDLLYEKNIPISEFVILSYIRDSFYRNEKYVDLVINRLVPPVIHLDEIEWDLLADYISESMEDFYKGYSLFLDQGAGPVRQRVAELHTAVVELSAKLQKGEIEAAWLPRHTFIVLSQIQGHAAALLEDPCF

SEQ ID NO: 4643 - DNA, 681 bp, Unknown
  Obtained from environmental sample
  misc_feature (1)..(681): n is a, c, g, or t
atgcttattccgcagatttattttccgtgcttggacaaaatactgaatgtttttgtaaaagacaaactttttttattgacgtgtcttgcgcattcggcgcggcttttattctcaggtttcggcgtcgggcttatttgcggattaacaacaggcatattggcgggctggagcaaacgctggagttactggataacccctcttatcaaaattatcggtcccattccctcaaccgcgtggatacctatcgcccttgtatgttttccaacctcaagacaggcgagcgtctttctgattgcgcttgcggtatggtttccaaccacgattttgacaagctccggcatatcaaatgtaaagaacgcgtattttgaagtcgccagtacgcttggagctaacacgtttcaaaaaatatttaagatagctttgcctgacgcaatgccgagtattttcatcggcgtttttaacggcacatgcgcgtcgttccttacgctcatgaccgccgaaatgcttggtgtgaaattcggcatcggctggtatataaactggcagcgcgaagttttagcgtacgcgaatgtatacgcggggcttattaccatcgcgatttctttttcattaatcataaccgcgctgtttaaactccgcgacagattattgngctggcagaaaggagtaatanaatggtag

SEQ ID NO: 4644 - protein, 226 aa, Unknown
  Obtained from environmental sample
  DOMAIN (29)...(219): Binding-protein-dependent transport system inner membrane component
  misc_feature (1)..(226): Xaa is any amino acid
MLIPQIYFPCLDKILNVFVKDKLFLLTCLAHSARLLFSGFGVGLICGLTTGILAGWSKRWSYWITPLIKIIGPIPSTAWIPIALVCFPTSRQASVFLIALAVWFPTTILTSSGISNVKNAYFEVASTLGANTFQKIFKIALPDAMPSIFIGVFNGTCASFLTLMTAEMLGVKFGIGWYINWQREVLAYANVYAGLITIAISFSLIITALFKLRDRLLXWQKGVIXW

SEQ ID NO: 4645 - DNA, 363 bp, Unknown
  Obtained from environmental sample
  misc_feature (1)..(363): n is a, c, g, or t
ttgatgcaaagtacaaataaaacataccgtatcgccgccgcgagtacggacggaaaaacaataaacgaacatttcggaagagcggtctcttttcttatttatgaaataggaaaagaaggttatacttttattgaaaacagaagcgtaaaacctataaaccgtgatagcgaacacaccgaagaaaatttggcgtcagctattgaagcgcttaaggattgtacggcgatagttgtggtcaaaatcggcgatccggtaaaacggatatttgaagcaaacggcatatccgtttttgaaaaagccgattccattgataacgcgctgtcaaaactagccgcatattacgcaaaaacagggggaaattaa

SEQ ID NO: 4646 - protein, 120 aa, Unknown
  Obtained from environmental sample
  DOMAIN (17)...(112): Dinitrogenase iron-molybdenum cofactor
  misc_feature (1)..(120): Xaa is any amino acid
MMQSTNKTYRIAAASTDGKTINEHFGRAVSFLIYEIGKEGYTFIENRSVKPINRDSEHTEENLASAIEALKDCTAIVVVKIGDPVKRIFEANGISVFEKADSIDNALSKLAAYYAKTGGN

SEQ ID NO: 4647 - DNA, 438 bp, Unknown
  Obtained from environmental sample
  misc_feature (1)..(438): n is a, c, g, or t
atgaacgagcctaccgctactatagcgcaaaatgaatacggatatgtcgccctgtttgactccgcggttgacgagccttacaaggatcaatactgctgcgcgtcttatgtgagcgacagacttgtcgaaaaacacaaggacattacagaaaaatttacccgcgcaatacaaaaagcaagcgcgtatattcagggacaccaagaagaaataacgcgtattcagattgaaaaaaattatgtaccgggagaccccgtaataaacgccgaagttttaaagaaatttaactatattccgtctgtaagcggcgcgtataaacaatttaccgtattagctcctcagcttcaggatatcggtatggtttcaaaagatattgatgtcgttgcccttcaaaaaaacagctttgtagagctaaagggacttgatgcaaagtacaaataa

SEQ ID NO: 4648 - protein, 145 aa, Unknown
  Obtained from environmental sample
  misc_feature (1)..(145): Xaa is any amino acid
MNEPTATIAQNEYGYVALFDSAVDEPYKDQYCCASYVSDRLVEKHKDITEKFTRAIQKASAYIQGHQEEITRIQIEKNYVPGDPVINAEVLKKFNYIPSVSGAYKQFTVLAPQLQDIGMVSKDIDVVALQKNSFVELKGLDAKYK

SEQ ID NO: 4649 - DNA, 564 bp, Unknown
  Obtained from environmental sample
  misc_feature (1)..(564): n is a, c, g, or t
atgaaattatattctacccctgatcatttttccccggtccccatgatcatgcacattgacggtaattctttttatgccgcctgcgagcgcgtattccgccccgatttatatcacagccccatagtggtattaaccaacaatgacggcataatcatagccttaaacgcagaatgtaaaaaattaggcttcaagcgcggcgacgttttctatcaagtcaaagacaaacttgaaaaaaagaaggtgaaaattttttccagcaactacaccctatatgccgatatgtccgcaagaatgaatttgatatataaccgcttcgcccccgaagtagaagcctactccatagacgaaagttttttattcttcccctcatggaacaacgccgattttaccgaaatcggtcagaacataaaaacagcggtaaccaaagaaaccggaataccggtatcaataggaattgcgcctaacaaaacgctggccaaaatgtgtaacaaattagccaaaaagcggggaaggtattggaacaataccaggtttatgcaattggctggaattaaatcangatga

SEQ ID NO: 4650 - protein, 187 aa, Unknown
  Obtained from environmental sample
  DOMAIN (19)...(186): impB/mucB/samB family
  misc_feature (1)..(187): Xaa is any amino acid
MKLYSTPDHFSPVPMIMHIDGNSFYAACERVFRPDLYHSPIVVLTNNDGIIIALNAECKKLGFKRGDVFYQVKDKLEKKKVKIFSSNYTLYADMSARMNLIYNRFAPEVEAYSIDESFLFFPSWNNADFTEIGQNIKTAVTKETGIPVSIGIAPNKTLAKMCNKLAKKRGRYWNNTRFMQLAGIKSX

SEQ ID NO: 4651 - DNA, 780 bp, Unknown
  Obtained from environmental sample
  misc_feature (1)..(780): n is a, c, g, or t
atgcgggaattatacataggcacaagcggttacgatacaagggatgggaaaggcgttttttaccccgaaaaactgccgcaaaaaaaatttcttgagtattattcaacacaattcaactcattggaactgaacggcacatattaccgtatgcccacgccggaacaaatgcaaaacatgataataagaacaggcggcaaagtaaaattcgccgtcaaagtgtttcaggagataacacacgccgaagataaatcccgatatcagctcttaatatacgaattcaaaaaagcccttgaacccctgcaaaaagacaatcttttgttatgtgcattattccaatttcccgaaagttttcattatgacaaaacagaacggatatatttagacgcacttctcaaggaaacatccggcataccgtcagtcgtagaaatgcgaaacacccaatggcaaaacgaccaagtatacaacgctttgcgcgagcgtaaaacaggctggtgtatcaccgacaacccaaacctgaaaaacctgatgaaacccgattttatatgcacaagcgaaatagcctacatacgctttcacggacgcaatgcacaaatgtggtacaatggcgacaatgtaacccgttacgactatctctataccgatgcagaattacaaacattcataaaccctataaaggaactattgaaacacgcaaaaatcgtccagttattttttaataaccatgccaaatctcaagccaccgtaaacgccaaaaagttagaattactgttgaaacaataa

SEQ ID NO: 4652 - protein, 259 aa, Unknown
  Obtained from environmental sample
  DOMAIN (20)...(258): Protein of unknown function DUF72
  misc_feature (1)..(259): Xaa is any amino acid
MRELYIGTSGYDTRDGKGVFYPEKLPQKKFLEYYSTQFNSLELNGTYYRMPTPEQMQNMIIRTGGKVKFAVKVFQEITHAEDKSRYQLLIYEFKKALEPLQKDNLLLCALFQFPESFHYDKTERIYLDALLKETSGIPSVVEMRNTQWQNDQVYNALRERKTGWCITDNPNLKNLMKPDFICTSEIAYIRFHGRNAQMWYNGDNVTRYDYLYTDAELQTFINPIKELLKHAKIVQLFFNNHAKSQATVNAKKLELLLKQ

SEQ ID NO: 4653 - DNA, 363 bp, Unknown
  Obtained from environmental sample
  misc_feature (1)..(363): n is a, c, g, or t
gtgaaaaagtacgccctgcttgcattgcttttatacaccgccgtgtcggcttttgcccaggatatggaggtgtttccgcagttggggcattcaggtaaggttacctctgtagcatttagtccagacggcaggcaggttctttcaggctctgaagatgaaactataaaactctgggatacaaacaccggaagtgaaatcaggactttttccgggcatacaaatcgggttagttcagtagcgttcagccatgatggaaggcagattctttcaggttcagcggaaaaaccatcaaactttgggaagcaaacacaggcagagaaatcaagactttttccgggcatactggttatgttacgtcagtaa

SEQ ID NO: 4654 - protein, 120 aa, Unknown
  Obtained from environmental sample
  SIGNAL (1)...(19)
  DOMAIN (22)...(59): WD domain, G-beta repeat
  misc_feature (1)..(120): Xaa is any amino acid
MKKYALLALLLYTAVSAFAQDMEVFPQLGHSGKVTSVAFSPDGRQVLSGSEDETIKLWDTNTGSEIRTFSGHTNRVSSVAFSHDGRQILSGSAEKPSNFGKQTQAEKSRLFPGILVMLRQ

SEQ ID NO: 4655 - DNA, 702 bp, Unknown
  Obtained from environmental sample
  misc_feature (1)..(702): n is a, c, g, or t
atggaagaagacgtgcttaacggatttgcggtactggaaaagaacgtcaaaaaaatgggagacataaaagaaaaaaattcgggagttatcaacggcattatattgctgggcaataaagtaaacaaaatccgcgatattgtgcgggttattaacactattaccgatcagactaaagttattgcgtttaacgcggcgctggaagcggctggcgccggggaaacaggcaagcgtttcgccgtggtggccgccgaggtaaacaggcttgccgacgatatagccgttcttacacgccagattcgggaacaggtcgaggaaattcagagttcttcttcttcgctgatcgtatacagcgaggaaggttccgacagaatcgccgagggctataaacttatcaaggatttggaagatgtttttaaggaaatcaaggcgggcgcggaaataacttccaatcaggcgcaggctatcaccgtttctacccagcagcaattgaagtccagcgaaaaagtcagtttctcaatttccgaggtttcccagggagtaaaacattttatcaactcggtcgaaaacgcggcggtgtccgccaaaaccctgacagaacgcactcgcgagcttgaacgcttcctgaccacagcgcaaagcgcgcaaacagcggcgcaaatagcggagaaagaagcaatcggacaggataaacatggcggttga

SEQ ID NO: 4656 - protein, 233 aa, Unknown
  Obtained from environmental sample
  DOMAIN (2)...(214): Methyl-accepting chemotaxis protein (MCP) signaling domain
  misc_feature (1)..(233): Xaa is any amino acid
MEEDVLNGFAVLEKNVKKMGDIKEKNSGVINGIILLGNKVNKIRDIVRVINTITDQTKVIAFNAALEAAGAGETGKRFAVVAAEVNRLADDIAVLTRQIREQVEEIQSSSSSLIVYSEEGSDRIAEGYKLIKDLEDVFKEIKAGAEITSNQAQAITVSTQQQLKSSEKVSFSISEVSQGVKHFINSVENAAVSAKTLTERTRELERFLTTAQSAQTAAQIAEKEAIGQDKHGG

SEQ ID NO: 4657 - DNA, 576 bp, Unknown
  Obtained from environmental sample
  misc_feature (1)..(576): n is a, c, g, or t
atgcgtccgcatttcatgcggacacagtttgacagcgcccttgaagcggtgttgctcctttcgtgggtgagccttaagcacggggacagcgtagccgttgggagcttcggcccggccagacgctggcttgggccgcgaaagggcttaagcgcctttcccctgctgatgaacggcctttatgaccttacaagtggtccctatccgtcttccccattttccgccttggaggacgcgctctttcgattaaagcggcggacttttattatccttataagcaacttccgcgaagaggacggccagtcactctcctggattcttaagcgccttgaaaagcggcatctccttttaatggtaagcttaagggaaaaagaatccgaattccttgcttcaaagtacccgttggagggcgaggaggctctggaaaccgccgctgccttttcgtacctggctgccagaagggaattgtatgcttcatgggaacattcaggccttttgaccctggaaacttccactgccgccctttcggcagcgctggtaaaccgttaccttctggtaaaacgttcggggcggttttag

SEQ ID NO: 4658 - protein, 191 aa, Unknown
  Obtained from environmental sample
  misc_feature (1)..(191): Xaa is any amino acid
MRPHFMRTQFDSALEAVLLLSWVSLKHGDSVAVGSFGPARRWLGPRKGLSAFPLLMNGLYDLTSGPYPSSPFSALEDALFRLKRRTFIILISNFREEDGQSLSWILKRLEKRHLLLMVSLREKESEFLASKYPLEGEEALETAAAFSYLAARRELYASWEHSGLLTLETSTAALSAALVNRYLLVKRSGRF

SEQ ID NO: 4659 - DNA, 651 bp, Unknown
  Obtained from environmental sample
  misc_feature (1)..(651): n is a, c, g, or t
atggtagctttgcttccccagaagaagcggattcgcagtccggcaggagccggagtgtattatcccgaaaataaaaaggaaacgctcgaatttttaaggagatttgaccttgaaccgggcaacggccgctgcgctcaggcaataatcgcccctcacggctcatggagcctttccggggaacttgccgcaaccgccttttccgccgcaatgggcagaagcaataacatcagccgcgttgttcttctgggccctattcacgacaaacgcgaaaaaggcgtttttttgtcggattcacacctttttcatacgccggtcgggaatatcacagtagacaaggaaattaccgaagaacttgaattcgcaagtgaatatttggaaattaacgatattccccaccttggagaacactcaatagagattcttcttccttttgtaaaatactgcttcccgtacgcctcgattattccggttcttatgggacagcctgaacaaaaatacataaaagaccttgcctcgacattaaaaaacgtgattgtccccatacttgatgaaactttgcttgtggtttcctgcaatctttccctgtatgaggataaaacgatagcgcaaaatcangcgcaggagtaccttaatttgatagtagggaaataa

SEQ ID NO: 4660 - protein, 216 aa, Unknown
  Obtained from environmental sample
  DOMAIN (13)...(213): Protein of unknown function DUF52
  misc_feature (1)..(216): Xaa is any amino acid
MVALLPQKKRIRSPAGAGVYYPENKKETLEFLRRFDLEPGNGRCAQAIIAPHGSWSLSGELAATAFSAAMGRSNNISRVVLLGPIHDKREKGVFLSDSHLFHTPVGNITVDKEITEELEFASEYLEINDIPHLGEHSIEILLPFVKYCFPYASIIPVLMGQPEQKYIKDLASTLKNVIVPILDETLLVVSCNLSLYEDKTIAQNXAQEYLNLIVGK

SEQ ID NO: 4661 - DNA, 960 bp, Unknown
  Obtained from environmental sample
  misc_feature (1)..(960): n is a, c, g, or t
atgctctgcagcatgcgaatctctgccccattcaggttttgtctattgcttcagcagatgcgctcttcaaacaaagaatcggttagccgcaaatacatgttcgggggccgctgtaacaagtacaccaatatgcgaaagcaggttaaggatgtgcctgtctttgactatgtggaaaaaaggcagaagatgatctttgaggaatacgctgcgccttcgggtgaagataaaaaacgcagcttcatcgtcggtatcccccgcgctttctcaacccataccctctacccgctttattcatggttctttcacgaactcggcataaaaacttttctctcttcggatgtggcgcacgaaggcgtggcaagggcggaatccacttactgtttcccggcggaaattgcccacggggcggtgcaggactgcctgaacaagggagcggactttgtgctattgccgcatttcagggatatgcccagctacgaggaaaaagttcacgcgaatttttgtcccataactcagggccttccttattacatcgaaaaggcttttcctgacgttgacaaaaaaaagtggcttccgctggtggtgagttttaaattcggcgaggagaaggcgctggagctttttcaggtgatgaacgagaaactcggcattggcgaggaagaaacaaaggctgcttttgaaaaagcccttgcgaaacagaacgagtacttctcggcggcgaaaaaattggggcttgctgctctggaagacgcccgtaaagctgaccgcccggttatcgcggttctgggacggccatataacgcgttcacgcccgaagccaacatggggattcccaggaagtttaccacgcggggctattccattgtgccatttgatattcttccgtttgaagatgaagaaatattttccatatgtactggtactacggtcagcaggatgttaaggccgcgagtctcttaa

SEQ ID NO: 4662 - protein, 319 aa, Unknown
  Obtained from environmental sample
  misc_feature (1)..(319): Xaa is any amino acid
MLCSMRISAPFRFCLLLQQMRSSNKESVSRKYMFGGRCNKYTNMRKQVKDVPVFDYVEKRQKMIFEEYAAPSGEDKKRSFIVGIPRAFSTHTLYPLYSWFFHELGIKTFLSSDVAHEGVARAESTYCFPAEIAHGAVQDCLNKGADFVLLPHFRDMPSYEEKVHANFCPITQGLPYYIEKAFPDVDKKKWLPLVVSFKFGEEKALELFQVMNEKLGIGEEETKAAFEKALAKQNEYFSAAKKLGLAALEDARKADRPVIAVLGRPYNAFTPEANMGIPRKFTTRGYSIVPFDILPFEDEEIFSICTGTTVSRMLRPRVS

SEQ ID NO: 4663 - DNA, 432 bp, Unknown
  Obtained from environmental sample
  misc_feature (1)..(432): n is a, c, g, or t
atgatggccgagtgggaatatgtcggcaggctaaggcaggaactgaaaatccccgtagccggaaacggggacatagccggcgctgaggaacttgtccggcgggcggcaggacactgcgacgcggtcatggtcgggcgggcggcggtgcgacaaccgtggatttttgctaaagcaagggaaattgaaagcgcaaattcgaaaatgagctctgtccccaatatcgaagaaaccggggttcgttttctggaacttttatcccgataccagccgccggagtttcatctttccagagcaatacggttttttggttttttctgtgacaatctgaaatgggggaactatctgaaaactcaattgaatcgcgaaaaaaccatgtccggcattgagcaggcatggcggaagtattttaaagacggtagtgcaacaacttga

SEQ ID NO: 4664 - protein, 143 aa, Unknown
  Obtained from environmental sample
  misc_feature (1)..(143): Xaa is any amino acid
MMAEWEYVGRLRQELKIPVAGNGDIAGAEELVRRAAGHCDAVMVGRAAVRQPWIFAKAREIESANSKMSSVPNIEETGVRFLELLSRYQPPEFHLSRAIRFFGFFCDNLKWGNYLKTQLNREKTMSGIEQAWRKYFKDGSATT

SEQ ID NO: 4665 - DNA, 435 bp, Unknown
  Obtained from environmental sample
  misc_feature (1)..(435): n is a, c, g, or t
atgaaaaaagtaattatttttttagttttggttttcgccttttgcggcttgtgtttttcgcaagcgggaaacaccgtaaatgttactgtagaaattaccaatgttgtcgttaacggcggtaaagtttatttggcaatatttgcgacaagcgaaagttttaagaaagaagaaccggagatagcgtttgagttacaggccgacaaaacttctttaattcaggaagtaacgcttgcacgcggggaatatgtggtatcggctttgcaggacgcgaatggtaataaagtgcttgattatgggctttttggaattccaaaagaattagtcggcatatccaactattccgggaaaggatttccctcaaaaaattttgataaacaaaaaatattgctcgatgaaaaaaccggaaaagtaactattggtttgtataaattttaa

SEQ ID NO: 4666 - protein, 144 aa, Unknown
  Obtained from environmental sample
  SIGNAL (1)...(22)
  misc_feature (1)..(144): Xaa is any amino acid
MKKVIIFLVLVFAFCGLCFSQAGNTVNVTVEITNVVVNGGKVYLAIFATSESFKKEEPEIAFELQADKTSLIQEVTLARGEYVVSALQDANGNKVLDYGLFGIPKELVGISNYSGKGFPSKNFDKQKILLDEKTGKVTIGLYKF

SEQ ID NO: 4667 - DNA, 414 bp, Unknown
  Obtained from environmental sample
  misc_feature (1)..(414): n is a, c, g, or t
atgcactacgatctgctcttgaagaatggaattgcggtaactcccgaaaaaaacttatgggcggatattgcggtaaaagacggtaagattgcccttgtcgggaaattggaaccggacgataccgcagaagaaacctatgacgcggacggtaaatacattctgccgggcattatagacgcccatgtgcatttccgcgatcccgggcttacagaaaaagaagattttgaaacaggcagtattgcggccgcttttggaggcgttacctttgccgcggatatgcccaacgtactgccgcctacatccactacagagcgttttcttgaaaaagtgcaaatcgccgaagagaaatcttatgtagatttcgggctttttgccctgcttgttaatgacaatattaaagagatggaagggtaa

SEQ ID NO: 4668 - protein, 137 aa, Unknown
  Obtained from environmental sample
  misc_feature (1)..(137): Xaa is any amino acid
MHYDLLLKNGIAVTPEKNLWADIAVKDGKIALVGKLEPDDTAEETYDADGKYILPGIIDAHVHFRDPGLTEKEDFETGSIAAAFGGVTFAADMPNVLPPTSTTERFLEKVQIAEEKSYVDFGLFALLVNDNIKEMEG

SEQ ID NO: 4669 - DNA, 351 bp, Unknown
  Obtained from environmental sample
  misc_feature (1)..(351): n is a, c, g, or t
atggcgcgcaatttccccgacgtgcagattatttttgtcgaaagcggcggcgataatctttccgctacattttcaccggagcttgcggacgctaccatttatgtaattgacgttgcccaaggcgacaaaataccgcgcaagggcggtcccggcgtcacccgctcggatttactcgtcatcaataaaatcgatcttgcgccgatggttggggcaaaccttgaagtgatggcaagggattcggcaaaggggcgcggcgaacgtccttttctgtttaccaatttggtcaccatggaaggcgttgacgaggtaatcaaatggattcgcaaaaatgttctgcttgaagaagtataa

SEQ ID NO: 4670 - protein, 116 aa, Unknown
  Obtained from environmental sample
  DOMAIN (1)...(91): CobW/HypB/UreG, nucleotide-binding domain
  misc_feature (1)..(116): Xaa is any amino acid
MARNFPDVQIIFVESGGDNLSATFSPELADATIYVIDVAQGDKIPRKGGPGVTRSDLLVINKIDLAPMVGANLEVMARDSAKGRGERPFLFTNLVTMEGVDEVIKWIRKNVLLEEV

SEQ ID NO: 4671 - DNA, 963 bp, Unknown
  Obtained from environmental sample
  misc_feature (1)..(963): n is a, c, g, or t
ttgatcagatcggccgaggtgagacgtcagcgaagcggaaattattcaggctgtaaggcttggacatacgacattggacggagtaaaatattttacccgcgctcaaatgggacgctgtcaaggcggcttttgtacctacaagatcataaaaataattatgaaggaagccaatctttcctgggaagaagttacaaaacatggcggaaaaagcagaatattggaaggcgtgttatgaaagaactccaatatgacgcggcggtaatcggcggaggagccgctggaatggcggcggcgcttgaactggaagaacaaggttttacttgcgctctcatagacagggaagatcaccttggcggtattcttatgcagtgtattcacaacggttttggtcttcacgaattttcggaagaattgacaggtcctgaatttgcggaacgttttattgagcgcgtaataaaatcaaaaattgcggtttaccttgacacgaccgttacgcgctttttacatgataattcctcatcgcaagttaaagaactctattgcgtatctcccgagggcgccgtaaaaataaaaactcgcgccgtattgctagcgatgggttgtcgtgaaaggaaccggggtaatgtacgtattcccggctcccgtccggcgggaatttataccgcgggtcttgcgcagcgccttgtaaacatagagggctatattcccggcagggaagttgtaattataggttcgggtgacatcgggctaatcatggcgcggcgcatgagctgggtaggttgcagggtaaaagccgtagtggaaataatgccgtaccccgccggtttgacgcgtaacattgttcagtgtcttaacgattataacattcctctttatctgtcatcgcaaaccacgggcatttttggtaatgaccgcgtagagggaatagaaagtaccccgatgaaaaacgcgtacttgcgctga

SEQ ID NO: 4672 - protein, 320 aa, Unknown
  Obtained from environmental sample
  DOMAIN (84)...(304): Pyridine nucleotide-disulphide oxidoreductase
  misc_feature (1)..(320): Xaa is any amino acid
MIRSAEVRRQRSGNYSGCKAWTYDIGRSKIFYPRSNGTLSRRLLYLQDHKNNYEGSQSFLGRSYKTWRKKQNIGRRVMKELQYDAAVIGGGAAGMAAALELEEQGFTCALIDREDHLGGILMQCIHNGFGLHEFSEELTGPEFAERFIERVIKSKIAVYLDTTVTRFLHDNSSSQVKELYCVSPEGAVKIKTRAVLLAMGCRERNRGNVRIPGSRPAGIYTAGLAQRLVNIEGYIPGREVVIIGSGDIGLIMARRMSWVGCRVKAVVEIMPYPAGLTRNIVQCLNDYNIPLYLSSQTTGIFGNDRVEGIESTPMKNAYLR

SEQ ID NO: 4673 - DNA, 411 bp, Unknown
  Obtained from environmental sample
  misc_feature (1)..(411): n is a, c, g, or t
atgaaactgcttctggtactggattcggatgaaagttacaatctcatttctctttacgtcaaacctctgggttttgagttaatccgttaccgtcacgccgttaaggcgatggataacattgacgaaatcgacccaagggcaattgttatcagcgcgagagattttcctcgccactggaaaaccatggtgcagtttttcagatctgagcgttccagggatgagtgtccggttattattcttacgggtgaagatttttccgtggaagaaagaaccaaagcttctttcctgggggtaagcggtacaattctggaagaccttcacaatccaacggaaattgagcgcttccacggattaataagccgttatcttcctgtgacgaaaaacgccggagccgcctttcactcgcgataa

SEQ ID NO: 4674 - protein, 136 aa, Unknown
  Obtained from environmental sample
  misc_feature (1)..(136): Xaa is any amino acid
MKLLLVLDSDESYNLISLYVKPLGFELIRYRHAVKAMDNIDEIDPRAIVISARDFPRHWKTMVQFFRSERSRDECPVIILTGEDFSVEERTKASFLGVSGTILEDLHNPTEIERFHGLISRYLPVTKNAGAAFHSR

SEQ ID NO: 4675 - DNA, 516 bp, Unknown
  Obtained from environmental sample
  misc_feature (1)..(516): n is a, c, g, or t
ttgggcatattgtcaaaccgccttgcgctcaccataaggccggctctcatcccaggccccgacggtattccgcttgaactggatgtggaaaccaacgccgttcttgtacgcgagaaacttcctcccgatgaggttattcgttacatgctgacggccagacagaaaagccagtgggaaaagttcttcctttacattgacctggaagccatgctttcccgcgatgcgtaccggaagcggcagtataacgccgaatccgaggaaggccgccaaaggatgatttcccggtaccggctggatctgcaaaactccgtgatagacggggatatttcgcttattcccatgaatttttccattgagcgtactgttcacaacgggcagacgggaacggtaaccgtgctggaatatttcagggttggttcatatacggagaagaagcgttacacctggtatctcgaaaaaagagacgagatatggacaattgtggattattcggttgttaatttaggaaccgaataa

SEQ ID NO: 4676 - protein, 171 aa, Unknown
  Obtained from environmental sample
  misc_feature (1)..(171): Xaa is any amino acid
MGILSNRLALTIRPALIPGPDGIPLELDVETNAVLVREKLPPDEVIRYMLTARQKSQWEKFFLYIDLEAMLSRDAYRKRQYNAESEEGRQRMISRYRLDLQNSVIDGDISLIPMNFSIERTVHNGQTGTVTVLEYFRVGSYTEKKRYTWYLEKRDEIWTIVDYSVVNLGTE

SEQ ID NO: 4677 - DNA, 690 bp, Unknown
  Obtained from environmental sample
  misc_feature (1)..(690): n is a, c, g, or t
atgacaaaaaaacacaaggcattggcagctgtaatcgcttgcgtgcttttttggggcttctcgtttatctcgataaaaatcgccgtggcggttcttccgccaatgaccctgggagcctttaggtttgcgctggcagttatcattcttttttttattaaaaggaaaatcgcgcctaaagaaaaactcataacgaaagatattccccttcttgcgggagcgggcattaccggagttaccctgtatttcttttttgagaataacggcgtgtcgctaattcccgcttcggaggcgtcaatttttgtcggggcaatcccggttattgccatgatttcggaagccgcttgggcaaaaatttccttttaccggaaaaaaaaattagcgaaagaaaatttgaatatcgaagagaaaatcgctgtcaacgaaaacaaaaatcgacaaccgctgttttttaaaactattctccccggcataggagctttattatcccttgcgggagtcgcgcttgttgcgggagtttcttttgctttttcaggaactgcccttggttatatttttatgtcaggagcctgtgtaagctgggtaatttactgttttcttacccgctctctttttatcagctacagcaggatcttcattgtgttctggcagtcattatttggtttcgcaggatttttgcccttttgttcttga

SEQ ID NO: 4678 - protein, 229 aa, Unknown
  Obtained from environmental sample
  SIGNAL (1)...(30)
  DOMAIN (16)...(171): Integral membrane protein DUF6
  misc_feature (1)..(229): Xaa is any amino acid
MTKKHKALAAVIACVLFWGFSFISIKIAVAVLPPMTLGAFRFALAVIILFFIKRKIAPKEKLITKDIPLLAGAGITGVTLYFFFENNGVSLIPASEASIFVGAIPVIAMISEAAWAKISFYRKKKLAKENLNIEEKIAVNENKNRQPLFFKTILPGIGALLSLAGVALVAGVSFAFSGTALGYIFMSGACVSWVIYCFLTRSLFISYSRIFIVFWQSLFGFAGFLPFCS

SEQ ID NO: 4679 - DNA, 324 bp, Unknown
  Obtained from environmental sample
  misc_feature (1)..(324): n is a, c, g, or t
atgcaatgcgaatactttgccatggaagggcttagccacctgcttaaggcagttaaaatgatacagaaaggtttaaatcccagtctggatattgggggaatattttttacaatgtacgatccccgcactcgccttgcccaccaggttataaaagaggtaagcgcttactttaaaaacaaggtgttcaccaccattattcccaggaacgtccggctttccgaagccccttcacacgggcttccaatttctttgtatgatccccaatgcaacggagccaaggcgtataagagcctgacccaggaggtgctaagccgtggcagttaa

SEQ ID NO: 4680 - protein, 107 aa, Unknown
  Obtained from environmental sample
  misc_feature (1)..(107): Xaa is any amino acid
MQCEYFAMEGLSHLLKAVKMIQKGLNPSLDIGGIFFTMYDPRTRLAHQVIKEVSAYFKNKVFTTIIPRNVRLSEAPSHGLPISLYDPQCNGAKAYKSLTQEVLSRGS

SEQ ID NO: 4681 - DNA, 951 bp, Unknown
  Obtained from environmental sample
  misc_feature (1)..(951): n is a, c, g, or t
atgggtngtgtaggcgcgcgtctgctcacgtttctgatcttcgcgccgctcgtctggggcctgttgctcctcgcgctgcccaacaagtgggggaggctgaccaagtggctggcccttgcggggtcgctctgtattttcgtgttggccgcagtgtccctgccgcgcctcgcgccaaatgaatccggcgttttggccagcgtggtttcgccactgttcacgcttttgggcgtgcccatcaattaccacctttcgctcgatggtctgaacctgtggctgatccttttgaccacattcctggtcccggtctcgatggcggggacttggaacagcataaaggagcgggccggcacattcttcgctcttttcactctgctggagtgcggtatgctgggcgcgtttctggcccaggatttgtttctcttctacatattctgggagttcatgctcatccccatgtatctgatgatcggcgtgtggggcggggcggagcgcaggtacgccgccaacaagttcatgattttcaccttggctggcagcctgctctggctggtggccctcatttacttggcgaccaacgccggcagcttttccccggagaccatggcccaggcggcggcaggtctgcccttcggcgtccagtgctgggtctttttggcattcgcccttgcgtttgcaatcaaggttccactgtttcccctgcacacttggctgcccgacgcccacacggaggcccccacggccggcagcgcgatactggccggcgtgctgttgaaaatgggcggctacggcttcctgcgtttcgccattcccatactccccgctgcggcactgcatttcgcaaatcctatggcgatactggcggtcatagccatcatctatggcgccttggtggcgatggtccagaaggacatcaagaagctggtggcctatagctctgctcggccgatctga

SEQ ID NO: 4682 - protein, 316 aa, Unknown
  Obtained from environmental sample
  DOMAIN (135)...(314): NADH-Ubiquinone/plastoquinone (complex I), various chains
  misc_feature (1)..(316): Xaa is any amino acid
MGXVGARLLTFLIFAPLVWGLLLLALPNKWGRLTKWLALAGSLCIFVLAAVSLPRLAPNESGVLASVVSPLFTLLGVPINYHLSLDGLNLWLILLTTFLVPVSMAGTWNSIKERAGTFFALFTLLECGMLGAFLAQDLFLFYIFWEFMLIPMYLMIGVWGGAERRYAANKFMIFTLAGSLLWLVALIYLATNAGSFSPETMAQAAAGLPFGVQCWVFLAFALAFAIKVPLFPLHTWLPDAHTEAPTAGSAILAGVLLKMGGYGFLRFAIPILPAAALHFANPMAILAVIAIIYGALVAMVQKDIKKLVAYSSARPI

SEQ ID NO: 4683 - DNA, 738 bp, Unknown
  Obtained from environmental sample
  misc_feature (1)..(738): n is a, c, g, or t
ttgtcggtcacggcttgtttgctgggcttgcaaaagaagcgtttatcgcaggagagaacggggttgagcatctcacttcttccttctcgtgaaaaatccctgctgcgctttcacccttgggtgttcagcggtgcggtggataaaataaatggaaacccaaaacttggcgaaacggttaaaattttaagtagcaatggtaattttttggcttggggagcgtattcgccaaattcgcagataagggcaagggtttggagttttgatgagaacgaaaatatagacagggatttttttgctcgcaaattaaggcgatgtttggagagccgcaaggctatgggctttgagccaaatggaacaaatgcatttcgcttggcgaatgcggaaaatgattttttgcccggttgcataattgattattatgcgggttatttaggtgttcaattgctctccgctggctgggaaatttttagggagactttagttgaatgtttaaaagaaattttcccaaattgcaaagggattattgagcgttctgatagcagtgttcgcataaaagagggtttggaaactcaggtgaaaatcttagcggggaaaattcctcagaatgtggttgaaatagaagaaaatgggcttaaaattttggttgatttgcatagcgggcacaaaactggctattatttagaccagagaaatgcgagaaaaagaattggcgaacttgccaaagacaacgtgttttga

SEQ ID NO: 4684 - protein, 245 aa, Unknown
  Obtained from environmental sample
  misc_feature (1)..(245): Xaa is any amino acid
MSVTACLLGLQKKRLSQERTGLSISLLPSREKSLLRFHPWVFSGAVDKINGNPKLGETVKILSSNGNFLAWGAYSPNSQIRARVWSFDENENIDRDFFARKLRRCLESRKAMGFEPNGTNAFRLANAENDFLPGCIIDYYAGYLGVQLLSAGWEIFRETLVECLKEIFPNCKGIIERSDSSVRIKEGLETQVKILAGKIPQNVVEIEENGLKILVDLHSGHKTGYYLDQRNARKRIGELAKDNVF

SEQ ID NO: 4685 - DNA, 702 bp, Unknown
  Obtained from environmental sample
  misc_feature (1)..(702): n is a, c, g, or t
atgcagctcgacgtttgcacaagctggggagtttccaggaaagaagccgaaaatgcccttttaaccacatcgctttggatggaaaggggaaaaaaagcctgggaacttcaattatctgccggatacaaggggcagtttttccccattgttcagggaaacttttttaaggacctcagagccgaaagcagcaaacgggttgttgaagcagaaccgccgggcatcgcaatcggagggctttccgtgggagaaagcgaaggggtcttttttgagtaccttgcctttacagcctcgcttttgccaaaaaaccttcccagatacgttatgggcatcgggacgccggaatatattctttttgctattgaaaacggcatagatatgttcgactgcgtattcccgacaaggaacgcccgcaacggtaacgtacttagccacagggggtctttcgcattaaaaaaagccgaaaaccgccttgattttatgccgatagatgaagagtgcggttgtaaggtatgccgtacatattcaagagcctatttaaggcacttgtttaaggccagggaaattctttgttcgattttggcaagctatcataatttgtattttataaacgagcttgttgtanatgcacgaaaagcgatcagggaaaagcggtttttggaatttaaaanagattttctatcgaagtataatagcatagaataa

SEQ ID NO: 4686 - protein, 233 aa, Unknown
  Obtained from environmental sample
  DOMAIN (1)...(227): Queuine tRNA-ribosyltransferase
  misc_feature (1)..(233): Xaa is any amino acid
MQLDVCTSWGVSRKEAENALLTTSLWMERGKKAWELQLSAGYKGQFFPIVQGNFFKDLRAESSKRVVEAEPPGIAIGGLSVGESEGVFFEYLAFTASLLPKNLPRYVMGIGTPEYILFAIENGIDMFDCVFPTRNARNGNVLSHRGSFALKKAENRLDFMPIDEECGCKVCRTYSRAYLRHLFKAREILCSILASYHNLYFINELVVXARKAIREKRFLEFKXDFLSKYNSIE

SEQ ID NO: 4687 - DNA, 756 bp, Unknown
  Obtained from environmental sample
  misc_feature (1)..(756): n is a, c, g, or t
atgagcggcgccgtgncggtggagccgaattcggagctcttttccggctttgtttttaagatacaggcgaacatggatccaaagcatagggataggatggccttcgtgcggatagtttccgggcgctttgagcgcgggatgaccgccgtgaacgtccgtaccgggcggacggcgcgtttagccaattcgagcgccttattcggtcgggagcgcaccacggtggacgaggccttcgccggagatgtgataggcgtcttgggcgtggacgctctgcggataggcgacacgctctgcggggagggggtttccggagttttatatgatgagataccggttttccctccggagtgcttcgctatcatccacaaccccagccccgccaactacaagcgcttccgggagggtctgacccagttggcgcttgagggtttggtcaagctgtatgagataccggctggccaccaaaggatatcgctcttgggcgcggtagggcctttgcagttcgatttggtgcagtacagactggagtcggagtacggcgccgcgtcgagaatagagaacacggattggactatggtcaggcgtgtggggtcaaaagaaggcattgatccgattgaagaaaagtcgttgcacatccccgcgggggcgcgtttggcccttgataatgacggtcgtcaggtaatgctgttcccgaccgattggcatttacgtttttttgaggaacacaacgagggggcggttatcagtgatttttga

SEQ ID NO: 4688 - protein, 251 aa, Unknown
  Obtained from environmental sample
  DOMAIN (31)...(98): Elongation factor Tu domain 2
  misc_feature (1)..(251): Xaa is any amino acid
MSGAVXVEPNSELFSGFVFKIQANMDPKHRDRMAFVRIVSGRFERGMTAVNVRTGRTARLANSSALFGRERTTVDEAFAGDVIGVLGVDALRIGDTLCGEGVSGVLYDEIPVFPPECFAIIHNPSPANYKRFREGLTQLALEGLVKLYEIPAGHQRISLLGAVGPLQFDLVQYRLESEYGAASRIENTDWTMVRRVGSKEGIDPIEEKSLHIPAGARLALDNDGRQVMLFPTDWHLRFFEEHNEGAVISDF

SEQ ID NO: 4689 - DNA, 549 bp, Unknown
  Obtained from environmental sample
  misc_feature (1)..(549): n is a, c, g, or t
atgacggcattggaaaaaataaataaccttattggcatggaaaactttaagaaacagattaatttaatggataagcaaatagaacatgaaataaaatatcaaatacaatatgttaaagcaaaattcgcaggttttaaagtattcataggcaacgcacataatggtaaaaagacagcggcaaagttgtttgccgagtatcttcaggaaaagggcataattaaaaatggatatataattgtagcggcaagtaatgattttataggcgaatatattgggcaatcacaggctaaaacaaaagatttattattaaaagcccttgatggcgttttatatattgatgaagcatcttcgcttcttcaaaatgaacgcacttcatttattgaaagagaaattatggatactatattatcatttatgtatgataattatgaaaggatttgcgtaatattatctgactcttctttaaatattaaaaaattgttggaaaatactataggactaaatacaaaaataacaaattattttgattttgaagagcataatggataa

SEQ ID NO: 4690 - protein, 182 aa, Unknown
  Obtained from environmental sample
  misc_feature (1)..(182): Xaa is any amino acid
MTALEKINNLIGMENFKKQINLMDKQIEHEIKYQIQYVKAKFAGFKVFIGNAHNGKKTAAKLFAEYLQEKGIIKNGYIIVAASNDFIGEYIGQSQAKTKDLLLKALDGVLYIDEASSLLQNERTSFIEREIMDTILSFMYDNYERICVILSDSSLNIKKLLENTIGLNTKITNYFDFEEHNG

SEQ ID NO: 4691 - DNA, 651 bp, Unknown
  Obtained from environmental sample
  misc_feature (1)..(651): n is a, c, g, or t
atgaaagacttttcaaatgaaacaagagccggaatactaattcacgctcttccctatattcaattttttcaaaataaaacaattgttgttaaatacggcggaaatgccatgcagggtgaagacctgaaaaaggcagtaattgaagacataatccttatgtcctgtgtgggaatacgcactgtgctggttcacggcggcggtcctgaaattgagaccatgttgaaaaagacaggcaaggaaagccggtttattaacggcctcaggtacacggatgaagaaacaatggatattgttcaaatggttttatgcggtaaggtaaacaaggaaattaccgctctgatagagaaaacaggcggtaaggcaatcgggctttgcggaattgacggaagtatgcttaaagcccgtcgaatgaagggtgaaaacgatttaggtcttgtcggcgagattgaacaggttgatgtttcaatgttaaattcaattttggaatccggtatcgttccggttatttcgtcggtggcttacggaaccggagttaacgagggaaaagctctcaatataaatgccgatattgccgccgcaaaaatcgccgccgcgctgggagctgaaaaactggtacttatgaccgatgtccagggcatttccgcgatataa

SEQ ID NO: 4692 - protein, 216 aa, Unknown
  Obtained from environmental sample
  DOMAIN (26)...(216): Amino acid kinase family
  misc_feature (1)..(216): Xaa is any amino acid
MKDFSNETRAGILIHALPYIQFFQNKTIVVKYGGNAMQGEDLKKAVIEDIILMSCVGIRTVLVHGGGPEIETMLKKTGKESRFINGLRYTDEETMDIVQMVLCGKVNKEITALIEKTGGKAIGLCGIDGSMLKARRMKGENDLGLVGEIEQVDVSMLNSILESGIVPVISSVAYGTGVNEGKALNINADIAAAKIAAALGAEKLVLMTDVQGISAI

SEQ ID NO: 4693 - DNA, 774 bp, Unknown
  Obtained from environmental sample
  misc_feature (1)..(774): n is a, c, g, or t
gtgaatatagttccaaaggaactcagagatttgggtgttggcactgctggtattcacccaagacacagggtttttgcggcggcagaacctttaaaagattcccccgccggcaaagccggcataaagcaaaatgataccattttaaacgtggacggctacaccataggttattatcaagatatgatagacataatctcggcatctgatgggggtgcagttgaagttatgtattcaagagctaatgaaaacggcaaaacagatactttgaacgcatcgataaatccgctttggaatgaagaagcgcagcgttatttaattggaattcaaatggggcttgcccaatttgatgaattgcaaattgttcacaagccacttggtgcagcccttgcaatggcggcaaaaaagagcattaacatgggaacaagcgtgtttcgctacattcaccgcattataataggagaggttaagttgagagccatgagcggaccggttggcattgtgcaggttataggtttggtgtggcttgaaaatttgcaaaaagccgtatttttgcttgcccttataagcataaatttgggcgttatgaatttgctgccccttgccataacagatggcggtcttcttttgtttttgctcattgaaaaaataagaggcaaaccgctttctcaaaagaaccaggctcgcattcagcaagcagcaacctcgttttttatagccctgttcgtttatataacctttgtggattttagcagaggctcaatgttaatgaagtaa

SEQ ID NO: 4694 - protein, 257 aa, Unknown
  Obtained from environmental sample
  DOMAIN (126)...(248): Peptidase family M50
  misc_feature (1)..(257): Xaa is any amino acid
MNIVPKELRDLGVGTAGIHPRHRVFAAAEPLKDSPAGKAGIKQNDTILNVDGYTIGYYQDMIDIISASDGGAVEVMYSRANENGKTDTLNASINPLWNEEAQRYLIGIQMGLAQFDELQIVHKPLGAALAMAAKKSINMGTSVFRYIHRIIIGEVKLRAMSGPVGIVQVIGLVWLENLQKAVFLLALISINLGVMNLLPLAITDGGLLLFLLIEKIRGKPLSQKNQARIQQAATSFFIALFVYITFVDFSRGSMLMK

SEQ ID NO: 4695 - DNA, 855 bp, Unknown
  Obtained from environmental sample
  misc_feature (1)..(855): n is a, c, g, or t
ttgacatctactctggaaaaaacagggcttattgtatcaagttctcccggcttaaaacagctcggtgttattgtgaagaatattcccgcagcgcaaagcggtcaggaaccgaaggttcaggaaccagaggttccagttatcgccgtagattcaggtttctccgtcattgtatatccggagattgtttacgccgacgcgattaaccttgccgccttcatgaatgttattgaggccggggctgttgtacgttttgagttgaccaaagattccgccgtccgcgcctttaacaataacataggctcggatgaaattatcgaattactgaaacggctctccggcggcaggcttgatgacagccagatttggaaccttaaagactgggaaaaacgccacggagaagtttcgctgaaaagcggcgtaattctaagcctctctcctgagcgccgttatctgacggagacaatgccccttgccggattaatcagcgaaactcttgcgcccggagtataccttctgccgccgaacgccgcggatgaagccgccgccgcactgtcctccgccggaattgacatcatttcccgccgcaatgaaaaacccgccgccttaatcgcgtccgccgattccgccgccgcgcaagcaaacaaatatttcccgccgcccggcgatccgggtaacaagcttaaaatcgctgatattacttctgtttcaacgccgcctctgttttcgccattggctacgccaatggcgccgccgtcggcactgccgtcggcgactgccctaacagagaaatttcacgctatacttaaagagactcagatgggcgatgttgaaaaggctgaacttccgccagaatga

SEQ ID NO: 4696 - protein, 284 aa, Unknown
  Obtained from environmental sample
  misc_feature (1)..(284): Xaa is any amino acid
MTSTLEKTGLIVSSSPGLKQLGVIVKNIPAAQSGQEPKVQEPEVPVIAVDSGFSVIVYPEIVYADAINLAAFMNVIEAGAVVRFELTKDSAVRAFNNNIGSDEIIELLKRLSGGRLDDSQIWNLKDWEKRHGEVSLKSGVILSLSPERRYLTETMPLAGLISETLAPGVYLLPPNAADEAAAALSSAGIDIISRRNEKPAALIASADSAAAQANKYFPPPGDPGNKLKIADITSVSTPPLFSPLATPMAPPSALPSATALTEKFHAILKETQMGDVEKAELPPE

SEQ ID NO: 4697 - DNA, 444 bp, Unknown
  Obtained from environmental sample
  misc_feature (1)..(444): n is a, c, g, or t
ttgatggccngccgattgcttaaaaataaagcgtccatagacagcattacaaaatcttccgaagaagtattgtcccgtttcggagccatagactcaggcgttaaaacggtttcagaacatgagcagaatatacgtaacgccatggaagagcaggaaacgggaggaaagcaaatactggaatccataagccgtttgcgggaaataacgtcttcggtaaaaaaagggtctgacaatatggaggaatcgggcgaaactttagtcagggaaaccgatgaattcataaaaacaagcaaagaaacggtagacggaatgaacgagatattgaaaggcattaaccagataaatatttctataggacaagtaaacgatatgagcatggaaaacaacaggaactttgaatcattaaaaacagaaaccggaaaatttattgttgacgaaagatga

SEQ ID NO: 4698 - protein, 147 aa, Unknown
  Obtained from environmental sample
  misc_feature (1)..(147): Xaa is any amino acid
MMAXRLLKNKASIDSITKSSEEVLSRFGAIDSGVKTVSEHEQNIRNAMEEQETGGKQILESISRLREITSSVKKGSDNMEESGETLVRETDEFIKTSKETVDGMNEILKGINQINISIGQVNDMSMENNRNFESLKTETGKFIVDER

SEQ ID NO: 4699 - DNA, 714 bp, Unknown
  Obtained from environmental sample
  misc_feature (1)..(714): n is a, c, g, or t
atgaccgaaacggcggcggcggtcaatgaaattaccgccaatatacaaagcataaacggacgcgtcataaaccagagcgccagcgtaagcgaaacccacgcgacaatggaacaggttgtcgccaacataaataaactcaacggacatattgaaaaccagagcggcaacatttctcaggcttcatccgccattgaacaaatggcggctaacataaattcagttacctcgactttgattaaaaatacggataatgtaaaggcgttaaaaggcgcttccgaaataggacgggccggattgcaggacgttgcctctgacataaaggaaatagagcgcgagtccgaagggcttttggaaattaactcggtaatggaaaatatcgcaagtcagactaatttgctttccatgaacgccgcgatagaagcggcccacgccggagacgcgggcaggggcttcgccgttgtcgccgatgaaatccgcaaactggcggtaaattcaagcgagcagtccaagatcataggagcggtgcttaaaaagataaaagattcgatagacacaattacaaagtccaccgataacgtacttgataaatttgaggcaattgatacaggaataaatacggtagcccggcaggaagaaaatatccgcagcgcaatggaagaacaaaatgacggcagcaacctgctcttaaaaaacaccggcagcttaacgagataa

SEQ ID NO: 4700 - protein, 237 aa, Unknown
  Obtained from environmental sample
  DOMAIN (51)...(236): Methyl-accepting chemotaxis protein (MCP) signaling domain
  misc_feature (1)..(237): Xaa is any amino acid
MTETAAAVNEITANIQSINGRVINQSASVSETHATMEQVVANINKLNGHIENQSGNISQASSAIEQMAANINSVTSTLIKNTDNVKALKGASEIGRAGLQDVASDIKEIERESEGLLEINSVMENIASQTNLLSMNAAIEAAHAGDAGRGFAVVADEIRKLAVNSSEQSKIIGAVLKKIKDSIDTITKSTDNVLDKFEAIDTGINTVARQEENIRSAMEEQNDGSNLLLKNTGSLTR

SEQ ID NO: 4701 - DNA, 831 bp, Unknown
  Obtained from environmental sample
  misc_feature (1)..(831): n is a, c, g, or t
atgactgttttaaaaacagaaaagaaagttgaaaaactgtcaaaaaagaatatcgtcatctttgattttgaaaccgataaacaagaaataatcaattttattaacaacaatcttgtcgctggcaatataacctctaaattccaaataaataaaaataacttcgtaattatctacagcaaatggcttgagaaagtgaaaaaaagcattgccatagattggtccatggtaaaaagatcatgcatcatcgacagtgactttttcctagccgatattctttcaaaggataattataccctaaaagataaactgttcgttatcttaatgaataatcagtacaagttcgataagaaatttgatgatgctgggttttccctatacaaggaagtctgctttaatgataatcaaaaaacgcataaggcattttgggataaatatgaacgcccaccgcttgaagaatattgggattacataatcaaccgcacggatttattggtaccacaagatataagagaacgaaaaggctctttttttactccgcaacaatgggtagaactgtctcaaaagtatatcggtgatgtgttaggtgaagactggcaggacgaatactatatatgggattgcactgccggaaccgggaaccttttggcagggcttacaaacaaatacaatatatgggcttctacgcttgataaagccgatgtagatgtaatgcgcgacacgataaggaatggagccaatctgcttgaagaccatgtctttcaatttgattttctgaatgacgatntttctaaattgcctaaagggttacaggatattattaacagcgactaa

SEQ ID NO: 4702 - protein, 276 aa, Unknown
  Obtained from environmental sample
  misc_feature (1)..(276): Xaa is any amino acid
MTVLKTEKKVEKLSKKNIVIFDFETDKQEIINFINNNLVAGNITSKFQINKNNFVIIYSKWLEKVKKSIAIDWSMVKRSCIIDSDFFLADILSKDNYTLKDKLFVILMNNQYKFDKKFDDAGFSLYKEVCFNDNQKTHKAFWDKYERPPLEEYWDYIINRTDLLVPQDIRERKGSFFTPQQWVELSQKYIGDVLGEDWQDEYYIWDCTAGTGNLLAGLTNKYNIWASTLDKADVDVMRDTIRNGANLLEDHVFQFDFLNDDXSKLPKGLQDIINSD

SEQ ID NO: 4703 - DNA, 555 bp, Unknown
  Obtained from environmental sample
  misc_feature (1)..(555): n is a, c, g, or t
gtggtaaaggccattgccgacgccaaaattgcggcggcggatattctgcaaaaactgaaactggaagccgatttttcaacacagccttcatgcgccgttgtcgccgatatttccgacctctattgcaagaagggggtgatcagcgaactgaaaccggacaacgccgacgcttaccgctgcctttcctgtaacagcctctgcgaggtctgcgttgacgtgtgcccgaacagagccaatgtgatggtggaattggaggattcaggaagacatcaggttatacatattgaccgaatgtgcaacgaatgcgggaactgcgccattttctgcccccatgccggaaagccctataaggacaaatttacaattttttgccgcgaagaggattttaccgaaagcgaaaacgcgggcctgcttaaaacaggcgcggacacttacaagatccgtctggaagacaagtccgtgctgacttaccacaggggaggggagacgatccctaaacagtggatcgcgctgattgaggttgttatgtcgaggtatgagtatttgttggcttaa

SEQ ID NO: 4704 - protein, 184 aa, Unknown
  Obtained from environmental sample
  misc_feature (1)..(184): Xaa is any amino acid
MVKAIADAKIAAADILQKLKLEADFSTQPSCAVVADISDLYCKKGVISELKPDNADAYRCLSCNSLCEVCVDVCPNRANVMVELEDSGRHQVIHIDRMCNECGNCAIFCPHAGKPYKDKFTIFCREEDFTESENAGLLKTGADTYKIRLEDKSVLTYHRGGETIPKQWIALIEVVMSRYEYLLA

SEQ ID NO: 4705 - DNA, 447 bp, Unknown
  Obtained from environmental sample
  misc_feature (1)..(447): n is a, c, g, or t
ttgagagcgggagcccggtctcgcagcaattgctcttccctnatagtgctgnagatgagtccggcggaaaaggccgtgattgattccggtaaaaagtattttaataatttgggttntgatatatccgattttggcggcggcacggtttccatatccgccctgccggcttttctgcgggacggcgaggcggagggcgcggtgagggagatggtgcgctacctgcttgacgggcgcggcccggagacgttcaaagaaccggtcaagcgtttcgcggcggcgtttgcctgcggggcggcgataaagaagggccagaaacttggtttggaagagatgaacgcgctgataaacgcgctattttcggccgtcgatccgttcacgtgcccgcacgggcgtcctacattggtgaggatatctgtggacgaattgacacggcgtttcttaagatga

SEQ ID NO: 4706 - protein, 148 aa, Unknown
  Obtained from environmental sample
  SIGNAL (1)...(24)
  misc_feature (1)..(148): Xaa is any amino acid
MRAGARSRSNCSSLIVLXMSPAEKAVIDSGKKYFNNLGXDISDFGGGTVSISALPAFLRDGEAEGAVREMVRYLLDGRGPETFKEPVKRFAAAFACGAAIKKGQKLGLEEMNALINALFSAVDPFTCPHGRPTLVRISVDELTRRFLR

SEQ ID NO: 4707 - DNA, 393 bp, Unknown
  Obtained from environmental sample
  misc_feature (1)..(393): n is a, c, g, or t
atgggcggcggtatgcgccaggcggggatactggcagcagcgggactcctagctctgacagagcatccttcactgctggcggaggatcacaggagggccagggaactggaaaaggcattggcggaaatcccgggaatcactgtggaacagggaaatatcaacatggtctttttttactgcctgaatccggcggggaatgatcctgccaggacgctggttgacgcgttccgccgccggggaattatcattaacgccccggagcaatttaccgtgaacggcgaaaaccggcttcttttccgttttgttacccatcactggatcggagaagaagaactggttgcaattatagaagcgtctcgattgattttcgattctgtgggattattacaatag

SEQ ID NO: 4708 - protein, 130 aa, Unknown
  Obtained from environmental sample
  SIGNAL (1)...(27)
  misc_feature (1)..(130): Xaa is any amino acid
MGGGMRQAGILAAAGLLALTEHPSLLAEDHRRARELEKALAEIPGITVEQGNINMVFFYCLNPAGNDPARTLVDAFRRRGIIINAPEQFTVNGENRLLFRFVTHHWIGEEELVAIIEASRLIFDSVGLLQ

SEQ ID NO: 4709 - DNA, 720 bp, Unknown
  Obtained from environmental sample
  misc_feature (1)..(720): n is a, c, g, or t
atggtcagtgaagcttccagtacctgcgagctgattggctacatcatgtttaaaatggaaaaacagaaagaacggtttaaggggattgatttttttacccggaactttattttgtcgcttcttaccggcattgtcggggattcccagatgggaaaatatctgaaaacccgccgggaaaagttgtggtaccggatctttacggaagtttttaacagggcgctgggagaaaaaaccgacaaagacagcaaaaacctgtcatccatggaagcggtctttgatgtcattcagaatttctcggttcgtgaaaaacactgttatgaaggtattatgcagttaaaaaatgcggaaaaatcaattcactacatctgcattgacaaagaaaaatcggcggagctttttaaagcccattactcggagttgatcatcaatgtttccaaagcggcggcggacactctggcggaggagtgcggtaaactgggtttggtagtatactacgatgatccgtctctttccaactatattcagttccgtttacggcgcagcgccaaatttatccatgttgatctccgggatgtgcttgcggggttgaaaatcgaaaacggaggagggcaccccggtgccatcggcttcagggttgctaaaaacgaagtaaaagacatcgagagttatacggcggacatcgtaaaccggatagaaaaaatcgtcgaactgtcggtataa

SEQ ID NO: 4710 - protein, 239 aa, Unknown
  Obtained from environmental sample
  misc_feature (1)..(239): Xaa is any amino acid
MVSEASSTCELIGYIMFKMEKQKERFKGIDFFTRNFILSLLTGIVGDSQMGKYLKTRREKLWYRIFTEVFNRALGEKTDKDSKNLSSMEAVFDVIQNFSVREKHCYEGIMQLKNAEKSIHYICIDKEKSAELFKAHYSELIINVSKAAADTLAEECGKLGLVVYYDDPSLSNYIQFRLRRSAKFIHVDLRDVLAGLKIENGGGHPGAIGFRVAKNEVKDIESYTADIVNRIEKIVELSV

SEQ ID NO: 4711 - DNA, 324 bp, Unknown
  Obtained from environmental sample
  misc_feature (1)..(324): n is a, c, g, or t
gtgcttgaaaaattgcccggtcataatatcgtatttttcctgcttgttttagcgatgttggcgttttactcaagcacattcgacgccatcaccatggttgtcgctgggttctgccataaaaccttgaaaattgacgagcaacccgataagaaactaagggcgttttgggctggcgtttttataattcttccgatagcccttatctggtcggaaggcactttaagcatgctattaacagtatcaatcatcgccgcttttccccttgggattatcctgctgacaattgttttcagtttcattaaggagttgagaaaaacaagttga

SEQ ID NO: 4712 - protein, 107 aa, Unknown
  Obtained from environmental sample
  SIGNAL (1)...(29)
  misc_feature (1)..(107): Xaa is any amino acid
MLEKLPGHNIVFFLLVLAMLAFYSSTFDAITMVVAGFCHKTLKIDEQPDKKLRAFWAGVFIILPIALIWSEGTLSMLLTVSIIAAFPLGIILLTIVFSFIKELRKTS

SEQ ID NO: 4713 - DNA, 921 bp, Unknown
  Obtained from environmental sample
  misc_feature (1)..(921): n is a, c, g, or t
ttgaggatatgcccgaatttgtccggatatttaccatctggaaacccaacngcccttgacaacatggacagccgtttcacaggcagcgcgggcgcgaccgggacggggcagtttgccctttccctgacaagggaaaacgggcagacagagaaagttaccagcgccgtcgttcagcacgcgatggcgcacatgaacgggcccaacggcaacaaagtcgaaatgagcgaccccatgattattaagatacagggaaaagacacatggtgtttaagaatcatggttcccattgaaaataagcgcctcaatgaaatagtcggagtcgtaggctgtctctttaacattgatctgatacaacccctggtagagcagactatcaataattacgaagaggtcagcagcatggcgatttacaccaacacagggttcgttttggcaaattaccttccggaaatgattggaaggcatctggttgaggtggaaacgcaatacggcgaacatttagacctggtcgccgaggctgttaaaaacgcgcgggaatgggaagtcgcgcattttgaccccatattgaaaacaaccatgtatatgagcatagctccaattcccctggcggcttccccgacaacatggtcgattatgatcggttcaaccgaggattacatccttaaagacgtcaactcaatgaacaaatttacaatcacgctgatgatcctggttgtttttgccgcggcggcgctggcgctcgtccttatccgcgttgacgcggcaaaaaccagagccgatacggagagcaggcacaagagcgcgttcctcgccaacatgagtcatgaactgcggacgccgctgaacgtggttatagggctgacagattntattctggaagacaanaaactggacaaacacattacggaaaaacctttgtaa

SEQ ID NO: 4714 - protein, 306 aa, Unknown
  Obtained from environmental sample
  misc_feature (1)..(306): Xaa is any amino acid
MRICPNLSGYLPSGNPTALDNMDSRFTGSAGATGTGQFALSLTRENGQTEKVTSAVVQHAMAHMNGPNGNKVEMSDPMIIKIQGKDTWCLRIMVPIENKRLNEIVGVVGCLFNIDLIQPLVEQTINNYEEVSSMAIYTNTGFVLANYLPEMIGRHLVEVETQYGEHLDLVAEAVKNAREWEVAHFDPILKTTMYMSIAPIPLAASPTTWSIMIGSTEDYILKDVNSMNKFTITLMILVVFAAAALALVLIRVDAAKTRADTESRHKSAFLANMSHELRTPLNVVIGLTDXILEDXKLDKHITEKPL

SEQ ID NO: 4715 - DNA, 825 bp, Unknown
  Obtained from environmental sample
  misc_feature (1)..(825): n is a, c, g, or t
ttgatactcgataccgaaaacagggcgagccttgttaatttagagatcaacatcttcgggaaggacgaggtagcggtatttggtaaaacaatcaatgagatggcacaggaactggcgcgcgccgccgcttccgtttccgatcttgatataggaaaagaaatccagaaaaagtttatccctctggatgtggacaaggatggcaataagctcaattcaggttacaaagacgccgaaaacgccgtttttttcggttactataagggcgcaaagatattatcgggagactattttgattaccttgatcttgacggcaggtactacgcggttattaaatgcgatgtagcgggcaacggaatcccggcttcgcttatcatggtgcaggttgcgaccatgtttcttaactttttcaagaaatggcagccgtccgcgcggttggaggaacttgtgtaccagatcaacgaatttattgacaggctgggtttcaaggggcgtttcgccgcgtttaccctctgcctttttgactcacagaccggtgatttgcatttctgcaacgcaggcgacaatatcatccatatttacgacgattccgaaaaaagcgttaaatcaattaccctgcaccagacgccggccgccggagcgctgccaaacagcattgtagaatcaataagcggttacagggtgcagaccttttcgcttgatcatggggatatcctgcttttatatactgacggaattgaggagggacaggggaacgaagcaatgggctcaatgagggtacatgaaatcgtcaatgccgtgatgaaccgcnggcgtataccggattaa

SEQ ID NO: 4716 - protein, 274 aa, Unknown
  Obtained from environmental sample
  DOMAIN (103)...(273): Stage II sporulation protein E (SpoIIE)
  misc_feature (1)..(274): Xaa is any amino acid
MILDTENRASLVNLEINIFGKDEVAVFGKTINEMAQELARAAASVSDLDIGKEIQKKFIPLDVDKDGNKLNSGYKDAENAVFFGYYKGAKILSGDYFDYLDLDGRYYAVIKCDVAGNGIPASLIMVQVATMFLNFFKKWQPSARLEELVYQINEFIDRLGFKGRFAAFTLCLFDSQTGDLHFCNAGDNIIHIYDDSEKSVKSITLHQTPAAGALPNSIVESISGYRVQTFSLDHGDILLLYTDGIEEGQGNEAMGSMRVHEIVNAVMNRXRIPD

SEQ ID NO: 4717 - DNA, 852 bp, Unknown
  Obtained from environmental sample
  misc_feature (1)..(852): n is a, c, g, or t
atgtttgcaaattactgcgatanccacgggattgatcctgaaaaggccggcccgcacgaggtgaggggcttnatcgccgacttgagttttgaacgcgcgtccgcggccagcgtgaatcgcaggctttcctccgtccggggcttttaccgctggctgaccaaatttcgcgggcgtatcgataatccctgcgacggcggcccgggagggctgctccgcaatgttaaagcgccgcaggccctgccgtccctgctctgggaagacgagatggcggattttgcggatttgccggacgagaaaaaaatactgtggccggccagggacaaggccctgattttggccatgtattccgcgggcctgcgtatcagcgaactggtttcgttaaaaatgaaaatgatgacggctaacatggagagcgcgagaataacaggcaagggcggcaaagagcgtatggtgttcttttccgaagaagcgagggcggcgattcatgactatctgccggaacggtacgcaaggataaggagcgcgggtctgaaggcggcggatttgagcggggcattgtttataagcgccaggggcagtcctgtttccgtggcgggcacgcgctggattgtcagccaatatgccgcggtttcgggactggggaaaaacatacacccccacagtttccgccacagtttcgctacacatttagtgaacgccggctgtgacgtgcggattgtgcaggaaatgttgggacacgcgaggcttagtacaacacagcgttactcccatgtcagcatggagcggttgaagaaggtgtatgagagagcgcatccccatgcgaaaaaagagggagtagggagtagggagtag

SEQ ID NO: 4718 - protein, 283 aa, Unknown
  Obtained from environmental sample
  DOMAIN (95)...(265): Phage integrase family
  misc_feature (1)..(283): Xaa is any amino acid
MFANYCDXHGIDPEKAGPHEVRGXIADLSFERASAASVNRRLSSVRGFYRWLTKFRGRIDNPCDGGPGGLLRNVKAPQALPSLLWEDEMADFADLPDEKKILWPARDKALILAMYSAGLRISELVSLKMKMMTANMESARITGKGGKERMVFFSEEARAAIHDYLPERYARIRSAGLKAADLSGALFISARGSPVSVAGTRWIVSQYAAVSGLGKNIHPHSFRHSFATHLVNAGCDVRIVQEMLGHARLSTTQRYSHVSMERLKKVYERAHPHAKKEGVGSRE

SEQ ID NO: 4719 - DNA, 669 bp, Unknown
  Obtained from environmental sample
  misc_feature (1)..(669): n is a, c, g, or t
ttgcaaacaaaaaaactgcccgatcattggcatatcgatcagaatccactttgccggtccgaagcggtggtacaggggacatcgtggcgcgttacggtattgacggcaagcctgctccgcctggagtacagccccgacggacttttcgaggacagggccactcaatttgccctgaaccggaatttcccgccatgcaaattttccgcagaagacaacggcgaagaactgacgatcgctaccgaaaccatgctgctccggtacgataaaaaacctctatccaaaatcgggctcagcgtaaggctgctggggaatgccggtatctttaaccggttctggtgttatggcaaccagggcgaaaacctgggcggcacagtacgtacgctggacaggatcgacggtgccgtgccgctggaaccgggcatcctctcaaaaagcggcatcgcggtagtagacgacagccggacgcctgtgctggattcaagcggatgggtcgagccgcgccgtgaagacgaaaacgatctttacatttttgcctacgggcggaattaccgcgactgccttaaggatttttaccgcctcaccgggcctacacccttgctgccccgctacgccctgggaaactggtggagccgtttttaccgctacacggaacagtcctacaaagactga

SEQ ID NO: 4720 - protein, 222 aa, Unknown
  Obtained from environmental sample
  misc_feature (1)..(222): Xaa is any amino acid
MQTKKLPDHWHIDQNPLCRSEAVVQGTSWRVTVLTASLLRLEYSPDGLFEDRATQFALNRNFPPCKFSAEDNGEELTIATETMLLRYDKKPLSKIGLSVRLLGNAGIFNRFWCYGNQGENLGGTVRTLDRIDGAVPLEPGILSKSGIAVVDDSRTPVLDSSGWVEPRREDENDLYIFAYGRNYRDCLKDFYRLTGPTPLLPRYALGNWWSRFYRYTEQSYKD

SEQ ID NO: 4721 - DNA, 774 bp, Unknown
  Obtained from environmental sample
  misc_feature (1)..(774): n is a, c, g, or t
atgacccgtttcctctcggaaaaacgccgcatcgaggtcatggaaagcgattttacccgcctgctccagacttcccagtcggtagaggaaaaacttgcccaggtttcaaactcggacgacatactgcaaaccatgcaggttcaaatacgccggctggaagacgcgataaaagaagccgaagaaaaatacaagcgggtagaacgaaagagcaaaaccttacaggaaaccaacgacggcatagaccggaatttcaggattttgcaggaagatgaacagttggtcaaaaggctggaagataccatttccacgctcagaattgacatggacaccatccaaagctcggttaaaaccctttcggctgaaaatgaaaaggcccgggatgccgccgaaaagctttccaccctggacgaaaccgtcaaatggctggaaaaacgcattgccgaaatgaatgttgcccgcgaaagcctggcgcggcttgccaccgagctgcaaaaccttgataaagacgcccaggaccagcttaaccttacccgttccctgctaagccgtgaagaagggaaaatagaaggccgtgttgccgggaaagctgccgggaaagctgccggcaaggcctccggcagggccgcggatgacggcgcgccgccgccccgtgaccgcgaaaacatcatcaggcttaaacgccagggctggagtattgacgaaattgcccggtcaatgaagatatccaagggcgaagtagagctgattctggaacttggccccaaagaaatgtaa

SEQ ID NO: 4722 - protein, 257 aa, Unknown
  Obtained from environmental sample
  misc_feature (1)..(257): Xaa is any amino acid
MTRFLSEKRRIEVMESDFTRLLQTSQSVEEKLAQVSNSDDILQTMQVQIRRLEDAIKEAEEKYKRVERKSKTLQETNDGIDRNFRILQEDEQLVKRLEDTISTLRIDMDTIQSSVKTLSAENEKARDAAEKLSTLDETVKWLEKRIAEMNVARESLARLATELQNLDKDAQDQLNLTRSLLSREEGKIEGRVAGKAAGKAAGKASGRAADDGAPPPRDRENIIRLKRQGWSIDEIARSMKISKGEVELILELGPKEM

SEQ ID NO: 4723 - DNA, 441 bp, Unknown
  Obtained from environmental sample
  misc_feature (1)..(441): n is a, c, g, or t
atggattacgcaaccgaatcgcttaaaaaacactatgaatggcggggcaagctggaaacaatacccaagatgccggtaaacacgcgggaggatctctcgctggcctacacgcccggcgtcgcgcagccctgccttgaaatacagaaatgccctgaaaaaagctgggagcttaccgggcgctggaacacggtggcggtcgtcaccgacggaaccgcggtgcttgggttaggcgacatcggccccgaggcgggaatgcccgtgatggagggaaaatgcgtcctgttcaaagcctttggcgggatagacgcggttcccctgtgcatacgatcaaaggaagttgacgtgattgtcgaaacaaccgccctgctcgcggggagtttcgggggaatcaaccttgaggacatctccgccccgcgctgttttgaaatgagcgcaagctga

SEQ ID NO: 4724 - protein, 146 aa, Unknown
  Obtained from environmental sample
  DOMAIN (16)...(143): Malic enzyme, N-terminal domain
  misc_feature (1)..(146): Xaa is any amino acid
MDYATESLKKHYEWRGKLETIPKMPVNTREDLSLAYTPGVAQPCLEIQKCPEKSWELTGRWNTVAVVTDGTAVLGLGDIGPEAGMPVMEGKCVLFKAFGGIDAVPLCIRSKEVDVIVETTALLAGSFGGINLEDISAPRCFEMSAS

SEQ ID NO: 4725 - DNA, 414 bp, Unknown
  Obtained from environmental sample
  misc_feature (1)..(414): n is a, c, g, or t
gtgnagcagggccgcngtcgtcacgaccgccgtaccgtgctggtcgtcatgaaaaatggggatgtcgcagcgggctttcagcttgcgctcatttcaaaacagcgcggggcggagatgtcctcaaggttgattcccccgaaactccccgcgagcagggcggttgtttcgacaatcacgtcaacttcctttgatcgtatgcacaggggaaccgcgtctatcccgccaaaggctttgaacaggacgcattttccctccatcacgggcattcccgcctcggggccgatgtcgcctaacccaagcaccgcggttccgtcggtgacgaccgccaccgtgttccagcgcccggtaagctcccagcttttttcagggcatttctgtatttcaaggcagggctgcgcgacgccgggcgtgtag

SEQ ID NO: 4726 - protein, 137 aa, Unknown
  Obtained from environmental sample
  misc_feature (1)..(137): Xaa is any amino acid
MXQGRXRHDRRTVLVVMKNGDVAAGFQLALISKQRGAEMSSRLIPPKLPASRAVVSTITSTSFDRMHRGTASIPPKALNRTHFPSITGIPASGPMSPNPSTAVPSVTTATVFQRPVSSQLFSGHFCISRQGCATPGV

SEQ ID NO: 4727 - DNA, 672 bp, Unknown
  Obtained from environmental sample
  misc_feature (1)..(672): n is a, c, g, or t
atggataaaaatcccatggaaagaaccctgctggtctgctgcggtacgggctgtatagcaaatggcgcaaaggcggtggccgaggctttggaaaaggctgcggagcttatgaaaaaacccggctccgaaactgtgcatcttaaaggcggaatcaaagctaccggctgcaacggcttttgtgagaacgggcccatagtcaggctaatgcccgatgatatttcctattacaatgtaaaacccgcggacgctgaagatattgtaaagcacatcatcggtgaagggaaaatcgtagaacggctgctctataagaatgacgaagggaagaaagtgctttcccaaatggagaatcccttttacgcgcagcagcacaagatcgccctcgccgatgccggccttattgagccgggaaacatcaaggattatctctgtcgcggcggttttgaggccctgaaaaaagctatttccatgaaagcggaagacataatagccgaagtggaaaaatccggactccgtggccgcggcggcgcgggctttcccacaggccgcaaatggcggcaggccgcaagttacagcgagactcccaaatacgttgtttgcaacggagacgaaggggatccgggcgcgtttatggatcgttccattcttgagggcgatcctcaccgcgttatttga

SEQ ID NO: 4728 - protein, 223 aa, Unknown
  Obtained from environmental sample
  SIGNAL (1)...(27)
  DOMAIN (145)...(223): Respiratory-chain NADH dehydrogenase 51 Kd subunit
  misc_feature (1)..(223): Xaa is any amino acid
MDKNPMERTLLVCCGTGCIANGAKAVAEALEKAAELMKKPGSETVHLKGGIKATGCNGFCENGPIVRLMPDDISYYNVKPADAEDIVKHIIGEGKIVERLLYKNDEGKKVLSQMENPFYAQQHKIALADAGLIEPGNIKDYLCRGGFEALKKAISMKAEDIIAEVEKSGLRGRGGAGFPTGRKWRQAASYSETPKYVVCNGDEGDPGAFMDRSILEGDPHRVI

SEQ ID NO: 4729 - DNA, 537 bp, Unknown
  Obtained from environmental sample
  misc_feature (1)..(537): n is a, c, g, or t
atgatgggttccggcggcgtaattgtcatggatgaccggacctgcatggtagaagtcgcccggtactacacccacttctttgcgagggaaagctgcggcaaatgtaccccatgcagggaaggactcaggcgcatgctggagatactgactgacttaacccttggaaaaggcagaacaggtgatattgagcgcctggaagaaaccgcgcttacaatgaatgccgcgagtctctgcggtctagggaaaaccgccgcgaatccggttttatctaccataaaatatttccgttctgaatacgaagcccatcttaacgagaaaacctgcccggcggggatatgtcccgctcttacttcgtttgtaattctggacgacaaatgcaagggctgcggcctctgcaaaaagtcctgcccggttttggccatcagcggggataaaaacaaaccccatgccattgataaaaaaacctgcgtaagctgcgggagctgcaggagcgcttgtccgttcgacgcgattaatacaagagggagggcatcctga

SEQ ID NO: 4730 - protein, 178 aa, Unknown
  Obtained from environmental sample
  DOMAIN (149)...(172): 4Fe-4S binding domain
  misc_feature (1)..(178): Xaa is any amino acid
MMGSGGVIVMDDRTCMVEVARYYTHFFARESCGKCTPCREGLRRMLEILTDLTLGKGRTGDIERLEETALTMNAASLCGLGKTAANPVLSTIKYFRSEYEAHLNEKTCPAGICPALTSFVILDDKCKGCGLCKKSCPVLAISGDKNKPHAIDKKTCVSCGSCRSACPFDAINTRGRAS

SEQ ID NO: 4731 - DNA, 897 bp, Unknown
  Obtained from environmental sample
  misc_feature (1)..(897): n is a, c, g, or t
ttgtgctttggctatgatcccttcctgatggaacgaagcccttacaacggcgcaaagggaagcatacgcgaggcgctggcaaagtacgcctgcatcggcggggatttccgcaaggcgcgtttaagtttgcaggaatactttcagcggccattgtcgcccgaatcctggggcttgccggctgaagctctgcttggagcgcttgaggcgcagcttgccctggggattcccgccataggcggaaaggactctatgtcgggcaattaccgcgacacggcccgcggcattgacataacagtgccccctacccttgtcgcctttgcggcgggaaccgccccggcggcgtctatccgttcaggcgcgcttggcggcaaggccggcaatgtcattgtccttctcgcacaaaccgagtcgtactcatttaagaccgccaatcccaattgtaacgaatgggatattttcaaagctaacatggacgcgcttgctgcgttaggcgcaattggctgcgtctgttcggcgtatcctgtcgtatcgggcggcgttgcggcaagcctcgcgctgatggcctttggcaacaatgccgggctggaaatgaaatcccgcgctttcaccattatcgacggatcgtcttaccagggagctgtgttagttgaaattgatggcgcggcgttcagggataatccccgcgtcggcgagatcctggggggagccggctgctgggaaatagccgcctttaccattgaggaacctgtatttcgcgtaacaaaagaagccggcgatgaaatgcaaattgcagaattcccgttagaagtcttgcgccgcgcatacgagtatcctttgacgaaagtgtatccgaacacggggtacggggttgagggttcagggttcggagaagaataa

SEQ ID NO: 4732 - protein, 298 aa, Unknown
  Obtained from environmental sample
  misc_feature (1)..(298): Xaa is any amino acid
MCFGYDPFLMERSPYNGAKGSIREALAKYACIGGDFRKARLSLQEYFQRPLSPESWGLPAEALLGALEAQLALGIPAIGGKDSMSGNYRDTARGIDITVPPTLVAFAAGTAPAASIRSGALGGKAGNVIVLLAQTESYSFKTANPNCNEWDIFKANMDALAALGAIGCVCSAYPVVSGGVAASLALMAFGNNAGLEMKSRAFTIIDGSSYQGAVLVEIDGAAFRDNPRVGEILGGAGCWEIAAFTIEEPVFRVTKEAGDEMQIAEFPLEVLRRAYEYPLTKVYPNTGYGVEGSGFGEE

SEQ ID NO: 4733 - DNA, 312 bp, Unknown
  Obtained from environmental sample
  misc_feature (1)..(312): n is a, c, g, or t
ttgagcgggcattttgaaactatggcggtaacgggacaggaaatgattcgcgccgctatttcggcgtttatggcgcaggacgctcaggcggcgcgggaagccgcggcgctggacaataaaattgacgcggagcataaagctcttaccgaagaaattttaaaactaatgaaaaaaaatcccgataaagttaaggatgcgcttcagatcattaatacgtcaaaccagcttgaaaggcttggggatcacatcactaatatttgcgaagcgattatttatatgatagaaggaaaacacgaggaattaaatgagtaa

SEQ ID NO: 4734 - protein, 103 aa, Unknown
  Obtained from environmental sample
  DOMAIN (5)...(90): PhoU family
  misc_feature (1)..(103): Xaa is any amino acid
MSGHFETMAVTGQEMIRAAISAFMAQDAQAAREAAALDNKIDAEHKALTEEILKLMKKNPDKVKDALQIINTSNQLERLGDHITNICEAIIYMIEGKHEELNE

SEQ ID NO: 4735 - DNA, 678 bp, Unknown
  Obtained from environmental sample
  misc_feature (1)..(678): n is a, c, g, or t
atgagtaaggctgtaattcttatcatagaagacgatcctgaaattcaggaattgctttctcatacaatgacaaaagaaggctggaaattattacaggtaaaaacaggcgaagacggcataaagattttaaggacaaaaaaagtaaattgcattttacttgacattatgcttcccggtatggacggtttaaacgtattaaaaaaaataaaagagattgaacaatgcaaatatattccggttatcatggcgactgcaaagggcgaggaagcggatattgtgacagggctggaattaggcgcggatgattatgttgttaagccgtacagcccaaaagtattgatagcgagaatacgggtcgctcttaggcggcaggaagaaaacggagttccgcagtctgttacagtttggcagcagggggaactgaaattagacgcagcccgtcatgccgcgtatagcggcgataaacagcttgaccttttcgccacggaattcgccctgcttaaacattttctttctaatcctgaaattgttttttcacgcaacccagatattgccgccatacacggaccggactaccccgttacagaccgttccgtagacgtgcagatattgggtctgcgtaaaaaactggggagcgcgggggatatgatagaaaacatccgtggtgtagggatatag

SEQ ID NO: 4736 - protein, 225 aa, Unknown
  Obtained from environmental sample
  DOMAIN (154)...(225): Transcriptional regulatory protein, C terminal
  misc_feature (1)..(225): Xaa is any amino acid
MSKAVILIIEDDPEIQELLSHTMTKEGWKLLQVKTGEDGIKILRTKKVNCILLDIMLPGMDGLNVLKKIKEIEQCKYIPVIMATAKGEEADIVTGLELGADDYVVKPYSPKVLIARIRVALRRQEENGVPQSVTVWQQGELKLDAARHAAYSGDKQLDLFATEFALLKHFLSNPEIVFSRNPDIAAIHGPDYPVTDRSVDVQILGLRKKLGSAGDMIENIRGVGI

SEQ ID NO: 4737 - DNA, 873 bp, Unknown
  Obtained from environmental sample
  misc_feature (1)..(873): n is a, c, g, or t
atgagttctactcccgaactggtagtggatgaagaaaaaatcaaaaaagccatacagtccggacttccattgacaattaccacgtatacacaccccaaagaagtagaactttacattgaacatgtcatagattcgtttctaaaacacatgaatcaaacaaaacttagggattatatcgtctattgtgtgcaggaacttgtaggaaacgcgaaaaaagccaacacaaaacgggtatatttctcggaacgcggtctggatatcaataatgacagcgattaccttctgggaatgaaggattttagagaagagacaataaataatatagcccattatctgcaattacagaaagaaaaagggttatttataaaaattattttacaggtaaaaagaaatacgattaatatagaaatacaaaacaatgtttccgcaaataaaatggaacaactgcgaattcaggataaaatggcgcgttccagacaatttaacactctggaagacgcgctgtcccaggttcttgacgattccgaaggcgcggggcttgggcttgtaatccttgttctcatgctgaaaaaaatgggaattgacgacgacgcttttgaaatcaaggcaaaaggaaacttaaccgtcgctaaaatttctatcccgcttgataaaacaatggtggataatatgtcggctctgtccggggaaattgtgcagaatgttaacaacctgccgcaatttcctgaaaatattatactcatacaaaaacttattaacgatcccgcttccgatatgcctataatcgcaaaacaaatttcgatggacccggctcttatggcggatctgttaaaattgtcatttcgcgcaatatatgttatccaaaaaagttga

SEQ ID NO: 4738 - protein, 290 aa, Unknown
  Obtained from environmental sample
  misc_feature (1)..(290): Xaa is any amino acid
MSSTPELVVDEEKIKKAIQSGLPLTITTYTHPKEVELYIEHVIDSFLKHMNQTKLRDYIVYCVQELVGNAKKANTKRVYFSERGLDINNDSDYLLGMKDFREETINNIAHYLQLQKEKGLFIKIILQVKRNTINIEIQNNVSANKMEQLRIQDKMARSRQFNTLEDALSQVLDDSEGAGLGLVILVLMLKKMGIDDDAFEIKAKGNLTVAKISIPLDKTMVDNMSALSGEIVQNVNNLPQFPENIILIQKLINDPASDMPIIAKQISMDPALMADLLKLSFRAIYVIQKS

SEQ ID NO: 4739 - DNA, 792 bp, Unknown
  Obtained from environmental sample
  misc_feature (1)..(792): n is a, c, g, or t
gtgcggtggggaataagcgaggtgatgatcggcggcagcacgacgaaccagcaggacaacgactcgatcaacacaacgcgcaaagagtacatcgggcagaagcagagttgggagggagcgttcttcatcccatttgtaccgatggtttttgtggaacactacgtgggcgacagaaacaacgcggcgctctctctagacgccacggtcaactggccgaaagacttccgcctttacttagagttctttttggacgatatgctcgcgccgtggaagataatgagcgacgactggggaaataaatgggcgctcaccgtaggggcgcagtactttacaaactggaagaaccgagacgtaagcgtcgggctggagataagccgggtcgagccatgggtctacactcacttctacggcgggagccatcgatacgaccactttaacacctgcctcggatctgaagcgggaccgaactccctttcggcgattgtcaactgcgatatcagcgttacggaaaagataacgcttggagttaggacggcgactttgtcgaacaatccgtcggcgcgcggcggcaagataactgatatctttcaatttgagggcaacgagtacagacagccggacgtcggtacaaaaagatttttggggccgggtacggtgcattacgtgaagccgggagtgtacgggcgctatgacccgttcggactctttagggtgaacgccgggatagacgttgatgtcgcggaagagcgggggcgggtttgtttttcacttgacgggggatttaggttttaa

SEQ ID NO: 4740 - protein, 263 aa, Unknown
  Obtained from environmental sample
  misc_feature (1)..(263): Xaa is any amino acid
MRWGISEVMIGGSTTNQQDNDSINTTRKEYIGQKQSWEGAFFIPFVPMVFVEHYVGDRNNAALSLDATVNWPKDFRLYLEFFLDDMLAPWKIMSDDWGNKWALTVGAQYFTNWKNRDVSVGLEISRVEPWVYTHFYGGSHRYDHFNTCLGSEAGPNSLSAIVNCDISVTEKITLGVRTATLSNNPSARGGKITDIFQFEGNEYRQPDVGTKRFLGPGTVHYVKPGVYGRYDPFGLFRVNAGIDVDVAEERGRVCFSLDGGFRF

SEQ ID NO: 4741 - DNA, 789 bp, Unknown
  Obtained from environmental sample
  misc_feature (1)..(789): n is a, c, g, or t
atggaaatacatacgcctgaaaaatattcggctctttgtaaaaagacaggctttactgaagatgaacgtgacaatattaagaattgcgctgataaaatgatcatcctttacgatgaaagaacaaaactatttgaacagcacgatgggtacttttcccttccccacattgaaatatctcaaattcccgttacggattttccgctctacaataactggtcttatgatcgcatttaccgtaccgatatgattaaacagccggacgtgctgatgtttttatttttgcacagccgggaattctccgaggaaatcaaacgggtaaattatgaattttacgaaccacgtaccagccatgagtcttcactttcgccctcaatacattccataattgcgtctgaaattgggaaaccggctgacgctttccgtttttttgcctttgcgacgcggatggatctggacaactacaaccgcaacactgccgaagggctgcacaccaccagtattgccgccgcatggatgaacatagtgtacggtttcggcggccttcgcagcgacagtgcgccggatggcgaaggcggggagcttattcttaaccccggccttccccggcagtggacagggtacgaattcaggattttctatcgcggcgcgcatatccgcgtcaaggtttccgctggagaggtggcattgtccacagatgatcgggtaagcgaggcgatacctattgtgatatatggcaagctatataatttcgattcaaatggtctgaggatccccctgtgtaccgcctga

SEQ ID NO: 4742 - protein, 262 aa, Unknown
  Obtained from environmental sample
  DOMAIN (198)...(252): Glycosyl hydrolase family 65, C-terminal domain
  misc_feature (1)..(262): Xaa is any amino acid
MEIHTPEKYSALCKKTGFTEDERDNIKNCADKMIILYDERTKLFEQHDGYFSLPHIEISQIPVTDFPLYNNWSYDRIYRTDMIKQPDVLMFLFLHSREFSEEIKRVNYEFYEPRTSHESSLSPSIHSIIASEIGKPADAFRFFAFATRMDLDNYNRNTAEGLHTTSIAAAWMNIVYGFGGLRSDSAPDGEGGELILNPGLPRQWTGYEFRIFYRGAHIRVKVSAGEVALSTDDRVSEAIPIVIYGKLYNFDSNGLRIPLCTA

SEQ ID NO: 4743 - DNA, 630 bp, Unknown
  Obtained from environmental sample
  misc_feature (1)..(630): n is a, c, g, or t
ttgtttatggaaacggtaatacgtcaattctaccttcccagaccggatagacggggcattatcgagcagttcgacggctatttccgcctggaggattgtaccctggatgcggtcagatctcggttgaaggatcccaaagaatactggggcggaggcggtggagttgcgaccgcgacgcagattattaaacaggccgatgttgtaaccatgctggcgctattcggcgatgattatccgaccggggtaaaaaaggtcaatctggatttttatgagccgaggacggaacacggctcaagcctttcttcctgtatgtacgccctgctttcctgcgagaccggcaacagcgactgggcttatccctttttcatcaaaagcgccgagatcgacattaccggcaaatcaaagcattttgccggcctcgtttacattggcggcactcaccctgcagcaaacggcggggcctggatgacggcaatccggggcttctgcggattttccgttgaaaacggcgatatacgaattgttccccgccttccgaaacattgggataaagtatgtttttccgttatgctaaacggcattgaacacagaataactgttactaaagacaatttcactgttgagaaataa

SEQ ID NO: 4744 - protein, 209 aa, Unknown
  Obtained from environmental sample
  misc_feature (1)..(209): Xaa is any amino acid
MFMETVIRQFYLPRPDRRGIIEQFDGYFRLEDCTLDAVRSRLKDPKEYWGGGGGVATATQIIKQADVVTMLALFGDDYPTGVKKVNLDFYEPRTEHGSSLSSCMYALLSCETGNSDWAYPFFIKSAEIDITGKSKHFAGLVYIGGTHPAANGGAWMTAIRGFCGFSVENGDIRIVPRLPKHWDKVCFSVMLNGIEHRITVTKDNFTVEK

SEQ ID NO: 4745 - DNA, 549 bp, Unknown
  Obtained from environmental sample
  misc_feature (1)..(549): n is a, c, g, or t
atgatccgtatcgatacgactgatattctctttatatgcggcggcgcttttgtaggactggataaactcattgagcgccggatagttgagcatccaatgggctttggtaccgataccaaagaccacaaaggaaagaacctgaaagagctttacgacgccctgcacccggacgaccttatccactttgggatgatccccgagtttatcggcaggcttccaatcaccgtaagcctggaagagcttaacagggacgatttaaagagaatcatcaccgagcctaaaaacgcgattattaagcaatacaccgcatcgcttgccattgacgaagtcaagctggaattcaccgaagacgcgattgatgccatcgcggatacggcaataaaacagaagaccggcgcgaggggactaagggccattgtcgaaaagctaatgaccgacatcatgtttgaaatcccgtccataaagggatttaagcatgtgctaatcacaaaagatacggttcttaaatccgaacctcctgatattcagactctgcagaaaatcgcctaa

SEQ ID NO: 4746 - protein, 182 aa, Unknown
  Obtained from environmental sample
  misc_feature (1)..(182): Xaa is any amino acid
MIRIDTTDILFICGGAFVGLDKLIERRIVEHPMGFGTDTKDHKGKNLKELYDALHPDDLIHFGMIPEFIGRLPITVSLEELNRDDLKRIITEPKNAIIKQYTASLAIDEVKLEFTEDAIDAIADTAIKQKTGARGLRAIVEKLMTDIMFEIPSIKGFKHVLITKDTVLKSEPPDIQTLQKIA

SEQ ID NO: 4747 - DNA, 339 bp, Unknown
  Obtained from environmental sample
  misc_feature (1)..(339): n is a, c, g, or t
gtgattagcacatgcttaaatccctttatggacgggatttcaaacatgatgtcggtcattagcttttcgacaatggcccttagtcccctcgcgccggtcttctgttttattgccgtatccgcgatggcatcaatcgcgtcttcggtgaattccagcttgacttcgtcaatggcaagcgatgcggtgtattgcttaataatcgcgtttttaggctcggtgatgattctctttaaatcgtccctgttaagctcttccaggcttacggtgattggaagcctgccgataaactcggggatcatcccaaagtggataaggtcgtccgggtgcagggcgtcgtaa

SEQ ID NO: 4748 - protein, 112 aa, Unknown
  Obtained from environmental sample
  misc_feature (1)..(112): Xaa is any amino acid
MISTCLNPFMDGISNMMSVISFSTMALSPLAPVFCFIAVSAMASIASSVNSSLTSSMASDAVYCLIIAFLGSVMILFKSSLLSSSRLTVIGSLPINSGIIPKWIRSSGCRAS

SEQ ID NO: 4749 - DNA, 516 bp, Unknown
  Obtained from environmental sample
  misc_feature (1)..(516): n is a, c, g, or t
ttgctaaagggaaacgaaacactggagtttttagccaaacaagcctcaaagggtaatgaaaaatgttttgtcgcgctctgcgatttgttaaaaacaaaactttttcgtaccgcaaaaggtgttctgggcaatgaatctctggcccttgatgctgtcagcgaagccattttccgcgcctttaagggcattaaacggcttcgggaacctaaatatgcggaaacttggtttatccgcatacaaataaatgtcgcaaatgatttctacaggaggcaaaaaaatgaaatagttatggaaaaagtaccggaaggcatatatcatgatgatcatagtgaattagaattcactcagttgatagaatctttacaacctgaattgcgtgacatcatcagccttaaatactattcaggttatacgttgtgtgaaatatccgaaatattggatgtaccggaaggaacggttaanagccgtctaaacagagcgcttaatatattacggttggaggttttatatgaataa

SEQ ID NO: 4750 - protein, 171 aa, Unknown
  Obtained from environmental sample
  DOMAIN (26)...(94): Sigma-70 region 2
  misc_feature (1)..(171): Xaa is any amino acid
MLKGNETLEFLAKQASKGNEKCFVALCDLLKTKLFRTAKGVLGNESLALDAVSEAIFRAFKGIKRLREPKYAETWFIRIQINVANDFYRRQKNEIVMEKVPEGIYHDDHSELEFTQLIESLQPELRDIISLKYYSGYTLCEISEILDVPEGTVXSRLNRALNILRLEVLYE

SEQ ID NO: 4751 - DNA, 675 bp, Unknown
  Obtained from environmental sample
  misc_feature (1)..(675): n is a, c, g, or t
ttgcggcacagagtgaatatggatgagcgttatgacccagatttgtatgaatgtaagtcggagatcaatgccaatggaatatacttgaaaaataaacccgaaaaagcaggaaaacaatacgaggcagttttgataggaactcaaacatggatggcggagaatttgaactatgatgtcccctatgttaccaccgatgtgtgctacaacaacaatgatgacaactgcgcgacctacggcaggttgtacgattggtcaacggcaatggctttagatgctgcgtgcaacaccagtactgtcgctgattgcgaagcaaccgtgtcgtctaagcatacaggcatctgccctgctggctggcatatccccagcgatgcagaatggacaacgcttacaaattatgttggcggcgcatcaacagcaggaaccaagctgaagaaatctacgacgtggaactcgaacaccacagacacggacgattacgggtttgcggctctgcctggcggcgacaattggggcagcttcggcaatgtcggcagcttcggcttctggtggtctgccacggagatcaatgctaaaatcgcctactaccggtacatgcgcgaacactcatatgtatactcgggcatcagcggcaacactaagacatacttacattcagtgcgttgtgtcaaggactga

SEQ ID NO: 4752 - protein, 224 aa, Unknown
  Obtained from environmental sample
  misc_feature (1)..(224): Xaa is any amino acid
MRHRVNMDERYDPDLYECKSEINANGIYLKNKPEKAGKQYEAVLIGTQTWMAENLNYDVPYVTTDVCYNNNDDNCATYGRLYDWSTAMALDAACNTSTVADCEATVSSKHTGICPAGWHIPSDAEWTTLTNYVGGASTAGTKLKKSTTWNSNTTDTDDYGFAALPGGDNWGSFGNVGSFGFWWSATEINAKIAYYRYMREHSYVYSGISGNTKTYLHSVRCVKD

SEQ ID NO: 4753 - DNA, 609 bp, Unknown
  Obtained from environmental sample
  misc_feature (1)..(609): n is a, c, g, or t
ttggtcgcggaatcggaaacatccgacatgatgaacgtcgaacggcggttccgcgaattgtccgcccatttcaaaacgggcctggtccatgggcagatggacaaggccgcgcgcgacaaggtcatggacgaattcctggccggcgatttgaaagttctggtcgcgacctcggtcatagaagtcggaatcgatgttccgtccgcgaccataatggtgattgaaaatgccgagcgattcggcatgtcggcgctgcaccaaatacgcggccgcgtcggacgcgggccggcgcagtcgtattgcatattgcttcacggcttcgcgattacggagaacgcggagaaaagaatcgccaccttatgcgaaacgaacgacggatttttaatcgccgaaagggatttgatgatgaggggcaccggcgagatactcggcacagcgcaatccggctggcttaattatcactttgtggattacagagagcaccaggcgctgttcaaattcgccgtcgaaaaggccaaggaatgcgcggcctcgggcgcaatcccggacgaagcgaaagacctgatgtggatctttggccaaacggacaagatggagtttataaagggataa

SEQ ID NO: 4754 - protein, 202 aa, Unknown
  Obtained from environmental sample
  DOMAIN (18)...(95): Helicase conserved C-terminal domain
  misc_feature (1)..(202): Xaa is any amino acid
MVAESETSDMMNVERRFRELSAHFKTGLVHGQMDKAARDKVMDEFLAGDLKVLVATSVIEVGIDVPSATIMVIENAERFGMSALHQIRGRVGRGPAQSYCILLHGFAITENAEKRIATLCETNDGFLIAERDLMMRGTGEILGTAQSGWLNYHFVDYREHQALFKFAVEKAKECAASGAIPDEAKDLMWIFGQTDKMEFIKG

SEQ ID NO: 4755 - DNA, 792 bp, Unknown
  Obtained from environmental sample
  misc_feature (1)..(792): n is a, c, g, or t
ttgatgngcgagtttcggcatacgtttatacgttggcataataccgctttgtcgccctggtttgcttttcctgttttcttgttatttattctgtggttaagcgcgtttctttttcgtttatttgcccagtatcgcactcaacttttaataagcagcgctctttcaagatattttccacatgctcttgcacaacgcattatgcgtgaaggaaaaactgatttaaaaccggcgtacaaagagctaactattcttttttccgatatttccggttttacaaaatggagttccgataaaacccccgaagctgtgcacaattttttaagcgattatcttgaaagcatggctgagattttatttaaccacggcggtactgtagataaattcatgggagacggaatactttcctttttcggcgatcccttcgaaatacccgatcatacggaacaatgtataaaagcggcaatagcaatgcaggaaaaagtgcggcttcttgccgaaaagtggaaacccattgttgatattgacctaaaagtacgtatggggataaacaccggaaaagtaatagtaggcaatcttggcaacaagacccgcatagagtacacggtaataggagcggcagttaatctcgcgcagcgcatggaaagcaacgcgcctgttggcggcatactggtaacggcggatgtacgtgaaaaagtaaaagataaattttctttccctgaaagaaaggatgtaacagttaaaggatatgccgaaactattgaggcgtatgttgtaggtgaaataataagatag

SEQ ID NO: 4756 - protein, 263 aa, Unknown
  Obtained from environmental sample
  DOMAIN (73)...(260): Adenylate and Guanylate cyclase catalytic domain
  misc_feature (1)..(263): Xaa is any amino acid
MMXEFRHTFIRWHNTALSPWFAFPVFLLFILWLSAFLFRLFAQYRTQLLISSALSRYFPHALAQRIMREGKTDLKPAYKELTILFSDISGFTKWSSDKTPEAVHNFLSDYLESMAEILFNHGGTVDKFMGDGILSFFGDPFEIPDHTEQCIKAAIAMQEKVRLLAEKWKPIVDIDLKVRMGINTGKVIVGNLGNKTRIEYTVIGAAVNLAQRMESNAPVGGILVTADVREKVKDKFSFPERKDVTVKGYAETIEAYVVGEIIR

SEQ ID NO: 4757 - DNA, 828 bp, Unknown
  Obtained from environmental sample
  misc_feature (1)..(828): n is a, c, g, or t
atggcggtaaatctgcgcgacaggctcaagagaatacaggagagcagaaaatttgaatccaaaattgactttccgcaggactcgccgagtgtttctcagagcgaagataatttaaaactgataaatcttggctggaagcagtgcggttttaaaacgctaaaaagagaaatttacgcgccttcgtcatttaaaaaaaaatcgcctcttccgcctgctcttgccgttcttgtacgtgatttagcaggaagggaattgccccaaattgaggactttctcttttttgacctggaaacatccgggctttacggcggatcggcgggaacaatcgcttttcttgccgcttttggaagaccgctttcaaacgggaaaatgcacataacgcagtatctgcttttggactatccgggcgagaatgattttttgcagaatataattacggaattgaataaggaaaagtctgtaatcgtaacatataacggaaaatgttttgattcgcagattattaaagcaaggtgtcttataaacagaataaagccgcctgaatatcggcatgttgatctgcttcatccggcaaggcggctttggaagaatattattcaggactgctctcaaaagtcggttgaaaccaacattattggcattgatcgtacaaatgacattcccggctctctcgctccggaaatctggtttgagtttctcaaaacaggagaaacagagaatttaatgggcatttgcgatcataatctgtcagatataaaaggtcttgcctcaatccttgcggcaatgattttaatcgcagaagatcctttaacgcgaaatgaattatga

SEQ ID NO: 4758 - protein, 275 aa, Unknown
  Obtained from environmental sample
  misc_feature (1)..(275): Xaa is any amino acid
MAVNLRDRLKRIQESRKFESKIDFPQDSPSVSQSEDNLKLINLGWKQCGFKTLKREIYAPSSFKKKSPLPPALAVLVRDLAGRELPQIEDFLFFDLETSGLYGGSAGTIAFLAAFGRPLSNGKMHITQYLLLDYPGENDFLQNIITELNKEKSVIVTYNGKCFDSQIIKARCLINRIKPPEYRHVDLLHPARRLWKNIIQDCSQKSVETNIIGIDRTNDIPGSLAPEIWFEFLKTGETENLMGICDHNLSDIKGLASILAAMILIAEDPLTRNEL

SEQ ID NO: 4759 - DNA, 741 bp, Unknown
  Obtained from environmental sample
  misc_feature (1)..(741): n is a, c, g, or t
gtgtttttttccctcaatgtgccggaagaaaataaagaatttttaaaaatacaatttattatttcagataacggtatcggaatgacagaggaacagataagccgtctttttcaatctntcagtcaggcggattccggtatttttaaccggtacggcggaaccggacttgggctttcaatcagccagaatctcgcggaaatgatgggcgggcatatcactgtaaaaagcaaaccaggcgaaggttcgacatttgaatttactttgtgttttacaattgttgaagaaaagcgggaatcggccgccggagaagtcacgcccgatctttccggcaagcgcatacttattgtagaagacgtgcagataaaccgctttattttaacggagcttcttgcggataccaatgtggaaattgacgaagccctggacggaaaggaagcggtcgccattttcagcgaaaagccgcgcgattattacgaccttatctttatggatatacagatgcccataatggacggttatgaagccaccaggcaaatcagggctattgaagccgaaatgataaaaaatgaagaagcccagggcaataaaggaccgcgcaggcagacgcgcattattgccatgacagctaacgcatataaggaagatattgaaaaagccctcgcctcgggaatggacggccatctttcaaaacctatagatatcaacgccgtaatgcgcactctcgcgggaataattgattga

SEQ ID NO: 4760 - protein, 246 aa, Unknown
  Obtained from environmental sample
  DOMAIN (10)...(91): Histidine kinase-, DNA gyrase B-, and HSP90-like ATPase
  misc_feature (1)..(246): Xaa is any amino acid
MFFSLNVPEENKEFLKIQFIISDNGIGMTEEQISRLFQSXSQADSGIFNRYGGTGLGLSISQNLAEMMGGHITVKSKPGEGSTFEFTLCFTIVEEKRESAAGEVTPDLSGKRILIVEDVQINRFILTELLADTNVEIDEALDGKEAVAIFSEKPRDYYDLIFMDIQMPIMDGYEATRQIRAIEAEMIKNEEAQGNKGPRRQTRIIAMTANAYKEDIEKALASGMDGHLSKPIDINAVMRTLAGIID

SEQ ID NO: 4761 - DNA, 579 bp, Unknown
  Obtained from environmental sample
  misc_feature (1)..(579): n is a, c, g, or t
ttgataaaatataactgtatagcgatgattgttctgatttcggacgttaccgaacaagtaaatttcgtaaaagatctggaaaaggccgcctatacggacagtcttacgggactttataacagaaagcattttgcggaacttgcgtcggcggaaattcaaagggcgttcagacttggtcaattattatatatgtccatgctggattttgattttttcaaaagcataaacgataactacggccacaccgcgggagatttggttttgaaaacaacctctgaagttatccataaaagcattcgttcctacgatttgctttgccgttacgggggcgaagaatttgtcctgctttttgccgtcaggaatgaagccgaagcatccgttgtggcggaaagaatcagaaaaggcatagaaaattgcgttattaactacgaagaacacatgttaaatattacatgcagcataggcatggcgaaattcatgagcaacgataacctggaaaccgctataaagaaagccgacgaagccctttacacagcgaaaaaagcgggacgtaatcaggtaaaaatatatgagccgtaa

SEQ ID NO: 4762 - protein, 192 aa, Unknown
  Obtained from environmental sample
  DOMAIN (26)...(186): GGDEF domain
  misc_feature (1)..(192): Xaa is any amino acid
MIKYNCIAMIVLISDVTEQVNFVKDLEKAAYTDSLTGLYNRKHFAELASAEIQRAFRLGQLLYMSMLDFDFFKSINDNYGHTAGDLVLKTTSEVIHKSIRSYDLLCRYGGEEFVLLFAVRNEAEASVVAERIRKGIENCVINYEEHMLNITCSIGMAKFMSNDNLETAIKKADEALYTAKKAGRNQVKIYEP

SEQ ID NO: 4763 - DNA, 846 bp, Unknown
  Obtained from environmental sample
  misc_feature (1)..(846): n is a, c, g, or t
atgaaagaaaatttgaatttcaaaaaaatgctgcaaatagcggcagcctccgatttgcccgttttgctcacaggtgagtctggcacaggcaaggaactcgcggctagggaattgcatgctcttggcaaaagaaataacagggcttttgttgcggttaactgcggggctatttcggcaggcattgccgagtctcttttttgcgggcatgttaaaggtgcttttaccggagcgagcagcgacaaggtgggttttgttagagcggccagcggtggcactctttttttagacgaggtagcggagctctccccagacattcaaaaaactcttttgcgcacgttgcaagaaaaaatggttatgcctgttggcagccaaaaggagataaatgtggattttaggcttatttgcgcgactcacagaaatttgccagctcttttagaaaaagggctttttaggcaggatttatattttaggctggcttctttaaccataaacattccccctttgagagagcgtagcgatttgcgaagcatcgcagaatctctttggaaaggcgatgaacctttgagcgagcgtaatttgagggctttgcaaaattattcgtggcccggcaatataaggcagttgaaaaatgttttggaacgctatgctctttttaagagtcacggctactcccttgaatttttgctaaaatccgaatcggagcaatgcagttttaacttgaatgaatcaccaccgccacaatacaaaccaaatctatgcgaaatcagcaaagaaatagagcgttgcgaaggaaacaaggctagggccgcaaaaaaactggaatcagcagaggctcggccgatctga

SEQ ID NO: 4764 - protein, 281 aa, Unknown
  Obtained from environmental sample
  DOMAIN (20)...(221): ATPase family associated with various cellular activities (AAA)
  misc_feature (1)..(281): Xaa is any amino acid
MKENLNFKKMLQIAAASDLPVLLTGESGTGKELAARELHALGKRNNRAFVAVNCGAISAGIAESLFCGHVKGAFTGASSDKVGFVRAASGGTLFLDEVAELSPDIQKTLLRTLQEKMVMPVGSQKEINVDFRLICATHRNLPALLEKGLFRQDLYFRLASLTINIPPLRERSDLRSIAESLWKGDEPLSERNLRALQNYSWPGNIRQLKNVLERYALFKSHGYSLEFLLKSESEQCSFNLNESPPPQYKPNLCEISKEIERCEGNKARAAKKLESAEARPI

SEQ ID NO: 4765 - DNA, 525 bp, Unknown
  Obtained from environmental sample
  misc_feature (1)..(525): n is a, c, g, or t
atgagtacaaaaattgtcaaaatgtacaaacaggatgtacccgctttgcgtttcattggcaaaaaatacggagacaatgatcgtattgatggaatgtttggaaagcattggggtgactggtttcagaatggatggtttaacataatcgaaaaacaaacaaacaaagatttaaaatcaatatatgaggacggagacgcgtatattgggcttatgcggtggaaggaaggagaacctttcgaatattggataggtatttttatgccggaaaatacatccgttcctgccggttatgaatatcatgattttccaaaggctgcattgggtgtttgctgggtatatggcaaagagccagatatttatatgtgtgaagaagattacgtgaaaaatttaaaagaaaatgggtatgaggttataaaagacaaagaaaatgcccaatggttttttgagcgatatggctgcccgcgatttacaacacctgatgaaaatggcaaagttattctggatatttgttattttataaaataa

SEQ ID NO: 4766 - protein, 174 aa, Unknown
  Obtained from environmental sample
  misc_feature (1)..(174): Xaa is any amino acid
MSTKIVKMYKQDVPALRFIGKKYGDNDRIDGMFGKHWGDWFQNGWFNIIEKQTNKDLKSIYEDGDAYIGLMRWKEGEPFEYWIGIFMPENTSVPAGYEYHDFPKAALGVCWVYGKEPDIYMCEEDYVKNLKENGYEVIKDKENAQWFFERYGCPRFTTPDENGKVILDICYFIK

SEQ ID NO: 4767 - DNA, 369 bp, Unknown
  Obtained from environmental sample
  misc_feature (1)..(369): n is a, c, g, or t
gtggaaaacggcacggtggtccgcgaatatgtcggctatgaccgccttgagggtatcgaggaacaggccttcctctccgctgtctatcagccgctggtgcctttgctcaacttcttcatgcctgcccaaaagctcaaaagcaaaaccaggatcggctccaaagagatcaaggcatacggcaagcctaaaagccccttccaaaggctgatagaatcttcagaagtgccgcagaaaacaaaagattcccttgtggcccatatcgccatatacaacccggtagtgcttcagcataatgtcaacaaggctatagtccgtctcaggcggcggcttgcccaatcgaaccgcgtaataaccaatgcgcagttatag

SEQ ID NO: 4768 - protein, 122 aa, Unknown
  Obtained from environmental sample
  misc_feature (1)..(122): Xaa is any amino acid
MENGTVVREYVGYDRLEGIEEQAFLSAVYQPLVPLLNFFMPAQKLKSKTRIGSKEIKAYGKPKSPFQRLIESSEVPQKTKDSLVAHIAIYNPVVLQHNVNKAIVRLRRRLAQSNRVITNAQL

SEQ ID NO: 4769 - DNA, 723 bp, Unknown
  Obtained from environmental sample
  misc_feature (1)..(723): n is a, c, g, or t
atggtggacacggtgctttactttgaagactcgtcgggcaacaacggggacacccgcttccttagggcctcaaaaaaccgctttggctcggtggacgagataggcatcttttcaatgggcgcaaaggggcttcaggcggtggaagatccttccctgctttttatggtgcgccgggacggggaattgccttccggaatagccacggcggctgtccttgaaggctcaagaacccttttaattgagcttcaggcgctgaccgtccccgccaaaggcacgatgaccagggttttttcgggccacatagacagcgcaagggtttccagggtggccgccgtgctcgaaaagcacctgggccttaggctctccgatcaggacctttacgtgaacgtggcgggaggcatacgcataaacgaagtgggggtcgaactggccctggcctgcgttctctactccgcgagaacgggcattccgctcccggctaagaccgccatagcgggggagctttcgttggcgggcgaggtgatgcccgtgcgccgcctgagcgccagggtgaaaaccgccggaaaccttggtttcactgcctttttgggcccgcaggccattagcgaggaaccctccgaagaaggcctgagcgccaaggactattcgccgcttcaaaacgaggggttttcttcctttcagaacatcaaagccgtcatcaaaagccttttttccataaagtaa

SEQ ID NO: 4770 - protein, 240 aa, Unknown
  Obtained from environmental sample
  misc_feature (1)..(240): Xaa is any amino acid
MVDTVLYFEDSSGNNGDTRFLRASKNRFGSVDEIGIFSMGAKGLQAVEDPSLLFMVRRDGELPSGIATAAVLEGSRTLLIELQALTVPAKGTMTRVFSGHIDSARVSRVAAVLEKHLGLRLSDQDLYVNVAGGIRINEVGVELALACVLYSARTGIPLPAKTAIAGELSLAGEVMPVRRLSARVKTAGNLGFTAFLGPQAISEEPSEEGLSAKDYSPLQNEGFSSFQNIKAVIKSLFSIK

SEQ ID NO: 4771 - DNA, 588 bp, Unknown
  Obtained from environmental sample
  misc_feature (1)..(588): n is a, c, g, or t
atgatcgcgactgttcgttccggatatcagacagcggggctgggtagtggttctgctcccctcgcggctgccggtatactcgaatcaaaacgattaagcctcagcatcaggcccccggttgtgaccggtcccgacggcacgccgattgaaatggatatagcgactaacgcggtgctggtacgggaacggcttgcgccggatcaggtggttgagtatatgttgaccgcccgtcaaagatcccagtgggaaaaattcttcctgtaccttgatcttgaggcgatgctgtcgcgggacgcggcgcgccagagaaaatggctgaccgaaagcgaagaaggcagaaggcggatgattgatcagtaccgtcaggaactgcgcagcgacgtcaccgacggaaccatctcggttattcctaccgatttttcaatagaacagaccaggtacaacagttttgagggaagcgttatcgtattgcaaagattcagaagcaacaatttcaccgaactgaaacaatacacctattcggtgcgcctgaaagacaatatttggaccattgtggattattccgttgttaatctggggactgaatga

SEQ ID NO: 4772 - protein, 195 aa, Unknown
  Obtained from environmental sample
  SIGNAL (1)...(23)
  misc_feature (1)..(195): Xaa is any amino acid
MIATVRSGYQTAGLGSGSAPLAAAGILESKRLSLSIRPPVVTGPDGTPIEMDIATNAVLVRERLAPDQVVEYMLTARQRSQWEKFFLYLDLEAMLSRDAARQRKWLTESEEGRRRMIDQYRQELRSDVTDGTISVIPTDFSIEQTRYNSFEGSVIVLQRFRSNNFTELKQYTYSVRLKDNIWTIVDYSVVNLGTE

SEQ ID NO: 4773 - DNA, 597 bp, Unknown
  Obtained from environmental sample
  misc_feature (1)..(597): n is a, c, g, or t
gtgcttgtttattcggggggcgcgccttattccatcagcacaatccccgcgggtggcgcgcaggtaccaggcgatatttcaataatgaaaaacatttcgcaggagaccgctgaaagtataaaagttaaatcgggatgctgctgggaaccgttcntggaagacgatgatgaaattattgttccgggagtcggtggaagggcgccccaggccataccacggtcgcagatcctcgcgatcatccgcccaagaatggaagagacttttaaactggtcaaggaaaaaatcgacaagctttctttttcaaggcccctgggtggcggggttgtgcttacaggcggcggctctgagctgctgggagcggcagacctggcggcccaggtttttaacctgccggtacgggtgggtataccgcttcctataggcggccttgttgaagattaccgcaaagccgcttttgcgaccgccgtgggactcgcgcttgaagggtacgatcgcatgcaaaaggacgttttcgttcacggcggtgaatccagagacaaaggggggccaaaagtttgggagaagctgaaagattggtttgaaaaagaatttttttaa

SEQ ID NO: 4774 - protein, 198 aa, Unknown
  Obtained from environmental sample
  DOMAIN (1)...(158): Cell division protein FtsA
  misc_feature (1)..(198): Xaa is any amino acid
MLVYSGGAPYSISTIPAGGAQVPGDISIMKNISQETAESIKVKSGCCWEPFXEDDDEIIVPGVGGRAPQAIPRSQILAIIRPRMEETFKLVKEKIDKLSFSRPLGGGVVLTGGGSELLGAADLAAQVFNLPVRVGIPLPIGGLVEDYRKAAFATAVGLALEGYDRMQKDVFVHGGESRDKGGPKVWEKLKDWFEKEFF

SEQ ID NO: 4775 - DNA, 627 bp, Unknown
  Obtained from environmental sample
  misc_feature (1)..(627): n is a, c, g, or t
gtggaggcaatatgcgcggccatgaggaaccggggcggctatgacggcagccacgacgaggcggtcaagaccgtcaaccatttcttcaaggagatgatgtaccagctatgcgacggcttttccgtgaacacggggtggttcaccgtcaacgtccacattggcggcctctttcattctgtcaaggaaatctttgacccccaaaagcaccgcgtcaccttcaagttccatatgcttaaagcgatgaagagcctgacctccctcattgaagtaaccatcaacggccacgttgaagaaagcgcgtacatatccgagttcaacgacatggaagaccctgatggcagcaatctttttgagccgggccacgtatgcgagattctgggccgcaggattaaaatcgacggccccgccgatgaagttggcctgtggatggttcccgtggcaggcggcgcaaaagaggtaaaaataacccgcatcgtgtccaacaccccctcacgcatcgaattcatcccggtggacacaggccaccctgaaaaccgcctggaaatccgcacacgcttctcaggctcacacacgccccttgccgccctgcgcgtcatcaccagcccctttgttatttcccaggcatga

SEQ ID NO: 4776 - protein, 208 aa, Unknown
  Obtained from environmental sample
  misc_feature (1)..(208): Xaa is any amino acid
MEAICAAMRNRGGYDGSHDEAVKTVNHFFKEMMYQLCDGFSVNTGWFTVNVHIGGLFHSVKEIFDPQKHRVTFKFHMLKAMKSLTSLIEVTINGHVEESAYISEFNDMEDPDGSNLFEPGHVCEILGRRIKIDGPADEVGLWMVPVAGGAKEVKITRIVSNTPSRIEFIPVDTGHPENRLEIRTRFSGSHTPLAALRVITSPFVISQA

SEQ ID NO: 4777 - DNA, 417 bp, Unknown
  Obtained from environmental sample
  misc_feature (1)..(417): n is a, c, g, or t
atggttgtacccaatcttatacaaaaattccgcgacatgggatttatatttgacaaagttcaccatcaaactgacattgaagatcgtgaaaataaaatttttgcggagcttgatattagccttgaaaacggtgacaaagtaatgattgtcgaagtcaaatctaaaccaaaaaccgaggatgttacagagcatatagaacgaatgaataaagtgcgtcttcatgctgatttacacggagacaagcggatatttctgggcgccatcgccggtatggtctttaatgaaaacgaaaaaatgttcgccatgaaaaacggtttttatgttattgaaccctcaggggaaacatttatcattaccgcgcctacaggcaaatattctcctcaggagtggtattattccaagccgcgtcataattaa

SEQ ID NO: 4778 - protein, 138 aa, Unknown
  Obtained from environmental sample
  misc_feature (1)..(138): Xaa is any amino acid
MVVPNLIQKFRDMGFIFDKVHHQTDIEDRENKIFAELDISLENGDKVMIVEVKSKPKTEDVTEHIERMNKVRLHADLHGDKRIFLGAIAGMVFNENEKMFAMKNGFYVIEPSGETFIITAPTGKYSPQEWYYSKPRHN

SEQ ID NO: 4779 - DNA, 747 bp, Unknown
  Obtained from environmental sample
  misc_feature (1)..(747): n is a, c, g, or t
atgtcgtctggctggctgcgcttcctcttagagcagtttgaatttccgtacgaattggttttcgcccccacgcttgacgcaggaaacctaaaagccaagtttgacgtgatcgttttccccgacggcgcaatatctcaaaggctgagggcagcaactggcggcgggccaggtggccaaggcggtgcaaggcagctgcgggacgcagacttgccagcagagttcaggggcaggcagggccgcgtttccatagaaaacaccatgccagcgctaaaagagtttgccagcgcggggggcactattgtcgccatgggctcttccagcgcaataggcgaaatacttggccttggcgcgacaaacgccatgacagagatggttaatggcagggcgcagcccctgccaagggacaagcactatgtgccaggctcaattttgcaggtggcggttgacaacagccagccccttgcatacggcatggacgccgcggcaaatgtctttttcaacaatagcccgtcctataagctgagcgaagccgccaaagcaaacggtgccaaggccgttgcttggttcgattcccccaatcccctcaagagcggctggatacatggccctgcctacctaaatggcaccatcgccgcaatggacatcccccacggcaaaggccgcctgtgcctgatagggcccgaacccaccttccgcgcccagccgcatggcacattcaagctgctgtttaatgcgatctatatgtag

SEQ ID NO: 4780 - protein, 248 aa, Unknown
  Obtained from environmental sample
  misc_feature (1)..(248): Xaa is any amino acid
MSSGWLRFLLEQFEFPYELVFAPTLDAGNLKAKFDVIVFPDGAISQRLRAATGGGPGGQGGARQLRDADLPAEFRGRQGRVSIENTMPALKEFASAGGTIVAMGSSSAIGEILGLGATNAMTEMVNGRAQPLPRDKHYVPGSILQVAVDNSQPLAYGMDAAANVFFNNSPSYKLSEAAKANGAKAVAWFDSPNPLKSGWIHGPAYLNGTIAAMDIPHGKGRLCLIGPEPTFRAQPHGTFKLLFNAIYM

SEQ ID NO: 4781 - DNA, 333 bp, Unknown
  Obtained from environmental sample
  misc_feature (1)..(333): n is a, c, g, or t
atgctcattgaccaggccgccccgcgccagattgacgatccgcgcgccttttttcataaagcggattttttccgcgtttatcaggcccttcgttgtgtcgctcagaggaacgtgcagggtgatgtaatcggctttacccaacagcccttcaagcgtgtcggcgcgggcaacctcgcgggaaagattccacgcagcctctacggaaatgtaaggatcgtagccgataacgtccatgcccagcgcgatagcgtcattcgccgtcataacgccaatggcccccaaccccactacgccgagggtcttgccccgcagttccggcccttcaaattttga

SEQ ID NO: 4782 - protein, 110 aa, Unknown
  Obtained from environmental sample
  misc_feature (1)..(110): Xaa is any amino acid
MLIDQAAPRQIDDPRAFFHKADFFRVYQALRCVAQRNVQGDVIGFTQQPFKRVGAGNLAGKIPRSLYGNVRIVADNVHAQRDSVIRRHNANGPQPHYAEGLAPQFRPFKF

SEQ ID NO: 4783 - DNA, 759 bp, Unknown
  Obtained from environmental sample
  misc_feature (1)..(759): n is a, c, g, or t
gtggggttgggggccattggcgttatgacggcgaatgacgctatcgcgctgggcatggacgttatcggctacgatccttacatttccgtagaggctgcgtggaatctttcccgcgaggttgcccgcgccgacacgcttgaagggctgttgggtaaagccgattacatcaccctgcacgttcctctgagcgacacaacgaagggcctgataaacgcggaaaaaatccgctttatgaaaaaaggcgcgcggatcgtcaatctggcgcggggcggcctggtcaatgagcatgatattattgaggcgctgaattcagaaaaacttgccgcttatgtaacggactttccctcggcggaaatgcttgcctgcaaaaaggcgatttgtgttccccatctgggcgcgtccactcccgaagcggaagataattgcgcgatcatggcggtaaagcagcttatggattttctggaaaatgggggcatccgcaattcggtgaattttccccgctgtaggttggatatgcgcgcacccaaccgcctgcttgtggcaaaccgcaatattcccaacatggtcgggcagattaccacgatacttgccgcggcaaatatcaacatcaccgacctgataaatcatcaccgggatgactttgcctataatatcatcgatacggaacaaaaaattccaccagcgactttggaacaaattaaggaagttaacggtattattaaggttcgttcgattgaaaggattgaaaagaaaggatga

SEQ ID NO: 4784 - protein, 252 aa, Unknown
  Obtained from environmental sample
  DOMAIN (1)...(132): D-isomer specific 2-hydroxyacid dehydrogenase, NAD binding domain
  misc_feature (1)..(252): Xaa is any amino acid
MGLGAIGVMTANDAIALGMDVIGYDPYISVEAAWNLSREVARADTLEGLLGKADYITLHVPLSDTTKGLINAEKIRFMKKGARIVNLARGGLVNEHDIIEALNSEKLAAYVTDFPSAEMLACKKAICVPHLGASTPEAEDNCAIMAVKQLMDFLENGGIRNSVNFPRCRLDMRAPNRLLVANRNIPNMVGQITTILAAANINITDLINHHRDDFAYNIIDTEQKIPPATLEQIKEVNGIIKVRSIERIEKKG

SEQ ID NO: 4785 - DNA, 930 bp, Unknown
  Obtained from environmental sample
  misc_feature (1)..(930): n is a, c, g, or t
atggcatggcccggcaattacaaccgctatgcggcggcgactatgttcagcctcttttttggcgggaaaatcttcgcccccggtttaagcatagacggtgaaaatgtccaggactggctgcagggccgctatattgccgccttccgccactgttaccgccgcctgaaaacctgcgccgccattgccggctggggcgtcatgaacgaaccgcacaacggctttatcggtcatggtaatttgtcccgcgccgaaaatcccgtactgccggcgggaccccgccccagtccctgggatacaatccgcgccgcttccggttatgcgacagtagcgccgatatacaatgaactgaacagaaaaacttccaaaagcgaactgcttaatcccggcgctcattcgctgttcagggaaggcttctcctgtccctggaaacaagccggagtatgggccgatgaaggcggtaagccaattctgctgagtaaagatcactttgcctggtttgaaggccggcagacaaattttatgcaggacttccataagcccttcaccctccgttttattgaaacgatgaaagaagcggatgaaaatacattcttttttattgagggaatgcctcccagcgcaaataccgcaatacatcccgtgtggaacaaagacgatccgcctaacacgatcaacgcgtttcactggtatgacggctttgccctgtttaccaaacaattccggccctggttcacgtttaatccgaacaagtttaaatttattctgggcaggaaaaaagcgcaggcttattttagtgaatgtctggcnaaaggggtcaagtggtcccgtgaaaagatgaataacattccctgcctgttaggagaatttggccttccctttgatatgaacaaacgccgcgccttttgccgatggaaattatttggcgcatga

SEQ ID NO: 4786 - protein, 309 aa, Unknown
  Obtained from environmental sample
  misc_feature (1)..(309): Xaa is any amino acid
MAWPGNYNRYAAATMFSLFFGGKIFAPGLSIDGENVQDWLQGRYIAAFRHCYRRLKTCAAIAGWGVMNEPHNGFIGHGNLSRAENPVLPAGPRPSPWDTIRAASGYATVAPIYNELNRKTSKSELLNPGAHSLFREGFSCPWKQAGVWADEGGKPILLSKDHFAWFEGRQTNFMQDFHKPFTLRFIETMKEADENTFFFIEGMPPSANTAIHPVWNKDDPPNTINAFHWYDGFALFTKQFRPWFTFNPNKFKFILGRKKAQAYFSECLAKGVKWSREKMNNIPCLLGEFGLPFDMNKRRAFCRWKLFGA

SEQ ID NO: 4787 - DNA, 849 bp, Unknown
  Obtained from environmental sample
  misc_feature (1)..(849): n is a, c, g, or t
atgggcgcgggcgcaatagcaataatgcagttggttcacggcggggcaagtcttnggagggaggatggcgaaaacgcccagcgcatggccccatcggaagtacagcttatgccgggcgctgcgccaaaagcgatggacgtggccgacatacaatccgttatcgccaaattcgcggcggcggctcaaagggccaaaacagccggctttgacggcgttgagatacatgcggcgcattattatcttttttcccaattcctctcgcccctgacaaatcttcgcaccgatggatggggcgggcctgttgaaaatagggcgcgatttcttattgaaacagtcaaggagattagaaaagccgtagggccagatttcattatttcttgcaggatacacgctgtggagcttatggaaggcggcatgtcaaccgaggattcggcgcaaatagcaaagatgttgggaggcgcggacgttgaccttataaacgcttccgccataggttcaggttcatggggcatggttgacggcaagagatgcctctcgactacgtccgtcccgccaaccgatggcgggcccggcatttatgttcccttcgcggccaaactgaaagtcgccagcggtctgccagttatcacagttggccgcttggccgagccaggagcggctgacgcggccttgggccttggcatggacttggtggcaatagcgcggcagatcatagcggaccctcttgcccccaagaaattgctggatggccagcatcggcaaataaaccgttgcaagagttgcctcaattgtttcaaaacaatccgcgagggtggaatcaggtgccagataaacaccgagtggccatga

SEQ ID NO: 4788 - protein, 282 aa, Unknown
  Obtained from environmental sample
  DOMAIN (1)...(254): NADH:flavin oxidoreductase / NADH oxidase family
  misc_feature (1)..(282): Xaa is any amino acid
MGAGAIAIMQLVHGGASLXREDGENAQRMAPSEVQLMPGAAPKAMDVADIQSVIAKFAAAAQRAKTAGFDGVEIHAAHYYLFSQFLSPLTNLRTDGWGGPVENRARFLIETVKEIRKAVGPDFIISCRIHAVELMEGGMSTEDSAQIAKMLGGADVDLINASAIGSGSWGMVDGKRCLSTTSVPPTDGGPGIYVPFAAKLKVASGLPVITVGRLAEPGAADAALGLGMDLVAIARQIIADPLAPKKLLDGQHRQINRCKSCLNCFKTIREGGIRCQINTEWP

SEQ ID NO: 4789 - DNA, 939 bp, Unknown
  Obtained from environmental sample
  misc_feature (1)..(939): n is a, c, g, or t
atgaaggccgtcatcgtttcggataccggcgcctacgcaagcctcggcggacctgtgctgcaaagggcctgcacncacgccgccgggccttacaactaccaggtcgtcgatatagacggtaaggccgtttacaccaacaatatccccggcggggcgttccgtggtttcggcgtgcctcagagctgcttcgcaaccgaaagcaacctgaacctgctggcagaaatggccggcatcgaccctttcgagatacgttaccgtaacgcgataaagccgggccaggttctgcctaacgggcagatcgctgacggagatgttgagttaagggaatgtcttgaggcgcttaaagagacttacgaaaaggccaaagctgaagggaaacacgttggcattgcgtgtgctttcaagaattccgggatcggcgttgggctaaaggatatcggccgctgtgttctttcggtggaaaacggcgttatacacatcagaaccagcgccgcctgcatcggccagggccttgccacagcccttacccagattgcctgccagaccttgtgccccgaagcaggaagcgatttttccgcggaaagcggcttccctgcggaaagcttcttctttgagcaggcggatacgacgcgcacccctgattcaggaacgactaccgcctcccgccagaccctgttctctggcgaggccgtgaggcaggcggcgctgaaactgaaggcggcgctggatagggaaggcggcaggtttgaagacggcctaaaagcgcttactggccaggagttttacggagagtattctggcgtcacagacccgatgggcagcgacaagccaaacccggtaagccatgttgcctatagttacgcggcagccgcggcaatccttgacgacgaaggcaaagtggaaaaactcgccgccgtttatgacatgggaaggttgtaa

SEQ ID NO: 4790 - protein, 312 aa, Unknown
  Obtained from environmental sample
  DOMAIN (1)...(312): Aldehyde oxidase and xanthine dehydrogenase, molybdopterin binding domain
  misc_feature (1)..(312): Xaa is any amino acid
MKAVIVSDTGAYASLGGPVLQRACTHAAGPYNYQVVDIDGKAVYTNNIPGGAFRGFGVPQSCFATESNLNLLAEMAGIDPFEIRYRNAIKPGQVLPNGQIADGDVELRECLEALKETYEKAKAEGKHVGIACAFKNSGIGVGLKDIGRCVLSVENGVIHIRTSAACIGQGLATALTQIACQTLCPEAGSDFSAESGFPAESFFFEQADTTRTPDSGTTTASRQTLFSGEAVRQAALKLKAALDREGGRFEDGLKALTGQEFYGEYSGVTDPMGSDKPNPVSHVAYSYAAAAAILDDEGKVEKLAAVYDMGRL

SEQ ID NO: 4791 - DNA, 690 bp, Unknown
  Obtained from environmental sample
  misc_feature (1)..(690): n is a, c, g, or t
atgaagttaacaggagcagttatgaaaggaccgattttggcagtacttgccgcgggtatgggcagccgttacggcggccttaaacaaatggatgttataggaaaaaacggcgaagtgctgctggattattcggtatacgacgcggttaaatccggttttgaaaaaattgtttttattatccgtcgcgacatagagaaagattttagggagattgtgcttgcgcggatgggttcaaaagtaaaatatgaattggcttttcaggaagcggacagcttaataccgccggatatattccgcgccgccaaagaagccggaagaaccaaaccatggggaacaggccacgccctgctttgcgctgcggataaaattaacgcgcctttcacggttattaacgccgatgacttctacggcagggaagcttttgccgttatgtgcaaacacctcaattcttccgcagaagccgccatagtgccgtaccgccttgataaaacgctcagccctcagggaacggtggcgcgcggcgtctgcaaagtttccggcggctatcttgccggtgttgatgaacttaccgctattgaaaaaaaagacggtcggataattaacatcgctcccgacagctctgtccgcgagcttcttcctgaaacacccgtgtcaatgaatttcggggtttcagccggggatactgcctaa

SEQ ID NO: 4792 - protein, 229 aa, Unknown
  Obtained from environmental sample
  SIGNAL (1)...(25)
  misc_feature (1)..(229): Xaa is any amino acid
MKLTGAVMKGPILAVLAAGMGSRYGGLKQMDVIGKNGEVLLDYSVYDAVKSGFEKIVFIIRRDIEKDFREIVLARMGSKVKYELAFQEADSLIPPDIFRAAKEAGRTKPWGTGHALLCAADKINAPFTVINADDFYGREAFAVMCKHLNSSAEAAIVPYRLDKTLSPQGTVARGVCKVSGGYLAGVDELTAIEKKDGRIINIAPDSSVRELLPETPVSMNFGVSAGDTA

SEQ ID NO: 4793 - DNA, 444 bp, Unknown
  Obtained from environmental sample
  misc_feature (1)..(444): n is a, c, g, or t
ttgggcaatcattccgacggctacgccagtcttggcggagaagaattaagcgcaataaaaacgaatcttaaagcggcatctctggcgatcaaagacataaccgggaaagatcctgttctgttccgcgctcccaacttaaaccacggcggtaatttatcccaagtctgcaaggaaatgggcatggctcttattgacggcaatgttcataacgattggcccggagacgcggcgtcaattaaaaacagcgttctttcaagtccgtataacggcggcattattcttttgcacgataacaatacatcacaaggcaatactatgtcggtactgccggaaataatcaggggccttagggacaaaggtttctggatattgacggtaggccagcttgccgccgtgaaggaggcatctttggaagcggggaagaggtataattcgattaattga

SEQ ID NO: 4794 - protein, 147 aa, Unknown
  Obtained from environmental sample
  misc_feature (1)..(147): Xaa is any amino acid
MGNHSDGYASLGGEELSAIKTNLKAASLAIKDITGKDPVLFRAPNLNHGGNLSQVCKEMGMALIDGNVHNDWPGDAASIKNSVLSSPYNGGIILLHDNNTSQGNTMSVLPEIIRGLRDKGFWILTVGQLAAVKEASLEAGKRYNSIN

SEQ ID NO: 4795 - DNA, 675 bp, Unknown
  Obtained from environmental sample
  misc_feature (1)..(675): n is a, c, g, or t
gtggatatagaattanccgtcaatttcgatccaaacggagagttcaggtttaatcttctgcaatgccgtcccctgcaaaccaaaggactcggacggtcaatcaagattccggatctcaaacaggaacagatatttttttcctcgattggcaactttatgggcggtaatgtcagactcagttttgattacgcgatatgcatcaggacgatggaatacctcgcgcttcccgagcaggataaatacaatgtcgcgcgcactataggagtgataaaccaaaaatataaagataaaaccatgctgttgctcggtccgggcagatgggggaccactacgccgtcactgggagttccggttcatttcagcgaactgtgcaacatggccgccatttgcgaggtatcgtatccaaaagcaggcgtagtaccggatctctctttcgggagccattttttccaggacatcgtggaatcggatgttttttacgcggcgatttttaacggagaacctgacgttgtattctgtcccgagcaaattttagagcgggaaaacatattcggaaaacttctttccggagaaaaaaaattggattcaattatacatattgcagaaacgcccggcctgatcttacattccgatattacaaaccaaaaattgctgatttattgggaacagagataa

SEQ ID NO: 4796 - protein, 224 aa, Unknown
  Obtained from environmental sample
  misc_feature (1)..(224): Xaa is any amino acid
MDIELXVNFDPNGEFRFNLLQCRPLQTKGLGRSIKIPDLKQEQIFFSSIGNFMGGNVRLSFDYAICIRTMEYLALPEQDKYNVARTIGVINQKYKDKTMLLLGPGRWGTTTPSLGVPVHFSELCNMAAICEVSYPKAGVVPDLSFGSHFFQDIVESDVFYAAIFNGEPDVVFCPEQILERENIFGKLLSGEKKLDSIIHIAETPGLILHSDITNQKLLIYWEQR

SEQ ID NO: 4797 - DNA, 885 bp, Unknown
  Obtained from environmental sample
  misc_feature (1)..(885): n is a, c, g, or t
ttgcccgatgaaatccctgaaattatcaaatatcggctgattcccctggtttcggacggggaatttgccgcaatgctggatatggcggcgggagcggcgaatatgcggcttcctgtccacctgaaaatagataccggcatgggccgtatgggctgtccatcccatgaagcccttgcaacggcgagacaaatagccgcctgcgccgctctggaatatgcgggaaccgccactcatttggctgttgctgattccgccgctgttgatgaccgcgcgtacactgagcggcagattgcctgttttaatgaagcgctggacagtattcgggcggcaggtttgaatccgggaattgttcatgcggccaattccggcgccattattcttcatccggaagcatggtttgacatggtgcgtccggggattctcctgtacggttataaggctgtcgaggaaaccgaagccggcctgacgctgccgcccctgcgggtagagccggtcatggaactgcgaaccaaagttgtctttatcaaatcggtgaaaaaaggcgaaaccctttcctacggcagaacctgggccgctccgcaggacacggaaattgccgtactatccattggctatggcgatggtctgccccgtcttgccggcaaccgatggcaggcgttcatcggcggcaaggcatatccactggcaggccgtatctgcatggatcagtgcatggccgatcttggccccgcatcgggagtccgccgctgggatgaagcggtactgtttggcggtcccgcccccgatgccgcagaccttgcccgcttaatcggcactatcccttacgagattacctgtaaatatcataagcgcgtgccgagaatgtatgaaggtgtaactgcctaa

SEQ ID NO: 4798 - protein, 294 aa, Unknown
  Obtained from environmental sample
  DOMAIN (1)...(148): Alanine racemase, N-terminal domain
  misc_feature (1)..(294): Xaa is any amino acid
MPDEIPEIIKYRLIPLVSDGEFAAMLDMAAGAANMRLPVHLKIDTGMGRMGCPSHEALATARQIAACAALEYAGTATHLAVADSAAVDDRAYTERQIACFNEALDSIRAAGLNPGIVHAANSGAIILHPEAWFDMVRPGILLYGYKAVEETEAGLTLPPLRVEPVMELRTKVVFIKSVKKGETLSYGRTWAAPQDTEIAVLSIGYGDGLPRLAGNRWQAFIGGKAYPLAGRICMDQCMADLGPASGVRRWDEAVLFGGPAPDAADLARLIGTIPYEITCKYHKRVPRMYEGVTA

SEQ ID NO: 4799 - DNA, 405 bp, Unknown
  Obtained from environmental sample
  misc_feature (1)..(405): n is a, c, g, or t
atgctggaaaaagtaatgggcaatattcccgttatggagcctcgcaaggaaaatgtatcaagcggcatgggcgatataataaatcaggtttccgtttatagaaattttccaaatgcgataggctattcatttttattttattcaactgaaatggtaaaaagcgatcaaataaagctattgtctattgaaggcatttatccctcaagagaaacaatacaggatggaagctatccgttttctgacagtttttacgcgatttttatcgatactgacgataaaaaccgcaatattgaaccatttatcgaatggatgctttcaagccagggccaggaattaatctcaaagactggttatataccgataaatttagattttacaaaaccgctttctataccgaaaaactag

SEQ ID NO: 4800 - protein, 134 aa, Unknown
  Obtained from environmental sample
  misc_feature (1)..(134): Xaa is any amino acid
MLEKVMGNIPVMEPRKENVSSGMGDIINQVSVYRNFPNAIGYSFLFYSTEMVKSDQIKLLSIEGIYPSRETIQDGSYPFSDSFYAIFIDTDDKNRNIEPFIEWMLSSQGQELISKTGYIPINLDFTKPLSIPKN

SEQ ID NO: 4801 - DNA, 765 bp, Unknown
  Obtained from environmental sample
  misc_feature (1)..(765): n is a, c, g, or t
atgaaaatcggagcgcaactgtacacggtacgcgattacttgaaaaacgcgggtgacatcgaaatgaccctgcggaaactgaaaggcatgggctatgacatggctcagctttcaggtttaggcccctgcgacattgatctgctggcgggatggataaaggaactggggataaccgtatgcggcacccacagcccgtgggatcgcattgacaatcccgccgaactgaaaaaactgattgaggaacataaaaaactcgggtgttccaatatcgggataggcataaagccggacattttccccaacacccacgagggctatacccgttttatcaaaaaggtgaacaatatttgcaaagttgtgcagggcgaaggtttaactttcggctatcacaaccacaacgttgaattccagaaattcaacggggtctgcgcccttgaccgccttatggaagaatgcccggatatgtacatcattttagacctgttctgggtgcaggcggggggggctaatcccgttaagtatattgagaagtataaaaaccgcattcagttgttgcatctgaaggatttccgcatgaacggatgggacaggcgatttgccgaaatcgggcaagggaacctggactggggcactattatgcccctctgcgaaaagctcggcatttcctgcgccgtcattgaacaagacgcggattttcttgtcgatccttttgacagtttagccatgagccgcgattacctgataaaagccggatattggaaatga

SEQ ID NO: 4802 - protein, 254 aa, Unknown
  Obtained from environmental sample
  DOMAIN (24)...(207): Xylose isomerase-like TIM barrel
  misc_feature (1)..(254): Xaa is any amino acid
MKIGAQLYTVRDYLKNAGDIEMTLRKLKGMGYDMAQLSGLGPCDIDLLAGWIKELGITVCGTHSPWDRIDNPAELKKLIEEHKKLGCSNIGIGIKPDIFPNTHEGYTRFIKKVNNICKVVQGEGLTFGYHNHNVEFQKFNGVCALDRLMEECPDMYIILDLFWVQAGGANPVKYIEKYKNRIQLLHLKDFRMNGWDRRFAEIGQGNLDWGTIMPLCEKLGISCAVIEQDADFLVDPFDSLAMSRDYLIKAGYWK

SEQ ID NO: 4803 - DNA, 654 bp, Unknown
  Obtained from environmental sample
  misc_feature (1)..(654): n is a, c, g, or t
gtgcagagatttcctgaagttggcgagttgatcgcagggaataaaggagaaggcgggctgcttcacaggctggactacgaaacacatggtctaatgcttcttgcaagaaacagtctcgccatggaagctctgcttgagcagcaaaaacagggaaaaattctaaaagaatacagcgcgttgactggagaaagcggaattgtccttcctggttttccaaaagagaaaccggaattacaatcaggaaacaccgttaagatcacaagcgcttttagggtttatggaaaaggaaggaaagccgtgcgtccggttttaatcggcgacgcgaaaaaaaatatgtcggagaagctttacgtcactgaaatttttgaaagcaaattaatttctaccttcggttctatggacgcagagcttggaaactgcctgtcgctaatgctcaggataagcaaagggtttcgccaccagattagaagccaccttgcctggcttggaacgccaatacttaatgacgcgctttacggcggcgcaacgtttggaaatggttgtcttgctttgagagcctgctcgcttgcgtttgccgatccggtgacgggagagcagaggcgttacgcgattccgggtctgaggcttgacgttgacaataatgaaaaatcgtag

SEQ ID NO: 4804 - protein, 217 aa, Unknown
  Obtained from environmental sample
  DOMAIN (9)...(161): RNA pseudouridylate synthase
  misc_feature (1)..(217): Xaa is any amino acid
MQRFPEVGELIAGNKGEGGLLHRLDYETHGLMLLARNSLAMEALLEQQKQGKILKEYSALTGESGIVLPGFPKEKPELQSGNTVKITSAFRVYGKGRKAVRPVLIGDAKKNMSEKLYVTEIFESKLISTFGSMDAELGNCLSLMLRISKGFRHQIRSHLAWLGTPILNDALYGGATFGNGCLALRACSLAFADPVTGEQRRYAIPGLRLDVDNNEKS

SEQ ID NO: 4805 - DNA, 438 bp, Unknown
  Obtained from environmental sample
  misc_feature (1)..(438): n is a, c, g, or t
atgacagattggccgagacagaaacgtaatgcttctatccagttcgatatgtcgggatttcccctctgggcaaaggatctgcgccgggccgaaattgtagcttttgggtcgtttcccattatgtactttttttcgaatttcggctttgacacttaccgctgggcaactcacggcaacaatatgcgctacgccccgtggccgtttaattccgccgggacgatagaacagacgcaaaatgaaaaactcataacccttggcattgctgccggcggcgctgttttggtcgccctaatagactacggcattatgcgctacaaaagaagcattctagcgaaggaacaggcaaaccttcccgatgggactcccattattatccgaaggcctctgtatgatgaggaagccgatgcatccgccggtgcgcttccaaaaaaggaatga

SEQ ID NO: 4806 - protein, 145 aa, Unknown
  Obtained from environmental sample
  misc_feature (1)..(145): Xaa is any amino acid
MTDWPRQKRNASIQFDMSGFPLWAKDLRRAEIVAFGSFPIMYFFSNFGFDTYRWATHGNNMRYAPWPFNSAGTIEQTQNEKLITLGIAAGGAVLVALIDYGIMRYKRSILAKEQANLPDGTPIIIRRPLYDEEADASAGALPKKE

SEQ ID NO: 4807 - DNA, 486 bp, Unknown
  Obtained from environmental sample
  misc_feature (1)..(486): n is a, c, g, or t
gtgttgtactacctcggcaagcgtatcaaggaagccggcacggaatttgacgccgccttaaaactgaatcccaatgacgcccaggttctgatgtacatgggaaaaatcttaaaagattccaaggattacgtaggggcaattccgtatcttgaaaaagcgtcccatgatcaggtatacaagcttcgttcaatcattgaaataggcagctgttatatatcccttaagatgctggataaggcgacatccgaactggaaagggcgataaatcttatcgttaaggaatccgatctggacagcctttatgccaggtattttctggccatgtgctatgaattgaccgggagcattccaaaggctttagcccagtgggacaagatctacgctcaaaaaaagaatttcagagatgtgggagaaaagctcacaaaatacattgaatacagaagcgaaatggaggaaaaagaatctaaagaatcttcaggatcgtaa

SEQ ID NO: 4808 - protein, 161 aa, Unknown
  Obtained from environmental sample
  misc_feature (1)..(161): Xaa is any amino acid
MLYYLGKRIKEAGTEFDAALKLNPNDAQVLMYMGKILKDSKDYVGAIPYLEKASHDQVYKLRSIIEIGSCYISLKMLDKATSELERAINLIVKESDLDSLYARYFLAMCYELTGSIPKALAQWDKIYAQKKNFRDVGEKLTKYIEYRSEMEEKESKESSGS

SEQ ID NO: 4809 - DNA, 402 bp, Unknown
  Obtained from environmental sample
  misc_feature (1)..(402): n is a, c, g, or t
atgctggaatttaaagacaaaataaccaattaccaattaaaagatgccgctaaagaagcggcttctctgtttacagcaagagatctattgtttgaaaaaggcgaacagggcatatctgctataatgccgggcgtcgatcttgataccggtatgagtaaagcgcgaaaattccaggaacgtatcaaagaaaaaatcttttccaaaaacggcgccgacgattgtacttatatcggactttcttcgcgcgcgggccgccttttaaaaacggaaaggatgattctggaaaccaacgaagcgcttaacaaggcaaagactgaccgtgacgcgtcaattatcgcgttcaagagcgaccttgaaaaatacaggaaatttattgcttctcaaaatccttcgcgctcctga

SEQ ID NO: 4810 - protein, 133 aa, Unknown
  Obtained from environmental sample
  misc_feature (1)..(133): Xaa is any amino acid
MLEFKDKITNYQLKDAAKEAASLFTARDLLFEKGEQGISAIMPGVDLDTGMSKARKFQERIKEKIFSKNGADDCTYIGLSSRAGRLLKTERMILETNEALNKAKTDRDASIIAFKSDLEKYRKFIASQNPSRS

SEQ ID NO: 4811 - DNA, 810 bp, Unknown
  Obtained from environmental sample
  misc_feature (1)..(810): n is a, c, g, or t
atggcgatctntacggcgattatcgccgcgggcgtcgtctttacggtaacggtctttgccgtactgacggtctccgccgcgatcgctcctacgcgtatcgtctttatgatatgtatccttacgatattctttgcgttcggaatcgtccttatgatacgtatctttgcgatactctttacggccggaatcatctttacgatacgtatctttgcgatactctttacggccggaatcgtctttatgatacgtatctttgcgatactctttacggccggaatcatccttgcgatacgtatctttatgatattctttacggacggaatcgtctttatgatacgtgtctttgcgatactctttacgcccggaatcgtccttgcgatacgtatctttatgatattctttacgtccggaatcacccctgccgtatcgatctttacgatgatcatcaccacctgtatcatctttgcgatacgtatctttgcgatactctttacgcccggaatcatccttgcgatacgtatctttatgatattctttacggacggaatcacccctgccgtatcgatctttacgatgatcatcaccacctgcatcatctttacgatacgtatctttgcgatactctttacgtccggaatcatccttgcgatacgtatcttttccgtaccgttcactgctacggtgttcgctcctacgcgcatcgcctttgtgacgcgtatctttacgatattctttacggacggcgccgtctttgcgatgcccgcctctaccgccgccctccgatcggtgctctcggccgctcggccataa

SEQ ID NO: 4812 - protein, 269 aa, Unknown
  Obtained from environmental sample
  SIGNAL (1)...(26)
  misc_feature (1)..(269): Xaa is any amino acid
MAIXTAIIAAGVVFTVTVFAVLTVSAAIAPTRIVFMICILTIFFAFGIVLMIRIFAILFTAGIIFTIRIFAILFTAGIVFMIRIFAILFTAGIILAIRIFMIFFTDGIVFMIRVFAILFTPGIVLAIRIFMIFFTSGITPAVSIFTMIITTCIIFAIRIFAILFTPGIILAIRIFMIFFTDGITPAVSIFTMIITTCIIFTIRIFAILFTSGIILAIRIFSVPFTATVFAPTRIAFVTRIFTIFFTDGAVFAMPASTAALRSVLSAARP

SEQ ID NO: 4813 - DNA, 657 bp, Unknown
  Obtained from environmental sample
  misc_feature (1)..(657): n is a, c, g, or t
atgaatagaatatttcaggttttaaagttagattattttaccgtaaaatcttctttatcaagaataataatgatatacataatttcaatattactgggtatgtcaacccagcctgtattgccggttattttgattatgtttttttgcgtatctttcagcggattgtcattttcattaatcgaaaaaaataaatgtgaaaaattatacgggattcttccggttcgcagaatagaaattgttatcggaagatatttatacggatttttaaccggaatagttaatctgattatttcaattattttttcgttcttaatagcggcatttacaaaccagaaaattgatattttaatattatctttttcaataacaatggcattttgttattatagttttgcggttagtatttcatttccggtttattataaatttggtttttccaaatcttttatatttatttcgctgcctttgtatttaataattcttgttactacattattggccgagaaaaccaatattttggataatgttagttttaatttgctttattttgttgaacattattttttgcttttgttatttgggtttattataagcatatttatgttaataatttcggctggtgtttcttatttaatctttaagaaaacggaattatga

SEQ ID NO: 4814 - protein, 218 aa, Unknown
  Obtained from environmental sample
  misc_feature (1)..(218): Xaa is any amino acid
MNRIFQVLKLDYFTVKSSLSRIIMIYIISILLGMSTQPVLPVILIMFFCVSFSGLSFSLIEKNKCEKLYGILPVRRIEIVIGRYLYGFLTGIVNLIISIIFSFLIAAFTNQKIDILILSFSITMAFCYYSFAVSISFPVYYKFGFSKSFIFISLPLYLIILVTTLLAEKTNILDNVSFNLLYFVEHYFLLLLFGFIISIFMLIISAGVSYLIFKKTEL

SEQ ID NO: 4815 - DNA, 333 bp, Unknown
  Obtained from environmental sample
  misc_feature (1)..(333): n is a, c, g, or t
gtgttttccattaatatcgaaaatagtcaggtaatactcggacatctttccaaagatatttccgactatttaaacgctataatggctcccgccgctacgggcgaaaaaatgaccaagaccgaatatctggaacttgtcggctctttttacaataaaggaataagcgacgaaatcgcggcttcaaaggttcgcgtctctattgaatttcccggcgctgtaacaaatgtaaaaggggggacattctccggcaaaaaagcgaatttcgatattccgctggttgatttgctggttttacagacgcctcttgtctacgaagtaaattggaagaactaa

SEQ ID NO: 4816 - protein, 110 aa, Unknown
  Obtained from environmental sample
  misc_feature (1)..(110): Xaa is any amino acid
MFSINIENSQVILGHLSKDISDYLNAIMAPAATGEKMTKTEYLELVGSFYNKGISDEIAASKVRVSIEFPGAVTNVKGGTFSGKKANFDIPLVDLLVLQTPLVYEVNWKN

SEQ ID NO: 4817 - DNA, 732 bp, Unknown
  Obtained from environmental sample
  misc_feature (1)..(732): n is a, c, g, or t
atgcaattgacagctttgcttttagcggcggcttttgcagttgttgttgcggcctgtcccgaagatgaggtcggcggaattcaagaaaagaaagaagaaactttaacaggtgttagtaaaaattacctaagcggacctgatgcgcttggttggggagtttcaactcaggctagcgttttgactctggggttaactccgggaagagacacaacagagataaaccttaattggtattcatcaggagcccaaaccgacaagcttgcgcaagtcaggttcattagaggaacccttatcgccggagacgaattaattgagaaaaccggagcggtaagcgcagcgtcagccggttatacagcccataaagccgtggtaacgggactgaaacctggtgcaagttacaagtatgctgtatccagcgacggaaccaactggagcgatgtttacgatttcaaggttcctgccgtaggcgctttcaagtttgccgtaatagctgatccccagcttacccaaggggctgttgatgttaatagccggtatcctgccgttggcactactaccgccgcaggctgggtagaaacaatgcagaaaattatagccaaaggcgtaagctttatcgcaagcggcggggatcaggttgatgccggcgcaggtaatgaaaccgaatatactaacttctttgcccccacaggactgcgtaaccttccttttgctccgcgtgtccggcaatcatga

SEQ ID NO: 4818 - protein, 243 aa, Unknown
  Obtained from environmental sample
  SIGNAL (1)...(18)
  misc_feature (1)..(243): Xaa is any amino acid
MQLTALLLAAAFAVVVAACPEDEVGGIQEKKEETLTGVSKNYLSGPDALGWGVSTQASVLTLGLTPGRDTTEINLNWYSSGAQTDKLAQVRFIRGTLIAGDELIEKTGAVSAASAGYTAHKAVVTGLKPGASYKYAVSSDGTNWSDVYDFKVPAVGAFKFAVIADPQLTQGAVDVNSRYPAVGTTTAAGWVETMQKIIAKGVSFIASGGDQVDAGAGNETEYTNFFAPTGLRNLPFAPRVRQS

SEQ ID NO: 4819 - DNA, 735 bp, Unknown
  Obtained from environmental sample
  misc_feature (1)..(735): n is a, c, g, or t
atgagcattagggattgttacgagcatgacggagaagattatggcaatgacaaatcntgcggtaactatttgtcgcagcagcaatcgagcagttcatctttcacaagttcaagttctgatgtgctttctcagctttcttcatcttcgtctagtgatgacgattgcaatataaacgattacaaaactgttaaaatcggtacgcaattatggatgggaaagaatttgaattgctatgctactggcagcaaatgctatgataacaaagaagccaactgcatcaaatatggtcgtttatacagttgggcagcagcaatgggcataaattcaaaatacaataatgaagagtggggcaaaagcgatgtaagacgtagaggcatttgcccagacggatggcatatcccaagcaacgaggaatgggaaaccttgatagattttgttagcgataacggggacgagggaactatgttgaaagccaaaagcggttggaactcggacgattcttatgatgtatctggcaacggcactgacgattacaaattttctgcaatgcctggcggctacaattatgatggcgaattcgacgaagttggctacaccggctattggtggactgctactgaatcaagtgatgaatatgcctacaactggtctatgtctttcgacagcgattacgcatatccggacgatgtggctaaggaaaatatgttcagtgttcgttgcgtgaaaaatgattaa

SEQ ID NO: 4820 - protein, 244 aa, Unknown
  Obtained from environmental sample
  misc_feature (1)..(244): Xaa is any amino acid
MSIRDCYEHDGEDYGNDKSCGNYLSQQQSSSSSFTSSSSDVLSQLSSSSSSDDDCNINDYKTVKIGTQLWMGKNLNCYATGSKCYDNKEANCIKYGRLYSWAAAMGINSKYNNEEWGKSDVRRRGICPDGWHIPSNEEWETLIDFVSDNGDEGTMLKAKSGWNSDDSYDVSGNGTDDYKFSAMPGGYNYDGEFDEVGYTGYWWTATESSDEYAYNWSMSFDSDYAYPDDVAKENMFSVRCVKND

SEQ ID NO: 4821 - DNA, 381 bp, Unknown
  Obtained from environmental sample
  misc_feature (1)..(381): n is a, c, g, or t
ttgctatgctcaagccgtcggaggggtccgccgggagtggccaagttgttttgcgacgccgtgatccgcgccggcgggaacacatgcccgcccgtaatagtcggcgtaggtgtgggggggacggcggacgcggtgtgcgctctggcgaagaaggcgctattgcgccccgtgggcgtgcacaacggcgacggcagatacgcccagatcgagcgctacctgataaaagagataaacgccagcggcataggcccgcagggcctcggcggaatgcatacggccctgtgggtggccgtagagtacatgccgtgccacatagcctccatgccggtggccgtgtgcatgaattgccacgccgcccgtagggcgtcggtagaattgtag

SEQ ID NO: 4822 - protein, 126 aa, Unknown
  Obtained from environmental sample
  DOMAIN (1)...(126): Fumarate hydratase (Fumerase)
  misc_feature (1)..(126): Xaa is any amino acid
MLCSSRRRGPPGVAKLFCDAVIRAGGNTCPPVIVGVGVGGTADAVCALAKKALLRPVGVHNGDGRYAQIERYLIKEINASGIGPQGLGGMHTALWVAVEYMPCHIASMPVAVCMNCHAARRASVEL

SEQ ID NO: 4823 - DNA, 795 bp, Unknown
  Obtained from environmental sample
  misc_feature (1)..(795): n is a, c, g, or t
ttgaaagagtttgccgttcctccgaaagatatcagggacgaagcgtcaatacacgtggcgcttaagtatacgaaaatgctgcatagcgcggttggacgcagtagtatcaacggtaaggatattaacgataacagtatcaacggcaaaaatatcaaaggcaacggtatcaataatgtaagtatcaacgatattgacgagacggatatcggcgacagcgtcgtcagccacggccttgttgtttcatcaatagacatcgatctccagcggcacgcgcaacgcgaactcgccgatcacttggatcagctaaaagctcgcgatgtggaaaacggcgcggtgattgtgcttgacaaaaacaatcgccaagtattggcgtacgtaggctccggcgggtatttcagttttaacaacgggatgctcgactacgcggcgataaagagatctacgggcagcctgatgaagccgttcatctacgcgcagggcatggaggagttggggtacacggcggcgacggttctcaaggacataaactacgatttcggcgagggggcgcgctcgttcattccggtcaacagcgacaggcagtaccaaggccccatactgtacaagtacgccttggccaacagcagaaacattccggcggtgcagttgatgaaggagttgggcgtcaataaagtctacgggcgcctcggcgcccttaatttggcggaagacgacgggcgcagcgactactacggtttgggcttatcgataggcgggctgtactgcggtctcacctcaatagccagagcttactga

SEQ ID NO: 4824 - protein, 264 aa, Unknown
  Obtained from environmental sample
  misc_feature (1)..(264): Xaa is any amino acid
MKEFAVPPKDIRDEASIHVALKYTKMLHSAVGRSSINGKDINDNSINGKNIKGNGINNVSINDIDETDIGDSVVSHGLVVSSIDIDLQRHAQRELADHLDQLKARDVENGAVIVLDKNNRQVLAYVGSGGYFSFNNGMLDYAAIKRSTGSLMKPFIYAQGMEELGYTAATVLKDINYDFGEGARSFIPVNSDRQYQGPILYKYALANSRNIPAVQLMKELGVNKVYGRLGALNLAEDDGRSDYYGLGLSIGGLYCGLTSIARAY

SEQ ID NO: 4825 - DNA, 621 bp, Unknown
  Obtained from environmental sample
  misc_feature (1)..(621): n is a, c, g, or t
atgtatgcacccacaatttacgacaccacaaagatattcaaagcctggggcactgcaaaagaaacaaaacccggtgcagaaaacgcaaccgaaatttggggcagcagaaaaaacaccatgcaaataaaagtactaaacgatgttgcaatttccgcaataataaccgccggtccagacaaaaaaaccctaatacgcgacctaaacggagactttattatagacccgaactcaggctataactccaacatttcagaagaacaaaaaatagacggaagctcagaccaattcaaaagtgcctacagcaaactatacggcaaagaaatgctcacaaccggcgtagctcccgtagtaggaaccaacatgagtccttgggaatattaccgcttcaaacagcaattagaccaacccgctccacaacccgccaccgccgacaccgccgcagccgcgcaacctgttgcagccgacccgtccgccgtagccgcgcaacccgcaaccgacccagcagcagcacagcaaccagcacaacccgcagcagcacaacctgccgccgtgcaacccgccgccgagccagaaacgcccaccgctaccgagccaccgccaccgcctccagactggcattaa

SEQ ID NO: 4826 - protein, 206 aa, Unknown
  Obtained from environmental sample
  misc_feature (1)..(206): Xaa is any amino acid
MYAPTIYDTTKIFKAWGTAKETKPGAENATEIWGSRKNTMQIKVLNDVAISAIITAGPDKKTLIRDLNGDFIIDPNSGYNSNISEEQKIDGSSDQFKSAYSKLYGKEMLTTGVAPVVGTNMSPWEYYRFKQQLDQPAPQPATADTAAAAQPVAADPSAVAAQPATDPAAAQQPAQPAAAQPAAVQPAAEPETPTATEPPPPPPDWH

SEQ ID NO: 4827 - DNA, 327 bp, Unknown
  Obtained from environmental sample
  misc_feature (1)..(327): n is a, c, g, or t
ttgacagattggccgagcggcatggcttcgcttgtgcttgtttgtatgtcctctatgcgtagcgatatatcgcctgcgttttttgcgctttggtttgcaagctcttttatttcatttgcaacaacggtaaaacccttgcctgcctcgccagcagaggatgcttctatggtggcattgagagccaataaatttgttttctcggatattctttttataacatctgttaccgcgccaatctcttttgccgccactcccagcttgttcatggtttctgttgcctcactagacataactgtggcatcgcccgctatgctgcgtgtatcgtaa

SEQ ID NO: 4828 - protein, 108 aa, Unknown
  Obtained from environmental sample
  SIGNAL (1)...(29)
  misc_feature (1)..(108): Xaa is any amino acid
MTDWPSGMASLVLVCMSSMRSDISPAFFALWFASSFISFATTVKPLPASPAEDASMVALRANKFVFSDILFITSVTAPISFAATPSLFMVSVASLDITVASPAMLRVS

SEQ ID NO: 4829 - DNA, 837 bp, Unknown
  Obtained from environmental sample
  misc_feature (1)..(837): n is a, c, g, or t
atgcggcggaaaacatacacccctgcaacacaattctgctactccagcaatgtttacgacaaatgtggcaacaaagactataacccaacgacacaattctgctactccagcaatgtttacgataaatgtggcaacaaagactataacccaatgacacaattctgctactccagcaatgtttatgacaaatgcggcaacaaagactataacccaacaactcaattttgcttcgctaatactatttatgcaaaatgcggtaacaaagactataattcaacaactcaattttgctatgaaaacattgttatcagcaaatgtggtagcaaagaatatgaccttgcaaaagattattgtttaaatggggtagtaacgggaaaagaagaatacacggattctcgtgatggccaaaaatacaagcatgtaaaaataggtacgcaaacctggatggctgaaaatctaaaatacgacataaaaaacaaaagcagatgctatgataataaaccagcaaattgtgataaatacggcaaattatacgaatggacaacagctatgggtatgaatgggcaggcagatcctatcaagaaccgaattcaaggcgtttgtcccgtggattggcatattccaagtgatgcagaatggacagtattaacaagctatgttggttctgatgctggaacgaaattaaaggctacaaatagttggaacaacagagcagatggcattactggcaatggcacaaacaactatggattcgcggctttgccaagcggcttcagcggacctggattttataacgctggtactaatggctattggtggagtccaatgancatgtaa

SEQ ID NO: 4830 - protein, 278 aa, Unknown
  Obtained from environmental sample
  misc_feature (1)..(278): Xaa is any amino acid
MRRKTYTPATQFCYSSNVYDKCGNKDYNPTTQFCYSSNVYDKCGNKDYNPMTQFCYSSNVYDKCGNKDYNPTTQFCFANTIYAKCGNKDYNSTTQFCYENIVISKCGSKEYDLAKDYCLNGVVTGKEEYTDSRDGQKYKHVKIGTQTWMAENLKYDIKNKSRCYDNKPANCDKYGKLYEWTTAMGMNGQADPIKNRIQGVCPVDWHIPSDAEWTVLTSYVGSDAGTKLKATNSWNNRADGITGNGTNNYGFAALPSGFSGPGFYNAGTNGYWWSPMXM

SEQ ID NO: 4831 - DNA, 423 bp, Unknown
  Obtained from environmental sample
  misc_feature (1)..(423): n is a, c, g, or t
atgatcaaggcgctgatcgacaccaatgtcgtgttggatgcgctcgccacgcgagagccttttcacgcggaggcggaaagaatttttctgctgacggctgaagaaaagtgccaaggggttgttacggccggcagtatcaccgacatatattaccttgtcagaaaaaatagctccgaggccgttgcgcgagaggcgttgcgcaatttgtttcagctattcgccattgtggatataagcggtaaggactgtgaacatgcgttggaatcgccccttgctgactatgaggatgccctgatcgccgtctgtgcgtcgagaatcggcgctgattatatcgttacgcgggatgaagattttttgcaggcccaatcgcctgtcagcgttattgcgcctgccggatttgtgaagatgctgtcgaacttgtaa

SEQ ID NO: 4832 - protein, 140 aa, Unknown
  Obtained from environmental sample
  DOMAIN (4)...(130): PIN domain
  misc_feature (1)..(140): Xaa is any amino acid
MIKALIDTNVVLDALATREPFHAEAERIFLLTAEEKCQGVVTAGSITDIYYLVRKNSSEAVAREALRNLFQLFAIVDISGKDCEHALESPLADYEDALIAVCASRIGADYIVTRDEDFLQAQSPVSVIAPAGFVKMLSNL

SEQ ID NO: 4833 - DNA, 309 bp, Unknown
  Obtained from environmental sample
  misc_feature (1)..(309): n is a, c, g, or t
atgagcgaaaataaaaacacattcaggtcttttctggactcaatttctggtctgcgctatgcaaatacaaagacagattatgaccaaaaggagccggccatgttggtttctttgtcggaactcaagaccaatcccggaaagtatgtggctatggccgaagagcaggatatttatatcaccaaaaacggaaggcgtgttgccaaactgacgggcgccaagccgaacaaaacggcttccgccaaggcccttttcggtatcctgccccgcgatgttgacctctccggcgcacgggaggaacggttaacatga

SEQ ID NO: 4834 - protein, 102 aa, Unknown
  Obtained from environmental sample
  misc_feature (1)..(102): Xaa is any amino acid
MSENKNTFRSFLDSISGLRYANTKTDYDQKEPAMLVSLSELKTNPGKYVAMAEEQDIYITKNGRRVAKLTGAKPNKTASAKALFGILPRDVDLSGAREERLT

SEQ ID NO: 4835 - DNA, 402 bp, Unknown
  Obtained from environmental sample
  misc_feature (1)..(402): n is a, c, g, or t
atgaagataaaaccaaatgaggaaaggaacatggaaatttcaggagtaaaagaacacattgaggaaattacaggtaacgattatatcgcaagcgaattgtactcaaagttcaatgtaaagcgcggcttgcgcaacgcggacggaaccggcgtacttgtcggccttacacgggtaggcgacgtacatggttacattattgacgaaggcgacaaaatccccgttcccggcaaactttattacaggggaattgacgttgaagacatagtcaacaacgcttcaggggaagggcgtttttgttttgaagaaacgtatatcttctttattcggccgcctgcccagcaaaaacagcttgatgatttaaagctcttacagcgaattcagcctctgcccaaaatttgctga

SEQ ID NO: 4836 - protein, 133 aa, Unknown
  Obtained from environmental sample
  misc_feature (1)..(133): Xaa is any amino acid
MKIKPNEERNMEISGVKEHIEEITGNDYIASELYSKFNVKRGLRNADGTGVLVGLTRVGDVHGYIIDEGDKIPVPGKLYYRGIDVEDIVNNASGEGRFCFEETYIFFIRPPAQQKQLDDLKLLQRIQPLPKIC

SEQ ID NO: 4837 - DNA, 921 bp, Unknown
  Obtained from environmental sample
  misc_feature (1)..(921): n is a, c, g, or t
atgtggccaagaactcgatgccgacagaagccggtgctgggagaatccccaatgcgtaactacggtatccagcattggttccgcaattgggagacctacaccgccgggccgtactccaagggcaagaatatagcgccgctgtacgaaccgaccccggccgtcggcgcggggcaggtgaacaacgagttcaacgcgaccgtcaggctcgttgacgcgcaggcggacgtaggccacgacacctctttcaagaacatcatgatccccgatatgcttacgttcactttggtggctggtaggacagacggtatgtaccagtttgacaggaggggcaacaacggcttcttcccgttggatggcaaaggtttcggaaatgagggacgtagaaataacttctcttttaccatggaaatggagtttaaattccagttcaaggcggggatggagttcaatttctcaggcgacgacgacgtatgggtcttcatagacgatgatttggtcttggacataggcggcatacatgaggagcagagcgacagattcagcttggacaacgttttgcctaacggcaagcagggcgagacgcacattttgcgcgtcttctacgccgagcgccacacgacggcgtccaacatccgtatccagacgaacatagtggccccgccctccgccgtcaacatcagcaccaaggacaacacaagcggcaccggcatggtcggttccactttagataagcccgccgataccacggtcaccctgtacagcgtggtctacgacgacgccggcgcgattatgcccccctgcaccaagggcggcgtgacctccggttgctacgactgcaacaacgtcacgtggacgataaacggggtggacgtangcaagggctgcgagtacaagatcgcggactccgtggcaaaacaatag

SEQ ID NO: 4838 - protein, 306 aa, Unknown
  Obtained from environmental sample
  DOMAIN (73)...(233): PA14 domain
  misc_feature (1)..(306): Xaa is any amino acid
MWPRTRCRQKPVLGESPMRNYGIQHWFRNWETYTAGPYSKGKNIAPLYEPTPAVGAGQVNNEFNATVRLVDAQADVGHDTSFKNIMIPDMLTFTLVAGRTDGMYQFDRRGNNGFFPLDGKGFGNEGRRNNFSFTMEMEFKFQFKAGMEFNFSGDDDVWVFIDDDLVLDIGGIHEEQSDRFSLDNVLPNGKQGETHILRVFYAERHTTASNIRIQTNIVAPPSAVNISTKDNTSGTGMVGSTLDKPADTTVTLYSVVYDDAGAIMPPCTKGGVTSGCYDCNNVTWTINGVDVXKGCEYKIADSVAKQ

SEQ ID NO: 4839 - DNA, 663 bp, Unknown
  Obtained from environmental sample
  misc_feature (1)..(663): n is a, c, g, or t
atgnggggccggnnccgttntcgccccccccccttcnnttatataatcagggaaacggatataacggatattatgacggatcaagaactgaaagatatgatcgccgaccttgtcgtgagtagcaaagaaacccatttggcgatgaaagagatgcggttggcgcaggaagaaacccgtctgcggatggaagaaaccaatcagcagatgaaagaaaccgacctgaagttaaaagaagtcggccgactggtcggaaacgtgagcaacaataacggctacttcgccgaagacttctttcaggaagtgctcgaaaaaaaattggaattcggcgggataaagtacgataaaatggtcgccaacttcggacgcaacgacggaaaagtaaaaatggagatcgacatcgtgctgattaacggggactcggtggccctcatagagacgaaatacagagtacacccgaaagacgtaacggaattggcgcaggaacgagtcaagaagtttaagacactgttccctgaatacaaaaactataaggcctatctcggcttggccggtttttctttcgacgacacggtaacggaaaaagccaaagaaatgggagtcggcatagtgaaacaagcgggggacggcgttgagattgaggctgagtgcttgaaagcatactga

SEQ ID NO: 4840 - protein, 220 aa, Unknown
  Obtained from environmental sample
  misc_feature (1)..(220): Xaa is any amino acid
MXGRXRXRPPPFXYIIRETDITDIMTDQELKDMIADLVVSSKETHLAMKEMRLAQEETRLRMEETNQQMKETDLKLKEVGRLVGNVSNNNGYFAEDFFQEVLEKKLEFGGIKYDKMVANFGRNDGKVKMEIDIVLINGDSVALIETKYRVHPKDVTELAQERVKKFKTLFPEYKNYKAYLGLAGFSFDDTVTEKAKEMGVGIVKQAGDGVEIEAECLKAY

SEQ ID NO: 4841 - DNA, 798 bp, Unknown
  Obtained from environmental sample
  misc_feature (1)..(798): n is a, c, g, or t
ttggaggggaacatggaaaaaccgcccgtaccgccgctcatggactattttaaggacatcaaagacccgcgggtagaacggaataaaatctacccgcttattgaggtcatcgtcattaccatcctggccgtcatggccttcgcggaagggtgggaggatatcgaaacttacggccttgcgaaacaggcatggcttaagaaattcctccccctgcgtgacggcatacccaaacatgacgtataccgacgggttttcagttgtttgcagccggccgccatcgaacaatgttttatggcgtgggtgagggatattaaacaggatattgaccgggaaatcatcgcggtcgacggcaagaccgtccgggggagtttcaattcgcaatcgaaggcttcccccctccatctcgtgagcgcttgggctgccggcaaccgtttggtgcttgcccaggttaaaactcaggataaaagcaacgaaataaccgccatcccttcgcttttggaactcattgccatcaaaggctgtatcgttaccattgacgccatgggctgtcaatacaaaatagcggactgcattgccgctcaggaggctgattacgtgttctctctcaaggaaaaccaacaatccctctatgaagacgtgactgaatacttccagggcatagatttctcccatcctgaaccggatgttcaggtcgaaagcaccttcgatgtagaccacgggcgcctggaacggcgccgctacggcgtttccggcaatgtctcatggcttgccgaacgccatcccgcaggaaaacggtaa

SEQ ID NO: 4842 - protein, 265 aa, Unknown
  Obtained from environmental sample
  DOMAIN (112)...(265): Transposase DDE domain
  misc_feature (1)..(265): Xaa is any amino acid
MEGNMEKPPVPPLMDYFKDIKDPRVERNKIYPLIEVIVITILAVMAFAEGWEDIETYGLAKQAWLKKFLPLRDGIPKHDVYRRVFSCLQPAAIEQCFMAWVRDIKQDIDREIIAVDGKTVRGSFNSQSKASPLHLVSAWAAGNRLVLAQVKTQDKSNEITAIPSLLELIAIKGCIVTIDAMGCQYKIADCIAAQEADYVFSLKENQQSLYEDVTEYFQGIDFSHPEPDVQVESTFDVDHGRLERRRYGVSGNVSWLAERHPAGKR

SEQ ID NO: 4843 - DNA, 651 bp, Unknown
  Obtained from environmental sample
  misc_feature (1)..(651): n is a, c, g, or t
ttgatatcccaggttggcgcttctactgacggcgctgtctcgcataactttgttgaattgtacaatgccggaagtacggcagtatccctgaacggttattctctgcaatatgcagccggcaccgctacaagcgcttcggaagacggtgagtggaatgtaatagaacttgaaggaactattccgtctcattgttcattccttatactgggcactgcggcaactgttacgccgacaataggtactacaagcagtaacactcaatacatcatccaaacaaattcggtagacatgaacaaaacatttactataagcaataatgtttttaaggttgctttaatgagcaatacaaccaaactaactgtacaaaatccctttaatattgacggaaatggaacaaaagcggctggttatgtggatatggtcggcgcgcttaattccaataatcaaacggtacgcggatatgagacaaccccatgcgcaaaaatgtccaaacagcagacagtacgccgtaaaagtttgacagataccgatgttaatgataatgactttgaaaatgtggattatcgtggaaacgccgccgctattggtttcaaattcccccagaatagcgcttacggcgcatggaatcccgttaccggtataaaggaataa

SEQ ID NO: 4844 - protein, 216 aa, Unknown
  Obtained from environmental sample
  misc_feature (1)..(216): Xaa is any amino acid
MISQVGASTDGAVSHNFVELYNAGSTAVSLNGYSLQYAAGTATSASEDGEWNVIELEGTIPSHCSFLILGTAATVTPTIGTTSSNTQYIIQTNSVDMNKTFTISNNVFKVALMSNTTKLTVQNPFNIDGNGTKAAGYVDMVGALNSNNQTVRGYETTPCAKMSKQQTVRRKSLTDTDVNDNDFENVDYRGNAAAIGFKFPQNSAYGAWNPVTGIKE

SEQ ID NO: 4845 - DNA, 780 bp, Unknown
  Obtained from environmental sample
  misc_feature (1)..(780): n is a, c, g, or t
ttgcggcggtgcaacaggacggcagggcgcttgagtatctgccggaggcattgcggactcaggagatttgcctcgcggcggtacggcaggacagcaacgcgcttagatatgtgccggaagcattgcggactcaggagatttgccttgcggcgctgcggcaggacggtactgcgtttattcatgtgccatataaactgtggcaagatgctgcgttttttcttgcggcagtacaacagaacagcggggcgctcaagcatgtgcctgaagcattgcggacacctgagttttgcttcgcggctgtgcagcagaacggcagcgcgcttgaggatgtgcctgaagcattgcggacacctgagttttgcctcacggctgtgcagcaggacggcagagcgcttgagtttgtgcctgaagcattgcggacacctgtgctttgcctcgcggctgtgcagcagaacggcaacgcgcttgagcatgtgccggaggcattgcagactcaggagatttgcctcgcggctgtgcaacaggacggcagagcgcttaggtatgtgccggaggcattacggactcaggagatttgcctcgcggctgtgcaacaggacggcagcgcgcttgagcatgtgccggaggcattgcagactcaggagatttgcctcgctgctgtgcagcaatcctgtggggcgcttgagcatgtgccggaggcattgcggactcaggagatttgcctcgctgctgtgcagcagaacggcagggcgtttgagtctgtgccggaagcattgctga

SEQ ID NO: 4846 - protein, 259 aa, Unknown
  Obtained from environmental sample
  misc_feature (1)..(259): Xaa is any amino acid
MRRCNRTAGRLSICRRHCGLRRFASRRYGRTATRLDMCRKHCGLRRFALRRCGRTVLRLFMCHINCGKMLRFFLRQYNRTAGRSSMCLKHCGHLSFASRLCSRTAARLRMCLKHCGHLSFASRLCSRTAERLSLCLKHCGHLCFASRLCSRTATRLSMCRRHCRLRRFASRLCNRTAERLGMCRRHYGLRRFASRLCNRTAARLSMCRRHCRLRRFASLLCSNPVGRLSMCRRHCGLRRFASLLCSRTAGRLSLCRKHC

SEQ ID NO: 4847 - DNA, 582 bp, Unknown
  Obtained from environmental sample
  misc_feature (1)..(582): n is a, c, g, or t
atggcaacaacaaggcgtgaagctttttttggagctgatgcggttgcgttaagccgtataggttcacaaatagagtccctgacatggttggtaggtggcgcttttggaaccgcattggtttcgttcataggacaaaattatggcgcaaaaaaatggaaccgcattcgcgaaacattcaagacagcttctttagttatgtttttttatggcgcttttgttacgtttgtattggcggtacttggtaagtatttatttgggttgtttttacctgatcctgtgttaatagaacgtagtgttttataccttcgtataattgctatatgtcaaataccattgtgtctggaagccgtatcaagtaattcctttcgtggtttaggcaatacgctttcacccgctattataaacacgatctgcaatattttacgagtaccatttgtttatatactatcgatggaaatatttgggattggtttgaccggaatttggattggtattacaacaagcgcatgtttgaaaagtatttggtcatatacatggtatttaattactaaacgaaaaagaataaatacacaaaatatataa

SEQ ID NO: 4848 - protein, 193 aa, Unknown
  Obtained from environmental sample
  DOMAIN (1)...(148): MatE
  misc_feature (1)..(193): Xaa is any amino acid
MATTRREAFFGADAVALSRIGSQIESLTWLVGGAFGTALVSFIGQNYGAKKWNRIRETFKTASLVMFFYGAFVTFVLAVLGKYLFGLFLPDPVLIERSVLYLRIIAICQIPLCLEAVSSNSFRGLGNTLSPAIINTICNILRVPFVYILSMEIFGIGLTGIWIGITTSACLKSIWSYTWYLITKRKRINTQNI

SEQ ID NO: 4849 - DNA, 873 bp, Unknown
  Obtained from environmental sample
  misc_feature (1)..(873): n is a, c, g, or t
atgctgccgcttacagtccccatgatgatcccgaacgaagcatccggcaatatctcaatgatgtacggcgtaaaaggccccgcttatactcaggttacagcctgcgccgccggcactgacgctctcggtcaggcgttagaccttatccgctcaggccgctgtgagatagtaatctcaggcggaacagaagcgaccattgttcccttcgccatcggcggtttccagatgttaaaagcgctttccacaaaacgctgtaacgagccgacaaaagcgtcccgtccctttgacgcggatcgcgacggattcgtaatgggagaaggttccggcattttaattcttgaaagcgaagaaagcgcaaaaaaacgaggcgtgaaaattatcgccgagttagcaggatacggagccagcgccgacgcatatcatataacatcgcctgatcctacgggtctcggcggttcaacggcggttaagaaagccatcgccgacgctgacttaaaaccggaagacattcagtattacaacgcacacggcacttcaaccgaaataaacgatcctaccgaaactaaaatgcttaaaatcgctttcggcgatcacgcgaaaaagctgaaagtatccagcaccaagagcatgcacggccattgcgtcgcaggcggcggcggacttgaagctatcgcctgtatcctggcgattaacgaagggttttatccgccgaccatcaatttagacaatcccgaccccgaatgtgatctggattatgtgccgaacaaagttcagtacggcgaaatcaacgccgccgcttccggttctctcggcttcggcggtcataacggcgttgtagttttcagaagtacaaaggttaataaaaggaaataa

SEQ ID NO: 4850 - protein, 290 aa, Unknown
  Obtained from environmental sample
  DOMAIN (2)...(118): Beta-ketoacyl synthase, N-terminal domain
  misc_feature (1)..(290): Xaa is any amino acid
MLPLTVPMMIPNEASGNISMMYGVKGPAYTQVTACAAGTDALGQALDLIRSGRCEIVISGGTEATIVPFAIGGFQMLKALSTKRCNEPTKASRPFDADRDGFVMGEGSGILILESEESAKKRGVKIIAELAGYGASADAYHITSPDPTGLGGSTAVKKAIADADLKPEDIQYYNAHGTSTEINDPTETKMLKIAFGDHAKKLKVSSTKSMHGHCVAGGGGLEAIACILAINEGFYPPTINLDNPDPECDLDYVPNKVQYGEINAAASGSLGFGGHNGVVVFRSTKVNKRK

SEQ ID NO: 4851 - DNA, 342 bp, Unknown
  Obtained from environmental sample
  misc_feature (1)..(342): n is a, c, g, or t
ttggtcagaatcggcacgaggaataaacacggcaatcttgctgtcttttttgtttttatccagaccgtaagccaacgccgccgcagtcggctcgttgataatacgcaggacttccagaccggcgatttttccggcatctttggtagcctgtctttgctggtcattgaaataagccggcacggtaataaccgctttgtcgactttttcgcccaggtgcgcctcagcgtcgtttttcagtttctgcaggatcatggcggaaatttccggcggggtgtaagttttgtcgtcgatttttaccgccgccgcgccgttggtgccgtcgaccacatgatacggcactaa

SEQ ID NO: 4852 - protein, 113 aa, Unknown
  Obtained from environmental sample
  misc_feature (1)..(113): Xaa is any amino acid
MVRIGTRNKHGNLAVFFVFIQTVSQRRRSRLVDNTQDFQTGDFSGIFGSLSLLVIEISRHGNNRFVDFFAQVRLSVVFQFLQDHGGNFRRGVSFVVDFYRRRAVGAVDHMIRH

SEQ ID NO: 4853 - DNA, 426 bp, Unknown
  Obtained from environmental sample
  misc_feature (1)..(426): n is a, c, g, or t
ttggcgatctgcccgaccagacgttcgccgtccttggcgaagccgacaaccgacggtacggtgcgtccgccttccgagctagtaatgacggtcggcttgccgccttccattaccgccacgcaggagtttgttgtgcccagatcgattccgattactttgtttcccatgatgtcctccttttttattttgctaccactacttgtgcatgtctcaataccttgtcatgcagtaagtatcccgccgcatattcttccaaaatggtctgcgcgggctgctcagactctttttgcagcagagcctcgtgtagacgcgggtcaaaaattttgccggccgtttccattctctgcacgccgaatttctgcaaaacatctttcaattgtttgtgtatcaactcanaaccgttttttacctcttcgtccgcattag

SEQ ID NO: 4854 - protein, 141 aa, Unknown
  Obtained from environmental sample
  misc_feature (1)..(141): Xaa is any amino acid
MAICPTRRSPSLAKPTTDGTVRPPSELVMTVGLPPSITATQEFVVPRSIPITLFPMMSSFFILLPLLVHVSIPCHAVSIPPHILPKWSARAAQTLFAAEPRVDAGQKFCRPFPFSARRISAKHLSIVCVSTXNRFLPLRPH

SEQ ID NO: 4855 - DNA, 720 bp, Unknown
  Obtained from environmental sample
  misc_feature (1)..(720): n is a, c, g, or t
atgaatattgcggcgcatcatcttgatttcaaggaactgaacaagcggataagaaccgccacggaggccgtctgcatagacggctgtttcgggcagagatttatcgcgagcggcatgaccggcaaaaatctgacgattaacggaacgccggggaacgcgttaggcgcttactttaacggcggaaccattatggtaaacggcaacgcgcaggatgccgtaggcgacacgatgaatgacggtaaaataatcattcacggaagcgcgggcgacgcgctcggttacgccatgagaggcggagaaatttatgtccgcgacaacgcgggatacagaaccggaattcacatgaaagaatacaaggaaaaaaaaccggtaatcgtcatcggcggcagagcgggcagtttcctgggcgaataccttgccggcggactcattgtggttctgggcataggctgcaatcatgagattcccgtctggtattttacgggtacgggaatgcacggcggaaaaatctttatcagaaccgacaaggaactctcttcgctcccggcgcaggtcattgaggatgtagccgccgatgatgatctgctggaaattgcgccctatgtcggcgagtttgcgaagcattttaacatggacgcgcagcagttactgcaagacaggtattatgtgttgaaacctaacgcgaagaacccgtataaacagttatatacggcgaattaa

SEQ ID NO: 4856 - protein, 239 aa, Unknown
  Obtained from environmental sample
  DOMAIN (1)...(209): GXGXG motif
  misc_feature (1)..(239): Xaa is any amino acid
MNIAAHHLDFKELNKRIRTATEAVCIDGCFGQRFIASGMTGKNLTINGTPGNALGAYFNGGTIMVNGNAQDAVGDTMNDGKIIIHGSAGDALGYAMRGGEIYVRDNAGYRTGIHMKEYKEKKPVIVIGGRAGSFLGEYLAGGLIVVLGIGCNHEIPVWYFTGTGMHGGKIFIRTDKELSSLPAQVIEDVAADDDLLEIAPYVGEFAKHFNMDAQQLLQDRYYVLKPNAKNPYKQLYTAN

SEQ ID NO: 4857 - DNA, 555 bp, Unknown
  Obtained from environmental sample
  misc_feature (1)..(555): n is a, c, g, or t
atgaaagtcatggtggacgacgtttaccgggccggggaaatccgcgaggccctcctggccctggccggcccggatgaatactgggccaacgactggatgcagcgcaacctaaacctcttcgccgccctgaaactggaacagacggccatgttcgtggtcctgaccctcatcgtggtcgtggccgccttcaatatcgtctccaccctcatcatgatggtcatggaaaagaaccgcgacatcgccatcctgaagtccatgggggccacccgccgtcagatccgccgcatcttcaccctccaggggctcatcgtgggcctggtcggggccgccgggggcctggccttcggggtggggctctgtcttcttttaaagaaatacaaattcatccagttgccggccgacgtttacatgatggacagcctgcccgtggaaatgcgggccgtccatatacttctgaccctggccgtgaccgtggccataagttacctggccaccatctacccggccggccaggcggccaggatggacccggtggagattctgcgctatgagtga

SEQ ID NO: 4858 - protein, 184 aa, Unknown
  Obtained from environmental sample
  DOMAIN (1)...(177): Predicted permease
  misc_feature (1)..(184): Xaa is any amino acid
MKVMVDDVYRAGEIREALLALAGPDEYWANDWMQRNLNLFAALKLEQTAMFVVLTLIVVVAAFNIVSTLIMMVMEKNRDIAILKSMGATRRQIRRIFTLQGLIVGLVGAAGGLAFGVGLCLLLKKYKFIQLPADVYMMDSLPVEMRAVHILLTLAVTVAISYLATIYPAGQAARMDPVEILRYE

SEQ ID NO: 4859 - DNA, 801 bp, Unknown
  Obtained from environmental sample
  misc_feature (1)..(801): n is a, c, g, or t
atgatcaccggcgtagtagaaaacttcccggggttcccagccggcatagacggccccgagcttatgtctaatatgcggcggcaggccgagaagttcgggacgcggctggtcaccgacgacgtggacgcggtggacctgtctcagcgcccgttcgccgtttccacggtaaatggggacaaatttaccgccgccgccctgataatcgccaccggcgcggcggcgagcagacttccgttggattccgaaaaaagactgtgggggcggggcgtctccgcctgcgccgtatgcgacggcgcgctgcccgtcttccgaggcaaggaactggccgtgatcggcggcggggataccgccgtagaggaggccgtccacctaacgcagttcgcctcaaaagtctgcctgatacaccggagggacgaattaagggcgggcgcgataatgagggagcgggcggcttcgcacccgaaaatcgagattctttggaataaggtcgtcgatgaattcctaggcgaaaataggttaagcggactgaagctgcgtgacaccgttacgggcgcaatgtccgaattgacggtagccggtgcgtttgaagcaatagggcacaagccgaacgtaggcttcctgaacggccagctggagttagacgaacaagattacatagtaataacgccgggtacgtcaaagacgtccgtcgacggcgttttcgcggcgggggatgtatgcgacccgcactaccgccaagcgataacggcggcggcaagcgggtgcagggcggcgcttgaggcgcagaagtggcttcaatag

SEQ ID NO: 4860 - protein, 266 aa, Unknown
  Obtained from environmental sample
  DOMAIN (1)...(244): Pyridine nucleotide-disulphide oxidoreductase
  misc_feature (1)..(266): Xaa is any amino acid
MITGVVENFPGFPAGIDGPELMSNMRRQAEKFGTRLVTDDVDAVDLSQRPFAVSTVNGDKFTAAALIIATGAAASRLPLDSEKRLWGRGVSACAVCDGALPVFRGKELAVIGGGDTAVEEAVHLTQFASKVCLIHRRDELRAGAIMRERAASHPKIEILWNKVVDEFLGENRLSGLKLRDTVTGAMSELTVAGAFEAIGHKPNVGFLNGQLELDEQDYIVITPGTSKTSVDGVFAAGDVCDPHYRQAITAAASGCRAALEAQKWLQ

SEQ ID NO: 4861 - DNA, 939 bp, Unknown
  Obtained from environmental sample
  misc_feature (1)..(939): n is a, c, g, or t
atgaaaatcagcggctctgcgatgatcattgacggcgaaaaactatcatcctctgacaagcttcccgtcctcatgcccgcttttgtcgatctccacgcgcatttccgcgatccggggcctggcgtgaatagcgcacttccttccgaagtaattgagtcagcctgcatggccgccgccgccggggggtttggtactgtggtctgcatggcaaatacaaagcctgccatagatacagttgaaaaagcggcgtctcttaaaaagcgttccgacgttctcggcctaatcgatctttatcctgtgatgtccctttcaaaaaacatggaaggcaaagagctgtccgaaatcacagcaattactaaaaatggcagttcttacatacccccaatgctttctgaggacggaaaagatccggacaatgacgatcttttccttgcggctatgaaagaggcaaagcgcatcggcacaccagtttcatgccactgcgatcttggcggcgatgagaacaacgctgtccgcagggctatcgagctgggcaaaaaagccgattgccggattcacattgcccatgtgtcaacagaaaacgcactacagacaattcgcgaggcaaagctggaattcaaagcgggtagccttgccctaacctgcgaggccatgccacaccatctttgccttacggaagaggatgccaataagcttggggcaaaaacctggggcagggtcagtccgccgctgcgttccgagaaggacaggcaggcccttattaatgcgcttaaagacggaacagtggacgcaatagcgaccgatcatgcgccccactcggcggcggacaaggaagctggctcgcctggcttttccggttttgaaaccgcattcgccgccctatacacagagcttgttcgcggcggcgcgattggccttaaacacctttcatccttttaa

SEQ ID NO: 4862 - protein, 312 aa, Unknown
  Obtained from environmental sample
  misc_feature (1)..(312): Xaa is any amino acid
MKISGSAMIIDGEKLSSSDKLPVLMPAFVDLHAHFRDPGPGVNSALPSEVIESACMAAAAGGFGTVVCMANTKPAIDTVEKAASLKKRSDVLGLIDLYPVMSLSKNMEGKELSEITAITKNGSSYIPPMLSEDGKDPDNDDLFLAAMKEAKRIGTPVSCHCDLGGDENNAVRRAIELGKKADCRIHIAHVSTENALQTIREAKLEFKAGSLALTCEAMPHHLCLTEEDANKLGAKTWGRVSPPLRSEKDRQALINALKDGTVDAIATDHAPHSAADKEAGSPGFSGFETAFAALYTELVRGGAIGLKHLSSF

SEQ ID NO: 4863 - DNA, 552 bp, Unknown
  Obtained from environmental sample
  misc_feature (1)..(552): n is a, c, g, or t
atggactccattgagccatggctccaatgggcggataaaaaaggcaagggtgcttttgtgcttatgcgtacaagcaacaaaggcaggcgcgattttgaatgtttaattattaaggaagagagcccttctccccggcggcttttcgacgcggtgggaaacaagctttccgagcttgccgcttcccgtctcggtgctcacggttacggcgcgtttggcgcggttgtgggggcggatccccaaaccgaagaagagcgcgaagaagcggcggccatccgtgccgggtatcccaatctcttttttctgatcccaggttacggggcacagggaggtgccgcctccgatgccgctctgcttttaagggaaggcaacgggggcgtagtaaacgcttcgcgctcgatacttaaagcatggcaaagctcgcacgaagcaaacggcagggaagcggacaacgcaatggcggcccaggcggcaagagtagcagcaatagaaatgcgggacagtattagaaaagcaacaggagaaaatataggaaataattttataccaaagtag

SEQ ID NO: 4864 - protein, 183 aa, Unknown
  Obtained from environmental sample
  misc_feature (1)..(183): Xaa is any amino acid
MDSIEPWLQWADKKGKGAFVLMRTSNKGRRDFECLIIKEESPSPRRLFDAVGNKLSELAASRLGAHGYGAFGAVVGADPQTEEEREEAAAIRAGYPNLFFLIPGYGAQGGAASDAALLLREGNGGVVNASRSILKAWQSSHEANGREADNAMAAQAARVAAIEMRDSIRKATGENIGNNFIPK

SEQ ID NO: 4865 - DNA, 768 bp, Unknown
  Obtained from environmental sample
  misc_feature (1)..(768): n is a, c, g, or t
atgcacgcggttttggaagaactgggaaaaatcggcattgtaccggtaatcaagattgatgatgttgaaaaagccgtcccgttggccagggccctggcagccgggggtatcccctgcgctgaaataacctttcgcaccgaacagggcgaagaagcaatcaggcgcatatcaaaagaagttcccggggtgcttacaggcgcgggaacggtgctgaccgcggaacaggttgacaaagcgattaacgcgggggcgaaatttatcgtcagcccgggccttaacccgaaagtagtatcgtactgcatcaagaaaggaatccccataacgccaggctgcgccaatccttcggacatagagcaggcactggaattgggccttgaggtggtaaagttcttccccgccgagcaggccggggggcttgactacataaaagcggtatcggccccctaccctaacctgaaattcatgcccaccggcggaatcaacgccgccaatatctcaaaatatattttgtttgacaaaatagtcgcctgcggaggctcatggatggctggcgccgatcttatcaacgcgggcgatttcgataaaataacggcgctttcaagggaagccgtactgggcatgctcggtttcagcgtcgcccatatcggtattaatgccggcggtgaagcggacgccatgaaagcggcgaaaatctttaacaatctctttggtttccctttaaagacggaaacagttccgtttttatgggcgacagcattgagaatgtaa

SEQ ID NO: 4866 - protein, 255 aa, Unknown
  Obtained from environmental sample
  DOMAIN (4)...(199): KDPG and KHG aldolase
  misc_feature (1)..(255): Xaa is any amino acid
MHAVLEELGKIGIVPVIKIDDVEKAVPLARALAAGGIPCAEITFRTEQGEEAIRRISKEVPGVLTGAGTVLTAEQVDKAINAGAKFIVSPGLNPKVVSYCIKKGIPITPGCANPSDIEQALELGLEVVKFFPAEQAGGLDYIKAVSAPYPNLKFMPTGGINAANISKYILFDKIVACGGSWMAGADLINAGDFDKITALSREAVLGMLGFSVAHIGINAGGEADAMKAAKIFNNLFGFPLKTETVPFLWATALRM

SEQ ID NO: 4867 - DNA, 459 bp, Unknown
  Obtained from environmental sample
  misc_feature (1)..(459): n is a, c, g, or t
atgcgaaacgacctgtggaaaatttgcaatgacaatggcgatttatttaaatcttgctgcatagctacctctagcaatggagagagagagtttttaaccattaactgcgagcaaaacagcatctttgactgtgcctccataaccaaatccatgccaactggttaccttgctctaaaggcaatagaaaaggggattctaaaccttgatactccggtggcagatattctcccagactttgcggcgtatcacaacaaagaggcaaaagtgttccatttgctaacacattccttggattaccgctttcccatgagcagcctcaaggatttgccgcctcaggagatttggcagagaatttgctcgcataaatttgaaatacctcctggtgggttattttgctacggaaatgcgaacagcattttgctcgggaaaagtttggaagcgtttaccatacacctttag

SEQ ID NO: 4868 - protein, 152 aa, Unknown
  Obtained from environmental sample
  misc_feature (1)..(152): Xaa is any amino acid
MRNDLWKICNDNGDLFKSCCIATSSNGEREFLTINCEQNSIFDCASITKSMPTGYLALKAIEKGILNLDTPVADILPDFAAYHNKEAKVFHLLTHSLDYRFPMSSLKDLPPQEIWQRICSHKFEIPPGGLFCYGNANSILLGKSLEAFTIHL

SEQ ID NO: 4869 - DNA, 552 bp, Unknown
  Obtained from environmental sample
  misc_feature (1)..(552): n is a, c, g, or t
ttggaaaaaccggttggaagaaacttgatgaattattacgctatacaggtaaaaacaaagggcgaggagaaattcataaagctgtttggctccctccacccggaagtgcgtctgcccatgcattttcccaggcgtataatcgacatacggcgaaaggggattgtccggaagtccactgtcgcggttttccccggctatatatttatcgaggcggaaagcggggaaattcaggcccaccagtgggctttccggcgcacggacggtttttaccgttttttgagatcaaaccaggatattagcccccttgcggacagggaccttgaacttgtgctgcattttgtgaaaagggccgggccggtcgccggcgtatccagggtgtattttaatgagaattcccgaattgttgtcatagaaggcccgttaattgggcttgagggaaggataataaaggtcgataaacgtaagaagagggcaaaagtaaaattgaacctttatgacgattcattcgcaatagatcttgcctttgaagtgattggagcgctggacagatag

SEQ ID NO: 4870 - protein, 183 aa, Unknown
  Obtained from environmental sample
  DOMAIN (10)...(105): Transcription termination factor nusG
  misc_feature (1)..(183): Xaa is any amino acid
MEKPVGRNLMNYYAIQVKTKGEEKFIKLFGSLHPEVRLPMHFPRRIIDIRRKGIVRKSTVAVFPGYIFIEAESGEIQAHQWAFRRTDGFYRFLRSNQDISPLADRDLELVLHFVKRAGPVAGVSRVYFNENSRIVVIEGPLIGLEGRIIKVDKRKKRAKVKLNLYDDSFAIDLAFEVIGALDR

SEQ ID NO: 4871 - DNA, 345 bp, Unknown
  Obtained from environmental sample
  misc_feature (1)..(345): n is a, c, g, or t
gtggaaggtttccagatttttgacaaaatggttgacgacatacgccaggaaatagcgtcgcgcctgcacctcgtgcggattcaggtctcgcccgcgggtgacggcgcgccgtatcgcggcgcgagccggcccagcaggacaatcgccacctcgcagtccgcgagccacagcagtatggcctctttcggcagcggcccgggcgcgtccggccgttcctcctcgcccatgggagccgcaagcgcccccgacggcgcgaccgttatacgcagccagcccaaagtaggccgcaacgacccctgtccctgcggcagcggccggaagtacaagcattgccacgggaagtag

SEQ ID NO: 4872 - protein, 114 aa, Unknown
  Obtained from environmental sample
  DOMAIN (96)...(114): SEC-C motif
  misc_feature (1)..(114): Xaa is any amino acid
MEGFQIFDKMVDDIRQEIASRLHLVRIQVSPAGDGAPYRGASRPSRTIATSQSASHSSMASFGSGPGASGRSSSPMGAASAPDGATVIRSQPKVGRNDPCPCGSGRKYKHCHGK

SEQ ID NO: 4873 - DNA, 798 bp, Unknown
  Obtained from environmental sample
  misc_feature (1)..(798): n is a, c, g, or t
gtgtgggacagcccatgggggcgcggatatcccggctggcatattgaatgttcggcgatgagcatgaaatacctcggcgaaaattttgatattcacgcggggggaatcgatcatattcccattcaccacacaaatgaaatcgcgcagagcgagtccgcaaccgggaaaaaaccatgggtaaaatattggctgcacaatgaattcctcgttcttaacaaagggaaaatgtcaaaatcggcgggcggttttctcactttgcaaacattggttgacgacggctatgacccgcttgattaccgctattttttactaggcggacactaccgcagccagcttcagttttccatgaaaagtttggaaggcgcgaaaagctcgcgcaaatctctgatggacaaggttcgctctttagcggcaaaatgcggcgtaaacacaggaggagagccgccatcgaagtatatagaagaatttaataaagccattgaggacgacctgaacacaccccgcgcgcttgcggaattatgggggcttttgaaagaaggtccggcggaacctgaaacgctttctgctgtcttcgatatggatagggtttttgggctcgggcttaaagacgcatgcgaggtaaaaactcaaggcgatgaaaacgccgccgaaatagaggaattaatcgaaaaaagggcgcaggcaaaaaaagcgaaagattttgccgccgcggacagcataagacaaagtttgaaggatcgcggtataatactggaagacggaccggcagggactacatggcgcnaaagcggcctgtaa

SEQ ID NO: 4874 - protein, 265 aa, Unknown
  Obtained from environmental sample
  DOMAIN (1)...(124): tRNA synthetases class I (C) catalytic domain
  misc_feature (1)..(265): Xaa is any amino acid
MWDSPWGRGYPGWHIECSAMSMKYLGENFDIHAGGIDHIPIHHTNEIAQSESATGKKPWVKYWLHNEFLVLNKGKMSKSAGGFLTLQTLVDDGYDPLDYRYFLLGGHYRSQLQFSMKSLEGAKSSRKSLMDKVRSLAAKCGVNTGGEPPSKYIEEFNKAIEDDLNTPRALAELWGLLKEGPAEPETLSAVFDMDRVFGLGLKDACEVKTQGDENAAEIEELIEKRAQAKKAKDFAAADSIRQSLKDRGIILEDGPAGTTWRXSGL

SEQ ID NO: 4875 - DNA, 420 bp, Unknown
  Obtained from environmental sample
  misc_feature (1)..(420): n is a, c, g, or t
ttgtcggtcacggtttgtttgcaaagctcgcaaaagaggcgtttatcgcaggagagaacggggttgagcatctcacttcttccttctcgtgaaaaatccctgctacgctttcacccctgggtgttcagcggtgctgtggataaaataaatgggaatccaaaacttggcgaaacggttaaaattttaagtagcaatggtaattttttggcttggggggcgtattcgccaaattcgcagataacagtggcatttactatattattggaaataatccaaggagtttgtatggttgtgaatgttgcagaaaatataaaacctatctcttacataaagaacaacgcctctaatgttatggattatgtttatgaaaataaaaatccagtaataataacaaaaaatggtgaagcaatagctgtttaa

SEQ ID NO: 4876 - protein, 139 aa, Unknown
  Obtained from environmental sample
  misc_feature (1)..(139): Xaa is any amino acid
MSVTVCLQSSQKRRLSQERTGLSISLLPSREKSLLRFHPWVFSGAVDKINGNPKLGETVKILSSNGNFLAWGAYSPNSQITVAFTILLEIIQGVCMVVNVAENIKPISYIKNNASNVMDYVYENKNPVIITKNGEAIAV

SEQ ID NO: 4877 - DNA, 651 bp, Unknown
  Obtained from environmental sample
  misc_feature (1)..(651): n is a, c, g, or t
ttggtgcaaaacggaatggggcgtggggctgggcacggaaagcacggtgttattcgcactggaaaggctgcggaaaggcaaaaaacagaaaatttgaaattctttggcgttagcacgagttttagcacaaccttgctctgccgcaaaatgggcattgaactaaaagacagcggctccgtttctcacttagacctggcaatagacggcacagacgagatagaccctaatttgaatttgataaaagggcgcggcgcagctcatctgttggaaaaaatagtagcgagccttgcggataaatttattatagttgccgattctacgaaaatggtgaaaactttaggcgagaagtttccgctaccgctggaaattttgccagcagcacttgggttggtggaggtttgcgtaaagagtttgggcggcacattggaagttcgcccagccggagcgtgcaaagacggcccaactatcagcgactcaggaaatataatagcagatgcgaaattcggtttgataaaggagcccgcagttctttgcaaaaaattggattcaattccagggcttgtcggtcacggtttgtttgcaaagctcgcaaaagaggcgtttatcgcaggagagaacggggttgagcatctcacttcttccttctcgtga

SEQ ID NO: 4878 - protein, 216 aa, Unknown
  Obtained from environmental sample
  DOMAIN (34)...(209): Ribose 5-phosphate isomerase A (phosphoriboisomerase A)
  misc_feature (1)..(216): Xaa is any amino acid
MVQNGMGRGAGHGKHGVIRTGKAAERQKTENLKFFGVSTSFSTTLLCRKMGIELKDSGSVSHLDLAIDGTDEIDPNLNLIKGRGAAHLLEKIVASLADKFIIVADSTKMVKTLGEKFPLPLEILPAALGLVEVCVKSLGGTLEVRPAGACKDGPTISDSGNIIADAKFGLIKEPAVLCKKLDSIPGLVGHGLFAKLAKEAFIAGENGVEHLTSSFS

SEQ ID NO: 4879 - DNA, 339 bp, Unknown
  Obtained from environmental sample
  misc_feature (1)..(339): n is a, c, g, or t
ttgccgattattaattatttacttattatttattcggaggcaattattatgaaaacaaatggaaaaacacccggtacgcttctgctggaatacatcagcaaaaacggcttaaattgcaacagagttgcaaaagaaatcagatgcagtcaaacggctttaaggctgattagtctggacaaaagccgcatcacggcttcagtcgcagtccgccttgctaaatattttaatactaagcccgagttttggctgttaacgcagatgaagcatgatcttgtaaaagccgcaggcaataaaacattatgcaaaaaactcagcagtatcagtatagtaactacctag

SEQ ID NO: 4880 - protein, 112 aa, Unknown
  Obtained from environmental sample
  misc_feature (1)..(112): Xaa is any amino acid
MPIINYLLIIYSEAIIMKTNGKTPGTLLLEYISKNGLNCNRVAKEIRCSQTALRLISLDKSRITASVAVRLAKYFNTKPEFWLLTQMKHDLVKAAGNKTLCKKLSSISIVTT

SEQ ID NO: 4881 - DNA, 456 bp, Unknown
  Obtained from environmental sample
  misc_feature (1)..(456): n is a, c, g, or t
atgaacagttattacgacgcgcagcttgagatgatagcgcttggcggttttgaaattctggggcacgctgaccttatcaaaaaaaattgtatcggaaaaaatttatggccgcgggaagaagaaatttaccgccaaaaagaaatctcgcgcgccgtaggcgatgcggcaggaaaaacgggtattatcgcggaagtaaacacgggaggaattaacagaaataagattaacgaggtttatccatctgaaacttttttaagattttttcgtgaaaataatgtgccgataattattacggcggacgcccattgtgccgatgatattaaaggtaattatgatattgcggcaaaaaatcttttatcagccggtttttcggaacatgtaattattttccgaaaaagaggaaaaaagataaaatatataaaagaaaaactgttaaatttccttgccgattattaa

SEQ ID NO: 4882 - protein, 151 aa, Unknown
  Obtained from environmental sample
  misc_feature (1)..(151): Xaa is any amino acid
MNSYYDAQLEMIALGGFEILGHADLIKKNCIGKNLWPREEEIYRQKEISRAVGDAAGKTGIIAEVNTGGINRNKINEVYPSETFLRFFRENNVPIIITADAHCADDIKGNYDIAAKNLLSAGFSEHVIIFRKRGKKIKYIKEKLLNFLADY

SEQ ID NO: 4883 - DNA, 594 bp, Unknown
  Obtained from environmental sample
  misc_feature (1)..(594): n is a, c, g, or t
ttgcgccgtttcgaggagcacctgcgttacgcggtggattttagctgtttgctggttggaactgaaacaggttcattaaatgcggactgttcgtttcatcctgacacgggaaaggaagagacctttgaacttttgtgcgcgtcaatcgaacggctcgtcaatttcgctgaaaaatgcggctcggttgtggcggtggaagccgtagcggatcagcatacaatttgcagtattgaaaagatggacaggctcctcaaacacattccttctccggcgctccgggttatctgggatccggtaaacctaatccccgcggctggcctgaaagaaagccaggagcaattctttgccagaaccctggacgcgtttggcgataaaatagccgcaatccacgcaaaggatttccgcatggaaggtggaaagaaaaaaggggacttacaggccgggacaggagaattggactgggtggccttattaaagcttctggggcagaaaaagtacggcattgatataattcttgaaaacaccattccggcgactgcgcagggtaccattgcctttatgagagaaaccgcggaaaagacaaaggcgaattag

SEQ ID NO: 4884 - protein, 197 aa, Unknown
  Obtained from environmental sample
  DOMAIN (1)...(152): Xylose isomerase-like TIM barrel
  misc_feature (1)..(197): Xaa is any amino acid
MRRFEEHLRYAVDFSCLLVGTETGSLNADCSFHPDTGKEETFELLCASIERLVNFAEKCGSVVAVEAVADQHTICSIEKMDRLLKHIPSPALRVIWDPVNLIPAAGLKESQEQFFARTLDAFGDKIAAIHAKDFRMEGGKKKGDLQAGTGELDWVALLKLLGQKKYGIDIILENTIPATAQGTIAFMRETAEKTKAN

SEQ ID NO: 4885 - DNA, 399 bp, Unknown
  Obtained from environmental sample
  misc_feature (1)..(399): n is a, c, g, or t
atggccgaggccggaaaggctgtcgttgaatatttgaaaaatcatagtggcaaaatcctctatatcaacgtgatgaacaaactttcggtagattgcgattgcttcggcaacccggccgccgtagacatgaacgatatcggcatcctctcgtccctcgaccccgtagccctcgaccaagcctgcgtcgacctcgtgaaaaaagcctcggacggatcaaagttagtaggccgcatgacggaaaagaacggttacctgatgatcagccacggggcgaaaatcggcctcggcaacctagcgtacaaaatcgtaaacttagacgacaactcaacgtctatcaaaataccggaacgggtttcgccctcgacggcggcgatgtgcgaactcggcaagtctaagtaa

SEQ ID NO: 4886 - protein, 132 aa, Unknown
  Obtained from environmental sample
  misc_feature (1)..(132): Xaa is any amino acid
MAEAGKAVVEYLKNHSGKILYINVMNKLSVDCDCFGNPAAVDMNDIGILSSLDPVALDQACVDLVKKASDGSKLVGRMTEKNGYLMISHGAKIGLGNLAYKIVNLDDNSTSIKIPERVSPSTAAMCELGKSK

SEQ ID NO: 4887 - DNA, 621 bp, Unknown
  Obtained from environmental sample
  misc_feature (1)..(621): n is a, c, g, or t
atgaatcaaaatttaactgggatcgtgtttatccttgaccgcagcggttctatggaagggctggagaatgacacgattgggggctttaacgggtttgtcaaaaaacaggcggaaataggtcagaccagcctcaccaccgtgctttttgacgataaatacgaaatactccacaacggcgttgacgcaaggaatgtgacgcttaccaaccgtgaatacttcacgcgcggttctaccgccctgctggacgccgtgggcaaaactatcaatgacgtggggaatcggctcaatgagacggcggaagaatcgaggcccggcaaggtcatcttcgtcatcaccacggacgggcttgaaaacgcgagccgcgaattcggctataacgaggtgaaaagaatgataacccatcagaccgaaaagtacggttgggagtttgtcttcatgggagccaatattgacgtagccaaagaaggggataaactcggcattaatgccgaccgatcattcagttttacgtcaacttcaaaaggtgtccacaaaatgtttttaggcgctgcctcactttgttgtggtatcagggagagcgaaccaaataaaaagaagaaaacaatcacatcgagaacatag

SEQ ID NO: 4888 - protein, 206 aa, Unknown
  Obtained from environmental sample
  misc_feature (1)..(206): Xaa is any amino acid
MNQNLTGIVFILDRSGSMEGLENDTIGGFNGFVKKQAEIGQTSLTTVLFDDKYEILHNGVDARNVTLTNREYFTRGSTALLDAVGKTINDVGNRLNETAEESRPGKVIFVITTDGLENASREFGYNEVKRMITHQTEKYGWEFVFMGANIDVAKEGDKLGINADRSFSFTSTSKGVHKMFLGAASLCCGIRESEPNKKKKTITSRT

SEQ ID NO: 4889 - DNA, 651 bp, Unknown
  Obtained from environmental sample
  misc_feature (1)..(651): n is a, c, g, or t
atgatacacttctatccgctttacattgatccgggaacggggagcgcgttattctcaattttaattggcgcggcggcgacaatttattttttgggccgagctcttgtaattaaacttaaagtaattctttccggcgggaaagccgccaacgccgcttccgcggatcattcctttataatttataacgaaggaaaacaatactggaatgtttttaagccggttcttgatgaatttgaaaaccataaaaccgcgcttctgtatttgacttccgcgcaggatgatccggtttttgatacttcatggagttttatcaaaccggaatatatcggtgaaggaaaccgcgcttttgcgcgtcttaatatgctccgcgcaggaatctgccttatgactactcccggccttgatgtgtaccagctcaagcgttcaaaaatggtcaaacattacgcgcatcttcttcacgctccaagcgacgtgaccatgtaccgtctttttagttttgattattttgattctgtgcttttgaccggcgattatcaggctgaagatataagaactctggagcgtcagcgtaacattccggaaaagaaacttgtcactgtaggctgttcttatcttgatgtatacgccgaaaaaataaaaatttcccgctga

SEQ ID NO: 4890 - protein, 216 aa, Unknown
  Obtained from environmental sample
  misc_feature (1)..(216): Xaa is any amino acid
MIHFYPLYIDPGTGSALFSILIGAAATIYFLGRALVIKLKVILSGGKAANAASADHSFIIYNEGKQYWNVFKPVLDEFENHKTALLYLTSAQDDPVFDTSWSFIKPEYIGEGNRAFARLNMLRAGICLMTTPGLDVYQLKRSKMVKHYAHLLHAPSDVTMYRLFSFDYFDSVLLTGDYQAEDIRTLERQRNIPEKKLVTVGCSYLDVYAEKIKISR

SEQ ID NO: 4891 - DNA, 315 bp, Unknown
  Obtained from environmental sample
  misc_feature (1)..(315): n is a, c, g, or t
ttgacgatcttttttactgcccccatcaccctgacaaggatttcccgggcgagcgtccggaattcaagatcgactgtgatgcgnncaagccaaaacccgggcatgattcttaaagcggcggaaaaatacaatattgatctttcacggtcatatatggttggggatgatatgcgcgatgtaaaagcgggaattaacgccggctgtattccggtatttctgacaaataacaagccctgtgaagatatgaataatatcaaaacttttaccaatttgcgggatttcaccgaacagtttttatcacagaaggatttatga

SEQ ID NO: 4892 - protein, 104 aa, Unknown
  Obtained from environmental sample
  misc_feature (1)..(104): Xaa is any amino acid
MTIFFTAPITLTRISRASVRNSRSTVMRXSQNPGMILKAAEKYNIDLSRSYMVGDDMRDVKAGINAGCIPVFLTNNKPCEDMNNIKTFTNLRDFTEQFLSQKDL

SEQ ID NO: 4893 - DNA, 312 bp, Unknown
  Obtained from environmental sample
  misc_feature (1)..(312): n is a, c, g, or t
atgaaagaagccttattaaaaggagattttaagggtttttccgactgtcttttgaacggctggctggcgaagaagaacgccgccgcttcaatctccaattcattcctggatgaactgtatcaatacgccattgacaacggcgcggaatcagcaaagatttcgggtgcgggcggaggcggcttcatgatgatatactgtaacccctgcaaaagaatcgcgctcattcgcgcgttaaaagaaaaacagggaatggtattaacaccttcatttactgaaacggggacacaggcatggactatatacaacaattaa

SEQ ID NO: 4894 - protein, 103 aa, Unknown
  Obtained from environmental sample
  DOMAIN (1)...(85): GHMP kinases C terminal
  misc_feature (1)..(103): Xaa is any amino acid
MKEALLKGDFKGFSDCLLNGWLAKKNAAASISNSFLDELYQYAIDNGAESAKISGAGGGGFMMIYCNPCKRIALIRALKEKQGMVLTPSFTETGTQAWTIYNN

SEQ ID NO: 4895 - DNA, 342 bp, Unknown
  Obtained from environmental sample
  misc_feature (1)..(342): n is a, c, g, or t
atggactatatacaacaattaattcaacgttatccgtcactggaatcagtcaaaagcgacataagcgcggcatttgacatcattgcccgctcatacgcaaatggcggcaaattgctgatagcgggtaacggaggcagcgcttccgacgcggaacatatcgccggtgaattgatgaanacattcgcaaaaaaaagaaatctgcctgattcctttattaccgatattaaaaaagttgatcctgaaattgccgaantaccttnatccccgtatgcagcccggccttcctacgatcgcgctttccggtcacgcttcactgaataccgcgtgtataaacgatattga

SEQ ID NO: 4896 - protein, 113 aa, Unknown
  Obtained from environmental sample
  misc_feature (1)..(113): Xaa is any amino acid
MDYIQQLIQRYPSLESVKSDISAAFDIIARSYANGGKLLIAGNGGSASDAEHIAGELMXTFAKKRNLPDSFITDIKKVDPEIAEXPXSPYAARPSYDRAFRSRFTEYRVYKRY

SEQ ID NO: 4897 - DNA, 741 bp, Unknown
  Obtained from environmental sample
  misc_feature (1)..(741): n is a, c, g, or t
ttgggcgtgccggtgatcaccgagtttttgcggcacaatatattggccggcgggtcgggggtgctgcccacctttccgggcagcctcattgtcgccaagtacacaacgggggtggggctttttgtaaatatcgggcttgtctcgcggatgacggttatagacagcgacgcgcaggcgttgctttttgagtcggacacggggccggggaccgtcctcatcgacaagtgcgctcaggaggcggagtgcgacggcgggtttgaccgcgacggggcgctgaccgccacgggcgccccttgttccgagtgcctcgagacattggccgccgatccgtggatagccaaggccgcgcccaagcaggcgtcgccggagattttttcgcacctgcttgaccacccctgcctcaagcggcttagcccggtcgacaaactggcgacgatcacggcgctcacggctaggagcgtctacgacttctaccgcagggagtatagggaagcggcgcaaccctcggcgctttggttatccggcggaggcgccaataatttgacgctcgtcgatttcctcaaggcctctttcgaccccataccggtacgcagcgtggaggatctgaacatcccgcccgacatgaaggtgcctctgacgctcgggttgacggtagacgcgttcgtctgcgggaagactattccgtgggagtcggggagcaaccccaacatcaagccgctggggcggtgggcgcttccgtag

SEQ ID NO: 4898 - protein, 246 aa, Unknown
  Obtained from environmental sample
  DOMAIN (1)...(220): Uncharacterised protein family (UPF0075)
  misc_feature (1)..(246): Xaa is any amino acid
MGVPVITEFLRHNILAGGSGVLPTFPGSLIVAKYTTGVGLFVNIGLVSRMTVIDSDAQALLFESDTGPGTVLIDKCAQEAECDGGFDRDGALTATGAPCSECLETLAADPWIAKAAPKQASPEIFSHLLDHPCLKRLSPVDKLATITALTARSVYDFYRREYREAAQPSALWLSGGGANNLTLVDFLKASFDPIPVRSVEDLNIPPDMKVPLTLGLTVDAFVCGKTIPWESGSNPNIKPLGRWALP

SEQ ID NO: 4899 - DNA, 807 bp, Unknown
  Obtained from environmental sample
  misc_feature (1)..(807): n is a, c, g, or t
atgcgcgaatttaacgtaacgggtctttgcctgccaaataaacactatatggttgacatctccaacaaagtccgccagatagccgctatggtggaaaatgggcagtattttactataaatagggctaggcaatatggcaaaaccacaaccataagactattggagcaagttttgttaaaaaatgggtatcaggtggctcgcataagttttgaaggtattggcgacactccatttgaaaacgaggagaatttttgccaaaatataatagaccaaatatccagagctatagacataataaaccccgaatatgcaaaaacttggataaacaattcgataaaaacatacaaggatttggatatttttttagatgaagtttgcaaagataaaaaagtagttttaataatagacgaaacagacaaaacatcaaataatttagtattcttaagattcataggaatgttaagggacaaatatttagaaagagaaaagccaaaaagagctaccttccaaagcgttattcttgctggcgtgtacgatattaagaatttaaaagtcaagctggtgcagcgagggctttaccaattgcaagacggagaaaaacgcataaattcaccttggaacatagctgttaatttcaatgtagatatgtctttttcaccgcccgaaatagccactatgcttttggaatacgaaaaagaccataaaacaggaatggatatagaagccatatcaaatgaaataagaacctacaccaacggctatccttatttggtctctagaatctgccaaaagactcggccgatctga

SEQ ID NO: 4900 - protein, 268 aa, Unknown
  Obtained from environmental sample
  misc_feature (1)..(268): Xaa is any amino acid
MREFNVTGLCLPNKHYMVDISNKVRQIAAMVENGQYFTINRARQYGKTTTIRLLEQVLLKNGYQVARISFEGIGDTPFENEENFCQNIIDQISRAIDIINPEYAKTWINNSIKTYKDLDIFLDEVCKDKKVVLIIDETDKTSNNLVFLRFIGMLRDKYLEREKPKRATFQSVILAGVYDIKNLKVKLVQRGLYQLQDGEKRINSPWNIAVNFNVDMSFSPPEIATMLLEYEKDHKTGMDIEAISNEIRTYTNGYPYLVSRICQKTRPI

SEQ ID NO: 4901 - DNA, 399 bp, Unknown
  Obtained from environmental sample
  misc_feature (1)..(399): n is a, c, g, or t
atgagcgtatcagatccagttgcggacatgctgacaaagattagaaatgcaggcatggcagggcacgaaaaagtagatattcccacttccaggcttaagcttgagatagttaaaatattgaagaccgaagggtatattaagaattttaagaaggcaaatcaggaaggagcgaatgtcatccgggttttccttaaatatgatgacaataccgctcctattattcacggaattgaaaaggtgtcaaaacccggacgccgtgtttatatgggatatcaaaatatgccgagggtattgaacggatacggaaccctgatcgtttctacgtcgcagggtgtaacaacaggcaaaaaagccgcggagaaaaaagtcggcggcgaagttatctgtacggtgtggtaa

SEQ ID NO: 4902 - protein, 132 aa, Unknown
  Obtained from environmental sample
  DOMAIN (5)...(132): Ribosomal protein S8
  misc_feature (1)..(132): Xaa is any amino acid
MSVSDPVADMLTKIRNAGMAGHEKVDIPTSRLKLEIVKILKTEGYIKNFKKANQEGANVIRVFLKYDDNTAPIIHGIEKVSKPGRRVYMGYQNMPRVLNGYGTLIVSTSQGVTTGKKAAEKKVGGEVICTVW

SEQ ID NO: 4903 - DNA, 414 bp, Unknown
  Obtained from environmental sample
  misc_feature (1)..(414): n is a, c, g, or t
atgtcgagaatcggaaaaataccggttaagattcccggtggagtaaaagtaacttttcaaaacgatgagatgcttgtagaaggtccaaagggaaagcttaaacaaaaatacgatcccgtgattacttttgaaaacaagggacaagaaattatcgttggtcgtaaagacgaacaaaagcagacaaaggcttttcacggtctttatcgcaaccttttgaataatatggtaatcggcgtttcaaccggttttaacaaatcgcttattgtaaacggcgtaggttacagggctgaagtgcagggaaaactcctgtccatgagccttgngtactcaaacgacatttttgtcgccattcccgaaggacttaccgccgccgcggacgcaaacggcaagattacaattacgggaattgactaa

SEQ ID NO: 4904 - protein, 137 aa, Unknown
  Obtained from environmental sample
  DOMAIN (11)...(82): Ribosomal protein L6
  misc_feature (1)..(137): Xaa is any amino acid
MSRIGKIPVKIPGGVKVTFQNDEMLVEGPKGKLKQKYDPVITFENKGQEIIVGRKDEQKQTKAFHGLYRNLLNNMVIGVSTGFNKSLIVNGVGYRAEVQGKLLSMSLXYSNDIFVAIPEGLTAAADANGKITITGID

SEQ ID NO: 4905 - DNA, 396 bp, Unknown
  Obtained from environmental sample
  misc_feature (1)..(396): n is a, c, g, or t
atgagcgcggcgttgggcggtgccgctaaagccccggtttatactgagcttgccgaatgtcatgactgttacaagtgcattcgcaaatgcccggtaaagtctatcaaggtggcgaaggggcaggcgagcatcctgtttgaccgctgtatttactgcgggcgttgcgtgatgagttgcccttcacatgccaaacattaccggaacgatgttgaaaaagtgaaactgctgttggccgacgggcggaagacggtagtttcactggccccttcgtttgtttctgaatttaccgaatggaaacaggaagagcttatcgccgcgcttaaaaagactgggcttcttcgccgtgtcggaaaccgcccttggcgcagattatctttccgcccgcagtgccagtga

SEQ ID NO: 4906 - protein, 131 aa, Unknown
  Obtained from environmental sample
  DOMAIN (13)...(36): 4Fe-4S binding domain
  misc_feature (1)..(131): Xaa is any amino acid
MSAALGGAAKAPVYTELAECHDCYKCIRKCPVKSIKVAKGQASILFDRCIYCGRCVMSCPSHAKHYRNDVEKVKLLLADGRKTVVSLAPSFVSEFTEWKQEELIAALKKTGLLRRVGNRPWRRLSFRPQCQ

SEQ ID NO: 4907 - DNA, 363 bp, Unknown
  Obtained from environmental sample
  misc_feature (1)..(363): n is a, c, g, or t
atgctttcaagcatagccgaaaacgatcaactgggatctaaagtaataaagtacgctaaaacattggttgacgccgcgcttaaaaatcgcgaggctatagactcgttgatcgcccgcaaggcggtcaactgggagttgcgccgtatggcggcggttgacaggaatgtcctccgtttggccacggccgagctcatatactttcgggagcaggtgccgtttaaggttgtgatagatgaggctgtggagctcgcaaagacctacggtaccgacgattccggcaaattcgtgaacggtattttagattccatacgcagggagttgtaccggaaagagggagcgggcggtggcgaagaaaaagcgtaa

SEQ ID NO: 4908 - protein, 120 aa, Unknown
  Obtained from environmental sample
  DOMAIN (1)...(107): NusB family
  misc_feature (1)..(120): Xaa is any amino acid
MLSSIAENDQLGSKVIKYAKTLVDAALKNREAIDSLIARKAVNWELRRMAAVDRNVLRLATAELIYFREQVPFKVVIDEAVELAKTYGTDDSGKFVNGILDSIRRELYRKEGAGGGEEKA

SEQ ID NO: 4909 - DNA, 693 bp, Unknown
  Obtained from environmental sample
  misc_feature (1)..(693): n is a, c, g, or t
atgccgaaaagttcaacacccgtccccnggataatgatccttgtcggccctcccggagagggcaaaacaacaaccatagcgaaactggcggccaatttcggcatggatgaaaatgcccgccaaatacgcaatgttaagctcatcacaattgacgcttacaaaatagggggaagggaacagcttgaaaaactggctgcctgtatgggagttccatgtttttttgcaacggattacgatgagatgaagaagattatcgccttaaattccggtggaacggatcttttccttatagatactatcggaaggcctcaccgggacatggtactattgggagagatgaaaaagatccttgacgcctgcgggactttgactgatgtccacctggtgcttgcggctaccacaaaattcagcgatgtaaacgagatactgaaaaatttcgaggcgtttggctacaagtcggtgattgttacaaagatggatgaaacgataaggaccgggaacataattagcgcgctttcggaaagggcaaagccgatttcctatataaccaacggtcaagggatactggaacatatacacaaagcctcggtgatgcaatttttaaccaaccttgagggctttaaggtgaacagaataaagtttgacgaaaagttcccggataaaggaaaaagaaaaaatgcaggagtggcatga

SEQ ID NO: 4910 - protein, 230 aa, Unknown
  Obtained from environmental sample
  DOMAIN (8)...(206): SRP54-type protein, GTPase domain
  misc_feature (1)..(230): Xaa is any amino acid
MPKSSTPVPXIMILVGPPGEGKTTTIAKLAANFGMDENARQIRNVKLITIDAYKIGGREQLEKLAACMGVPCFFATDYDEMKKIIALNSGGTDLFLIDTIGRPHRDMVLLGEMKKILDACGTLTDVHLVLAATTKFSDVNEILKNFEAFGYKSVIVTKMDETIRTGNIISALSERAKPISYITNGQGILEHIHKASVMQFLTNLEGFKVNRIKFDEKFPDKGKRKNAGVA

SEQ ID NO: 4911 - DNA, 570 bp, Unknown
  Obtained from environmental sample
  misc_feature (1)..(570): n is a, c, g, or t
atgcttgtcaatatttcagaaaccaaaagtatgtggtttggggaaagcgaaaaacgcattaaatcggtttttgaccgttacaggagaattataaaagacgattgccttgctccaatacttctctttaacgaagccgatgccgttctcggaaagcgccgtgaattgacgaattcccgcagcggcccagatcaaaccgaaaacgctatacaaaacattattttgcaggaaatggaaaacctgaacggaatccttatcgcaaccaccaacatgacatccaactttgacaaagcgtttgagcgccgtttcctttataaaatcaattttgacaagcccgacattgaatcaaaaaagctgatgtggcaaagctttatccccgacctttcagactctgacgcgcggcgccttgcgtcaaaattcgatttttcaggcggccagatagaaaacatagccagaaagagcgcggtctcatttatcttaaaaggcgcaaaaacggatattcctgccctggaaacattttgcggggaagaattgtttgaaacaacagccaacagaataggctttaacgtttaa

SEQ ID NO: 4912 - protein, 189 aa, Unknown
  Obtained from environmental sample
  DOMAIN (3)...(159): ATPase family associated with various cellular activities (AAA)
  misc_feature (1)..(189): Xaa is any amino acid
MLVNISETKSMWFGESEKRIKSVFDRYRRIIKDDCLAPILLFNEADAVLGKRRELTNSRSGPDQTENAIQNIILQEMENLNGILIATTNMTSNFDKAFERRFLYKINFDKPDIESKKLMWQSFIPDLSDSDARRLASKFDFSGGQIENIARKSAVSFILKGAKTDIPALETFCGEELFETTANRIGFNV

SEQ ID NO: 4913 - DNA, 489 bp, Unknown
  Obtained from environmental sample
  misc_feature (1)..(489): n is a, c, g, or t
ttggccccttcgtttaccgatgagtattacgaggatgacgtaaattcattgctggaagaattaacggaatttgcgaataaacattccggttatgccggcggacgcgcatggcttttggtcggcggaatacatgccgcaaaagaaaactgggccctggccgaggctgcctatgtttcagccgccaggctaaatagtaagaactatcttgcgccggttgcgtggtttaacgccgccgccgccgcggaagagcagggcaaaacaaccgaagccatcgggtattatggcagcagcattacaactacagccgtgttttcagcggcgccccgcgcccagttctcggtcggacggctgtatgaaacccagaacgaagacgaaaaagcgattgaagcttaccgcgccgtcatttcaggctggccttttgaccaggtatgggcaaaacttgcccgcagcaggatcatagcgctggagacaaaaaccaacagtgattaa

SEQ ID NO: 4914 - protein, 162 aa, Unknown
  Obtained from environmental sample
  misc_feature (1)..(162): Xaa is any amino acid
MAPSFTDEYYEDDVNSLLEELTEFANKHSGYAGGRAWLLVGGIHAAKENWALAEAAYVSAARLNSKNYLAPVAWFNAAAAAEEQGKTTEAIGYYGSSITTTAVFSAAPRAQFSVGRLYETQNEDEKAIEAYRAVISGWPFDQVWAKLARSRIIALETKTNSD

SEQ ID NO: 4915 - DNA, 606 bp, Unknown
  Obtained from environmental sample
  misc_feature (1)..(606): n is a, c, g, or t
gtgggtcagattcggccgaggggcacggcgcgtggtgcataccggcaaatacgccgtcgtcacccgttcttcggcgcggagaaacgtctggcgccaacggaaagctacgtgcgcatctccgacgaggagatctacgacaggggcgaagtcatgtacccaaacgtcatagccgtattcgccccgcaggtgataacggttggcaagtcgcactcgataccgttctattcgggactgcgcaacggcggattgatcattgttaattccgaagaaccgataataacagaaaaagatatggcggaaattgacaaaacgggagcgcgtgtaacctacgtcccggcgacaaaactggcggtggatttcgccggaaccgacttagcgacaaacatgacgatgcttggcgccatctgcggcctatcccccgatttagttgacttggattctctattgacggcggtagaggaacgtttcagcggaaagtcaaagatagtcgcttcgggaacaaccgcggcgcttgacgaagcaatcaagagtaaatacgacaaagcatcggcgctgattgaaaagaatttggtcgctatcaaagaggcgtatggatatacgaaatag

SEQ ID NO: 4916 - protein, 201 aa, Unknown
  Obtained from environmental sample
  DOMAIN (1)...(176): Pyruvate ferredoxin/flavodoxin oxidoreductase
  misc_feature (1)..(201): Xaa is any amino acid
MGQIRPRGTARGAYRQIRRRHPFFGAEKRLAPTESYVRISDEEIYDRGEVMYPNVIAVFAPQVITVGKSHSIPFYSGLRNGGLIIVNSEEPIITEKDMAEIDKTGARVTYVPATKLAVDFAGTDLATNMTMLGAICGLSPDLVDLDSLLTAVEERFSGKSKIVASGTTAALDEAIKSKYDKASALIEKNLVAIKEAYGYTK

SEQ ID NO: 4917 - DNA, 570 bp, Unknown
  Obtained from environmental sample
  misc_feature (1)..(570): n is a, c, g, or t
ttggccgccgttcctgtttttggtctggcgtatataaacgtgtatttttttgctgttaaattgcatatttttcccgggagcctgggttatggatttgatttgctcccaagatggacaaatttgaattttattctttcggtcattagtcattaccgcttgcctttccttactatggtgctggttgccataggggggcagtctttgggcatgcgcgaaatgtccatatatgaattgaatgccgactatgttaaatactcgcggcttatgggtattaaagataaaaaaattgtctggtacgtgttccgcaacgccatgctgccacagattacaggcctcgccctatctcttggaaccttgatgggtggaaaccttgtcgccgagattgtattttcctatcccggtgtgggaatgaccgtgtatagcgcagtcagggggcaggattatccccttatttcaggctgtaccttaatcattaccgttatggttctggccgccaattttatcgtggatattgtctgtggcattatcgatccgcgagtgcggatgacaactcatgaggagggcgcctag

SEQ ID NO: 4918 - protein, 189 aa, Unknown
  Obtained from environmental sample
  DOMAIN (1)...(182): Binding-protein-dependent transport system inner membrane component
  misc_feature (1)..(189): Xaa is any amino acid
MAAVPVFGLAYINVYFFAVKLHIFPGSLGYGFDLLPRWTNLNFILSVISHYRLPFLTMVLVAIGGQSLGMREMSIYELNADYVKYSRLMGIKDKKIVWYVFRNAMLPQITGLALSLGTLMGGNLVAEIVFSYPGVGMTVYSAVRGQDYPLISGCTLIITVMVLAANFIVDIVCGIIDPRVRMTTHEEGA

SEQ ID NO: 4919 - DNA, 795 bp, Unknown
  Obtained from environmental sample
  misc_feature (1)..(795): n is a, c, g, or t
atgaacgccctcaaccctaccaggaaggttattcgttttatagaagatgtccttgaagcccacggaaaggggcttaccaaaaacgaagttttcgatctggcgcgggagcgttttgccgtcctcaatttgccggaaaaggtgttgaaccagtacgcagtggagctttcaggcggcatgaagcagaggacgatcattgccatttccactattttgaaccccaaggttctcatcgctgacgaaccttcttcggcgctggatgtctcctcacaaaaaattgtgatcaagctcctgtacgacttaatggaaaagggttttgtaaggtcattgattttcatcacccatgagctgcccctgctctacaatgttaccgatgacataatggtaatgtacgccggggaaatcgtggagcgcggaacagcgaaggaaatggtttttgatcctatcatgccatattccaaagggcttatgaattcgattatagtgccggaagaagggaccagaggccatgtgctaatggccattccgggcgcgccgcctaacttaaaactcaagcagacgggttgccgcttcgctgaacgttgccgctatgcggatcctgagtgttccaaaggaaccatcgacgaacagtacggcggcgcagaagggcgttcttaccgctgccgccataagctggaagcgctctttcatttgtacgaaaaagatctccccaatctgttggatcatgacaatataaatagcgacggagcaggcgaaaaaaagaaagaacgcaaaaaacgacggagcaagcatgaatag

SEQ ID NO: 4920 - protein, 264 aa, Unknown
  Obtained from environmental sample
  DOMAIN (1)...(132): ABC transporter
  misc_feature (1)..(264): Xaa is any amino acid
MNALNPTRKVIRFIEDVLEAHGKGLTKNEVFDLARERFAVLNLPEKVLNQYAVELSGGMKQRTIIAISTILNPKVLIADEPSSALDVSSQKIVIKLLYDLMEKGFVRSLIFITHELPLLYNVTDDIMVMYAGEIVERGTAKEMVFDPIMPYSKGLMNSIIVPEEGTRGHVLMAIPGAPPNLKLKQTGCRFAERCRYADPECSKGTIDEQYGGAEGRSYRCRHKLEALFHLYEKDLPNLLDHDNINSDGAGEKKKERKKRRSKHE

SEQ ID NO: 4921 - DNA, 900 bp, Unknown
  Obtained from environmental sample
  misc_feature (1)..(900): n is a, c, g, or t
gtgtggataaaggcgaaaaataatgttggcgtaagcggcttcagccccgccgcgagcggcaaacccattgacaatgcttcggcgccgacgctcagcgcgagtgactcgcaaatatacgtaacatggacaacaatcgcgggggcggatcaatatgatattttctgcggaacaggaataaatccgccgcagaccgctacgcagacggttatcggtacgtccgcgactatcggcagtctggtaaacggcacgacatattatgtgtgggtgcgcggaaaaaattcaacgggaaccggagtaataagcggcgcggcaagagcgaaacctgtcggcaacatggggacggttacggtgagtaccggtaacggtaagttgacggcaagttggtctgccgttgccggggcggatcaatatgatgtgtattacagcgcgacaagcgcgatgccgggaagcgctttgcagactgtttcaacgacaacggcgacgatttccggtttaacaaacgggacaacgtactatgtgtgggttaaatcgaaaaatgccaatggcgggggcaatgcaagcttaatggtaagcggtaaaccgatcggtacgccgggagcgccggtattgagtccggattcaaatcaattaacagtaacatggacagccgttgcgggcgctgatgaatatgaagtgtattatggaataggtactccgacaacgcttgcggcaacaactgccaatactaccgtaactatcaatgggctgatcaacggtacatattactatgttcgtctgcgggcaaaaaatacaatcggagtatctgactatggaccaactgcaagaggaacacccgagaagagtccgggattgtaccgcggcgcggaaaaatcggcaatcanaatcttactgattcattaa

SEQ ID NO: 4922 - protein, 299 aa, Unknown
  Obtained from environmental sample
  SIGNAL (1)...(20)
  DOMAIN (22)...(101): Fibronectin type III domain
  misc_feature (1)..(299): Xaa is any amino acid
MWIKAKNNVGVSGFSPAASGKPIDNASAPTLSASDSQIYVTWTTIAGADQYDIFCGTGINPPQTATQTVIGTSATIGSLVNGTTYYVWVRGKNSTGTGVISGAARAKPVGNMGTVTVSTGNGKLTASWSAVAGADQYDVYYSATSAMPGSALQTVSTTTATISGLTNGTTYYVWVKSKNANGGGNASLMVSGKPIGTPGAPVLSPDSNQLTVTWTAVAGADEYEVYYGIGTPTTLAATTANTTVTINGLINGTYYYVRLRAKNTIGVSDYGPTARGTPEKSPGLYRGAEKSAIXILLIH

SEQ ID NO: 4923 - DNA, 390 bp, Unknown
  Obtained from environmental sample
  misc_feature (1)..(390): n is a, c, g, or t
ttgacggattatcccgacgagccgagtttggatgtgaaactacttttaacanccatttccgccgaaaccccagccctgtcctacaaagactctatgcacttctggaacgaagtgagcaaagactatgagcatattcccaacaaacgcaaacgttttgccgaaatcaagcaaaatccgtacctcaatgcactgcaagtcaaatttgcctacgccctcacagctcacaaaacccaaggcggacaatggaaagccgtatttattgatcagggctattttaccgatgatatgctgaatacagagtttttgcgatggatgtacaccgccatcacacgcgccacggagaccgtttatttggtgaacttttcggataatttctttggtgttgtttaa

SEQ ID NO: 4924 - protein, 129 aa, Unknown
  Obtained from environmental sample
  misc_feature (1)..(129): Xaa is any amino acid
MTDYPDEPSLDVKLLLTXISAETPALSYKDSMHFWNEVSKDYEHIPNKRKRFAEIKQNPYLNALQVKFAYALTAHKTQGGQWKAVFIDQGYFTDDMLNTEFLRWMYTAITRATETVYLVNFSDNFFGVV

SEQ ID NO: 4925 - DNA, 552 bp, Unknown
  Obtained from environmental sample
  misc_feature (1)..(552): n is a, c, g, or t
ttgcctgctcgttcgaaatcaaggcggacggcagcctatgggcgtgggggcggaactactccggcgagctcggcatcggcgacaccaacagcaggaacacccccacacgcgtgggcacggacgccaactgggcggccgtgtcggtgtgcctctaccacaccctcgccatcaagacggacggcagcctctgggcctgggggagcaacacctccggccagctcggcctcggcgacagcggcagtggcagtggcacaaaccggaacacccccacccgcgtgggcactgacaccaactgggcggcggtgtcggctggcaccgcacactcgctcgccctcaagacggacggcagtctctgggcgtgggggagcaactataaaggccagctcggcctcggcaccagtgacgacaatccacacccgacacccacccgcgtgggcacggactcttggaaggccgtggccgcggatggcatgtcagctcttcctagttacggtcattcgctcgccatcaaggcggacggctccctctgggcgtggggggacaattctttag

SEQ ID NO: 4926 - protein, 183 aa, Unknown
  Obtained from environmental sample
  SIGNAL (1)...(27)
  misc_feature (1)..(183): Xaa is any amino acid
MPARSKSRRTAAYGRGGGTTPASSASATPTAGTPPHAWARTPTGRPCRCASTTPSPSRRTAASGPGGATPPASSASATAAVAVAQTGTPPPAWALTPTGRRCRLAPHTRSPSRRTAVSGRGGATIKASSASAPVTTIHTRHPPAWARTLGRPWPRMACQLFLVTVIRSPSRRTAPSGRGGTIL

SEQ ID NO: 4927 - DNA, 816 bp, Unknown
  Obtained from environmental sample
  misc_feature (1)..(816): n is a, c, g, or t
atggagatggataggcggacatttgacacgtttcgtcagttgatctacgacaagagcggtataacgctcggcgagggtaaagaggcgcttgtctccgcccgcgtaggtaagcggttgcgtgcccttgggtacgacaactacaaggattacctgcaatacctgaccggcaccagcgaggagtcggaggcggagttcattgagtttctcgacgtgatttccacgaacgttacttctttcttccgtgagaacgatcactttgtctttatggcggattatgtcagaaagatggtggaagaggggcgcgacaaggtgcgtatttggtgcgcggccagttcgagcggggaggaaccgtacacgctcgccatgaccttcctcgagaacgcgcatggtttccgcggcgattgcaagatattggccaccgacatatcgacgaaaatattgaagatggctagggcggggcagtacaccgaggcgaaaatgcagggggtcaacccgcagttgcggagcaagtattttaccgtgagcggatcgggctccaacaaggtgtacacggtgaacgacacgctcgcgaacatgcttacgttcaagcggttgaatttgtcgaagccgccgtttcctatgaagggtccgttcgatctcatcttctgccgaaacgtgatgatatactttgacaacatagtaaggaagaagttgatggacgaattttcccgattgctgcgtccgggcggttacttgatggtgggccactcggagagtatggccgggatgctgtgcaatatggataccgtgcaaccgtcggtgtatttgaaagcgtga

SEQ ID NO: 4928 - protein, 271 aa, Unknown
  Obtained from environmental sample
  DOMAIN (163)...(247): Methyltransferase domain
  misc_feature (1)..(271): Xaa is any amino acid
MEMDRRTFDTFRQLIYDKSGITLGEGKEALVSARVGKRLRALGYDNYKDYLQYLTGTSEESEAEFIEFLDVISTNVTSFFRENDHFVFMADYVRKMVEEGRDKVRIWCAASSSGEEPYTLAMTFLENAHGFRGDCKILATDISTKILKMARAGQYTEAKMQGVNPQLRSKYFTVSGSGSNKVYTVNDTLANMLTFKRLNLSKPPFPMKGPFDLIFCRNVMIYFDNIVRKKLMDEFSRLLRPGGYLMVGHSESMAGMLCNMDTVQPSVYLKA

SEQ ID NO: 4929 - DNA, 723 bp, Unknown
  Obtained from environmental sample
  misc_feature (1)..(723): n is a, c, g, or t
atgcaatgcgttaaatgcaataccaataaccgcagttccgctaagttttgtaagcagtgcggtactgcgataagcgaatcgaaaccggcagccagccttggtctttctatcgatcagcttgtagggttcgatgaaatgaaaaaaaaattgtctgaattgcaggcaatccttgaaacaaaaaaacatgacaactcaggcacgcgctattcttacgacacaatcatcatcggctcttccggcactgcaaagacgctcatctcaaatctcattgccaacctgttctataaattcggcatgatcgcaaaaagcaaaccggaaaaaatagacggcgcgagtctcaatggaatgtccaaaaaagatattgacagcctgttttcaaaagcaaagggtgggatgctttttattgacaatgcccaaaaactcctggattccgaaggcaaggcaatggcggctttttcccatttcattgacgcgatggacgcaaacaaggacgaccctgtcgtgcttatggcgggccttcctgtcggcctgcgggaaatggtaaaaagctccgaatcggcaaacaagcaaatagtcaaccgatttgaaaatatatttattatccccgattatacgccggaccagtatgtcaaaattacagagaacgaattgaaaaaacaaagttttacattcaattctgaattttccgaaaaactcctccagcggtccgctcggccaatctga

SEQ ID NO: 4930 - protein, 240 aa, Unknown
  Obtained from environmental sample
  misc_feature (1)..(240): Xaa is any amino acid
MQCVKCNTNNRSSAKFCKQCGTAISESKPAASLGLSIDQLVGFDEMKKKLSELQAILETKKHDNSGTRYSYDTIIIGSSGTAKTLISNLIANLFYKFGMIAKSKPEKIDGASLNGMSKKDIDSLFSKAKGGMLFIDNAQKLLDSEGKAMAAFSHFIDAMDANKDDPVVLMAGLPVGLREMVKSSESANKQIVNRFENIFIIPDYTPDQYVKITENELKKQSFTFNSEFSEKLLQRSARPI

SEQ ID NO: 4931 - DNA, 726 bp, Unknown
  Obtained from environmental sample
  misc_feature (1)..(726): n is a, c, g, or t
gtgacgggtattcccggtatcctcatgctttcttcccaagtggatcgggatgatcccctttatataatcgggcctccccgcattgccgaatacattgatgccagccgccgggttttggacatgtacatcaattacgagataatagtaaaggaaatccttgaacccggcgtggtctatgagggagagggtttccatgtccgggcctttcccctgcggcataccaagccctgttatgggtataccctggaagaggataaacggcccggggagtttcatcccgatttggccgctgccctgggcgtagcgcggggccccctttggtcaaagctccaggacggcgaaagtgttaaagcagaagacggtactgaggtgaggcccgagcaagtcctgggcccttcccggtctgggcggaagttttcttttgtgaccgataccctaggttttgaggcaattgccccggaagttgccaattccgacctcttcgtctgcgagggaatgttcgaagcggaactgttggaaactgccgtggaaaaaagacacatgaccgcagagcaggccgctcacattgccttggccgcgaaagtgaaaaaactggccctcatccattacagcccccgctacaacgaacaaaacctgaaacagcttttgaaagaggctctggcgattttcccggacacggtcctttccagggaccgtatggtgtttcccatcgaatatgtcgattaa

SEQ ID NO: 4932 - protein, 241 aa, Unknown
  Obtained from environmental sample
  misc_feature (1)..(241): Xaa is any amino acid
MTGIPGILMLSSQVDRDDPLYIIGPPRIAEYIDASRRVLDMYINYEIIVKEILEPGVVYEGEGFHVRAFPLRHTKPCYGYTLEEDKRPGEFHPDLAAALGVARGPLWSKLQDGESVKAEDGTEVRPEQVLGPSRSGRKFSFVTDTLGFEAIAPEVANSDLFVCEGMFEAELLETAVEKRHMTAEQAAHIALAAKVKKLALIHYSPRYNEQNLKQLLKEALAIFPDTVLSRDRMVFPIEYVD

SEQ ID NO: 4933 - DNA, 465 bp, Unknown
  Obtained from environmental sample
  misc_feature (1)..(465): n is a, c, g, or t
atggaaccgcggcagtaccggcggcatccggcgacggatgggaagcctatgttcgagaacggtatgccgagtatggcgagtcttgatacaaactgtctcttgcgttggctattggaagatgagcctaaacatactgccataataactaatattatcaacttcgaagaaaatctggttattgcagatgcagcattgattgaaatgatatttgttcttgagaaaatcaagaaaatcagcagagaaacagttgaaaaagcggttttggctatttttgagaaagataatatcatgtgcaaccgcgggcttttcattgaaattctccctatttataccagccaccccaaactttcaattgtagattgttaccttgcagcttatgccgccagtacaggagtcgcgccgctcttaacctttgataaaaaaatgggcaaccaactctcgggtacaagattactccttccatag

SEQ ID NO: 4934 - protein, 154 aa, Unknown
  Obtained from environmental sample
  DOMAIN (26)...(151): PIN domain
  misc_feature (1)..(154): Xaa is any amino acid
MEPRQYRRHPATDGKPMFENGMPSMASLDTNCLLRWLLEDEPKHTAIITNIINFEENLVIADAALIEMIFVLEKIKKISRETVEKAVLAIFEKDNIMCNRGLFIEILPIYTSHPKLSIVDCYLAAYAASTGVAPLLTFDKKMGNQLSGTRLLLP

SEQ ID NO: 4935 - DNA, 645 bp, Unknown
  Obtained from environmental sample
  misc_feature (1)..(645): n is a, c, g, or t
gtggaacaattgaagaaaaaaggaattgtgacgcgcagcgggagcatagtggatgcaacatttgtagacgtgccgcggcaacgaaatacaaaggaagagaacaaggaaataaaggaaggcaaaacacttgaagaatgggagaaagaagaaaaccggcataagaaggctcaaaaagacgttgacgcacgctgggcaactaaaaataaagaagtgcattacgggtataaaaaccatatcaaaatagacaagaagtcaaaaataataacgaaatatagtacgactagcgcggaagtacatgacagccaggaattgaaaaatctcattgaagatgggaaggacaagaggatatatggtgatagcgcatatactggggaagaggtacaaagctgcataccggaaacgacattgaatcgaatacatgaaaaggggtaccgtaataatccattgacgaaaacgcaggaacggaataacaaagccaaatcgcatatacgctcaagggcagagcatgtatttgccaggatgaatcatttcgggggaatatacataaggacaataggaaaggcgagggcagattttcaaatagggcttttgaatctgacatacaatataacccgatatgtctacttggctggagcaacatcatag

SEQ ID NO: 4936 - protein, 214 aa, Unknown
  Obtained from environmental sample
  DOMAIN (14)...(203): Transposase DDE domain
  misc_feature (1)..(214): Xaa is any amino acid
MEQLKKKGIVTRSGSIVDATFVDVPRQRNTKEENKEIKEGKTLEEWEKEENRHKKAQKDVDARWATKNKEVHYGYKNHIKIDKKSKIITKYSTTSAEVHDSQELKNLIEDGKDKRIYGDSAYTGEEVQSCIPETTLNRIHEKGYRNNPLTKTQERNNKAKSHIRSRAEHVFARMNHFGGIYIRTIGKARADFQIGLLNLTYNITRYVYLAGATS

SEQ ID NO: 4937 - DNA, 495 bp, Unknown
  Obtained from environmental sample
  misc_feature (1)..(495): n is a, c, g, or t
atgatcaggcaaaatgtatacgccgatgaggtaaaaaactgggactttaaattttttcctcaatccgcccagctccatgatgtgggaaaaattgccatcagagacgacatattgatgaagcccgccaaactgactgcggacgaatttaacgaaatgaaaaagcacaccttctttggcgaaaaagtcattgaaaaaatacaggaaaacgcgagggaaagcgtttttttgacacatgcaaaaataatggccggaacccatcacgaaaaatgggacggctccggttacccgcggggtatagcagggcttgaaattccgctccagggcagattaatggccattgtagatgtttatgacgcgctgatctccgagcgaccatataaaaaaccgttccctccggatcagtccctgaagattattaaagaaggaagcggcgttcactttgatccggctttagtagaagtattcgctgccgcagtccagtatttcccggaataa

SEQ ID NO: 4938 - protein, 164 aa, Unknown
  Obtained from environmental sample
  DOMAIN (3)...(120): HD domain
  misc_feature (1)..(164): Xaa is any amino acid
MIRQNVYADEVKNWDFKFFPQSAQLHDVGKIAIRDDILMKPAKLTADEFNEMKKHTFFGEKVIEKIQENARESVFLTHAKIMAGTHHEKWDGSGYPRGIAGLEIPLQGRLMAIVDVYDALISERPYKKPFPPDQSLKIIKEGSGVHFDPALVEVFAAAVQYFPE

SEQ ID NO: 4939 - DNA, 756 bp, Unknown
  Obtained from environmental sample
  misc_feature (1)..(756): n is a, c, g, or t
atgaatataatgattattaacggcagcccgaaaaaaaaaggcggagcttcggcgttctttgcgaagattctgcgttgtatgctttttacgcataaagttacaacaaaaagcataggcgtatcaaaagattaccatgaaatatttgataacctacagaacactgacgccgttgtaatatcggttccgttatatgttgatagtattccgtctcatttcatacattttcttaagcagacggagcggtattgtaaagataacaaatgccgatttaggctctacgttatttctaatgctggttttgtcggtgggcatcaaaatcaaacgcacctggaacagtataaatgctggtgcgagcgtgcgggcgttacctggggcggcggactcggcattggcggcggtgtaatgcttcatgtaatattctatgtaacattactgctaagtatattgcaatttattattggcatatttattaatattgtttcgggcgaaccggctatagataatgtattattatccagttttgtccgtagtgtgactatttggctgtttttcagcagcggaatgcttctttttgaatttatattagcgttggctataaaaagcaaaaagagcataaaaacccaatatacaagggtaatgctgccttcgtttatttttattgtatttgcggatatatttatggtattaagcgcgttacttcacggtaaactgccattttcattgtttaaaaaaagtgaaatatatcgagtaaaatga

SEQ ID NO: 4940 - protein, 251 aa, Unknown
  Obtained from environmental sample
  misc_feature (1)..(251): Xaa is any amino acid
MNIMIINGSPKKKGGASAFFAKILRCMLFTHKVTTKSIGVSKDYHEIFDNLQNTDAVVISVPLYVDSIPSHFIHFLKQTERYCKDNKCRFRLYVISNAGFVGGHQNQTHLEQYKCWCERAGVTWGGGLGIGGGVMLHVIFYVTLLLSILQFIIGIFINIVSGEPAIDNVLLSSFVRSVTIWLFFSSGMLLFEFILALAIKSKKSIKTQYTRVMLPSFIFIVFADIFMVLSALLHGKLPFSLFKKSEIYRVK

SEQ ID NO: 4941 - DNA, 819 bp, Unknown
  Obtained from environmental sample
  misc_feature (1)..(819): n is a, c, g, or t
atgcacgtaactcacgtgccattcatccgcgccgctggagaattaaaatcaaagcccacacagcacagcgttaaaacgctgcgctcgctggggctgcagccagacgtactcgtttgccgcgcagagcaggatatccctagcggcctaaaggaaaagatagccctattttgctcggtcactccagacgcagtgttcagcgcaagagacaccgaccacatctacgaagtcccactcaacctcaacaaagatggcctagacgcaaaagtggcatccctgcttggcctaaaggatgcagaacccgacctgcgggcctggattgacttggtgggtcggatacacaacccaaagcgcagcgcaaaagtggccgtggtgggcaagtacgtcggcttcaaagaaagctataaaagcctagaggaagcgatcaaacatgcaggttacggcctagagacccaaattgacataaaatgggtggaatccgaaaaacttgagtcaggacttccagacgcccatttgggtgactgccaagggatattagtccctagcggcttcggggtgcgcggcatgaagggcctgatattggctgcccggttcgcccgcgagaaaaatatcccattttttgggattggccttgggatgcagatggccgccgtggaattcgcccgcaacgtggcaatgctggaaggggccgactcgaccgaatttgaagagaacccccgccacaagatcatctgccagtacagagagattgccgatgcggaagaaccgcatggcctgatgcgactaggcagctacccttgcacgatcaaggaggcagcctag

SEQ ID NO: 4942 - protein, 272 aa, Unknown
  Obtained from environmental sample
  DOMAIN (129)...(272): Glutamine amidotransferase class-I
  misc_feature (1)..(272): Xaa is any amino acid
MHVTHVPFIRAAGELKSKPTQHSVKTLRSLGLQPDVLVCRAEQDIPSGLKEKIALFCSVTPDAVFSARDTDHIYEVPLNLNKDGLDAKVASLLGLKDAEPDLRAWIDLVGRIHNPKRSAKVAVVGKYVGFKESYKSLEEAIKHAGYGLETQIDIKWVESEKLESGLPDAHLGDCQGILVPSGFGVRGMKGLILAARFAREKNIPFFGIGLGMQMAAVEFARNVAMLEGADSTEFEENPRHKIICQYREIADAEEPHGLMRLGSYPCTIKEAA

SEQ ID NO: 4943 - DNA, 723 bp, Unknown
  Obtained from environmental sample
  misc_feature (1)..(723): n is a, c, g, or t
ttggcggagctaattacggttttgtattttcataaaatgaatttcagcgcggatcgcctgaacgatcctgaccgcgaccgcctggttatttccaaggggcatgccgcgcttatccagtacgcagcactgtgcgaaaaaggatgctttcccagggaggaactcaaacgggtaaaaaccctgcgcggccttttgcaggggcacccagactgttcggttccaggcattgaggcggttaccggctctttggggcagggcctgtccgtagcggttggaatggccctggccttgcggctggacaaaagcccggctcatgtttacgcggttatgggcgacggagagcagtccgaagggcagatttgggaagcggcaatggcggcggcaaatttcaaggttggcaaccttaccgccttccttgactggaacaaggtgcaggccacaggcccgacaaaggatattttctgtattcccgatttggataagaaatgggcggccttcggctggaacgttatcagtgccgatggacacgactttgagaagatccttgaagctatagaaaaagccgaagcggtgaaagacaagccctcggttattatccttgatacggtaaaaggaaagtgtttttcctttgccgaggggaattccgcgtaccacaacgggatattcaccgaagaagtgtaccaacaggcgattcgggaattggatgccataaaggcggggctgtaa

SEQ ID NO: 4944 - protein, 240 aa, Unknown
  Obtained from environmental sample
  DOMAIN (69)...(199): Thiamine pyrophosphate enzyme, C-terminal TPP binding domain
  misc_feature (1)..(240): Xaa is any amino acid
MAELITVLYFHKMNFSADRLNDPDRDRLVISKGHAALIQYAALCEKGCFPREELKRVKTLRGLLQGHPDCSVPGIEAVTGSLGQGLSVAVGMALALRLDKSPAHVYAVMGDGEQSEGQIWEAAMAAANFKVGNLTAFLDWNKVQATGPTKDIFCIPDLDKKWAAFGWNVISADGHDFEKILEAIEKAEAVKDKPSVIILDTVKGKCFSFAEGNSAYHNGIFTEEVYQQAIRELDAIKAGL

SEQ ID NO: 4945 - DNA, 360 bp, Unknown
  Obtained from environmental sample
  misc_feature (1)..(360): n is a, c, g, or t
ttgatgagcgccgagtacatcatggcggaaggaaacgaaaatgtaatcctctgcgagagggggatacgcacctttgaaacttacacgaggaataccctcgatctgtccgcgattcccgtgctgaaggaactctcccacctgccggtgatcatcgatccgagccacgctatcggcgtttcgcgttatgtgaaatcaatgacgctggcgtcggttgcggccggcgcggacgggcttatcattgaagtgcataatgatccgcagaacgcggcctgcgacggcgctcagtccctcacgctggaacagttcgccgatgtcgcggaaaaggtgcggcggatacgcgaagtagtcgcggcgctttag

SEQ ID NO: 4946 - protein, 119 aa, Unknown
  Obtained from environmental sample
  DOMAIN (1)...(115): DAHP synthetase I family
  misc_feature (1)..(119): Xaa is any amino acid
MMSAEYIMAEGNENVILCERGIRTFETYTRNTLDLSAIPVLKELSHLPVIIDPSHAIGVSRYVKSMTLASVAAGADGLIIEVHNDPQNAACDGAQSLTLEQFADVAEKVRRIREVVAAL

SEQ ID NO: 4947 - DNA, 531 bp, Unknown
  Obtained from environmental sample
  misc_feature (1)..(531): n is a, c, g, or t
atgaacatcggcattatcggcctgggccttatcggaggctcgttcgccaaagcgtataaggccgccggccataccgtatacgcaagcgagatcgatcaaagcatactggatttcgccgttctttcgcgcgttgtggacgctccgctggacgccgacgcgctgccccgctgcgacctgatccttatagcgctatatccgcaggcagcgatagaatttctggacaaaatggcgcggcatatacctgcggacgccactgtcatcgactgctgcggcacaaaaaaaaagatatgcgccgcggggtttcaggccgccggccggtacggattcacctttgtgggcggacacccgatggcgggtaccgaaaactccgggtataaacacagcanagcgactttgttcaaaggcgcgtccatgatcatagtgccgcctgtaaatgacgacatcattttttttgataaaattcagcgtctgctagcgccggcggaattcggcaggttgatcgttaccacgcggacaaacacgacgcgatga

SEQ ID NO: 4948 - protein, 176 aa, Unknown
  Obtained from environmental sample
  SIGNAL (1)...(16)
  DOMAIN (1)...(142): NAD binding domain of 6-phosphogluconate dehydrogenase
  misc_feature (1)..(176): Xaa is any amino acid
MNIGIIGLGLIGGSFAKAYKAAGHTVYASEIDQSILDFAVLSRVVDAPLDADALPRCDLILIALYPQAAIEFLDKMARHIPADATVIDCCGTKKKICAAGFQAAGRYGFTFVGGHPMAGTENSGYKHSXATLFKGASMIIVPPVNDDIIFFDKIQRLLAPAEFGRLIVTTRTNTTR

SEQ ID NO: 4949 - DNA, 765 bp, Unknown
  Obtained from environmental sample
  misc_feature (1)..(765): n is a, c, g, or t
gtgtatttatattgcggacggtcaagtacgggcgtacaggcgcagggggtatttaatatcgccagaagaggcgttagaaacggcatacaatactcaggggttttcaattatgccgggggcaatattaacggcatgcaggtttcaggcttcttcaataaagcggaagaacttaggggaatgcaaatcgggactgtaaatgtgaattccggcggaaccggccttatgatcggcgctgtcaatgtttccggttcagataaagtagtgcctattgggcttgttaatatcattaaagacggtatcatgcatccgtatatttattttgacgacatgatgttctcaaatatcggcttcagaagcgggtcaaaacatttttacggtactatcggtgtaggctttggcggaagcatgtttttcggcagtggggataaacttcttattcacagggtaggattcgggtttgaataccctttcaaaaaactgtttttcgatattgaaataacaagcggcaatataattaagcttgattccaagtgggatgacatggatatattcccgactaatgtgactaatatggcccagttgcgccttgtggcagggtataagcttttttcacatctgggcgtgtttgcaggcgtttcttatgattacttctataggatgagggaaacctcccctgatccaagggatttcggagggtcgtttctgggcataggcaatgacaagcacatcggtaaactgggtttctttggaggtatacagttctag

SEQ ID NO: 4950 - protein, 254 aa, Unknown
  Obtained from environmental sample
  misc_feature (1)..(254): Xaa is any amino acid
MYLYCGRSSTGVQAQGVFNIARRGVRNGIQYSGVFNYAGGNINGMQVSGFFNKAEELRGMQIGTVNVNSGGTGLMIGAVNVSGSDKVVPIGLVNIIKDGIMHPYIYFDDMMFSNIGFRSGSKHFYGTIGVGFGGSMFFGSGDKLLIHRVGFGFEYPFKKLFFDIEITSGNIIKLDSKWDDMDIFPTNVTNMAQLRLVAGYKLFSHLGVFAGVSYDYFYRMRETSPDPRDFGGSFLGIGNDKHIGKLGFFGGIQF

SEQ ID NO: 4951 - DNA, 318 bp, Unknown
  Obtained from environmental sample
  misc_feature (1)..(318): n is a, c, g, or t
atgacatccgtttggcggattggtttatgtatcggggaggaacgcttaaagggcgaagacgggaaaaaagcgcattcaacccaaaaaccggaagagcttcttaaaagggtaatcctgtctgcgacaaaacagggcgacatcgtgcttgatcctttttttgggacaggcacaacaggcgctgtcgccaaaaagctaaaacgaaattatatagggatagagagagagccggaatatataaaactcgcggaaaacaggatcaccggcattaaggattgttttgaagaagccgattggacggaagaatgtctcacacattga

SEQ ID NO: 4952 - protein, 105 aa, Unknown
  Obtained from environmental sample
  DOMAIN (1)...(84): DNA methylase
  misc_feature (1)..(105): Xaa is any amino acid
MTSVWRIGLCIGEERLKGEDGKKAHSTQKPEELLKRVILSATKQGDIVLDPFFGTGTTGAVAKKLKRNYIGIEREPEYIKLAENRITGIKDCFEEADWTEECLTH

SEQ ID NO: 4953 - DNA, 567 bp, Unknown
  Obtained from environmental sample
  misc_feature (1)..(567): n is a, c, g, or t
ttgaacgatgacgaaaaagcccttatttacgactgccactttatcaccgcaaaacctattttatatgtctgtaacgtggacgaggaagggatgaaagccgtcatggctgaggggaaagttcattatgtggaagttgtgcgaaaggtcgctgcctccgaaggttccccggtagtggtcataagcggcaaattcgaagcggaactcatcgccatcgaagacccggcggaaagactcgcctttctggaagagcttggtctaaaagagccgggccttgcccctttaattcgcgcggcttacgggcttttggggcttaggacttttttcaccgccggcgaagacgaatgccgggcctggactatccgcgccggggaccccgcgcccaaagccgccagggcgattcacacagattttgaaaaaggctttatcaaagccgaagtgtacacctgcgatgatattttcaaatacggcaccgaggcaaagatcaaggaagcgggcaagtaccgcattgaaggcaaggaatatatcgtgcaggacggcgatgtaatgttctttaagttcaatgtgtga

SEQ ID NO: 4954 - protein, 188 aa, Unknown
  Obtained from environmental sample
  DOMAIN (104)...(187): Protein of unknown function (DUF933)
  misc_feature (1)..(188): Xaa is any amino acid
MNDDEKALIYDCHFITAKPILYVCNVDEEGMKAVMAEGKVHYVEVVRKVAASEGSPVVVISGKFEAELIAIEDPAERLAFLEELGLKEPGLAPLIRAAYGLLGLRTFFTAGEDECRAWTIRAGDPAPKAARAIHTDFEKGFIKAEVYTCDDIFKYGTEAKIKEAGKYRIEGKEYIVQDGDVMFFKFNV

SEQ ID NO: 4955 - DNA, 495 bp, Unknown
  Obtained from environmental sample
  misc_feature (1)..(495): n is a, c, g, or t
gtgttacagatagacgccgacggccagcaggagccggggaaagcggttttttttcttgaagagtccgcccggcatcctgatatgattatctgcggatatccggtatttgatgaaaccgctcccggaagcagggtggcaggacggaagatttccaatttctgggccgctgtggttacgctttcaacggaactcaaggatgtactttgcggtttcagggtatatccggtggatgtatcattacgcataacccaaactctctttcttgacaagcgcatgggctttgacccggaaatcctggtgcgcctgtactggaaaaaggtgtttccggtatttcaccctgtaaaagtaacctacccgccggacgggatttccaatttccgtaaggtcagggacaatatctgcataagcctgatgtttacccggctgtttatgggtatgattctgcgcctgccgctgttgcttgccctgaaaaaaaaacgacggaaacagagataa

SEQ ID NO: 4956 - protein, 164 aa, Unknown
  Obtained from environmental sample
  misc_feature (1)..(164): Xaa is any amino acid
MLQIDADGQQEPGKAVFFLEESARHPDMIICGYPVFDETAPGSRVAGRKISNFWAAVVTLSTELKDVLCGFRVYPVDVSLRITQTLFLDKRMGFDPEILVRLYWKKVFPVFHPVKVTYPPDGISNFRKVRDNICISLMFTRLFMGMILRLPLLLALKKKRRKQR

SEQ ID NO: 4957 - DNA, 462 bp, Unknown
  Obtained from environmental sample
  misc_feature (1)..(462): n is a, c, g, or t
atggctaaaatccttgtagttgatgatgaagaaattatgcgcgatatggtggcagatagccttgaacttaatggacatcgctgcacggttgcagcaaacccgcaaatagccttggagcaaatttcggttgtgaatccagatttgataatttcagactacaaaatgcccggaatgacaggattggatttgctgaaagccgtgaaaaaagaacgcccttcccagccctttttgatgatgaccgcatttggctccattgaaatggcagtggaggctttgcaaaacggcgcagaccattttatagaaaaaaaagactttgagcacgcagaaataatagaacacgctgttgctatggtacttgaaaaatacaagtacagaatggaaaattccgctttaaaaagacgcctatgcgaaaaaaatttcattgggtgtagtgaaaaatttcttgcactaaataaattgtga

SEQ ID NO: 4958 - protein, 153 aa, Unknown
  Obtained from environmental sample
  DOMAIN (2)...(115): Response regulator receiver domain
  misc_feature (1)..(153): Xaa is any amino acid
MAKILVVDDEEIMRDMVADSLELNGHRCTVAANPQIALEQISVVNPDLIISDYKMPGMTGLDLLKAVKKERPSQPFLMMTAFGSIEMAVEALQNGADHFIEKKDFEHAEIIEHAVAMVLEKYKYRMENSALKRRLCEKNFIGCSEKFLALNKL

SEQ ID NO: 4959 - DNA, 816 bp, Unknown
  Obtained from environmental sample
  misc_feature (1)..(816): n is a, c, g, or t
gtgaaggccgatgacgccaaggagatcgtctccgagcacattatcaaggggcgtcaggtccagaggctgctctacaagaggagcgacgagaagatccacacgaagatcgaggacatcgacttctaccagaagcaggtgcgcgtggtgctgcgcaactgcggattcatcgaccccgagaacatagacgagtacatagcacgcgacgggtacgtggcgctcgagaaggcgctattcgagatgaagcccgacgatgtcatcaaggagcttgaaatctccggattgcgcggtcggggcggcgcgggttttcccacgtttcgcaagtggttgttctccaagggcgttccgagcgaccaaaagttcatcgtctgcaacgccgatgagggcgatccgggcgcgtacatggaccgcagcacgcttgagggcgacccgcactcggtgctcgaggcgatgaccatagccgggcatacggtgggcgcgaatcaagggttcatctacatccgcgccgagtacccgctggccatccaccgactcgagatcgccatcaggcaggccaaggataacggtcttttgggtaacgacatcctcggaagcggttttaatttcgatatagagataaggctcggcgcgggcgctttcgtctgcggcgaggagacggcgctgttggcttccatagagggcaagcgcggtatgcccgttccccgcccgccgttcccggcggtcaaggggctttggggcaagcccaccgttatcaaacacgtggagacgtgngcgaatattcccgttatcataatgaagggcggcgcgtggttcgcctaa

SEQ ID NO: 4960 - protein, 271 aa, Unknown
  Obtained from environmental sample
  DOMAIN (68)...(271): Respiratory-chain NADH dehydrogenase 51 Kd subunit
  misc_feature (1)..(271): Xaa is any amino acid
MKADDAKEIVSEHIIKGRQVQRLLYKRSDEKIHTKIEDIDFYQKQVRVVLRNCGFIDPENIDEYIARDGYVALEKALFEMKPDDVIKELEISGLRGRGGAGFPTFRKWLFSKGVPSDQKFIVCNADEGDPGAYMDRSTLEGDPHSVLEAMTIAGHTVGANQGFIYIRAEYPLAIHRLEIAIRQAKDNGLLGNDILGSGFNFDIEIRLGAGAFVCGEETALLASIEGKRGMPVPRPPFPAVKGLWGKPTVIKHVETXANIPVIIMKGGAWFA

SEQ ID NO: 4961 - DNA, 810 bp, Unknown
  Obtained from environmental sample
  misc_feature (1)..(810): n is a, c, g, or t
atggttccggtagcgggcggcagtttttatatgggtgaaaaactgggtactggcagtggtagtgatgtaacaccggtacataaagtaatactggcaaacttttccataggcaagtatcaggtaacgcaggagcagtatgaggcggtgatgaaaagcaatccaagtagttttgacggaacaatggacaaggaacccgcagaaggtgaagttcagggggaacgcccggtggagaaggtaagttggtatgacgctttggtattctgcaacaaactgagtattgcggaaggcttaaaccccgcgtacagcatatcgggaaaaaccaatccttccgaatggggaagcgcgccgaatagcaataacacggaatggaacgcggtaataatcgttcccagttccaacggttaccgtttaccgacagaggcacaatgggagtatgcggcgaaaggcggcgatccagacgcggaaggctgggaagggtatacctatgcggggagcaataatgttggcgaggtcgcgtggtatggagataacagtgatcagaaaacccaccaagtagggaagaaggctcccaatggattggacttgtatgacatgagtgggaatgtgaatgaatggtgctgggactggtacgaaagctattcgagcgatacgcagaccgatcccacgggcgcatcctcggggactaaccgcgtgtttcgcggtggaagctgggacctcaatagttctttcgcgaccgtaaaccggaacaacaacaccccgtatttccggagcagtaatctgggcttccggctcgcgcgaccngcaccgtga

SEQ ID NO: 4962 - protein, 269 aa, Unknown
  Obtained from environmental sample
  DOMAIN (1)...(266): Domain of unknown function (DUF323)
  misc_feature (1)..(269): Xaa is any amino acid
MVPVAGGSFYMGEKLGTGSGSDVTPVHKVILANFSIGKYQVTQEQYEAVMKSNPSSFDGTMDKEPAEGEVQGERPVEKVSWYDALVFCNKLSIAEGLNPAYSISGKTNPSEWGSAPNSNNTEWNAVIIVPSSNGYRLPTEAQWEYAAKGGDPDAEGWEGYTYAGSNNVGEVAWYGDNSDQKTHQVGKKAPNGLDLYDMSGNVNEWCWDWYESYSSDTQTDPTGASSGTNRVFRGGSWDLNSSFATVNRNNNTPYFRSSNLGFRLARPAP

SEQ ID NO: 4963 - DNA, 771 bp, Unknown
  Obtained from environmental sample
  misc_feature (1)..(771): n is a, c, g, or t
atgatgggcgtgaatgataaaggagtgactatggacatggcagctaccgctctggtaacgggcgcttttcggggcataggcaaagcagtggcgcaatgtctcgcccgggacggcttgcaggtctatttgaccgatgtgagtccgccggaagaggcggccccggcgatcaaggaaattgaggaacagggcggcaaggttcgcgcgtttcgtctggatgtgagcgacacgaacgcggtgagcgactttttcgccgccgagatcaaaaacaaggtgcagctcgcggtgttggtgaacaacgccggcatcaccagggacggttttctcatccgtatgcaggacgcggattttgacagcgtgctggcggtaaacctgcggggcgccttcgcctgtctgcgtgaggccgcgaaaatcatgagcaagcagcgcagcggacgcatcatcaatatcagttccgtgagcgggcagatgggcaatgccgggcaggtcaactattctgcggccaaagccggcctgatcggcatgacgaagtcggcggcaaaggaattggccgtgcgcaacgtcaccgtcaatgccgtggcgcccggctttgttgaaaccggcatgacggcggtcttgtccgaagaagtccgcgccgcctatctggaacatattccgttaaaacgtctggggcaggtcgaggatatcgcggaagccgtggcctttctcgcttcggacagggcaagctacatcaccggccaggtgttggccgtaaacggcggcatgtattgctag

SEQ ID NO: 4964 - protein, 256 aa, Unknown
  Obtained from environmental sample
  DOMAIN (17)...(251): NAD dependent epimerase/dehydratase family
  misc_feature (1)..(256): Xaa is any amino acid
MMGVNDKGVTMDMAATALVTGAFRGIGKAVAQCLARDGLQVYLTDVSPPEEAAPAIKEIEEQGGKVRAFRLDVSDTNAVSDFFAAEIKNKVQLAVLVNNAGITRDGFLIRMQDADFDSVLAVNLRGAFACLREAAKIMSKQRSGRIINISSVSGQMGNAGQVNYSAAKAGLIGMTKSAAKELAVRNVTVNAVAPGFVETGMTAVLSEEVRAAYLEHIPLKRLGQVEDIAEAVAFLASDRASYITGQVLAVNGGMYC

SEQ ID NO: 4965 - DNA, 930 bp, Unknown
  Obtained from environmental sample
  misc_feature (1)..(930): n is a, c, g, or t
atgaaaactgagaatgtcctccccatagaacgtcacggttacgattttattcccgccgagtacctgcgccggggcgcggatgagtactggcggcggaacgcgcaacaacnagagttattttctaaaaataaagatagctggcggcggctgagacctcaagaaatagaagtactgagccaaaataaaaattactgcgctaagtgggatgactttttagtaaccgatccatttgatccttcgctaattcgcgattcaaatttttacggacttgtgcgcataggctctttacaaaatgttgtgcttaaacatcatgacttttgtattcccgcagggattcgtaacagtacaataatttcctgcgacattggcgatgacaccgcaatccagaattgcgcatttgtttgcaattatattattggaaacaactgtatcctctccgaagtcaatgaattgcagactaccaaccatgcaaaattcggtaacggcgcaataaaggatggcgaagatgaagaagtacgcgtctggatcgacgtgatgaacgaggccggcggacgttcaattttgccgttcgataaaatgatcgccgcggatgcgtatatttgggcggcgtaccgtgatgatacggcgttgaccgctaaattggcggagattacgcaaaaacaatacggaagtttacggggcagttatggggttatcgggtcaaatgcggtaattaaaagctgttcaattatcaaggatacggcggtgggggagtgcgcttacattaagggagcgaataaacttaaaaacattacgatacagtcgtccgccgaagagcctacgcagataggcgagggcgtggaaatggtgaacggcattgtgggatacgcctgtaacgctttctacggttccaaggcggtgcgttttgtcatgggcaggaacagtaactaa

SEQ ID NO: 4966 - protein, 309 aa, Unknown
  Obtained from environmental sample
  misc_feature (1)..(309): Xaa is any amino acid
MKTENVLPIERHGYDFIPAEYLRRGADEYWRRNAQQXELFSKNKDSWRRLRPQEIEVLSQNKNYCAKWDDFLVTDPFDPSLIRDSNFYGLVRIGSLQNVVLKHHDFCIPAGIRNSTIISCDIGDDTAIQNCAFVCNYIIGNNCILSEVNELQTTNHAKFGNGAIKDGEDEEVRVWIDVMNEAGGRSILPFDKMIAADAYIWAAYRDDTALTAKLAEITQKQYGSLRGSYGVIGSNAVIKSCSIIKDTAVGECAYIKGANKLKNITIQSSAEEPTQIGEGVEMVNGIVGYACNAFYGSKAVRFVMGRNSN

SEQ ID NO: 4967 - DNA, 915 bp, Unknown
  Obtained from environmental sample
  misc_feature (1)..(915): n is a, c, g, or t
atgaggccaaagaaaaagatttgcacggaaattttcaaacggtaccagaaagcaggtaaaaaagacaaaggcaggatacttgcggaatacgctccgctactcggatacaaccgtgattaccttgcatatcagctcacgaattgggggaaaaggcggtatgccctcgtggacgggaaattagtcaaatttaccgccaaaccggccctgcaaggtcgcaggaaggctcgacaagacaaaagaacagggaggccggaaaaatataatccggcttttgttgcagtcctacgcgacatctgggaactgttcgattttcaatgcgggaaactgttagcgcctctgctcaggggaatgatgagttttctggctatagagtttaatctcagcgaaacattacaggcgttgctcaaatccgtcagccccgcaaccattgaccgcaaactcaggaaagaaaaagagcggtatcgggtgaagggcatacacaccaccaagccgggcagcctcttgaaaagccagatcccggtgagggtctgtttccaccgggacgagagaaagcccggttattttgaacttgacaccgtcagccactgcggggcgcgggcttgcggccagttttgccaaaccctgaccgtcaccgacgtcggctcagggtggaccgaagtatgcgcccttttgaataacgcccaccgctgggtcaaggaacacattgtccatacccgcgatacgctgccgttccctatgctcggtattgacagcgacaacggcggcgagtttatcaaccaccagctccttgactggtgtatccagaacggcatcaagtttacccgaagccgcccgtaccggaaaaacgacaattgtttcgttgaacaaaaaaacggcgatgtcgtgcgaaaaacncgtcggatacgcccgttttga

SEQ ID NO: 4968 - protein, 304 aa, Unknown
  Obtained from environmental sample
  DOMAIN (180)...(304): Integrase core domain
  misc_feature (1)..(304): Xaa is any amino acid
MRPKKKICTEIFKRYQKAGKKDKGRILAEYAPLLGYNRDYLAYQLTNWGKRRYALVDGKLVKFTAKPALQGRRKARQDKRTGRPEKYNPAFVAVLRDIWELFDFQCGKLLAPLLRGMMSFLAIEFNLSETLQALLKSVSPATIDRKLRKEKERYRVKGIHTTKPGSLLKSQIPVRVCFHRDERKPGYFELDTVSHCGARACGQFCQTLTVTDVGSGWTEVCALLNNAHRWVKEHIVHTRDTLPFPMLGIDSDNGGEFINHQLLDWCIQNGIKFTRSRPYRKNDNCFVEQKNGDVVRKTRRIRPF

SEQ ID NO: 4969 - DNA, 843 bp, Unknown
  Obtained from environmental sample
  misc_feature (1)..(843): n is a, c, g, or t
atggtgagcgataacgatacgacatacgaccacagcgaacaatccgtaacggttgggtacacggacgtggcaatggatgccggcacagccggggaaattaccgtttactatgccggcgccgaagggacagtctatccggaaagcgaaaccgcgccggtgaacgcgggaacctatgacgtattagttacaacggcgggcggtaatctctatgccgcgcttgaagtaaaaacaccgctggagaagctgaccatacggcagaaaccggtaacgataaccggccttggcgtgatcaataaaacctacgacggcaacgtaacggcaacagtaagcggaacagcggcattagacggtgtagttgaaggtgatgatgtgaatgtcattgacggaaccgccacatttgccgacaaaaatacgggagcggacaaggccgttaccttcagcgggtatgcgctgacgggagctgacgcggacaattacagccttgtggcgcagcctgaaagtgtggcggcggctattacggcaaaacccgttaccataaccggcttattggtacagaacaagcaatacgacggcaacactacggcaacggtgagcggcacggcggcaatcagcggattgattagcgacgatacggtgacggtgaacgcgggaaccgccgcgtttaccgacaagaatgtgggaacaaacaaggccattacctttagcggctggtcgctggacggagcggacacggataattacagccttgtggcgcagcctgaaagtgtggcggcggctattacggcaaaatccgttaccattaccggcttattggtacaaaacaagcaatacgacggcacgtaa

SEQ ID NO: 4970 - protein, 280 aa, Unknown
  Obtained from environmental sample
  misc_feature (1)..(280): Xaa is any amino acid
MVSDNDTTYDHSEQSVTVGYTDVAMDAGTAGEITVYYAGAEGTVYPESETAPVNAGTYDVLVTTAGGNLYAALEVKTPLEKLTIRQKPVTITGLGVINKTYDGNVTATVSGTAALDGVVEGDDVNVIDGTATFADKNTGADKAVTFSGYALTGADADNYSLVAQPESVAAAITAKPVTITGLLVQNKQYDGNTTATVSGTAAISGLISDDTVTVNAGTAAFTDKNVGTNKAITFSGWSLDGADTDNYSLVAQPESVAAAITAKSVTITGLLVQNKQYDGT

SEQ ID NO: 4971 - DNA, 1002 bp, Unknown
  Obtained from environmental sample
  misc_feature (1)..(1002): n is a, c, g, or t
atggccgagggcttcgcacaatattttctcttgcgtggtcgcccaacggcaaggatatcgccgcttgactacatagacggcgacaggaggaaaatcggcatctacgacacgttacagaggagtttttccgtattcggcgacggtttggagtacgacaggcgcaacccgtcgttcaacaaggacggttcggcgctctacttctcctcggacgaaacaggaatattcaacgtctaccggtataagttcaagtcgggcaggttggaacggctgaccaacgtttccggcggcgcgtttcatccggcggtttccgcggacggtaaaaagctcgtctataccggctacgacagaaacgggtacggtatctacctcatcgatacgcttaaatcgctgcaggcgtctacggtggccgtcgccgacgcgataacggcgcgggtggggaaagagccggcgcattactccacgccgctctcaaaccgcctgaaatactcgcgaataccgaggcagacgctgtttgtccccacgcttatagcggagcagcttgtgaccgccgacgatgatgagttcaagggtgtcacgcacgttaaaggcggcgtggtggcgaacttcttggacccgcttgcgtggagcgatgtgggaaatgagctcggcgcgtttttgctggttgacttgaagagaatctttgagttcatcgatttggacaagggcctaatcagcccgcgagccagctacgacgccggtattttcggtacgtcgaaggccttgccgataacggttgatggcgaggctatggtgcgcggtatcgccggggatgattggttctacgatgaatctgagggtaagacgatggtgctgccctataggattcagttgactaacgccctattcggcgcgtcgcacctcantgtcgacgggatatacgggcacctctttttaggcatgaccgctacgacgtcgcgcttgacttgncggaatacaacgcgggcgtctttaccctacatctga

SEQ ID NO: 4972 - protein, 333 aa, Unknown
  Obtained from environmental sample
  DOMAIN (88)...(123): WD40-like Beta Propeller Repeat
  misc_feature (1)..(333): Xaa is any amino acid
MAEGFAQYFLLRGRPTARISPLDYIDGDRRKIGIYDTLQRSFSVFGDGLEYDRRNPSFNKDGSALYFSSDETGIFNVYRYKFKSGRLERLTNVSGGAFHPAVSADGKKLVYTGYDRNGYGIYLIDTLKSLQASTVAVADAITARVGKEPAHYSTPLSNRLKYSRIPRQTLFVPTLIAEQLVTADDDEFKGVTHVKGGVVANFLDPLAWSDVGNELGAFLLVDLKRIFEFIDLDKGLISPRASYDAGIFGTSKALPITVDGEAMVRGIAGDDWFYDESEGKTMVLPYRIQLTNALFGASHLXVDGIYGHLFLGMTATTSRLTXRNTTRASLPYI

SEQ ID NO: 4973 - DNA, 309 bp, Unknown
  Obtained from environmental sample
  misc_feature (1)..(309): n is a, c, g, or t
ttgcaagcacagcaaatagaaacccgcgaaggtgcccaaagagccatagataggcttcaggaaaccataaagattacaagcagcaaccgtgcagccataggtacatacataaatcgccttgactacacaatcaacaacattgcatctatggagtacaacatccaagatgcagagagccgcattcgcgacaccgactttgcgaaggagaccacggacttcaccaggaatcagattatggtgcaagccgctacgagcatgttgtcgcaggcgaatagcttgccgcaatcggttctagggttgataggataa

SEQ ID NO: 4974 - protein, 102 aa, Unknown
  Obtained from environmental sample
  DOMAIN (9)...(80): Bacterial flagellin C-terminus
  misc_feature (1)..(102): Xaa is any amino acid
MQAQQIETREGAQRAIDRLQETIKITSSNRAAIGTYINRLDYTINNIASMEYNIQDAESRIRDTDFAKETTDFTRNQIMVQAATSMLSQANSLPQSVLGLIG

SEQ ID NO: 4975 - DNA, 315 bp, Unknown
  Obtained from environmental sample
  misc_feature (1)..(315): n is a, c, g, or t
gtggagggctgcgtcccttatcatagccaccgaagacggctccgagggggtaagggacgcatcctggacttttnttcgccgatggggtacagcggcgtgttgcnntgcggccccgagccgatgcttcgggaggtagccgacagaagcgttgcgtgcggagtcccatgctttataagcaccgaaaggcacatggcctgcggggtaggagcctgtcttggatgtaaaataagaaccactggcggaagccggcgttgctgcgccgacggcccgatattctctggcgaggagatctgctttgaaagcaaaagaacctga

SEQ ID NO: 4976 - protein, 104 aa, Unknown
  Obtained from environmental sample
  misc_feature (1)..(104): Xaa is any amino acid
MEGCVPYHSHRRRLRGGKGRILDFXSPMGYSGVLXCGPEPMLREVADRSVACGVPCFISTERHMACGVGACLGCKIRTTGGSRRCCADGPIFSGEEICFESKRT

SEQ ID NO: 4977 - DNA, 333 bp, Unknown
  Obtained from environmental sample
  misc_feature (1)..(333): n is a, c, g, or t
atgccgcagtggatagccagagagtacctggcccgccgcggcgcggccaagttccgcnccgaacagctggtcccggccagatgcccgctcctagggtacgccttcgcgacgatgcaggtagagggtacgcacctccagcacgacttcctgagggtagacgaacagcccgacgtgggtcaagacggctacgacgccggggcgaagatactgaaaacgttcttcgacgaggagctgaagaagttcctggtgccggaactgaacaaggtcggacggaagatcatcgagtgctgcttggacaacgggacggtgaaggactatgaggcgctgttatga

SEQ ID NO: 4978 - protein, 110 aa, Unknown
  Obtained from environmental sample
  misc_feature (1)..(110): Xaa is any amino acid
MPQWIAREYLARRGAAKFRXEQLVPARCPLLGYAFATMQVEGTHLQHDFLRVDEQPDVGQDGYDAGAKILKTFFDEELKKFLVPELNKVGRKIIECCLDNGTVKDYEALL

SEQ ID NO: 4979 - DNA, 492 bp, Unknown
  Obtained from environmental sample
  misc_feature (1)..(492): n is a, c, g, or t
ttggctttttggggcaggtcaaacctcaagcggataatggttaccgttatcggagcgggcagcacggcaagggctgttgtgtcggagctgcaccggctgggcgcaaagaccctgatcctgaacaggaccgtccacaaggcccgtaatctcgcctccgcctataaatttgcctggggcggcctggacaaccgcggcattgacatgatggacaaatactgtgatattattatacaagctacccctgcagggatggaagaaaatgattccggcgatcctgtagcaatgtatagattctgtgggcgggaagatgtgatggatctgacttatctgccggaaaagacggctttccttaaaagggctgccgatgagggttgtcgggtacagaacggttatgatatgtttatcagaaaagcccagtaccagtatgccttatttacaggaagagaatttccggaatacctgatggcgcggcttcagatggacagtgattaa

SEQ ID NO: 4980 - protein, 163 aa, Unknown
  Obtained from environmental sample
  SIGNAL (1)...(25)
  DOMAIN (5)...(117): Shikimate / quinate 5-dehydrogenase
  misc_feature (1)..(163): Xaa is any amino acid
MAFWGRSNLKRIMVTVIGAGSTARAVVSELHRLGAKTLILNRTVHKARNLASAYKFAWGGLDNRGIDMMDKYCDIIIQATPAGMEENDSGDPVAMYRFCGREDVMDLTYLPEKTAFLKRAADEGCRVQNGYDMFIRKAQYQYALFTGREFPEYLMARLQMDSD

SEQ ID NO: 4981 - DNA, 402 bp, Unknown
  Obtained from environmental sample
  misc_feature (1)..(402): n is a, c, g, or t
atgggctatgttccccacgccttccttgatgaaaccaccgacggcatntttgtcggcgcgccttcatggtatcttgttaacgcaaagtccaaaaatgttgaggaagccaggaaattcctcattgctatggcaggcactctggatggtcataactacatggtgactaatgccggcatggttcccgccttcaaatcctgtacgctgagacccgcaggacagttttcaagagccgttcaggaatggtccaaccagggcaagatatacgcgtggcagcagaatgaaatgcccgacggttttggcatgaataccctgggcccgattttccatcagatggcttcggggcagattgacccgcagggatttgtaagactggctgccggggcggtcagcgctatcaaatga

SEQ ID NO: 4982 - protein, 133 aa, Unknown
  Obtained from environmental sample
  misc_feature (1)..(133): Xaa is any amino acid
MGYVPHAFLDETTDGXFVGAPSWYLVNAKSKNVEEARKFLIAMAGTLDGHNYMVTNAGMVPAFKSCTLRPAGQFSRAVQEWSNQGKIYAWQQNEMPDGFGMNTLGPIFHQMASGQIDPQGFVRLAAGAVSAIK

SEQ ID NO: 4983 - DNA, 342 bp, Unknown
  Obtained from environmental sample
  misc_feature (1)..(342): n is a, c, g, or t
atggtaaaacagggtgatattatttggctggattttgatccgcagaccggtcatgaacaaaaaggcaggcggccagctctggtaataagcaatgaaacctttaacaatttttcaagtttggctattgtttgtccaattacaaatacgcgcaagaatcatccttttcatgtaaaattggataaaagaacaaaaacaacaggagttgttttgtctgaccaatcaagaacgttggatattaaagcgcgtaactttgaatttatcgaaaaaatcccggatgatattttatttgaagttatagatattattagcggttttattgaaggagagcccaatgctcgataa

SEQ ID NO: 4984 - protein, 113 aa, Unknown
  Obtained from environmental sample
  DOMAIN (3)...(107): PemK-like protein
  misc_feature (1)..(113): Xaa is any amino acid
MVKQGDIIWLDFDPQTGHEQKGRRPALVISNETFNNFSSLAIVCPITNTRKNHPFHVKLDKRTKTTGVVLSDQSRTLDIKARNFEFIEKIPDDILFEVIDIISGFIEGEPNAR

SEQ ID NO: 4985 - DNA, 795 bp, Unknown
  Obtained from environmental sample
  misc_feature (1)..(795): n is a, c, g, or t
ttgtggcggggagtgagcctatcttttgactttgactttaaaccgaaagaatatttaatgatcatagacggaattgacgtgcggatagaccgcaaaaaaatcaaaaatatgcacttatacgtaaaaccgcccgacggcatagtctcggtatccgctccgatgcgcataagcaatatcgcgatagaacgctttgtccgctcaaagatcgactgggtaaaaaaacaacaagaacatttcgcgcaacaaccccgccagtctccaaggcaatacgtctccggagaaacgctctacctctggggcaaacagtacttcctgcaagtcgattacgccggcagatattcgctgacgctctccggcaactccgctttgcttacagtccgccccaacagcaccacagcgcaacgcgaaaacttcgtccgcgaatggtaccgcgcccaactaaaagaagagataacccgcaccctccccaaatgggaaaccgcaaccggcctgaaatgcaactcgtggcacaccaaatacatgacaagcaaatggggaacgtgcaacatctccaaacgaaagatatggctgaacctccaactagcccaaaaaccgatggagtgcctagaatacataattctgcacgaactggcccacctgaaaataagaaaccacaacgccgccttcgcggcgtttctggacaaacatatgccgttttggagagaggtcaagaagaggctgaacgggcagacgctggattgctgggagggtacagggggtcgggaggatgaacaggtagggcagacgggggcgtga

SEQ ID NO: 4986 - protein, 264 aa, Unknown
  Obtained from environmental sample
  DOMAIN (37)...(243): Protein of unknown function DUF45
  misc_feature (1)..(264): Xaa is any amino acid
MWRGVSLSFDFDFKPKEYLMIIDGIDVRIDRKKIKNMHLYVKPPDGIVSVSAPMRISNIAIERFVRSKIDWVKKQQEHFAQQPRQSPRQYVSGETLYLWGKQYFLQVDYAGRYSLTLSGNSALLTVRPNSTTAQRENFVREWYRAQLKEEITRTLPKWETATGLKCNSWHTKYMTSKWGTCNISKRKIWLNLQLAQKPMECLEYIILHELAHLKIRNHNAAFAAFLDKHMPFWREVKKRLNGQTLDCWEGTGGREDEQVGQTGA

SEQ ID NO: 4987 - DNA, 648 bp, Unknown
  Obtained from environmental sample
  misc_feature (1)..(648): n is a, c, g, or t
atgaatagactcactataagacggttgcgcggacgcaccctattgatgacggcggcgacagtgatggcggcttgcgccgcatactgcgcggaacccgcgggaaaatctgaccccggaacactaatcgacaagaggaacggcaaaacgtacaagacgacaatgatcggcggcaagcggtggatggcggaaaacctgaattataaaaccggcaacagccaatgctacgccaacaatgactccaactgcgacaaatacggcagactgtacgaccataacacagcgaaaaaagcctgccccgccggctggcacctgccctctccccaagaatggcacgacttagccgcagccgtaggcgatgtggacgttcaaggcaaaaagctaaaatccaaaaccggctggaatcggaacaccgaagacggcaaagacggcaacggaacagacgattacggtttctcagccctacccggcggccaccgcgcccccaacggcaccttcaacgacgccggcaacttcggcagctggtggaccacaaacctaagctgcagcctagcatacaacagagacatctactacggcggcttcggctacttcggcgccggggacgggatgagatacgggtattcggttcggtgtgttcaagacgaatga

SEQ ID NO: 4988 - protein, 215 aa, Unknown
  Obtained from environmental sample
  SIGNAL (1)...(26)
  misc_feature (1)..(215): Xaa is any amino acid
MNRLTIRRLRGRTLLMTAATVMAACAAYCAEPAGKSDPGTLIDKRNGKTYKTTMIGGKRWMAENLNYKTGNSQCYANNDSNCDKYGRLYDHNTAKKACPAGWHLPSPQEWHDLAAAVGDVDVQGKKLKSKTGWNRNTEDGKDGNGTDDYGFSALPGGHRAPNGTFNDAGNFGSWWTTNLSCSLAYNRDIYYGGFGYFGAGDGMRYGYSVRCVQDE

SEQ ID NO: 4989 - DNA, 561 bp, Unknown
  Obtained from environmental sample
  misc_feature (1)..(561): n is a, c, g, or t
ttggcgctggccgcgatattggccagtccggggaatgtcctactgttggacgaaccgacgaaccacttagacatcgcgtcgatagagatgctgtcggaatctatggcctcttacgccgggacaatactgttcgtatcccacgacgaatattttatatcacgcttagccacacgcataatagaggtaaggccgatgcgcctgagagattttccgggaaaattggctgattacagatactacgttgacaaactattcaaggaacaaaacgatggcgatacggcaaacaagaaaagcaaatcagcgtcgcccgacgttgttgacgaaaaggaaataagaatcaaggagcgagaagagagaaaaaaacgagaacgcgagacatcaaagttagaacaggagatagcgaagaaagaggcgcagattgcggaacaagagtctatactgaacacgcctgacaacgcgttgaattacgaattgctgcactcgacatcggtggcgataggcgtattaaagagggagttggacgggttgatggagagatgggtagaagtagggtcattatga

SEQ ID NO: 4990 - protein, 186 aa, Unknown
  Obtained from environmental sample
  misc_feature (1)..(186): Xaa is any amino acid
MALAAILASPGNVLLLDEPTNHLDIASIEMLSESMASYAGTILFVSHDEYFISRLATRIIEVRPMRLRDFPGKLADYRYYVDKLFKEQNDGDTANKKSKSASPDVVDEKEIRIKEREERKKRERETSKLEQEIAKKEAQIAEQESILNTPDNALNYELLHSTSVAIGVLKRELDGLMERWVEVGSL

SEQ ID NO: 4991 - DNA, 573 bp, Unknown
  Obtained from environmental sample
  misc_feature (1)..(573): n is a, c, g, or t
atggaactagacgccgaaaaggccgcgctgcggaaacagttgaagaagctgcggaatgggcttcccgaagaaaagagggcggagtggtctaagctaacatgcagcaacattgagaaatactgcgtgagcaagcgcatacgcaaggtggcggcattctggccgcttggctcggaggttgaccttaggcccttggtgtcatctcagtcaagttgggtattcgtatttccaagggtggtttcaacgcaccctccgcgattggcctgggggccagagccgctggaacctggcttatttggcctgatggagccagtgatggcgcagcactttttcccgccgtcgcaactgctgctggtgcctgggctgggcttcaacggcaacggtttccgcatcggctacggcggcggtttttatgacgcgctgctggacagggcgggggatggcttgattacgcttggcgtggcttatgaagcccagatggttccagaattgcccattggccctttagaccagccaacgcagggcgtggtaacggagagggggattagatggatgagggatgaagagaaggactaa

SEQ ID NO: 4992 - protein, 190 aa, Unknown
  Obtained from environmental sample
  DOMAIN (7)...(178): 5-formyltetrahydrofolate cyclo-ligase family
  misc_feature (1)..(190): Xaa is any amino acid
MELDAEKAALRKQLKKLRNGLPEEKRAEWSKLTCSNIEKYCVSKRIRKVAAFWPLGSEVDLRPLVSSQSSWVFVFPRVVSTHPPRLAWGPEPLEPGLFGLMEPVMAQHFFPPSQLLLVPGLGFNGNGFRIGYGGGFYDALLDRAGDGLITLGVAYEAQMVPELPIGPLDQPTQGVVTERGIRWMRDEEKD

SEQ ID NO: 4993 - DNA, 882 bp, Unknown
  Obtained from environmental sample
  misc_feature (1)..(882): n is a, c, g, or t
ttgtcggacgcggtaacccgttccattagccctgaaaatttaaagggtgaaaaaggaaaaggcggaatgtgtgagcttgaaaacggctcatcaaaaaactccgcgcgggaacttgggaaaggctggaaggttaatcctttcatcgttattaaaccgcatgaaactgtcgagattgccaatattgaggggagcggcgctatccagcatatatggatgacacccacaggaaaatggcgcaataccatcatacgtttttattgggacggacagagccagccgtcggtcgagtgtccggtgggtgattttttctgttcgggctggcagtgttataatcaaatttcttccctggctgtctgcgtaaacccgggaagcgccttcaactgttattggaatatgccctttcataaaaactgccgcgtcactctggagaaccgctctgacgagggtgtgacatattattatcaaattacctatactcttgcgcagataccccaggagtgcgcttattttcacgctcaatttcgcagggtaaatccccttccatataagtcggtttatacgattctggagaacgtaaagggaaaggggcagtatgtgggaacttacctggcctggggagtgaataacaacggttggtggggcgaaggtgaaattaaattttatatggacggcgataatgaatatcccaccatctgcggcacgggaaccgaagattatttctgcggctcctataattttgaagatccgtataatcacaaccgttacgtttcattttcaacgccttatacgggttttcaggaaataaagcgtgatgaactctacgcctgtcaaaaacgattcaatatgtaccgctggcacataagcgatcccatccgtttttga

SEQ ID NO: 4994 - protein, 293 aa, Unknown
  Obtained from environmental sample
  misc_feature (1)..(293): Xaa is any amino acid
MSDAVTRSISPENLKGEKGKGGMCELENGSSKNSARELGKGWKVNPFIVIKPHETVEIANIEGSGAIQHIWMTPTGKWRNTIIRFYWDGQSQPSVECPVGDFFCSGWQCYNQISSLAVCVNPGSAFNCYWNMPFHKNCRVTLENRSDEGVTYYYQITYTLAQIPQECAYFHAQFRRVNPLPYKSVYTILENVKGKGQYVGTYLAWGVNNNGWWGEGEIKFYMDGDNEYPTICGTGTEDYFCGSYNFEDPYNHNRYVSFSTPYTGFQEIKRDELYACQKRFNMYRWHISDPIRF

SEQ ID NO: 4995 - DNA, 765 bp, Unknown
  Obtained from environmental sample
  misc_feature (1)..(765): n is a, c, g, or t
atgatcaaagagtattatccccaatataaaaaccacaaagtagcggtaatttccccctgcatcgccaaacggcgagagtatgacgaaacaggcatgggcgattacaacgttacaatggttgaattaaaaaatcttctggacagtcagaaaataaacctctcctcatttccaaaagtagaatatacaggagtaagcgcagaacgtgcggttggctttccaattcccggcggtcttttggatacagccgaacgttttgaaccggggattagacggaacaccgaaaagattgaaggagtatttgccatctatccttatttgaaagaaatctccgaaatattgaacacagacgatgaattgccgctgttgatagactgcctgaattgcgaaaaaggctgccttggcggccccggcacggggaacgccgaaaaaccgctggctgaacttaaagcccctgtacgaaaacgcatgactaagcttgaaaaagagcataatcccaaaaaagcaaaaagcgcatacaaaaaataccacgacgttttgaaaaagtactggaaaaaaggtctgtataaccggagctatcgtaatctttcagaaaacaatacaatcaaacatccagacgaggctgaaataactaaaatcttccgcagtatgaaaaaattcggaaaggaagatatatacaactgtacctgctgcggttacggaagctgcaaagcgatggcaacggctatttacaacaacctgaacaaacctgaaaattgcgcccattaa

SEQ ID NO: 4996 - protein, 254 aa, Unknown
  Obtained from environmental sample
  misc_feature (1)..(254): Xaa is any amino acid
MIKEYYPQYKNHKVAVISPCIAKRREYDETGMGDYNVTMVELKNLLDSQKINLSSFPKVEYTGVSAERAVGFPIPGGLLDTAERFEPGIRRNTEKIEGVFAIYPYLKEISEILNTDDELPLLIDCLNCEKGCLGGPGTGNAEKPLAELKAPVRKRMTKLEKEHNPKKAKSAYKKYHDVLKKYWKKGLYNRSYRNLSENNTIKHPDEAEITKIFRSMKKFGKEDIYNCTCCGYGSCKAMATAIYNNLNKPENCAH

SEQ ID NO: 4997 - DNA, 708 bp, Unknown
  Obtained from environmental sample
  misc_feature (1)..(708): n is a, c, g, or t
atggtattgcagactattctatacggcgattccaaaagtttaaaagtaggacagaaagttttagcgataggcaaccctttcgcgcttgagcgcacattaacagtcgggattgtttcaggccttggacggcctattcaaatatccaataaccgcataatccgcgacatgattcaaactgacgcttctattaaccccggcaattcaggcggtccgttacttgatactcagggcaagatggtagggattaacacaatgatttattccccgtcaggtggttctgtcggcattggttttgccgtcccggtcaataccgccatgcgcgtcgtgaacgaacttatccaatacggaaaagtccgccgcggctggatagacgcaaccgtcgttcagcttttcccaagccttgtacgttacgcgaaattatccgtggacgcggggcttcttgtttcccgcaccaaaaagagcggtcttgcggaaagagccggtttgcggcagggcagcgagcctgttcagtacggacgcagcgtgatttaccttggcggggacataatcacttccgtaaacgggttaaaaacaaaaaccctcgcagacctttacgcgtctttagaggcaagcaagcccggcgatgttgtaaaggtggaaataatgcgcggggggcagacgagtattttgcagataacgctggcggatagggaagaagtgatgaattag

SEQ ID NO: 4998 - protein, 235 aa, Unknown
  Obtained from environmental sample
  misc_feature (1)..(235): Xaa is any amino acid
MVLQTILYGDSKSLKVGQKVLAIGNPFALERTLTVGIVSGLGRPIQISNNRIIRDMIQTDASINPGNSGGPLLDTQGKMVGINTMIYSPSGGSVGIGFAVPVNTAMRVVNELIQYGKVRRGWIDATVVQLFPSLVRYAKLSVDAGLLVSRTKKSGLAERAGLRQGSEPVQYGRSVIYLGGDIITSVNGLKTKTLADLYASLEASKPGDVVKVEIMRGGQTSILQITLADREEVMN

SEQ ID NO: 4999 - DNA, 477 bp, Unknown
  Obtained from environmental sample
  misc_feature (1)..(477): n is a, c, g, or t
atgacaagacactggttttttcccgtaatgggaaaccatgaaaatatgtttttaatggggcacttggactttccgggacgaaagagatatatcgaagcccacattaaaaacggcggagcgtgggcatacgaaaaactggacgcagagaagggaaacgccctgttagaagccatagacaaccttcctttaattattaaggttgacgacacgattatcgtccacgccgcccttcccgcagtagagagtttggaagaaatagaagaaaacccgaccgtataccttgaaacggcgttatggcacagagaggagtatccacccgtccttattccgggcataaaccgtgtattcgtcggtcattccgttgtcgataaaccgactcggtacgacaaagtaattaacattgacactggaattaacaggatatacaggaacaagcagggagcgttaacggttatggagatcggggggcaaatataa

SEQ ID NO: 5000 - protein, 158 aa, Unknown
  Obtained from environmental sample
  misc_feature (1)..(158): Xaa is any amino acid
MTRHWFFPVMGNHENMFLMGHLDFPGRKRYIEAHIKNGGAWAYEKLDAEKGNALLEAIDNLPLIIKVDDTIIVHAALPAVESLEEIEENPTVYLETALWHREEYPPVLIPGINRVFVGHSVVDKPTRYDKVINIDTGINRIYRNKQGALTVMEIGGQI

SEQ ID NO: 5001 - DNA, 747 bp, Unknown
  Obtained from environmental sample
  misc_feature (1)..(747): n is a, c, g, or t
atgaacaatgtaagccgcccccttgtccgttatcacggatcgaaatggaagatcgccccgtggattatctcacttattccgaaacaccgtaggtatgtagaaccctacggggggggggcagccgtgctgttgcttaaaccccgttcacatgaagaactttacaacgacatcgacagcgacattgtaaacctgttcagggtaacaagggacagcggcgaccaattaaaacgccggattgaaagcaccccgtttgcaagggaggaatatttacaggcgtataagccgaccgacgacccgatagaacaggcaaggcggacggttatacgggctttcatgggcagggcgaacaccggggcaacgggaaaaatcaccgacagcggatcgaccgtaaccggtttccgatcaagttctcacggctgcggaaagacggcggcgaaggtctgggcttcgtactcggacgctttcaacgctcttattgaacgcctgaagggtgttgtcatcgaaaacagggacgcattagaaataattgaactacacgattcagatacgacgcttttttatattgacccgccttatgttttttcgacaagggacaccggcactgattatcgttatgagatgaccgaccaagaacacattgagttggcaaaaaaattagcgaagcaaaaggaatggtcctggtatctggttatcacagcgatttataccacgatctttataaaggttggactgtcaaagaaaaaataa

SEQ ID NO: 5002 - protein, 248 aa, Unknown
  Obtained from environmental sample
  DOMAIN (11)...(247): D12 class N6 adenine-specific DNA methyltransferase
  misc_feature (1)..(248): Xaa is any amino acid
MNNVSRPLVRYHGSKWKIAPWIISLIPKHRRYVEPYGGGAAVLLLKPRSHEELYNDIDSDIVNLFRVTRDSGDQLKRRIESTPFAREEYLQAYKPTDDPIEQARRTVIRAFMGRANTGATGKITDSGSTVTGFRSSSHGCGKTAAKVWASYSDAFNALIERLKGVVIENRDALEIIELHDSDTTLFYIDPPYVFSTRDTGTDYRYEMTDQEHIELAKKLAKQKEWSWYLVITAIYTTIFIKVGLSKKK

SEQ ID NO: 5003 - DNA, 612 bp, Unknown
  Obtained from environmental sample
  misc_feature (1)..(612): n is a, c, g, or t
atgaaaaaagtttattcagatcaaacaaggaagaatggattacaacttatatctgcctcagataaaggtgatattaaaaccgtggaatcattacttaaagaagatatttatatccatgcgcaggacaaagaaggcaagtgcgctcttgtagctgccgcttataggaaccatctcgaaattgtcgatttgctgattgccgccggagcggatgtcaatatgaaagacaataccctgcaaagcgcttatttgatttcaacttctgaaggatatacagaactgctgaaaaaaacactcaaagccggagcggatgttcactgtacggacagttacaacggaacaggccttatccgggctgccgaccgcggacatgttgaaataataagagaacttttaaagacagatattcgtgttaatcatattaacaagctggggtggactgcattacttgaagcaatcatactgggtgacggagggaaacggcatactgaggttgtgcgtatgctggttgatgccggcgctgatgtaaacttgcctgacaaagacggagtcacaccgttgtcgcatgccaaaagcaaaaaatttaccgacattattaaaattctggaaaattaa

SEQ ID NO: 5004 - protein, 203 aa, Unknown
  Obtained from environmental sample
  DOMAIN (44)...(76): Ankyrin repeat
  misc_feature (1)..(203): Xaa is any amino acid
MKKVYSDQTRKNGLQLISASDKGDIKTVESLLKEDIYIHAQDKEGKCALVAAAYRNHLEIVDLLIAAGADVNMKDNTLQSAYLISTSEGYTELLKKTLKAGADVHCTDSYNGTGLIRAADRGHVEIIRELLKTDIRVNHINKLGWTALLEAIILGDGGKRHTEVVRMLVDAGADVNLPDKDGVTPLSHAKSKKFTDIIKILEN

SEQ ID NO: 5005 - DNA, 762 bp, Unknown
  Obtained from environmental sample
  misc_feature (1)..(762): n is a, c, g, or t
ttgctggatgttactccttccgccgggaggattgtatcacaggaaattgattcagaaacaggagcgcaaaaaattgttttatccaacggagtaaatgtaatacttaaagagactgcaaacagaaataacgaaattgttttttacgctatggcaaagggcggaaccgtgaacgcgaaacaggatacgattttttcagttagtttggcttctgaaatgattaatgtatcggggcttggaccgtattcgcgcgtcgaattaataagaaaattgaccggaaaacaagtgtcgttttcattctggatttcaaactattaccgcggctttcagggttcgtccgcagcgcaggatttaaaaacattttttgaaatgctttatcttttttttacaatgccttcggcggacgaaagagcgattgccgcgatgcttgatcattacaggacaagtcttgcgcatgtcgaagatgatccgcaaggagttttttcacgggaattgagcagaatagtcagcggcaatcatcctctttttactcctcttgagcttgatgatatgaataaaatttcgatagagcaggcttttgattttgttggcaattgcataaaccctgctgattacacttttatatttaccggaaacatcaatacggaaacaatgctcgaatatttggcagtttaccttgcctncataccaaatgcggcttcgatggacgcatgggttgatcccggaaataagcgtccgaaagaaagtgagcatataattttataa

SEQ ID NO: 5006 - protein, 253 aa, Unknown
  Obtained from environmental sample
  misc_feature (1)..(253): Xaa is any amino acid
MLDVTPSAGRIVSQEIDSETGAQKIVLSNGVNVILKETANRNNEIVFYAMAKGGTVNAKQDTIFSVSLASEMINVSGLGPYSRVELIRKLTGKQVSFSFWISNYYRGFQGSSAAQDLKTFFEMLYLFFTMPSADERAIAAMLDHYRTSLAHVEDDPQGVFSRELSRIVSGNHPLFTPLELDDMNKISIEQAFDFVGNCINPADYTFIFTGNINTETMLEYLAVYLAXIPNAASMDAWVDPGNKRPKESEHIIL

SEQ ID NO: 5007 - DNA, 891 bp, Unknown
  Obtained from environmental sample
  misc_feature (1)..(891): n is a, c, g, or t
ttgcggcagtgtgtctgcctcggacaggcttattcagacccggtacaatttgacagcatatctttgaaataccccgttatattagtgcatggaatcgccctgcgtgacacggagtttgtcgtaacctcctggggcagaatcccggatgtattgagagaatacggcgtggaagtatattttggaaatacggacgcgtggggttccattgaatcaaacgcggatataataaaaaaaacggtggacgcggtattgaaagaaaccgggaaagaaaaggttaatataatagcgcattccaaaggcggcctggattcccgtatgatgatatggaaatataattacggtgacagggtagcaagccttactacggtatcaacgccgcatcatggttcaatggtagcggattttgttcaaagcgcgaaacccctccataccaaagccgccaaaagaagtcttgagattttgggtaaaatatataacgacatgaatcccaatgcttatattgcaagctatgaattaacaaccgaaaatatgaaagaatttaacaaaaatgtaataatggatgacagggtatacgttcaaagtatttattcgacaatgaacaatgccgcagatgacccgatctttgccagcagttttttatatttaaaaagggtagagggtgataacgacggtctggtgagtgaatattccgcaaaatggggaaaaaatgttaataaggtagacggcgcgctatcccatggacaaattatcgatgttacgggaagaagccagtttgaaataggaatttctaatggacagcctcttgagcctgtgaagagaggctggaatgaagtggggattcccaatatctatctgaaaatcgcgaaagatttaagtcgtagaggattctga

SEQ ID NO: 5008 - protein, 296 aa, Unknown
  Obtained from environmental sample
  misc_feature (1)..(296): Xaa is any amino acid
MRQCVCLGQAYSDPVQFDSISLKYPVILVHGIALRDTEFVVTSWGRIPDVLREYGVEVYFGNTDAWGSIESNADIIKKTVDAVLKETGKEKVNIIAHSKGGLDSRMMIWKYNYGDRVASLTTVSTPHHGSMVADFVQSAKPLHTKAAKRSLEILGKIYNDMNPNAYIASYELTTENMKEFNKNVIMDDRVYVQSIYSTMNNAADDPIFASSFLYLKRVEGDNDGLVSEYSAKWGKNVNKVDGALSHGQIIDVTGRSQFEIGISNGQPLEPVKRGWNEVGIPNIYLKIAKDLSRRGF

SEQ ID NO: 5009 - DNA, 960 bp, Unknown
  Obtained from environmental sample
  misc_feature (1)..(960): n is a, c, g, or t
ttgcagatcatgccgcagtttatgcggttctcaaaggtcaagtgcgctgacaaatcgcgcancctgattctcgtcgcgacctccggcgataccggcaaggcggcgctggaagggttcaaaaatcgggaggggatattgatcgcggtcttctaccctcacggcggcgtcagcgagatacaaaggttgcagatggccacgacggatggaaacaatacgcacgtcttcgcggcgcgggggaacttcgacgactgccagaacggcgttaaggcgttgttcggggatagcgggctgagggataaagcggcggaacacggggtgaaattctcatccgccaattctatcaactgggggcgcctctgtccgcagatcgtctactatgttaagtcatatcttgatttggtatcaacaagcgtaatatcttacggtgataaaattgatttctgcgttcccaccggcaacttcggcaacatcctagccggttactacgctaaagagatggggctgccgattcgtaaattaatctgcgcgtctaataaaaataatgtgttgacggacttcttcaagagcggcgagtacagcataaaagggcgcgaattccacaagacgatgtcgccgtctatggatatattaatatcatcaaatctagagagatttttgttcgagatgtccgagagggatgccgggaaggttgacggttggtatgattggttgaccaagatgggaaaattttctgtcgataaggatataatggaaaggatgaggggcgtgatagaggcgcgctgggtggatgaggatgaggcgttgaagacgataggggaggtttatcacgagagcaagtacgtaatggacacccacacggctgtagccgcggcggcggtcggcggtgtcaatagtgatagggataacgacgttccggtgataataacttcaagcggcaagcccctcgtgccgaaatgctga

SEQ ID NO: 5010 - protein, 319 aa, Unknown
  Obtained from environmental sample
  DOMAIN (1)...(311): Pyridoxal-phosphate dependent enzyme
  misc_feature (1)..(319): Xaa is any amino acid
MQIMPQFMRFSKVKCADKSRXLILVATSGDTGKAALEGFKNREGILIAVFYPHGGVSEIQRLQMATTDGNNTHVFAARGNFDDCQNGVKALFGDSGLRDKAAEHGVKFSSANSINWGRLCPQIVYYVKSYLDLVSTSVISYGDKIDFCVPTGNFGNILAGYYAKEMGLPIRKLICASNKNNVLTDFFKSGEYSIKGREFHKTMSPSMDILISSNLERFLFEMSERDAGKVDGWYDWLTKMGKFSVDKDIMERMRGVIEARWVDEDEALKTIGEVYHESKYVMDTHTAVAAAAVGGVNSDRDNDVPVIITSSGKPLVPKC

SEQ ID NO: 5011 - DNA, 771 bp, Unknown
  Obtained from environmental sample
  misc_feature (1)..(771): n is a, c, g, or t
ttgtngggctggtctttccatatctatataccgcataaacttttatatggatacgagagcggacgctcaggtgaagtgaatgttggagacggaacataccttaatataagggctttttactatgcctatgcggattaccgcggggcattcagggacaacccctttattctaagagtgtcgcaggaaacaaacagacccttgccgccgggagcttatatacaggaaacggttaacacttttacacagatcgcaaaagataacgccagcgccgtaagaaacccggaggatatggtaggcaagatcaccggaattctggaaaaggaaaggggcaaaaacgttgacatcgcggtctgtcttgatgttacaggttccatggacccttatttcgacgcgatacgcacgcggttaatccccatgttaaaggatatgtctgccgggtttagatcattcagaataggcatggttttttacaaggattactttgatgaattcattaacaaggtttttccttttaccaacgactttgacgcgcttcagaagagtattagcagcgtgagggtaggcggagggggggatatacccgaagcggtttacgaggcgctctatgccggggctacaaagctgtcatgggaagcggataaaagaatcatgctcctgataggcgacgctccgccccatccgcgtccaagaggagccataacaaagcaaatggtagacagggaagcggccaaccggggaatcgagctgcacgcgatgattcttccgcagtaa

SEQ ID NO: 5012 - protein, 256 aa, Unknown
  Obtained from environmental sample
  misc_feature (1)..(256): Xaa is any amino acid
MXGWSFHIYIPHKLLYGYESGRSGEVNVGDGTYLNIRAFYYAYADYRGAFRDNPFILRVSQETNRPLPPGAYIQETVNTFTQIAKDNASAVRNPEDMVGKITGILEKERGKNVDIAVCLDVTGSMDPYFDAIRTRLIPMLKDMSAGFRSFRIGMVFYKDYFDEFINKVFPFTNDFDALQKSISSVRVGGGGDIPEAVYEALYAGATKLSWEADKRIMLLIGDAPPHPRPRGAITKQMVDREAANRGIELHAMILPQ

SEQ ID NO: 5013 - DNA, 303 bp, Unknown
  Obtained from environmental sample
  misc_feature (1)..(303): n is a, c, g, or t
ttgatgtcttcgaggtttatgccgccgaacgtcggttccatggccaccacgatacggatgaattcgtcgggggtcttggtgtttagttctatgtcgaagacgtctatgtcggcgaatctcttgaagaggacgcccttgccctccatgaccggtttgccggcgagggggcctatgtcgcccaggcccagcaccgccgtgccgtctgtgaccacggctacgaggttgccgcgggcggtgtatttgtacgctgtccacgggtctttggcgatttcgcggcatggttcggcgacgccgggcgtgtag

SEQ ID NO: 5014 - protein, 100 aa, Unknown
  Obtained from environmental sample
  misc_feature (1)..(100): Xaa is any amino acid
MMSSRFMPPNVGSMATTIRMNSSGVLVFSSMSKTSMSANLLKRTPLPSMTGLPARGPMSPRPSTAVPSVTTATRLPRAVYLYAVHGSLAISRHGSATPGV

SEQ ID NO: 5015 - DNA, 543 bp, Unknown
  Obtained from environmental sample
  misc_feature (1)..(543): n is a, c, g, or t
atgccgcgaaatcgccaaagacccgtggacagcgtacaaatacaccgcccgcggcaacctcgtagccgtggtcacagacggcacggcggtgctgggcctgggcgacataggccccctcgccggcaaaccggtcatggagggcaagggcgtcctcttcaagagattcgccgacatagacgtcttcgacatagaactaaacaccaagacccccgacgaattcatccgtatcgtggtggccatggaaccgacgttcggcggcataaacctcgaagacatcaaagcgccggagtgcttttatatagaagaagagctgaagaaacggatgggcatcccggtcttccacgacgaccagcacggcacggctatcatctccggcgcggcgctcataaacgcggcgaaactgcaggacaaggcgctcagcgagatgaagataatcttttccggcgccggcgccgcggctatttcgtgcgcttacctatatgtacgcctcggcgtaaaaatggagaacatcaccctcgtagactcaaaaggcgtcatctataa

SEQ ID NO: 5016 - protein, 180 aa, Unknown
  Obtained from environmental sample
  misc_feature (1)..(180): Xaa is any amino acid
MPRNRQRPVDSVQIHRPRQPRSRGHRRHGGAGPGRHRPPRRQTGHGGQGRPLQEIRRHRRLRHRTKHQDPRRIHPYRGGHGTDVRRHKPRRHQSAGVLLYRRRAEETDGHPGLPRRPARHGYHLRRGAHKRGETAGQGAQRDEDNLFRRRRRGYFVRLPICTPRRKNGEHHPRRLKRRHL

SEQ ID NO: 5017 - DNA, 921 bp, Unknown
  Obtained from environmental sample
  misc_feature (1)..(921): n is a, c, g, or t
atgttagcgctaaaaacggcagatttgcgtaacgattttcggcttatcagcgaaaccataactggtgatttaactttgagaacaatncattacancgacatagtanccgccgtccgctcaatgtgcattgaggcggcttacgtcctccccgacgacgtgttggcgcgtatcaaggaggcccgcgccgccgagccgttccatcgggcgcagggcatcctcgacgacataatagagaacgcccgcatcgcggcgaaccggcgtattcctatctgtcaagacaccggcaccgcggtatttttcgtgacgcttggtgagagtgcgcgcgttgacggcggtgggcttgtcgacgccataaacgagggggtgcgccgggggtacacggaggggtacctgcgtccttccgtcgtcgacgacccgatcttcgacaggatcaactccggcggcaacactccggcggtggtgcacgtagaccttgcgccgggcgacaggcttgggattaagcttttgccaaagggcgccggttgcgagaacatgagcgcgctggccatgctgaagccgtctgacggttccgccggcgtggctaagttcgtctgcgacgcggtaatccgcgccggcgggaacccgtgtccgccgttagttgtgggcgtcggggtgggcggaacggcggacgcggtgtgcgcgctggcgaagaaagcgctattgcgccctgtgggaacgcacaacgacgacggcaggtacgctcagattgagcgctaccttataaaggagataaacgccagcggcgtcggcccgcaggggttgggcggaatgcacacggcgctgtgggtggccgtggagtacatgccctgccacatagcctccatgccggtagcggtatgtataaactgccacgccgcccgcagggcgtcggtagacatttaa

SEQ ID NO: 5018 - protein, 306 aa, Unknown
  Obtained from environmental sample
  DOMAIN (34)...(306): Fumarate hydratase (Fumerase)
  misc_feature (1)..(306): Xaa is any amino acid
MLALKTADLRNDFRLISETITGDLTLRTXHYXDIVXAVRSMCIEAAYVLPDDVLARIKEARAAEPFHRAQGILDDIIENARIAANRRIPICQDTGTAVFFVTLGESARVDGGGLVDAINEGVRRGYTEGYLRPSVVDDPIFDRINSGGNTPAVVHVDLAPGDRLGIKLLPKGAGCENMSALAMLKPSDGSAGVAKFVCDAVIRAGGNPCPPLVVGVGVGGTADAVCALAKKALLRPVGTHNDDGRYAQIERYLIKEINASGVGPQGLGGMHTALWVAVEYMPCHIASMPVAVCINCHAARRASVDI

SEQ ID NO: 5019 - DNA, 450 bp, Unknown
  Obtained from environmental sample
  misc_feature (1)..(450): n is a, c, g, or t
ttgtgcgttcccacagggcgcaatagcgctttcttcgccagcgcgcacaccgcgtccgccgttccgcccaccccgacgcccacaactaacggcggacacgggttcccgccggcgcggattaccgcgtcgcagacgaacttagccacgccggcggaaccgtcagacggcttcagcatggccagcgcgctcatgttctcgcaaccggcgccctttggcaaaagcttaatcccaagcctgtcgcccggcgcaaggtctacgtgcaccaccgccggagtgttgccgccggagttgatcctgtcgaagatcgggtcgtcgacgacggaaggacgcaggtacccctccgtgtacccccggcgcaccccctcgtttatggcgtcgacaagcccaccgccgtcaacgcgcgcactctcaccaagcgtcacgaaaaataccgcggtgccggtgtcttga

SEQ ID NO: 5020 - protein, 149 aa, Unknown
  Obtained from environmental sample
  SIGNAL (1)...(20)
  misc_feature (1)..(149): Xaa is any amino acid
MCVPTGRNSAFFASAHTASAVPPTPTPTTNGGHGFPPARITASQTNLATPAEPSDGFSMASALMFSQPAPFGKSLIPSLSPGARSTCTTAGVLPPELILSKIGSSTTEGRRYPSVYPRRTPSFMASTSPPPSTRALSPSVTKNTAVPVS

SEQ ID NO: 5021 - DNA, 549 bp, Unknown
  Obtained from environmental sample
  misc_feature (1)..(549): n is a, c, g, or t
atggaaaactttttaaccgacaacgaagatattctgttccagctggaacatcttgatctggatcgcatcattcacctaaaagaggaaaatttcagccaggcgaagctgtacccccacgcccccaaagacgccgaagacgcgaaagattcttaccgcatggtactgaatatcatcggcgggatcgcgggcgagtttattgcgcctaacgcgcctgctgttgacgaagccggtcccaccctggcgaacaatcaggtaacccttcaccccgcgacccgaaaggcgctggatatgatggcaaaagccgacatgatgggtttcgtcattccccgaaagtacggcggccttaatatgcccaacacgatcctcagcattgcggcggagatagtcgccagggcggatgcttcatttctcaatttcggcctgcaacaggacaacgcgggaaccatcaacaaattcgcctctgaagatcagaaagaaagatacctgcctaaactctgctcgggcgaatgggattcggcgatgttcaaccagccgacgcggccgcgataa

SEQ ID NO: 5022 - protein, 182 aa, Unknown
  Obtained from environmental sample
  DOMAIN (48)...(169): Acyl-CoA dehydrogenase, N-terminal domain
  misc_feature (1)..(182): Xaa is any amino acid
MENFLTDNEDILFQLEHLDLDRIIHLKEENFSQAKLYPHAPKDAEDAKDSYRMVLNIIGGIAGEFIAPNAPAVDEAGPTLANNQVTLHPATRKALDMMAKADMMGFVIPRKYGGLNMPNTILSIAAEIVARADASFLNFGLQQDNAGTINKFASEDQKERYLPKLCSGEWDSAMFNQPTRPR

SEQ ID NO: 5023 - DNA, 393 bp, Unknown
  Obtained from environmental sample
  misc_feature (1)..(393): n is a, c, g, or t
atggaagaaaagaccgtcaactcaaggggcgcccagatcatcgtgtcaggcggcataggcgtaggaagcagggacaatttcgcgcttataagggagctgacggaaacccttggcgcggaagttggcgcttcccgcgcggcggtggacgcgggcttcatcggcaaggagcaccaggtcgggcaaacgggaaccaccgtcaggccgaagctctacgtagcctgcggcatntcaggcgcgattcagcaccgcgctggtatggacaattccgcccgcatcatcgcaatcaacagcgatccggaagcgccgattttcagcattgcccattacggtatcgtgggagacctgaacgaggttatcccccggatgatcaaagcgtacaaggccagagtgtag

SEQ ID NO: 5024 - protein, 130 aa, Unknown
  Obtained from environmental sample
  DOMAIN (5)...(90): Electron transfer flavoprotein FAD-binding domain
  misc_feature (1)..(130): Xaa is any amino acid
MEEKTVNSRGAQIIVSGGIGVGSRDNFALIRELTETLGAEVGASRAAVDAGFIGKEHQVGQTGTTVRPKLYVACGXSGAIQHRAGMDNSARIIAINSDPEAPIFSIAHYGIVGDLNEVIPRMIKAYKARV

SEQ ID NO: 5025 - DNA, 777 bp, Unknown
  Obtained from environmental sample
  misc_feature (1)..(777): n is a, c, g, or t
ttgatttggcgttattttgtaattccactgccgacaaagcttgcggacagccagcttgacgaaagggaatttaccgcgaaatgcgtgttcagcgtcaatacaaaaattgagggcgcttatgttttttcaagcgggaaaaatatgggcgtgttcaaggctgtcgggtttccggaggatgtagggcgcttttacaaacttgaagaatacgagggatggtgctttacttcgcacggccgctacccgacaaatacgccgggctggtggggcggcgcccatccgtttgcgcttcttgattattctgtggtgcataacggcgaaatatcttcctacgataccaaccggcgcgccattgaaatgtacggctataaatgtaccttgcagaccgacacggaagttattacctatataatagattatcttcacagaaaacaaaaacttaactttgatgaaatcgcttccgtcatcgccgcgtctttttggcagaccattgaaaaacagacgccaaaagaacgggaaatacatgaatatttgcgcgtaatgttcagcgctcagttggttaccggtcctttttcaatccttgtgggttttgaaggcgggcttatggcgttaaacgacaggctcaaactgcgcagtatggttgtcggtgaaaaggacgatcttgtctacattgcgagcgaagaggcggctatccgcatcattcagcctgaccttgacaatgtgtgggctcccagaggcggccagcctgtaatcgtcagcgtaaacagaggtaaaatgtaa

SEQ ID NO: 5026 - protein, 258 aa, Unknown
  Obtained from environmental sample
  DOMAIN (54)...(227): Glutamine amidotransferases class-II
  misc_feature (1)..(258): Xaa is any amino acid
MIWRYFVIPLPTKLADSQLDEREFTAKCVFSVNTKIEGAYVFSSGKNMGVFKAVGFPEDVGRFYKLEEYEGWCFTSHGRYPTNTPGWWGGAHPFALLDYSVVHNGEISSYDTNRRAIEMYGYKCTLQTDTEVITYIIDYLHRKQKLNFDEIASVIAASFWQTIEKQTPKEREIHEYLRVMFSAQLVTGPFSILVGFEGGLMALNDRLKLRSMVVGEKDDLVYIASEEAAIRIIQPDLDNVWAPRGGQPVIVSVNRGKM

SEQ ID NO: 5027 - DNA, 993 bp, Unknown
  Obtained from environmental sample
  misc_feature (1)..(993): n is a, c, g, or t
ttgtatatatcattagcgncattntgctcccgcctgatgaagataaaaaaagatgattctacctctaataattcaacaactataaaaaaatcagtattagaatggaaaatacttaatcaactaatacatcaaataaaacctaataggatacctcaaacaaattttttaataaaaaaatcacatgtaatatttagtgattgtaaattagctaaagctacaatatttatttttctatttatttcatcgcttctacacactgtactttttaagagatggtgtgatttttatatcacgcttaccgcaagtttttttaaatgtattttcaattggacgacatttccctattttagattgtttacattagtttttagcattggattggctttttatgtttttttaaaattattaatacttcaaagagatcaccgaataataaaaaaacttgatgttaaaggcgcagtagttgaaatgttcaacgacggcgatgaatcatattttgataaatatttagatgaggttttgtatctattctctaatacagaacaaaaagtaatagtttttgaagatatggacagatttaatagtaatgtgatatttgagcgtttacgcgaggtaaatacactagtaaataattcacttcaaacaaaaaatgatccaatgcgatttttctatttaattcgagatgatatatttattaataaagacagaacaaaattttttgacctaattataccggtaattcctatcgttgattgttcaaattcttatgacaaatttattgatgtattcaaggaatgttgtattttaaaacattttgatagtacatttttacagggtctttccctttatattgatgaaatgcgcttacttcttaatatttgtaatgaatatcaaatttattatcaacagatcggaaatactggaacagaaatagatactaataaattgctggcaataatcgcttttaaaaatcttttccaaaagattttctga

SEQ ID NO: 5028 - protein, 330 aa, Unknown
  Obtained from environmental sample
  misc_feature (1)..(330): Xaa is any amino acid
MYISLAXXCSRLMKIKKDDSTSNNSTTIKKSVLEWKILNQLIHQIKPNRIPQTNFLIKKSHVIFSDCKLAKATIFIFLFISSLLHTVLFKRWCDFYITLTASFFKCIFNWTTFPYFRLFTLVFSIGLAFYVFLKLLILQRDHRIIKKLDVKGAVVEMFNDGDESYFDKYLDEVLYLFSNTEQKVIVFEDMDRFNSNVIFERLREVNTLVNNSLQTKNDPMRFFYLIRDDIFINKDRTKFFDLIIPVIPIVDCSNSYDKFIDVFKECCILKHFDSTFLQGLSLYIDEMRLLLNICNEYQIYYQQIGNTGTEIDTNKLLAIIAFKNLFQKIF

SEQ ID NO: 5029 - DNA, 657 bp, Unknown
  Obtained from environmental sample
  misc_feature (1)..(657): n is a, c, g, or t
atgaaactgcaaaagattattttatctaatgttcctgaaattgaactattgnaagccgaaggccgtcagtatcttgagataacaagatatgacagatatattaaaaatagagttgtccagcgtatacatcaggaagatttctgtcaggcgcttggcattgtttccggtcaaaaatatcagacaggcggcggcgcgaaattaaagaactgttacagaatcattaatgaattttctgaaaatcgcctcttggatattatccgatttacggaatggattattttcaactatttaatcggcaatacggacgctcacgcgaaaaatttatctttgctttacagtggttccggggttaagcttgccccgttttacgatttactgtcaaccgaggtttaccctgaaagcatcattgaccatgaaatggctatgcttataaatggcaaggggaaatataattctttaagacttaatgatttcatctcgttatttgaaaatttagaacaaaatgccacaaatatgatgaagacgataaaaaataaatttgcggatattgttcctgcagctgaaaaacttcgaaaaaatatgcctgatccagatatgcctgtttataataaaataatcggtattattaaaaaacgcttttctgttttattcgggtaa

SEQ ID NO: 5030 - protein, 218 aa, Unknown
  Obtained from environmental sample
  DOMAIN (41)...(124): HipA-like C-terminal domain
  misc_feature (1)..(218): Xaa is any amino acid
MKLQKIILSNVPEIELLXAEGRQYLEITRYDRYIKNRVVQRIHQEDFCQALGIVSGQKYQTGGGAKLKNCYRIINEFSENRLLDIIRFTEWIIFNYLIGNTDAHAKNLSLLYSGSGVKLAPFYDLLSTEVYPESIIDHEMAMLINGKGKYNSLRLNDFISLFENLEQNATNMMKTIKNKFADIVPAAEKLRKNMPDPDMPVYNKIIGIIKKRFSVLFG

SEQ ID NO: 5031 - DNA, 774 bp, Unknown
  Obtained from environmental sample
  misc_feature (1)..(774): n is a, c, g, or t
atgacagataacggcggatattccctttttaaaaatattccaaacgttcttcgcgcaagaggatttcgcctttacacggaaaaagggcggcgtttaaccgatctctggctgaacggcggcgcggcaatactcgggcacactccgcccgacgttctccgtgatttaaaaaatacggcaagccgagggttatacgcgcccttcccgcacttttcacggaaccggtacataaaagcgctgtctaaattattccccggatacagtttccgtctctacgccgcgccgccgccggaactggaaacgtttataaaggacggaactgccggattttggaggccgttttctgattccaatcttccctatgcaatagaagacagtgctccgccgctccttgttccggttctgcccggcatccagctctggcgcggcggactgcctttcggcctttgcataacagccgccaaatcaaaagacacacttgcgcagctgcctgcggaagatatgctttcgcctgtattgcttgtcgccgcagcgcgcggactctacgatattctggcatccccgcagagggcaaaacctgtacttccgcgtactttcaaagcgttaaaaacatcgctttggcggcggcagggtatttaccttatattaaaggaaaatccttctctgcaaacatgggaatcccttttcaataggttttttgaggcaggtttccttattccgccgaacccgctgccgccccttttctcccgggcgagcttctcggccaatctatcttga

SEQ ID NO: 5032 - protein, 257 aa, Unknown
  Obtained from environmental sample
  misc_feature (1)..(257): Xaa is any amino acid
MTDNGGYSLFKNIPNVLRARGFRLYTEKGRRLTDLWLNGGAAILGHTPPDVLRDLKNTASRGLYAPFPHFSRNRYIKALSKLFPGYSFRLYAAPPPELETFIKDGTAGFWRPFSDSNLPYAIEDSAPPLLVPVLPGIQLWRGGLPFGLCITAAKSKDTLAQLPAEDMLSPVLLVAAARGLYDILASPQRAKPVLPRTFKALKTSLWRRQGIYLILKENPSLQTWESLFNRFFEAGFLIPPNPLPPLFSRASFSANLS

SEQ ID NO: 5033 - DNA, 618 bp, Unknown
  Obtained from environmental sample
  misc_feature (1)..(618): n is a, c, g, or t
gtgaatatgtttcttgaactgatttatcccttattcagattctttacgcctctgtatgtttttgtatatcttaccttccgcggagcttttgccgcccttacaacgttacttatctgttatatctttggcggaaaaattattgaacttatccgcaaattaaaaataggccagtcaatccgtgaagacggtccgcagacacatctgacaaaatccggaacgccgactatgggcggaatttttattattctttccgttgtgattgcgatgctcttctggcaggatttgcataacagggcggtctggattactatgggcgcttttatcgctttcggcgcgattggattttttgacgattttttaaaaatttcaaagcgtaattccgcggggcttccggcgtgggcgaaactcgctctgcagtttgccgtggcgattacggttgttcttattatctattttacaggcgatgaaaaaaccacccttttatacgttccgtttttcaaaaatccggtgctggacatggggtgggtgtggattcctttcgctgtacttttggttgtaggggaatcaaacgcggttaatttttcagacgggctcgacggcttgcttgcggggctgtaa

SEQ ID NO: 5034 - protein, 205 aa, Unknown
  Obtained from environmental sample
  DOMAIN (100)...(205): Glycosyl transferase family 4
  misc_feature (1)..(205): Xaa is any amino acid
MNMFLELIYPLFRFFTPLYVFVYLTFRGAFAALTTLLICYIFGGKIIELIRKLKIGQSIREDGPQTHLTKSGTPTMGGIFIILSVVIAMLFWQDLHNRAVWITMGAFIAFGAIGFFDDFLKISKRNSAGLPAWAKLALQFAVAITVVLIIYFTGDEKTTLLYVPFFKNPVLDMGWVWIPFAVLLVVGESNAVNFSDGLDGLLAGL

SEQ ID NO: 5035 - DNA, 876 bp, Unknown
  Obtained from environmental sample
  misc_feature (1)..(876): n is a, c, g, or t
atgttcttaacacgaattcccggcataggcgtggaacggtacggcgcgtcacggtggatagagatagggcctttttcttaccagccgtccgaaatggtaaaaattgtgcttcctttgtatcttgcgcacataatggacaagaaagcgaataatatgaataatttttcttccggcatactgccgcctgtgcttgttacggggcttttcttcggtcttatttacatgcagaacaatttttctacggcggtctttcttgtgtttaacgcgatggtcatattttttctggcaggtatgcgtttccgttacttttttgcggctatcgcgatgatattgccggtatccgcgcttttggtgtttacaaaagagcatcgcgtaaagcgtcttgtaagttttttaaggccgcagtgggatccgctcggcgcgggttttcaggttaacgcaagccgtgacgcgattgtttcaggcggcttttggggaaaaggcataggagagggaacgcgcaagatagcgagcattccggaaattcattcggactttatcttcagcgcgtttgttgaagagacgggttttataggcataatgctgttttttgtcatgtacgcggttttcggcattttaggctacagggcggctttaagggcgcagactgttttcgggcggcttctcgcggcgggtatgactacaatgattataacgcaaaccctgtcaaacgtcgccgttgtttccggggcgcttcccgcgacgggaattccgcttccgttcttttccgccggcggttcgtccatcgcaaccacccttatttgcgcgggaatgatagctaatatcgccagaaaaggcgtgagcgttccttctccgattaacgctcggccgatctga

SEQ ID NO: 5036 - protein, 291 aa, Unknown
  Obtained from environmental sample
  DOMAIN (1)...(281): Cell cycle protein
  misc_feature (1)..(291): Xaa is any amino acid
MFLTRIPGIGVERYGASRWIEIGPFSYQPSEMVKIVLPLYLAHIMDKKANNMNNFSSGILPPVLVTGLFFGLIYMQNNFSTAVFLVFNAMVIFFLAGMRFRYFFAAIAMILPVSALLVFTKEHRVKRLVSFLRPQWDPLGAGFQVNASRDAIVSGGFWGKGIGEGTRKIASIPEIHSDFIFSAFVEETGFIGIMLFFVMYAVFGILGYRAALRAQTVFGRLLAAGMTTMIITQTLSNVAVVSGALPATGIPLPFFSAGGSSIATTLICAGMIANIARKGVSVPSPINARPI

SEQ ID NO: 5037 - DNA, 678 bp, Unknown
  Obtained from environmental sample
  misc_feature (1)..(678): n is a, c, g, or t
atgagatatagatattcaaccggaaaaaacgggaaaccggtaaaaaaagcgataatctacacctgcgatgaacacggaataaatttttccgatataaacaaggaagccgtaggcataatcaaaaaattaagacacgcgggctttgacgcctatattgtcggcggcgctgtcagggacttaatacttggcaaaaaaccgaaggactttgacattgtaagcgacgcgagcccggcgaaaattaaaaaagtattccgcaattccagaataataggtagacgattccgtttggtgcatgtttattttgaagagagagtctttgaagtctctacttttcgttctttaaaagacgggtatacgggtaatatattcggtacaatggatgaagatgtttttcgccgtgactttacgatgaacgctctcttttacgatattgaacagcaagttgtaattgattatgtgggagggatgaatgacataaaaaagaagcaggttaaaccggtcatccccctttcagaaattttcacggaagatcctgtaagaatgatacgcgctgtgaaatacgcggctctcgcaggtttttcaattccgtttaatcttaagttaaaaatctcaaggcaatcagatttacttgcgggtatttctccgtcacgccttacggaagaaactcggccaatctga

SEQ ID NO: 5038 - protein, 225 aa, Unknown
  Obtained from environmental sample
  DOMAIN (108)...(225): Poly A polymerase family
  misc_feature (1)..(225): Xaa is any amino acid
MRYRYSTGKNGKPVKKAIIYTCDEHGINFSDINKEAVGIIKKLRHAGFDAYIVGGAVRDLILGKKPKDFDIVSDASPAKIKKVFRNSRIIGRRFRLVHVYFEERVFEVSTFRSLKDGYTGNIFGTMDEDVFRRDFTMNALFYDIEQQVVIDYVGGMNDIKKKQVKPVIPLSEIFTEDPVRMIRAVKYAALAGFSIPFNLKLKISRQSDLLAGISPSRLTEETRPI

SEQ ID NO: 5039 - DNA, 768 bp, Unknown
  Obtained from environmental sample
  misc_feature (1)..(768): n is a, c, g, or t
gtgaaatcagcttgcccatttcggtgtcctgtccttgacgaagcgccggaattcaaaacgaatgtgttacaggccctgagggaaccgctggaagagcgctatctgaccattgccagagttgaaggctcggtcaagctgcctgccgatttccagcttgttatggccgccaacgcctgcccctgtggcaagctcggatccggtaggttcgacggatccggtaggttcgatggatccagtaggcccgacggatccggtgaatcaacggacactgcggagcataccttatccggcagttgtttttgcagtcccgaagaaatataccggtattggaaaagattaggcggcgctctgctggatcggatagatatccgggttccggtaaacggaagcggtgaagccttgtacgaacgtaacggcggggatcaaaccgaaaccagcgctgtcatacgccgccgtgtcatgcgggccgtggaactgcagcgccgccgttttgcggacaacggagtccgccgcaactcccggatgagcgcatcccacatagagctttcctgcccccttagcggggcggcagagcgggcgtttcgcagagcggcggaacggctggctttttccggcagggcttaccacagcgtccttaaaacggccagaaccattgccgacctggatgaaaaggaaataatcgaagcggaacacattctggaagcaatccaacaccgccgccttggggatgacccctacgatgtgctgctggcagtctgtaagagttag

SEQ ID NO: 5040 - protein, 255 aa, Unknown
  Obtained from environmental sample
  DOMAIN (1)...(134): Magnesium chelatase, subunit ChlI
  misc_feature (1)..(255): Xaa is any amino acid
MKSACPFRCPVLDEAPEFKTNVLQALREPLEERYLTIARVEGSVKLPADFQLVMAANACPCGKLGSGRFDGSGRFDGSSRPDGSGESTDTAEHTLSGSCFCSPEEIYRYWKRLGGALLDRIDIRVPVNGSGEALYERNGGDQTETSAVIRRRVMRAVELQRRRFADNGVRRNSRMSASHIELSCPLSGAAERAFRRAAERLAFSGRAYHSVLKTARTIADLDEKEIIEAEHILEAIQHRRLGDDPYDVLLAVCKS

SEQ ID NO: 5041 - DNA, 378 bp, Unknown
  Obtained from environmental sample
  misc_feature (1)..(378): n is a, c, g, or t
ttggactttgtttgttttccatataaattattagaccctttactggaagtagaaggtataagaatgataaataaaaatgacctgtcagcaatgaaagtatcagctgtagggacaagggggaatgaagcaaaagatttttatgatttatactgtttactgaaagaaatgtcgattgaccaaatatttgaaaatttcaaaaagaaatatggcatggataatttctggcattatcaaaaaagcgtagtatattttgatgatgttgaagattcatcatggaacggattaagatttttaaaagaaaatgtatctaaagatactattaaaagtgtattaacacaagcggtcattgaatatgaaagaaataatttattgccataa

SEQ ID NO: 5042 - protein, 125 aa, Unknown
  Obtained from environmental sample
  misc_feature (1)..(125): Xaa is any amino acid
MDFVCFPYKLLDPLLEVEGIRMINKNDLSAMKVSAVGTRGNEAKDFYDLYCLLKEMSIDQIFENFKKKYGMDNFWHYQKSVVYFDDVEDSSWNGLRFLKENVSKDTIKSVLTQAVIEYERNNLLP

SEQ ID NO: 5043 - DNA, 909 bp, Unknown
  Obtained from environmental sample
  misc_feature (1)..(909): n is a, c, g, or t
gtgtggctatgcgattgcgggcacaaagagtgcgtgggcgaacttgacgagttacatacgcttgtgggcgacggcgacaaatcggcggggaaatccatacacgctcaaacggcgcggcaagtgcaagagagtttaagaacgaaagacgcggctaaaaggctctccgacgctggtatcgactcggtgtggatagaaagactcgcgaacgtaaatataagcccggtggacatacatcgccacatagtagacaaacttgaggtgaaatgccccaaatgcggcgcaatgatgaagcgtacgctcgaagtgctcgactgctggttcgagtcggggtctatgccgtacgcgcaacaacactacccgtttgacaacaaagaaatctttgagaagaatttcccggctgacttcatcgccgaggggctcgaccaaacacgcgggtggttctatacactgacggttctctccggagcgctattcgggaagatggcctttaaaaacgttatagtaaacggcataatcctcgccgaagacgggaaaaaactcgccaaacgtctgcggaactacgctccgccggaagacatactaaatcaattaggcgccgacgcgcttcgcctatttttgataaattcccctgccgtcaaggccgaagatttgcgattctcggagaaaggcgtgacgganatggctcgcgccgtactgctgccgttctggaacgcctacgcctttttcgtcacctacgccaatgtggacgggtggaaacctgccgacctcaatccgccaaagggcggaacagaacttgacaggtggatagtgtcgctgcttaacgacgntatcgcgtctgtcaacaagagatggaactctancatctatancaagtcgtacctcacttggtggactttatcgancatttga

SEQ ID NO: 5044 - protein, 302 aa, Unknown
  Obtained from environmental sample
  DOMAIN (2)...(218): tRNA synthetases class I (I, L, M and V)
  misc_feature (1)..(302): Xaa is any amino acid
MWLCDCGHKECVGELDELHTLVGDGDKSAGKSIHAQTARQVQESLRTKDAAKRLSDAGIDSVWIERLANVNISPVDIHRHIVDKLEVKCPKCGAMMKRTLEVLDCWFESGSMPYAQQHYPFDNKEIFEKNFPADFIAEGLDQTRGWFYTLTVLSGALFGKMAFKNVIVNGIILAEDGKKLAKRLRNYAPPEDILNQLGADALRLFLINSPAVKAEDLRFSEKGVTXMARAVLLPFWNAYAFFVTYANVDGWKPADLNPPKGGTELDRWIVSLLNDXIASVNKRWNSXIYXKSYLTWWTLSXI

SEQ ID NO: 5045 - DNA, 597 bp, Unknown
  Obtained from environmental sample
  misc_feature (1)..(597): n is a, c, g, or t
ttgggagcgggcgcgtttgtgtgcggcgaagaaaccgcgcttattaaatcggtagaaggcaaccgaggaatgccggttccaaaaccgccgttccccgcgaacaaaggcttgtggcaaagaccgaccatcatcaacaatgttgaaacattcgccaacgtgccggttattaccaataaaggcggcgcatggcttgccaaattgggtactgaaaaatccaagggaacaaaagtattcgcccttaccggaaaaataaaaagttccggccttgtcgaagtaccgatgggaaccacattacgcgacattgtgtttggcataggcggcggaatcaaagacggaaagaaattcaagggagtgcagacgggcggcccgtccggcggtattcttaccgaaaaatcgcttgaccttcccatagactttgacacattgacagctaacggctcgatgatgggctcgggcggcatgatcgtcatggacgaagacgactgcgttgtagacgtttcgcgcttctacatggaattctgcgttgatgaaagctgcggaaaatgttccccgtgccgtatcggcacaacacagatacttaagcttcttgaaaaatag

SEQ ID NO: 5046 - protein, 198 aa, Unknown
  Obtained from environmental sample
  DOMAIN (1)...(123): Respiratory-chain NADH dehydrogenase 51 Kd subunit
  misc_feature (1)..(198): Xaa is any amino acid
MGAGAFVCGEETALIKSVEGNRGMPVPKPPFPANKGLWQRPTIINNVETFANVPVITNKGGAWLAKLGTEKSKGTKVFALTGKIKSSGLVEVPMGTTLRDIVFGIGGGIKDGKKFKGVQTGGPSGGILTEKSLDLPIDFDTLTANGSMMGSGGMIVMDEDDCVVDVSRFYMEFCVDESCGKCSPCRIGTTQILKLLEK

SEQ ID NO: 5047 - DNA, 897 bp, Unknown
  Obtained from environmental sample
  misc_feature (1)..(897): n is a, c, g, or t
atgagtgcggcggcggttgcgaaagaggacagtgctttgaacaggtttggcaaagagttggtatcccttgccgcagagggaaaattagaccccgttatagggcgtgaagaggaaatccgcagagtaattcgcattttggcacgcaaaacaaaaaataatcctgtgctcgtaggggagccgggcacaggaaaaaccgccattgtagagggcctcgcgcaccgcattcacagaaacgatgtgccggatgctttgaagggcaaaaaaatattttcacttgatttatccgctttaatagcaggtgcaaaatatcaaggcgaatttgaagaacgcttaaaagccgttttagacgaattggaacaagagcaagatacgcttttgttcatagacgaaattcacaatatagtaggggcaggaaaaacgcagggcagtatggatttgggcaatatgctaaaaccagggcttgctcgcggggaattgcattgcataggtgcaaccacaacttctgaataccgcaaatacatagaaaaagatgccgctttggaacgccgctttcaacccgtgccagtcgcggaaccaagcccagacgaggctctttccattttgcgtggcataaaggagagctttgatgcccaccacggggttcgcattcaagacaacgccttggtcgccgctgtgcagctttccagccgctatatctcagaccgctttttgccagacaaagccgtagatttaatagacgaggcggcgagtatggtgaaaacccagctagacaccgttcccgaagccctagacactttgcaaaggcggcagcttcaacttcgcatagaggaaaaagcgcttggaatggaaaacgatgccgtttcaaaagagcggttaaaagaattgcaagaggaataa

SEQ ID NO: 5048 - protein, 298 aa, Unknown
  Obtained from environmental sample
  DOMAIN (53)...(246): ATPase family associated with various cellular activities (AAA)
  misc_feature (1)..(298): Xaa is any amino acid
MSAAAVAKEDSALNRFGKELVSLAAEGKLDPVIGREEEIRRVIRILARKTKNNPVLVGEPGTGKTAIVEGLAHRIHRNDVPDALKGKKIFSLDLSALIAGAKYQGEFEERLKAVLDELEQEQDTLLFIDEIHNIVGAGKTQGSMDLGNMLKPGLARGELHCIGATTTSEYRKYIEKDAALERRFQPVPVAEPSPDEALSILRGIKESFDAHHGVRIQDNALVAAVQLSSRYISDRFLPDKAVDLIDEAASMVKTQLDTVPEALDTLQRRQLQLRIEEKALGMENDAVSKERLKELQEE

SEQ ID NO: 5049 - DNA, 393 bp, Unknown
  Obtained from environmental sample
  misc_feature (1)..(393): n is a, c, g, or t
gtgcccgcgttcgcgatgcctatgggtttctttttgctcaaacagtttattgacaccataccgaactcgcttcttgaagcggcaaaggttgacggcgcgaaagagtggcgcattttcctggtgataatccttcccatggtaaagcccgcgtggctgaccgtgatgatattttccgtgcagaatctgtggaacgcccgcgcttccaactttatttattcggagcagcttaaaaccctgccctacgcgctttcgcagatcatctccggcggcatagcccgcgccggggtaggggcggcggtaacgctctttgtaatgatagtgccgctggtgatgtttattttcgcgcagagcaatattctgcagacaatggcgagttcggggataaaggaatga

SEQ ID NO: 5050 - protein, 130 aa, Unknown
  Obtained from environmental sample
  misc_feature (1)..(130): Xaa is any amino acid
MPAFAMPMGFFLLKQFIDTIPNSLLEAAKVDGAKEWRIFLVIILPMVKPAWLTVMIFSVQNLWNARASNFIYSEQLKTLPYALSQIISGGIARAGVGAAVTLFVMIVPLVMFIFAQSNILQTMASSGIKE

SEQ ID NO: 5051 - DNA, 510 bp, Unknown
  Obtained from environmental sample
  misc_feature (1)..(510): n is a, c, g, or t
atgaaaaaagaaaaaataaaaaataaaaaaggaagattttcttcctctttatcacgaattctaatttcttttttcttttttctcttttctcttttctctttgtcggctaccccgacaaattatacctacaactacgacttctgggaggagcaggtcgcttcccccgacgcttactttgtgagcgcctatattctgggtacgggtctgggcataggcaatttcagcgacccgcaggggctttttgtccgggataaccgcgtatatgtatgcgattcgggcaataaccggatagtcctgctggcttatgaagacggggcgcaccggcttgtatcggtgaagaattcggtgatgattgacggcaaggaaagcccttttaattatcctatggatatttttgaaagcagggacggttcactgtatgtagccgataccaacaaccaccgcatactncagctggacaaggactggaactatatttcttccatattnaagccgatgatgaaagcatag

SEQ ID NO: 5052 - protein, 169 aa, Unknown
  Obtained from environmental sample
  SIGNAL (1)...(30)
  DOMAIN (125)...(152): NHL repeat
  misc_feature (1)..(169): Xaa is any amino acid
MKKEKIKNKKGRFSSSLSRILISFFFFLFSLFSLSATPTNYTYNYDFWEEQVASPDAYFVSAYILGTGLGIGNFSDPQGLFVRDNRVYVCDSGNNRIVLLAYEDGAHRLVSVKNSVMIDGKESPFNYPMDIFESRDGSLYVADTNNHRILQLDKDWNYISSIXKPMMKA

SEQ ID NO: 5053 - DNA, 933 bp, Unknown
  Obtained from environmental sample
  misc_feature (1)..(933): n is a, c, g, or t
atgctgacggttttcataaagagcctgtcgagctcttttaaggaacgaagagccggactaattaccacggcgcttaaggtggttcgttcgctgaccccggcgagaacctgcacttccaattacaaagaatcccttgaggtacagcttagcctgctccctgaagcgccaaaaggcgcaatggaagccatttcgcatctggaacttctggaaaaaggcaatactgccgaagccgccaaacggatgggctgcaccgaagaggagctgacgcgcatttttgaagttttaaaggagctttccccttttccgggaaggttttttttcagcggagaaacccgctatgtagtgcctgatattcaggtcgtaaaaaaggaaggagagtttgtcattatcctgaatgaggaagaaattcctgttttgggaataaatccgtttttcatggaagttgccgcgaggccccgtataacggaagaaaaaccggcaagggattttgtgagggaaaacatcagagaagccaggtggtttatcaattccatcaaccagaggaaccacaccctgctgaaggtcgccagggcgattgtagaattccagcgcgcttttttttctgacggcccaaagtatattgccccgcttaccctcagagacatttctgaggaaattggcctccacgaaacaaccgtgtcccgtgtggccaatggcaaatatatgcagaccgaatggggcatttttgaactgcgccatttttttactaattccattaccggaaccggatcgggcggctccaggtattcaaaggagggggttaaggagataataaaagatatattaaaatccgatgaaactcgtctttcggataaggacatcgtggagcttttgcagaagagagggtattacccttgcgcggaggagcggtggctaaatacagaaacgagatga

SEQ ID NO: 5054 - protein, 310 aa, Unknown
  Obtained from environmental sample
  DOMAIN (1)...(146): Sigma-54 factor, core binding domain
  misc_feature (1)..(310): Xaa is any amino acid
MLTVFIKSLSSSFKERRAGLITTALKVVRSLTPARTCTSNYKESLEVQLSLLPEAPKGAMEAISHLELLEKGNTAEAAKRMGCTEEELTRIFEVLKELSPFPGRFFFSGETRYVVPDIQVVKKEGEFVIILNEEEIPVLGINPFFMEVAARPRITEEKPARDFVRENIREARWFINSINQRNHTLLKVARAIVEFQRAFFSDGPKYIAPLTLRDISEEIGLHETTVSRVANGKYMQTEWGIFELRHFFTNSITGTGSGGSRYSKEGVKEIIKDILKSDETRLSDKDIVELLQKRGYYPCAEERWLNTETR

SEQ ID NO: 5055 - DNA, 480 bp, Unknown
  Obtained from environmental sample
  misc_feature (1)..(480): n is a, c, g, or t
atggaagagctggaatttgcggagcctcaagaaccgtctcttgaacttacggtgcgcgtgctcaacatcaacgacggcagaaacgcggaactgctttcctcgtgcaaagccctgggcgaatacagcgcatttgtcgcgcgggagcgttcttttgaacaacagcttggcgacaggcaaaaagcaatgcaagccgctgtacgctattgtctggatcatgatatattgagatcgttcatggagaaacattcgcgggaggtgctgcgtatgcggatcaccgagtggaatacagaggaagccatcgccgtctggcgcgaagaaggccgcgaagaaggtcgagcggaaggtcgcacagaaggcaaggcggatggattggcggaaggtcgcgcggaattgcgcaaaaccgcccgaaaactcaaagctatgggcttatctgctgaacaaatagcagaggcaaccgggctttcttcggatgaattgtag

SEQ ID NO: 5056 - protein, 159 aa, Unknown
  Obtained from environmental sample
  misc_feature (1)..(159): Xaa is any amino acid
MEELEFAEPQEPSLELTVRVLNINDGRNAELLSSCKALGEYSAFVARERSFEQQLGDRQKAMQAAVRYCLDHDILRSFMEKHSREVLRMRITEWNTEEAIAVWREEGREEGRAEGRTEGKADGLAEGRAELRKTARKLKAMGLSAEQIAEATGLSSDEL

SEQ ID NO: 5057 - DNA, 480 bp, Unknown
  Obtained from environmental sample
  misc_feature (1)..(480): n is a, c, g, or t
ttgactcagacggaaaactgccaaactagcctggatttacctgctttaattatctgctctacggtggatgatactgtctccctgggtaaagctcttgcaaatttgctgaagaaaggcgatgttgtagccctaaaggggcctttgggagcaggaaagacctatcttacaaaaggtatagccatggctctggaggtaaaagaagctgtaaccagccccagttacaccattgtttctgaatatgatggcgttttgcatggtaattccataaaaattttccacattgacgcctatcgtcttgccggaaatgatgatttttcagcaattgggggagaagaaatgatctttgggaacggtatttccataattgaatggagcgaacgcattccggaatacatccccaaagacgccttaagggtggatatacaaataaatgatgatgaaaaacggtatttccacatttatctggaaaacgtacaatga

SEQ ID NO: 5058 - protein, 159 aa, Unknown
  Obtained from environmental sample
  DOMAIN (25)...(151): Uncharacterised P-loop hydrolase UPF0079
  misc_feature (1)..(159): Xaa is any amino acid
MTQTENCQTSLDLPALIICSTVDDTVSLGKALANLLKKGDVVALKGPLGAGKTYLTKGIAMALEVKEAVTSPSYTIVSEYDGVLHGNSIKIFHIDAYRLAGNDDFSAIGGEEMIFGNGISIIEWSERIPEYIPKDALRVDIQINDDEKRYFHIYLENVQ

SEQ ID NO: 5059 - DNA, 342 bp, Unknown
  Obtained from environmental sample
  misc_feature (1)..(342): n is a, c, g, or t
atgaatacccttgccattgattcgtcaagcaacgttttatcggtcgcgctggaaacagaaacctcaattctgcatgaagaaattgaaaaggcaaatagccattcctgttttctaatggaatgcacggacggcctttgcaaatcggcaggcataaagcccgccgatttaagcctagttgcctgcatggaagggccgggctcgtttaccggcctcaggatcgggttttccgcagcaaaaggcattgcccttgcccttggaatcccgttgatattcgttccaacccttgattgcattgcgtatcccttttctaagcagcccgggattggtgcttcctgtacttga

SEQ ID NO: 5060 - protein, 113 aa, Unknown
  Obtained from environmental sample
  DOMAIN (22)...(111): Glycoprotease family
  misc_feature (1)..(113): Xaa is any amino acid
MNTLAIDSSSNVLSVALETETSILHEEIEKANSHSCFLMECTDGLCKSAGIKPADLSLVACMEGPGSFTGLRIGFSAAKGIALALGIPLIFVPTLDCIAYPFSKQPGIGASCT

SEQ ID NO: 5061 - DNA, 870 bp, Unknown
  Obtained from environmental sample
  misc_feature (1)..(870): n is a, c, g, or t
ttggataagacccgttctnccagccttgtancacggcaggaggccatacgcgcccctgagaanctggattccctcagcgcggacgcgagggccgcgctggtttatgatatgatcaataatccttttacaacagcttatatttccgcccgcattctgggaaaccacggatgcgttaccgcgatacccgttctgcgggaactggcgtcttccgaggattatatgcttgcgggcgaggcgatgatcgccctggcgagactgcgggacctggcgttccgcccccatattgaaaatatcattcttaatacgcaaaacccccggctgagaattatgggagttgaggccctgggcatatacgccctgcccgattcgcttaatacttttattaacattataagaagcacggatccgccgccgtttctgcttaatgaagttatattggaaatgtccgcgattctcggcacgcagaaccagttttaccgtattctgacgcgttttatcgccgaaccttctctggccccggcgcttgccctggacgaagcggaagcggccgttgcgtactacaaatcgaacattggctggagaaaaggcggtaagagaaaaaccgaactgccccttctggacaggcaggcgggcagtattcatgaggccgtgtccgcccttgaaaacaacggcgacggcaaaccgctgtcgctttggatacaggcccttcccgatttcgccttttccgatgagcccgcctttaagactgcgcaggcgctttttcctgaaattcttgtggatgacaatatggcttcccacaagtgcctgcgccttctgatagtccactgggcggcgtatcaaatccgggtctggacgcggaggttgaaataa

SEQ ID NO: 5062 - protein, 289 aa, Unknown
  Obtained from environmental sample
  misc_feature (1)..(289): Xaa is any amino acid
MDKTRSXSLVXRQEAIRAPEXLDSLSADARAALVYDMINNPFTTAYISARILGNHGCVTAIPVLRELASSEDYMLAGEAMIALARLRDLAFRPHIENIILNTQNPRLRIMGVEALGIYALPDSLNTFINIIRSTDPPPFLLNEVILEMSAILGTQNQFYRILTRFIAEPSLAPALALDEAEAAVAYYKSNIGWRKGGKRKTELPLLDRQAGSIHEAVSALENNGDGKPLSLWIQALPDFAFSDEPAFKTAQALFPEILVDDNMASHKCLRLLIVHWAAYQIRVWTRRLK

SEQ ID NO: 5063 - DNA, 636 bp, Unknown
  Obtained from environmental sample
  misc_feature (1)..(636): n is a, c, g, or t
atgctccgcaagttccgggatgtcctgtggccgctgccgcaacggcggaatgtaaatgggcagcacattcaggcggtaatagagatcgccacgaaactcgcccttttttaccagcgcctcaatgtccttgttggtcgccgcaaggatgcgcacattcacggtaacggtggaatcagagcccactttttcaaagctccgttcctggataacccgcagcagctttgcctgcaaagacaggggcagatcgccgatttcgtcaaggaatatcgtgccgccgtccgccatctcaaaacgcccctgccgcgcggcaacagcgtcggtaaaagcgccccgcacatgcccgaaaagttcactttccccaagtccttcgggcagggccgcgcagtttaccctgacaaaaggaaaacggccacggggactgcgcacatggattctctcggcaaagagctccttccccaccccgctttctcccaagatcaaaaccgaagaatcggtttttgccacgcggtcaatcatcttgattatctcgaggattatggggcttttggcaatcattgtgcgcatacggatgcccgttacacgatgattttaattggtatccgctgcggtgttcccttcgtccgcgtcattctttga

SEQ ID NO: 5064 - protein, 211 aa, Unknown
  Obtained from environmental sample
  misc_feature (1)..(211): Xaa is any amino acid
MLRKFRDVLWPLPQRRNVNGQHIQAVIEIATKLALFYQRLNVLVGRRKDAHIHGNGGIRAHFFKAPFLDNPQQLCLQRQGQIADFVKEYRAAVRHLKTPLPRGNSVGKSAPHMPEKFTFPKSFGQGRAVYPDKRKTATGTAHMDSLGKELLPHPAFSQDQNRRIGFCHAVNHLDYLEDYGAFGNHCAHTDARYTMILIGIRCGVPFVRVIL

SEQ ID NO: 5065 - DNA, 675 bp, Unknown
  Obtained from environmental sample
  misc_feature (1)..(675): n is a, c, g, or t
atgcgcacaatgattgccaaaagccccataatcctcgagataatcaagatgattgaccgcgtggcaaaaaccgattcttcggttttgatcttgggagaaagcggggtggggaaggagctctttgccgagagaatccatgtgcgcagtccccgtggccgttttccttttgtcagggtaaactgcgcggccctgcccgaaggacttggggaaagtgaacttttcgggcatgtgcggggcgcttttaccgacgctgttgccgcgcggcaggggcgttttgagatggcggacggcggcacgatattccttgacgaaatcggcgatctgcccctgtctttgcaggcaaagctgctgcgggttatccaggaacggagctttgaaaaagtgggctctgattccaccgttaccgtgaatgtgcgcatccttgcggcgaccaacaaggacattgaggcgctggtaaaaaagggcgagtttcgtggcgatctctattaccgcctgaatgtgctgcccatttacattccgccgttgcggcagcggccacaggacatcccggaacttgcggagcattttctcgcgaaatatacgcggaaaacaaaaaagcagtttcagggtttttccaaagaagcgctggaaagcatgtttacatattcatggncctgggcatgtgcgggaacttga

SEQ ID NO: 5066 - protein, 224 aa, Unknown
  Obtained from environmental sample
  DOMAIN (27)...(214): ATPase family associated with various cellular activities (AAA)
  misc_feature (1)..(224): Xaa is any amino acid
MRTMIAKSPIILEIIKMIDRVAKTDSSVLILGESGVGKELFAERIHVRSPRGRFPFVRVNCAALPEGLGESELFGHVRGAFTDAVAARQGRFEMADGGTIFLDEIGDLPLSLQAKLLRVIQERSFEKVGSDSTVTVNVRILAATNKDIEALVKKGEFRGDLYYRLNVLPIYIPPLRQRPQDIPELAEHFLAKYTRKTKKQFQGFSKEALESMFTYSWXWACAGT

SEQ ID NO: 5067 - DNA, 750 bp, Unknown
  Obtained from environmental sample
  misc_feature (1)..(750): n is a, c, g, or t
ttgatggtgcccatttttacgcataatgaattctggggcgttgtcagttttcaggatcataccaacgaccgttattttgacgaggactgttccgatctgctgcatactgcggcgcgtatattcaccaacgcggttatcagggaagaaatgaaacgccatgaaaaaatggaagcggcgctcaacagagccgctgtcatgtttttatcgcatagtaaagaagcttttgaagatgccatgacagcgggcgtgaaagagatcgccgatgtattaaatttggacagattttccctgttgcgtaactttatcatgaccgatggtgtgcgttgtggaggacaaatttaccgctggaacagggattccggcggaaccacagcgccgataaaagggctggagtctttttctcccgagcagtatgtgcccaactggaggaaaatttttgcttcaggaggagtaattaacggtccggtaaggcttatgcccgaagcggaggtgctgcaatcgtttggtttggtgtcgatatgcgttacgccggtttatatcaacaacgccttttggggtattgccttttttgaggacctccataccgagcgcttttttgaaaaggacagcattgaaataatgcggttggcggcgtttctgtgcgcaaacaccgttatacgcgccgacatggaacatgccatagccgatgctaacgaatttaacagcgccatcctttccgcttcaccttttgctgactttctcgccatctga

SEQ ID NO: 5068 - protein, 249 aa, Unknown
  Obtained from environmental sample
  DOMAIN (74)...(218): GAF domain
  misc_feature (1)..(249): Xaa is any amino acid
MMVPIFTHNEFWGVVSFQDHTNDRYFDEDCSDLLHTAARIFTNAVIREEMKRHEKMEAALNRAAVMFLSHSKEAFEDAMTAGVKEIADVLNLDRFSLLRNFIMTDGVRCGGQIYRWNRDSGGTTAPIKGLESFSPEQYVPNWRKIFASGGVINGPVRLMPEAEVLQSFGLVSICVTPVYINNAFWGIAFFEDLHTERFFEKDSIEIMRLAAFLCANTVIRADMEHAIADANEFNSAILSASPFADFLAI

SEQ ID NO: 5069 - DNA, 741 bp, Unknown
  Obtained from environmental sample
  misc_feature (1)..(741): n is a, c, g, or t
ttgattgcttatggagtagaactgcagtggtatcaagacggtccagacgaaagcgatgagttgnccaggcgcatggcaaagttgcagggaataaagaacgaaagaaaatggatatgcgacattcctcctgtacctgccttgctcgcaagagacagatttatagcgggcgatgcaactgaggccgcttttttggctttggaagcttctttaatttcagattcagatatggttgtgaagtcggttaatttagattcaagccgagcgggaatttttggagccttcaagagattgggtgcggagattgatattgttgcccgccatgaaagaggtcgtgatgtttggggagatttgaggattaaaagggcaaaaatgctagttggcaggcggcttggcacagatgttttgcaaacctgtttagacgaaattcccatgcttgctgttctagcgtgttttgcagagggcgaaaccatttttaaaattcccgactgggcagtggatttttgcaaacctattttagcggctatttatgaaaatctcaaaattgcaggcatagaatgtggtctttacgaagacggtttaattttgcgcggcaaagcagagattgaggcagatggctttgattgcaagagtatgcccattttggggcttgctttgcatgtcttgaataaaaaagcaaaaagcaaggaagccgttaaaggaattgaatgtgtggaaaatttattgccgggggtcttgagttga

SEQ ID NO: 5070 - protein, 246 aa, Unknown
  Obtained from environmental sample
  misc_feature (1)..(246): Xaa is any amino acid
MIAYGVELQWYQDGPDESDELXRRMAKLQGIKNERKWICDIPPVPALLARDRFIAGDATEAAFLALEASLISDSDMVVKSVNLDSSRAGIFGAFKRLGAEIDIVARHERGRDVWGDLRIKRAKMLVGRRLGTDVLQTCLDEIPMLAVLACFAEGETIFKIPDWAVDFCKPILAAIYENLKIAGIECGLYEDGLILRGKAEIEADGFDCKSMPILGLALHVLNKKAKSKEAVKGIECVENLLPGVLS

SEQ ID NO: 5071 - DNA, 456 bp, Unknown
  Obtained from environmental sample
  misc_feature (1)..(456): n is a, c, g, or t
ttgagaattgttttggttggttttggtttgcttgcgggttcggttgcttctgcaatcaggcaggctaatttaaaaaccacaattcgcgcggttagctcaagagaaacaattgaaaaggcaaaaaaactttctttggcagacgatttttttgaatatggcgaagtggaaaaatggttgccaggttcaaatttaattttgctgtgcagccccataaagcatattttatccacaattgaaattctcaaaaacaatgcaaatttacttaacgaagaagttatagtaagcgatattggcagcacaaaagagcaaatttgcagtgctggttatgcgcttggttcaccttttatttttgttggcgggcatcctatggctggctcggaaaaacacggcattgaacacagcgacccttctatttttgaaaacgcctactggcttttatgcctgccagaaaattag

SEQ ID NO: 5072 - protein, 151 aa, Unknown
  Obtained from environmental sample
  SIGNAL (1)...(22)
  misc_feature (1)..(151): Xaa is any amino acid
MRIVLVGFGLLAGSVASAIRQANLKTTIRAVSSRETIEKAKKLSLADDFFEYGEVEKWLPGSNLILLCSPIKHILSTIEILKNNANLLNEEVIVSDIGSTKEQICSAGYALGSPFIFVGGHPMAGSEKHGIEHSDPSIFENAYWLLCLPEN

SEQ ID NO: 5073 - DNA, 921 bp, Unknown
  Obtained from environmental sample
  misc_feature (1)..(921): n is a, c, g, or t
atgctgctgtctgttttcgttataactattgccggctcatttctagcgcttttcctcctttcagtaaccgaccgggacaagaagggttgggttcaattctacgctaagggaaaggattcaggttttactttcaaggaacttgagctccttcagcgtttggctgttaagtcaaaactggaagatcctacaaccctgtttttttccaacagacaactggatacgtgcataagggatcttatcagaagcctgcgtatatcaggaactgaaaacgataaagtaaaccaggattttctttccaaattgtatgatttcaggcagaaaatcgagatggaaaagccaaagataaaacacggtatttccaattccaggcagataagcgacgggcagaatttgcggattttggcaaaaggttacggggtttttaaatcacaagtcgttaaaaacaccagcacttaccttgcgatatcaaggccggtaagcgagaaactgccgatgaatttttcctggcaggggttgaagctttctgtttatttctggcgggatgaggacgcgggctatgtttttgatacggcagttgaggatgaagttttttccaaaggcattgcctctattaaaatagcccactccgattctctttttagaacccagaaacggaaatctattcgcgtaaggaagcataaggcggcctatctctacccggttataaacgatgaagagttaaacaaaatagaaagcgagccgggcgttaaatgctatatcgaagacctttccgataccggatgtgccataacgatcggaggaagagccctgtcangcttgcgtnataaagcgcagtttattctgaataataatctgatatgtatgtccggtactgtcccgctcgttgatacagggagataccatagatcatgcttcatgtga

SEQ ID NO: 5074 - protein, 306 aa, Unknown
  Obtained from environmental sample
  SIGNAL (1)...(21)
  misc_feature (1)..(306): Xaa is any amino acid
MLLSVFVITIAGSFLALFLLSVTDRDKKGWVQFYAKGKDSGFTFKELELLQRLAVKSKLEDPTTLFFSNRQLDTCIRDLIRSLRISGTENDKVNQDFLSKLYDFRQKIEMEKPKIKHGISNSRQISDGQNLRILAKGYGVFKSQVVKNTSTYLAISRPVSEKLPMNFSWQGLKLSVYFWRDEDAGYVFDTAVEDEVFSKGIASIKIAHSDSLFRTQKRKSIRVRKHKAAYLYPVINDEELNKIESEPGVKCYIEDLSDTGCAITIGGRALSXLRXKAQFILNNNLICMSGTVPLVDTGRYHRSCFM

SEQ ID NO: 5075 - DNA, 333 bp, Unknown
  Obtained from environmental sample
  misc_feature (1)..(333): n is a, c, g, or t
ttgcccccttcaattaattacgattcgccaaaagagttaaaagcatttctcgaagagcgcggaattgggatgaggaaaaaattcggccagaattttatgattaacccgtacgagcgaaaaacactgcttgacgctttggaattgccggcaggggcaaaggtttgggaagcgggcgctgggttgggcgcaatgacggacgggcttttgaaacgcggcgctcaggttaccgcctttgaaattgatcccgcctttgcccgcgctctaagggaatttttcgctgatggttccgtcgagggtgggggagcattttgccttgtgaaggggacatactaa

SEQ ID NO: 5076 - protein, 110 aa, Unknown
  Obtained from environmental sample
  misc_feature (1)..(110): Xaa is any amino acid
MPPSINYDSPKELKAFLEERGIGMRKKFGQNFMINPYERKTLLDALELPAGAKVWEAGAGLGAMTDGLLKRGAQVTAFEIDPAFARALREFFADGSVEGGGAFCLVKGTY

SEQ ID NO: 5077 - DNA, 528 bp, Unknown
  Obtained from environmental sample
  misc_feature (1)..(528): n is a, c, g, or t
ttgtgtatggcttttataattcagcttctctttcagagccagacaggcgtttccctttctttcattctttcttatctggctttgctgggcatactcactctgggcgaggccgcgcgggatttgttaaagggaaggctgcctgagtttattggcgcgggcttttcggcttccataggggcgtttgtttttacggctcctgttgtcgctctgtatttcgcttctgtaaggccgataggaattcttgccggtcttgtagccgcgcctattgcctcgctttttatgattttgtccctggcggcgcttgccgcaagttttttgccctttcccgtatggaatatttttgactttattcttgagcggatttaccgcttgctggaatcgcttgttactttggcggggcgcgttccgggatttcctgcctcaaaccctgctgcggttctgattttttctattctcttttgcctcttgatttattttctctacgcgctgaacaggcgctacaggaacaacattgcccccttcaattaa

SEQ ID NO: 5078 - protein, 175 aa, Unknown
  Obtained from environmental sample
  misc_feature (1)..(175): Xaa is any amino acid
MCMAFIIQLLFQSQTGVSLSFILSYLALLGILTLGEAARDLLKGRLPEFIGAGFSASIGAFVFTAPVVALYFASVRPIGILAGLVAAPIASLFMILSLAALAASFLPFPVWNIFDFILERIYRLLESLVTLAGRVPGFPASNPAAVLIFSILFCLLIYFLYALNRRYRNNIAPFN

SEQ ID NO: 5079 - DNA, 438 bp, Unknown
  Obtained from environmental sample
  misc_feature (1)..(438): n is a, c, g, or t
ttgaccgcccccccgtcatcaagcatacccacaagcccgcctacggccgtctgcccgacaaccgcgcccatagcgacgctattctcaatcaccccgcccaactgcctccccacaagcaccccaacgcatccatatccgacgacggagtccgcggcgacggtaacgttttttatctctgcccccagcgtaaacccgaacaacccgacattaataccagccccggcggcctcatccgaaacagtgcggtttatgtacaacccggttatcttatacccccagccgtcaaacacccccctaaaagcctttgtcgaatcaacaagatccggaacgccaaaccctccctgcaccaacaccttacgctccccaataggcaagaaccccgccccgtcgttcaactcgcggctcccggaagcgtcaatgtctttgagaagtctgtaa

SEQ ID NO: 5080 - protein, 145 aa, Unknown
  Obtained from environmental sample
  misc_feature (1)..(145): Xaa is any amino acid
MTAPPSSSIPTSPPTAVCPTTAPIATLFSITPPNCLPTSTPTHPYPTTESAATVTFFISAPSVNPNNPTLIPAPAASSETVRFMYNPVILYPQPSNTPLKAFVESTRSGTPNPPCTNTLRSPIGKNPAPSFNSRLPEASMSLRSL

SEQ ID NO: 5081 - DNA, 669 bp, Unknown
  Obtained from environmental sample
  misc_feature (1)..(669): n is a, c, g, or t
atgggggaaaaaataaacggtattctcacatttattgatcaacgtgatttagaaggcgataacctgaagttttcaaaactttataataaaatatctccgttttattacattagtcagaaaatgttttgcagaataaaattcggtggggaatttaagtttagaaatgattttttgcaatatataaaagtaaatgataacgatttagtattggaaacatcggtgggaacggctgataatttttattatatgaataaaaaagccaaatattacggtgcggatatatctatgggaatgttaaaaatggcgttgaaacatacaaaaaaatggaaaatagacgcagaattaaattgttgcgaggcagaaaatttaccgtatgaggataatgtgtttgacgttgtatattcttgcggcggttttaatttttataatgataagcaaaaggccgttaatgaaatgatacgtgtgtcaaaacccggaaaaaagatttttgttattgatgaaacggaaaaaactgttaaggaaatatacaaaaacgttcctgggaaagaattatatgacaaaggaaaggcaagtgtgccgatagagtttattccaaaagggatggaagatgttgattggaaaatagtatgtaaaggatatatgtatatattgtcatttattaaaccgtaa

SEQ ID NO: 5082 - protein, 222 aa, Unknown
  Obtained from environmental sample
  DOMAIN (14)...(221): ubiE/COQ5 methyltransferase family
  misc_feature (1)..(222): Xaa is any amino acid
MGEKINGILTFIDQRDLEGDNLKFSKLYNKISPFYYISQKMFCRIKFGGEFKFRNDFLQYIKVNDNDLVLETSVGTADNFYYMNKKAKYYGADISMGMLKMALKHTKKWKIDAELNCCEAENLPYEDNVFDVVYSCGGFNFYNDKQKAVNEMIRVSKPGKKIFVIDETEKTVKEIYKNVPGKELYDKGKASVPIEFIPKGMEDVDWKIVCKGYMYILSFIKP

SEQ ID NO: 5083 - DNA, 693 bp, Unknown
  Obtained from environmental sample
  misc_feature (1)..(693): n is a, c, g, or t
gtgtcagccgataatcaaaatcaaaaccggagtcaaaacccgacccactacacgccgtccgacattgagcaaaagtggcaggcccgctggcgtgaggccgacctctacaagacggcgtacgacccgtctaagcccaagttctacgcgctcgacatgttcccgtacccgtcgggctccggcctccacgtggggcattgcgaggggtatacggccaccgacatcatcagccgctacaagcgtatgaacggctacaacgtcctgcaccccatgggctgggacgctttcggcctgccggcggagaactacgccatcaagacgggcatccacccgcgcgtcaccaccgagaaggccgtggccaactttaccaagcagatcaattcggtaggattcgcctatgattgggatagggagatcaacaccaccgatccggcgtactacaagtggacgcagtggatatttttgcagctgttcaaaaaggggctcgcctacgagggcaagatgcctatcaattggtgtcccgcctgtaagaccggtttggccaacgaggaggtggtgggcggcggcaagtgcgagcgttgcgggacggccgtcgagcgcaagatatgcgccagtggatactcaagatcaccgcctacgccgacaggctacttgaggatttgtccgaggtcgattggccngagtccacgctcttga

SEQ ID NO: 5084 - protein, 230 aa, Unknown
  Obtained from environmental sample
  misc_feature (1)..(230): Xaa is any amino acid
MSADNQNQNRSQNPTHYTPSDIEQKWQARWREADLYKTAYDPSKPKFYALDMFPYPSGSGLHVGHCEGYTATDIISRYKRMNGYNVLHPMGWDAFGLPAENYAIKTGIHPRVTTEKAVANFTKQINSVGFAYDWDREINTTDPAYYKWTQWIFLQLFKKGLAYEGKMPINWCPACKTGLANEEVVGGGKCERCGTAVERKICASGYSRSPPTPTGYLRICPRSIGXSPRS

SEQ ID NO: 5085 - DNA, 504 bp, Unknown
  Obtained from environmental sample
  misc_feature (1)..(504): n is a, c, g, or t
atggaccgagcgttgctgttatcggtcagcccgaccacgcttgaccgcattctgaagcctatacgctcgcgtcacggcaagggactgtacggtacaaaaccggggcttatgctgcgcaaccagatacctatcagaacctcactttgggatatcgattctccgggctacatggaagcggacaccgtcgcgcattgcggcaactacttggtcggagagttcgtacggagcctcactatgacagacatccacacagggtggacggtttgccgggcggtttggaataagaccgctgaggacatcgtggcgcaggtggcggacattgaacggaacctgcctttggaactgctcggcttcgactgcgacaacggggcggaattcattaaccactgtctgatgcgcttcctgacgaataggccaaaacccgttgaattcacgcgctccagaccgtacaaaaagaacgacaacgcatatgtagaacagaaaaactggattcacgcacggtag

SEQ ID NO: 5086 - protein, 167 aa, Unknown
  Obtained from environmental sample
  misc_feature (1)..(167): Xaa is any amino acid
MDRALLLSVSPTTLDRILKPIRSRHGKGLYGTKPGLMLRNQIPIRTSLWDIDSPGYMEADTVAHCGNYLVGEFVRSLTMTDIHTGWTVCRAVWNKTAEDIVAQVADIERNLPLELLGFDCDNGAEFINHCLMRFLTNRPKPVEFTRSRPYKKNDNAYVEQKNWIHAR

SEQ ID NO: 5087 - DNA, 492 bp, Unknown
  Obtained from environmental sample
  misc_feature (1)..(492): n is a, c, g, or t
atgtttatccttgtggggcttatttttattgtagtggctcttaacatcttccagtcgcagagaagggctgttttacaacgccgggaagagataggccttcttcgcgctgtcggcggacatgaaaaggcagtccgttttgtttttgtctgcgacggagcacttatcggacttacgggcgccggtataggccttgttttcggccttgttatcgcttcccatattcctcaatttttttcgttagtcgaaagtattgtaaatacgtgtatcggccttttaaacacaatggccggttttttggggattgagcgaacgggacactttgccgttttttcaccggctgttttttacattaaggaaattccttcaaggattttacctgccgaggtattgttgatttttatgtttggttttctttccgctctgtccgcggcatggtttgcgtcgcgaaaagcggctaaaatacaaccggcggaggtgctgcgttatgagtaa

SEQ ID NO: 5088 - protein, 163 aa, Unknown
  Obtained from environmental sample
  DOMAIN (1)...(156): Predicted permease
  misc_feature (1)..(163): Xaa is any amino acid
MFILVGLIFIVVALNIFQSQRRAVLQRREEIGLLRAVGGHEKAVRFVFVCDGALIGLTGAGIGLVFGLVIASHIPQFFSLVESIVNTCIGLLNTMAGFLGIERTGHFAVFSPAVFYIKEIPSRILPAEVLLIFMFGFLSALSAAWFASRKAAKIQPAEVLRYE

SEQ ID NO: 5089 - DNA, 408 bp, Unknown
  Obtained from environmental sample
  misc_feature (1)..(408): n is a, c, g, or t
ttggttttctttccgctctgtccgcggcatggtttgcgtcgcgaaaagcggctaaaatacaaccggcggaggtgctgcgttatgagtaatattcttgtcagggcgcaagacatagtaaaaaactatgtctcaggaacggagactctttatatattaaaaggcataaaccttcagatagaagaaggaatgtccgcggcgataacaggccagagcggaagcggcaaaagtacgctgcttaacatcttaggcgggcttgaccgtaccgacgaaggaagcgtttttatcggcaatgacgaaattacttcccttcccgaaaaagaaatgtcggtgtacagatcaaaacgcgtcggctttatctttcagtttcattattgcttaaagattttaccgcccttgaaaacatcatga

SEQ ID NO: 5090 - protein, 135 aa, Unknown
  Obtained from environmental sample
  misc_feature (1)..(135): Xaa is any amino acid
MVFFPLCPRHGLRREKRLKYNRRRCCVMSNILVRAQDIVKNYVSGTETLYILKGINLQIEEGMSAAITGQSGSGKSTLLNILGGLDRTDEGSVFIGNDEITSLPEKEMSVYRSKRVGFIFQFHYCLKILPPLKTS

SEQ ID NO: 5091 - DNA, 513 bp, Unknown
  Obtained from environmental sample
  misc_feature (1)..(513): n is a, c, g, or t
atggcgacctccgtagcccgctccccttgtccggcctacggcgtccaactcgtcaataaaaattatgcaggaggcgctgcgtctgccctgctcaaagagatccctgacgcggctggcccccacgccgacaaacatctcgacaaaatcggagccggacatgtggaaaaaggcaacccccgcttcgcccgcgaccgagcgcgccatcagagtcttgccggttccgggcatgcccacaagcaggacgcccttgggaatccttgctcccatttttgtaaacttctgggggtttttcaggaaagccactacttcctcaagctcaaacttggcgtctttctgtccggcgacatcggcaaagctaactttttttccctcgtcatggtaacgctttgccttgcttttgccgaattggaaggccttgcctcctccgcccggcatactccggaacataaaccagataaagccgaaacctataatccaggggaaaagatcaatcagtatgcgccagaagcttaa

SEQ ID NO: 5092 - protein, 170 aa, Unknown
  Obtained from environmental sample
  misc_feature (1)..(170): Xaa is any amino acid
MATSVARSPCPAYGVQLVNKNYAGGAASALLKEIPDAAGPHADKHLDKIGAGHVEKGNPRFARDRARHQSLAGSGHAHKQDALGNPCSHFCKLLGVFQESHYFLKLKLGVFLSGDIGKANFFSLVMVTLCLAFAELEGLASSARHTPEHKPDKAETYNPGEKINQYAPEA

SEQ ID NO: 5093 - DNA, 318 bp, Unknown
  Obtained from environmental sample
  misc_feature (1)..(318): n is a, c, g, or t
atgcaggaggcgctgcgtctgccctgctcaaagagatccctgacgcggctggcccccacgccgacaaacatctcgacaaaatcggagccggacatgtggaaaaaggcaacccccgcttcgcccgcgaccgagcgcgccatcagagtcttgccggttccgggcatgcccacaagcaggacgcccttgggaatccttgctcccatttttgtaaacttctgggggtttttcaggaaagccactacttcctcaagctcaaacttggcgtctttctgtccggcgacatcggcaaagctaactttttttccctcgtcatggtaa

SEQ ID NO: 5094 - protein, 105 aa, Unknown
  Obtained from environmental sample
  misc_feature (1)..(105): Xaa is any amino acid
MQEALRLPCSKRSLTRLAPTPTNISTKSEPDMWKKATPASPATERAIRVLPVPGMPTSRTPLGILAPIFVNFWGFFRKATTSSSSNLASFCPATSAKLTFFPSSW

SEQ ID NO: 5095 - DNA, 768 bp, Unknown
  Obtained from environmental sample
  misc_feature (1)..(768): n is a, c, g, or t
gtggaatttttgcgtgcttattcccaactcggcgccaaacccgaatacgccgccgtcggtaaaacgcgtggatgcgttaacgtaaacacaggccgcgtcaatttcgtttcggaattgccgggcggaatgcaggtcattagtcagtatagcttcagaatgtttagtcccataacggttgatgtgttcaatcgcctcctggcaagagccaacggttttaatcgccagaatagcgtcaaggaattcagtgctccagtcttcctcgcatgcgtctctgagtctcagattaaccaaagcttcttcccttatcgcggccctggattcggcgtcacagcggaattcgaccgctccggcaagccgggatacaagcctgaacatcaagggaccaagcgtcccgcgatgcaccagcagggtttccacagcattgcaggcgccgggcttttgcagtttggcattggctataatttccacggcattatccatattggcgctgggttccacatagatatggcaattaccctcgccggtttcgataaccggaattcgcgcgttctgaacaacccgctgaatcaattccctgccgccgcggggcagcactacgtcaatccagcccctggcggtgaggatttcgtctacatcttcatggctgccgggttttgcatcggagagcgccacagcgtcaggaatgccgccgcccgactccagtcccattttaatcgcagttacaagcgcccggttagactccagcgcagaggacgatccccgcaataa

SEQ ID NO: 5096 - protein, 255 aa, Unknown
  Obtained from environmental sample
  misc_feature (1)..(255): Xaa is any amino acid
MEFLRAYSQLGAKPEYAAVGKTRGCVNVNTGRVNFVSELPGGMQVISQYSFRMFSPITVDVFNRLLARANGFNRQNSVKEFSAPVFLACVSESQINQSFFPYRGPGFGVTAEFDRSGKPGYKPEHQGTKRPAMHQQGFHSIAGAGLLQFGIGYNFHGIIHIGAGFHIDMAITLAGFDNRNSRVLNNPLNQFPAAAGQHYVNPAPGGEDFVYIFMAAGFCIGERHSVRNAAARLQSHFNRSYKRPVRLQRRGRSPQ

SEQ ID NO: 5097 - DNA, 846 bp, Unknown
  Obtained from environmental sample
  misc_feature (1)..(846): n is a, c, g, or t
ttgcggggatcgtcctctgcgctggagtctaaccgggcgcttgtaactgcgattaaaatgggactggagtcgggcggcggcattcctgacgctgtggcgctctccgatgcaaaacccggcagccatgaagatgtagacgaaatcctcaccgccaggggctggattgacgtagtgctgccccgcggcggcagggaattgattcagcgggttgttcagaacgcgcgaattccggttatcgaaaccggcgagggtaattgccatatctatgtggaacccagcgccaatatggataatgccgtggaaattatagccaatgccaaactgcaaaagcccggcgcctgcaatgctgtggaaaccctgctggtgcatcgcgggacgcttggtcccttgatgttcaggcttgtatcccggcttgccggagcggtcgaattccgctgtgacgccgaatccagggccgcgataagggaagaagctttggttaatctgagactcagagacgcatgcgaggaagactggagcactgaattccttgacgctattctggcgattaaaaccgttggctcttgccaggaggcgattgaacacatcaaccgttatgggactaaacattctgaagctatactgactaatgacctgcattccgcccggcaattccgaaacgaaattgacgcggcctgtgtttacgttaacgcatccacgcgttttaccgacggcggcgtattcgggtttggcgccgagttgggaataagcacgcaaaaattccacacgcgcggaccaatgggtttggaggctttaacctcgtancagtatttggttaacggatcggggcaggtgagaatactttga

SEQ ID NO: 5098 - protein, 281 aa, Unknown
  Obtained from environmental sample
  misc_feature (1)..(281): Xaa is any amino acid
MRGSSSALESNRALVTAIKMGLESGGGIPDAVALSDAKPGSHEDVDEILTARGWIDVVLPRGGRELIQRVVQNARIPVIETGEGNCHIYVEPSANMDNAVEIIANAKLQKPGACNAVETLLVHRGTLGPLMFRLVSRLAGAVEFRCDAESRAAIREEALVNLRLRDACEEDWSTEFLDAILAIKTVGSCQEAIEHINRYGTKHSEAILTNDLHSARQFRNEIDAACVYVNASTRFTDGGVFGFGAELGISTQKFHTRGPMGLEALTSXQYLVNGSGQVRIL

SEQ ID NO: 5099 - DNA, 711 bp, Unknown
  Obtained from environmental sample
  misc_feature (1)..(711): n is a, c, g, or t
atggtcagaatcggccgaggacgcattcgcttctatgacggctcccgcgaaatagacatgaacagttttggagcaatagcctttcactatatggtcacttggcgcaaggaagagggcgttttggcaaagtccgttgccacctcaaatttcgcaaatatcatagccgcaaaattgggcattccggtcatggaaaccccagtcggctttaaaaatttccgcccctggctaaaaagaaacgctaaccccaaggcgctcatagcctttgaggaatccgatggcataaccggcttgaacaataccctggaaaaagacgccatgtttgggcttttgatagctttggagataatggcagtaacaggcaaaaatttaggcgaatatttagaccttttgtatgcggaatacggccgcctttaccccgaacgttcgggttttgaagtggaaaaatccatggttggagatccacttctggcaaaagtggcggaaatcgcaaaatctgcgcaacccggggcaaaaatctccattggcaaaaaaagcaaggttgtacgcgagctattgaccatagacggcgttaaaataatcttcaatgacgattcctggatgctaatacgcccaagcggaacagagccaaaagtccgtatttacgccgaatgccgcgatgctgaggaaaaagaggatatgtttacagccgcaaaagacctgttttttaagtaa

SEQ ID NO: 5100 - protein, 236 aa, Unknown
  Obtained from environmental sample
  DOMAIN (161)...(236): Phosphoglucomutase/phosphomannomutase, C-terminal domain
  misc_feature (1)..(236): Xaa is any amino acid
MVRIGRGRIRFYDGSREIDMNSFGAIAFHYMVTWRKEEGVLAKSVATSNFANIIAAKLGIPVMETPVGFKNFRPWLKRNANPKALIAFEESDGITGLNNTLEKDAMFGLLIALEIMAVTGKNLGEYLDLLYAEYGRLYPERSGFEVEKSMVGDPLLAKVAEIAKSAQPGAKISIGKKSKVVRELLTIDGVKIIFNDDSWMLIRPSGTEPKVRIYAECRDAEEKEDMFTAAKDLFFK

SEQ ID NO: 5101 - DNA, 723 bp, Unknown
  Obtained from environmental sample
  misc_feature (1)..(723): n is a, c, g, or t
gtgaacatttcccaataccgtgattccggattggatcttccagggctcctgaaatttctccttaaaggaaccgctaaaataaggctaaggctttcctcaatagaacttgaatcggaagaacctgagccaggactttttggtgatgtgtttctccgcgttcttgctgacgaaaggatacggcctcattttcatctttccctgcaatcgggaagtgctgcaatactggcaaagatgggcaggtcctatagccctgcggatatcgaaaaaactgtggcgctgcttcgcagtattcgccaggacccgtttttggcctgcgatattattgccggatttcccggggaaacagagtgtgaatttgaaaaaacctacaaattgatggaaaagcttaattttgcctggatacacgcctttcagtattcaaagcgccctggaaccgcagcttttggtttttcaggcgatgtaggcgggaaggatgccgcaagaagggtagagcttttgacaactctggcgcgtaaaggccgcctggaatacattcagcgctggatatgcagggaagtggaagccgttttagaagcaggggataatttgccgaaaggtatggttcaggcggttacggaaaactatctgaaagtccgcgtggattacggggatgaaaaaccccccttcccctggcagtcttattcgatgctatatagcggaaattgcagaaaccggcagttatga

SEQ ID NO: 5102 - protein, 240 aa, Unknown
  Obtained from environmental sample
  misc_feature (1)..(240): Xaa is any amino acid
MNISQYRDSGLDLPGLLKFLLKGTAKIRLRLSSIELESEEPEPGLFGDVFLRVLADERIRPHFHLSLQSGSAAILAKMGRSYSPADIEKTVALLRSIRQDPFLACDIIAGFPGETECEFEKTYKLMEKLNFAWIHAFQYSKRPGTAAFGFSGDVGGKDAARRVELLTTLARKGRLEYIQRWICREVEAVLEAGDNLPKGMVQAVTENYLKVRVDYGDEKPPFPWQSYSMLYSGNCRNRQL

SEQ ID NO: 5103 - DNA, 360 bp, Unknown
  Obtained from environmental sample
  misc_feature (1)..(360): n is a, c, g, or t
ttggtgcgaaaaccccctcgggatatttcatcggcaatgcgggataaagacacaggcgggcctgttcattttgactgtgtggccgcaaggatcacgtttggtgaaaaacttgaaaagggcgattccgttgtttacataggagcaggccgttttggcatagtaaatttcggaagctcgggagcgtctcagcgatatgacggttcatcacaggactccggcaaatcagaaaacccttcagacattcaggacaattcccccggaaaccgcggctttacaataaaaaaaattatcgaatgggaaaataaagataaaagagcggaatggcgctcggcaatttgtgatcattattcagtaacttaa

SEQ ID NO: 5104 - protein, 119 aa, Unknown
  Obtained from environmental sample
  misc_feature (1)..(119): Xaa is any amino acid
MVRKPPRDISSAMRDKDTGGPVHFDCVAARITFGEKLEKGDSVVYIGAGRFGIVNFGSSGASQRYDGSSQDSGKSENPSDIQDNSPGNRGFTIKKIIEWENKDKRAEWRSAICDHYSVT

SEQ ID NO: 5105 - DNA, 978 bp, Unknown
  Obtained from environmental sample
  misc_feature (1)..(978): n is a, c, g, or t
ttgaggaacggcgcaaataggcggcaaggacacgcgggcgctctttcgcggcttgttgatagaggaggccggggagcgttcatggagcgtcaggggaagtatccggtgatatttctgagcttcaaagatgttggaaaagagaccctcgatggaacttgcgcggcattcaagaatataatatcggaggaattcggccggcacaattatgtcaaagaaaaaatcggcgattcgacaaacttgaaaaagtttgaaagcctctcttccggcgagggagatatttctttatatggcgattcactcaaatttttaagcaagtgcttggagaattaccacggcagaaagaccgtaatcctgatcgatgagtacgatgttccattgcaaaagtcttggcttttcggttttttcaatgagttgattgagtttatccgcccgctgcttagcagcgcgctcaaagacaatccgcatttgcaattttccgttatgaccggatgcctgcgaatttctaaagagagtatatttaccggactcaaccatttagacgtggtttcgatactcaataagtattattccgaatatttcggctttacgcaaaacgagatagacgccatgcttacgtactacgatctggaggacaaaacacatatagtcagagattggtacaacggctatctattcggtaatacggaagtgtacaacccatggagcagtttgtatgtggcgaggtcttggattaatgacataaatgagccacccaaaccctactgggtaaacaccagcggcaacgacgtcattcgcgacatgatagataagatgagcctcgaagcgaaagccggtctagaaaatctgatggccggcggaaacatctctgcgacagtttgcgaaggcgtaacgtatgacgaaatatataacagcgccgaatacctctggaaacttcctgtttttcacgggctacctgaaaaaggtcggagaatctgttga

SEQ ID NO: 5106 - protein, 325 aa, Unknown
  Obtained from environmental sample
  DOMAIN (1)...(320): Protein of unknown function (DUF1703)
  misc_feature (1)..(325): Xaa is any amino acid
MRNGANRRQGHAGALSRLVDRGGRGAFMERQGKYPVIFLSFKDVGKETLDGTCAAFKNIISEEFGRHNYVKEKIGDSTNLKKFESLSSGEGDISLYGDSLKFLSKCLENYHGRKTVILIDEYDVPLQKSWLFGFFNELIEFIRPLLSSALKDNPHLQFSVMTGCLRISKESIFTGLNHLDVVSILNKYYSEYFGFTQNEIDAMLTYYDLEDKTHIVRDWYNGYLFGNTEVYNPWSSLYVARSWINDINEPPKPYWVNTSGNDVIRDMIDKMSLEAKAGLENLMAGGNISATVCEGVTYDEIYNSAEYLWKLPVFHGLPEKGRRIC

SEQ ID NO: 5107 - DNA, 765 bp, Unknown
  Obtained from environmental sample
  misc_feature (1)..(765): n is a, c, g, or t
gtgtctgactacttgagtaaaaatgaaattaataaaacaataaactcggcaatctctgaatatggggaaattaacaatatacatgaaatatggagggaacctattatagagatcatttctgcaagcaatgaaaaaataaaagagctaaaacgagctgtatctttggaacattttatgcctcaggattttttacaggacgcaaaaagcataataagtttttttattccgtttcatgaaaaaatagtaaagagtaatattaacggaacaatggcttcaaaagaatgggtcacggcatatattaaaacaaatgatttgataaaagtaattaataataaaatagaagaattaatgcaaggaaacggatataaaaccggtaaaattcccgcaacgcataattttgatgaaaaaacgttaataagtaattggtctcacagacatatagcatatatagcgggcattggaacatttggaataaataatatgcttataaccaaaaaaggatgttgcggaagatttggcagtataataatcaactatgagttaaataattatcaacaagttaacaaaataaaggaaaaatgtttatataagttaaatggagattgtggaatatgccacggtagatgtatagtaaatgcgtatgaaaataataacttcaatagaaatacatgctataaacagtgtttggaaaacgcaaagtaccataaagaaactggatacgcggatgtatgcggaaagtgcctggtcggattgccttgttcataa

SEQ ID NO: 5108 - protein, 254 aa, Unknown
  Obtained from environmental sample
  misc_feature (1)..(254): Xaa is any amino acid
MSDYLSKNEINKTINSAISEYGEINNIHEIWREPIIEIISASNEKIKELKRAVSLEHFMPQDFLQDAKSIISFFIPFHEKIVKSNINGTMASKEWVTAYIKTNDLIKVINNKIEELMQGNGYKTGKIPATHNFDEKTLISNWSHRHIAYIAGIGTFGINNMLITKKGCCGRFGSIIINYELNNYQQVNKIKEKCLYKLNGDCGICHGRCIVNAYENNNFNRNTCYKQCLENAKYHKETGYADVCGKCLVGLPCS

SEQ ID NO: 5109 - DNA, 450 bp, Unknown
  Obtained from environmental sample
  misc_feature (1)..(450): n is a, c, g, or t
atgcaatccctgagcgaaatggggatgatccccgccctagaagaggccgtgctgcgcgggaggacgctcttcctcggtatatgcgtgggcctgcaggtgctcttcgaccacagcgacgaggacgacacagactgcctcggatggcttagcggccgcgtcgtcaaattcgacggctcaaaagtcagagtcccgcagatggggtggaatcaggtgaaattcactcagcagacgcccgtcaaaacccaagaagactacttttacttcgtcaactcatatcacgcgaaacccgaagacgggtctgcggtatggggatcggcggactacaacggcgcgttcaccgcggccgttcacaaggataacatctacgccacccagtttcacgcggaaaagagcggcgaggccggactggctctgctcaacggttttctgaatctaaaaggcggggcttga

SEQ ID NO: 5110 - protein, 149 aa, Unknown
  Obtained from environmental sample
  DOMAIN (2)...(145): Glutamine amidotransferase class-I
  misc_feature (1)..(149): Xaa is any amino acid
MQSLSEMGMIPALEEAVLRGRTLFLGICVGLQVLFDHSDEDDTDCLGWLSGRVVKFDGSKVRVPQMGWNQVKFTQQTPVKTQEDYFYFVNSYHAKPEDGSAVWGSADYNGAFTAAVHKDNIYATQFHAEKSGEAGLALLNGFLNLKGGA

SEQ ID NO: 5111 - DNA, 393 bp, Unknown
  Obtained from environmental sample
  misc_feature (1)..(393): n is a, c, g, or t
atgctgaccaaacgacttatagcttgcttcgacatagtcgacggcatggtgacaaaggcggtgcaattccaagacaacatccgcgtcgcgcccgccggagaactcgccggcaccatgtacgaagagcagatcgacgaactgatcttctacgacatcaccgcgagcgccgagagacgcggcatagacatcaagacggttaaagaggtcgcgggccgcgtcttcatcccgttcaccgtcggcggagggctcaaagatttagacgatatgtacgaggcgctcanagccggagccgagaaagtaagcgtagactccatggccgtgcggaacccgcagatcatagccgacggcgccnaagccttcggctcgcagtgcgtagtcttctccaccaagtaa

SEQ ID NO: 5112 - protein, 130 aa, Unknown
  Obtained from environmental sample
  DOMAIN (5)...(130): Histidine biosynthesis protein
  misc_feature (1)..(130): Xaa is any amino acid
MLTKRLIACFDIVDGMVTKAVQFQDNIRVAPAGELAGTMYEEQIDELIFYDITASAERRGIDIKTVKEVAGRVFIPFTVGGGLKDLDDMYEALXAGAEKVSVDSMAVRNPQIIADGAXAFGSQCVVFSTK

SEQ ID NO: 5113 - DNA, 522 bp, Unknown
  Obtained from environmental sample
  misc_feature (1)..(522): n is a, c, g, or t
atgggctccaggttccgcggaattcccaaagtcctcttttttattgccgcggcgctttatcccgtatttatattttactttctggtaatccgtaaaacccctttacggatgttttcccttttcgttatggcctttgccctccttatttttatcacgggaacatcaaaaaaaaaagaaacaggaggcgtttccttcttttggaattccgcggtgcttttggcgctgggcgctttatgcttttttgttaactccgccatcattcttaaattctaccccctgctgatgaatattctgtttcttggggcttttggcagcacccttttttccccccccaccatgattttccgttttgcggcaatgcaggacagctccattaaaggctccctgaacgaaaaaagggtcgccgcctactgccgaaaagtaacctatgtctggtgcgggttttttatatttaacggaagcattgccgcatggactattttttccggtttcgacgcngtgtggtctgtttataccggctaa

SEQ ID NO: 5114 - protein, 173 aa, Unknown
  Obtained from environmental sample
  misc_feature (1)..(173): Xaa is any amino acid
MGSRFRGIPKVLFFIAAALYPVFIFYFLVIRKTPLRMFSLFVMAFALLIFITGTSKKKETGGVSFFWNSAVLLALGALCFFVNSAIILKFYPLLMNILFLGAFGSTLFSPPTMIFRFAAMQDSSIKGSLNEKRVAAYCRKVTYVWCGFFIFNGSIAAWTIFSGFDAVWSVYTG

SEQ ID NO: 5115 - DNA, 390 bp, Unknown
  Obtained from environmental sample
  misc_feature (1)..(390): n is a, c, g, or t
atgggagaattcaggacagagaggataggcgctctgattcaggaaaaaatcgctgccttcatcatcgaaggaaaaatcaaagacccaagggtaaatccatttttatcggtttcccgcgtaaaggtttcaaacgatctctcctgggccgatgtctatatctccacattcaaacccgaaactaagctcgcgcgcggcgtagaaggcttgcaaagcgccgcaggatttatacagtcccaattggctacggaaatgaggataaggttgacgcccaggctccgtttccatgaagatcaaagcatccggcagggatttgaaatggtaaaaaaaatcgaaaaaattatcgaggaagacgctgaaaaagatccggacaagacagggcaaagcctgtaa

SEQ ID NO: 5116 - protein, 129 aa, Unknown
  Obtained from environmental sample
  DOMAIN (5)...(110): Ribosome-binding factor A
  misc_feature (1)..(129): Xaa is any amino acid
MGEFRTERIGALIQEKIAAFIIEGKIKDPRVNPFLSVSRVKVSNDLSWADVYISTFKPETKLARGVEGLQSAAGFIQSQLATEMRIRLTPRLRFHEDQSIRQGFEMVKKIEKIIEEDAEKDPDKTGQSL

SEQ ID NO: 5117 - DNA, 588 bp, Unknown
  Obtained from environmental sample
  misc_feature (1)..(588): n is a, c, g, or t
ttgccagggatagtctggattttttgggctttttggaacgcaaaagcggaaaatggagctacggctatgtctttgcgggtaattgaatggccttcatttttagatgattccccgccggatttttgctcggcgatggcaatcggggtttttgacggcgtccatcttggccaccaggcgcttattgaaaggatagtgcggcgcgggccaaaccctacggttgtaactttcagggaaaatccaaaaaaagtgctgtcgcggattgcgggaaccgaaacatccgggcagtataaaaggaatatttacagtctgaaacaaaaaatagaaatttttgacagcctgggcgttaagttccttgtcctgattgacttttctgaagaattcagtaagctaaagggaagggaattccttgatctgcttgggaataatggcaagatggcttttttagccgttggcagtaatttccgctgtgggtttgctcaggataccgacgcggttctggccaagaaggtgaatgaagaaaagggaataccaaccgagcttattatgccggtatattctgcgggtagcaggcctgtcagttccagctaa

SEQ ID NO: 5118 - protein, 195 aa, Unknown
  Obtained from environmental sample
  DOMAIN (43)...(195): FAD synthetase
  misc_feature (1)..(195): Xaa is any amino acid
MPGIVWIFWAFWNAKAENGATAMSLRVIEWPSFLDDSPPDFCSAMAIGVFDGVHLGHQALIERIVRRGPNPTVVTFRENPKKVLSRIAGTETSGQYKRNIYSLKQKIEIFDSLGVKFLVLIDFSEEFSKLKGREFLDLLGNNGKMAFLAVGSNFRCGFAQDTDAVLAKKVNEEKGIPTELIMPVYSAGSRPVSSS

SEQ ID NO: 5119 - DNA, 453 bp, Unknown
  Obtained from environmental sample
  misc_feature (1)..(453): n is a, c, g, or t
ttgagcttgttttcctgtcggctccctgtatgccgatttcaagtccgcgtttctccggggacctatatacgatccctggcgcgggacatagccctggctgcggggactagggcgcatctttcctccntgcggcgcaacatggttgggcccttccggctggaagacgccgtggacaaagattgcccttgctttagcgaggccttgcttccaataagcgcctctctttntgagaaactccagctcccttatttttttatagattccaatgcggaagaaaggtttatccatggcaagagccttgacggcattattaaagccgaaaacctttcgacagaaaaagacgcgtcggctatagctgccggagtttttgccagggatagtctggattttttgggctttttggaacgcaaaagcggaaaatggagctacggctatgtctttgcgggtaattga

SEQ ID NO: 5120 - protein, 150 aa, Unknown
  Obtained from environmental sample
  misc_feature (1)..(150): Xaa is any amino acid
MSLFSCRLPVCRFQVRVSPGTYIRSLARDIALAAGTRAHLSSXRRNMVGPFRLEDAVDKDCPCFSEALLPISASLXEKLQLPYFFIDSNAEERFIHGKSLDGIIKAENLSTEKDASAIAAGVFARDSLDFLGFLERKSGKWSYGYVFAGN

SEQ ID NO: 5121 - DNA, 486 bp, Unknown
  Obtained from environmental sample
  misc_feature (1)..(486): n is a, c, g, or t
atgagaaagaatagaagtctccttgaaggagcggaataccatgttacagccaggataaaccggggagaaatgattttcttgaatcagggggatagagatctatttatggaaaccctcaaacgagccaagaaaaaatttattttttcactcaaaaacttctgtgttatgggaaatcatgtccatttcctaataaaaccaggaccgggagtatcactttcaaaaataatgcaatggcttttaggtgtttttgcccaattgtggaataaaagacatggtttatctggtcatttatggggggataggtttttttcgcgaataatttcaggaattctggattttttaagagttttttcatatattgaccaaaatcctgttgcagcaggtttagtagattattccgagcaatgggagtatggtggggcatggtatcaaaaaaacaggattaatgatattattgaattagttgattctgtggctcctgaatag

SEQ ID NO: 5122 - protein, 161 aa, Unknown
  Obtained from environmental sample
  DOMAIN (52)...(102): Protein of unknown function (DUF1568)
  misc_feature (1)..(161): Xaa is any amino acid
MRKNRSLLEGAEYHVTARINRGEMIFLNQGDRDLFMETLKRAKKKFIFSLKNFCVMGNHVHFLIKPGPGVSLSKIMQWLLGVFAQLWNKRHGLSGHLWGDRFFSRIISGILDFLRVFSYIDQNPVAAGLVDYSEQWEYGGAWYQKNRINDIIELVDSVAPE

SEQ ID NO: 5123 - DNA, 504 bp, Unknown
  Obtained from environmental sample
  misc_feature (1)..(504): n is a, c, g, or t
atgcaagaactgtttgaacaaatagtaaagggccgcgcttttgaatacgcggttatacccactgccgccattaccttttcgccggaactgcttgaagcctgcgaagccaacgcatgcggaaaatataaccgttgctggacctgtcccccggctgtgccccctccggaagaacaacaacaaaaaatacgctctttttcctccgcctttgtttttaccaccaaatcaaacctggatgattcttttgattatgaggggatgatgcgggcaaaggattaccatgacaaactaaccctggaactgcatgaaaagtttggtaaaaccaatcccgttttcggcgcggggggctgtacgctctgtaccgactgcgcttatcctgatccctgccgcttccccgaaaaaatcttccccgcgattgaagcggcagggatcaacgtcaccgaactcagccgcgccgccggcctgcgttataataacgcgcanacaccgtcacttacttttcaatga

SEQ ID NO: 5124 - protein, 167 aa, Unknown
  Obtained from environmental sample
  misc_feature (1)..(167): Xaa is any amino acid
MQELFEQIVKGRAFEYAVIPTAAITFSPELLEACEANACGKYNRCWTCPPAVPPPEEQQQKIRSFSSAFVFTTKSNLDDSFDYEGMMRAKDYHDKLTLELHEKFGKTNPVFGAGGCTLCTDCAYPDPCRFPEKIFPAIEAAGINVTELSRAAGLRYNNAXTPSLTFQ

SEQ ID NO: 5125 - DNA, 939 bp, Unknown
  Obtained from environmental sample
  misc_feature (1)..(939): n is a, c, g, or t
gtgataaaaacaaactcaggatgggatcaaaaccgcgagcgagaaagcttttgggcgaataacgcagtgcagataccccaggcatggatacgcgacggctgcggggaaagggctatcacacgcgaccttaaatggggcatacccgtacccaagccgggttatgaaaacaaagtcttctatgtatggttcgacgcgcccataggctatatttcaatttccggctgccttggcaaagacctggcggacggattccacgatttcgcgcaggccgcccgtaagacaaagtttccgaactggcagaaatttgtcgactactggtggaaaagcccggacgatgtggaactgtttcaatttataggcaaagacaacatccccttccatacggtgatattcccctcaagcctccttggctcgggcgacaactggaccatgctgcaccatatatccagctcggagtaccttaactacgaaagcggaaaattctccaagtccaggggcataggcgttttcggcacagacgcgatggaaacgggaatccccgccgacgtatggcgtttttacattttttataaccgcccagagaaatcggacgtgcagtttacatggaaagattttcaggagaaggtaaacggcgaattgatcggaaaccttggaaacctcgtcaaccgtaccctgctgtttattatccgttattatgacggcagactgcccaccggcctgcccgatcaggttctttggcagaacgtcagaaaatatgaaaattccattacggaaaaacttgagcgagttgatctgagggacgcctttcgtgagatctttgagctttcctcgtacgcgaacaaatattttcaggacgcggaaccctggcggctaaggacggaagacccggtcagggccaaggcggtatccgcgaccttgcccacatcgtgcgcgacatag

SEQ ID NO: 5126 - protein, 312 aa, Unknown
  Obtained from environmental sample
  misc_feature (1)..(312): Xaa is any amino acid
MIKTNSGWDQNRERESFWANNAVQIPQAWIRDGCGERAITRDLKWGIPVPKPGYENKVFYVWFDAPIGYISISGCLGKDLADGFHDFAQAARKTKFPNWQKFVDYWWKSPDDVELFQFIGKDNIPFHTVIFPSSLLGSGDNWTMLHHISSSEYLNYESGKFSKSRGIGVFGTDAMETGIPADVWRFYIFYNRPEKSDVQFTWKDFQEKVNGELIGNLGNLVNRTLLFIIRYYDGRLPTGLPDQVLWQNVRKYENSITEKLERVDLRDAFREIFELSSYANKYFQDAEPWRLRTEDPVRAKAVSATLPTSCAT

SEQ ID NO: 5127 - DNA, 315 bp, Unknown
  Obtained from environmental sample
  misc_feature (1)..(315): n is a, c, g, or t
atgaatttaaaaaccgccgtggtaaatacggatccaaattccccggactatgaacccactatgtatcacctgaggctgattaaaaaactgcttatgcaggccgccgatcgttaccgtgaaaaatacgaattatccaccaaccgtattgatgattttaaaatgggcataaattttcttaatgctttacgtagaattcacgcgcttcttggagaacggcctgaggccgaaacgctcaagaaaaaggcggaaatttggtcttcaaaactcgaaacggatcataaaaagcacgaagaagctcctgccaggaaaagttaa

SEQ ID NO: 5128 - protein, 104 aa, Unknown
  Obtained from environmental sample
  misc_feature (1)..(104): Xaa is any amino acid
MNLKTAVVNTDPNSPDYEPTMYHLRLIKKLLMQAADRYREKYELSTNRIDDFKMGINFLNALRRIHALLGERPEAETLKKKAEIWSSKLETDHKKHEEAPARKS

SEQ ID NO: 5129 - DNA, 843 bp, Unknown
  Obtained from environmental sample
  misc_feature (1)..(843): n is a, c, g, or t
ttggccgtccaacccgttaataccgcgtataaaatcactctgaacgtggatgatctaggcggtagttctaccacttccggaagccttggagcagtgctttcagcaaacccttacaaatacgtaaacattgacctttccggcagtacaataagcagtattggggagggggcttttaacggttgtaactaccttgtcagcataaccatacccaacagtgttaccagcattgggatgcaggctttttcctattgctgcagccttaccagcgtaaccatacctaacagtgttaccagcattggtgggggagctttttccggtagcggccttaccagcataaccatacccaacaacgttatcagcattggggaaggggcttttaccttttgctccaaccttaccgcaataagcgttgattcgggtaatagtgagtatagttcccaagacggtgcattgtataacaagaataaaaccgttttacatacatatccggcaggaatatcaggaaccgtctttaccataccgaacagcgttaccagcattggggattgcgcttttttctattgccgcaaccttaccagcataaccatccccaacaatgttaccagtattaggaggagcgcttttgcctattgtaccagctttaccaacgtaaccataccgaacagtgttaccagcattgaggattgcgctttttacctgtgcaccggccttaccagcgtaaccataccaaacagcgttaccagcattgggtgtaacgcttttgcctattgcaccagccttaccacaataaacgttgattccggtaatagcgcttatagttcccaagacgagcgtattgtataa

SEQ ID NO: 5130 - protein, 280 aa, Unknown
  Obtained from environmental sample
  misc_feature (1)..(280): Xaa is any amino acid
MAVQPVNTAYKITLNVDDLGGSSTTSGSLGAVLSANPYKYVNIDLSGSTISSIGEGAFNGCNYLVSITIPNSVTSIGMQAFSYCCSLTSVTIPNSVTSIGGGAFSGSGLTSITIPNNVISIGEGAFTFCSNLTAISVDSGNSEYSSQDGALYNKNKTVLHTYPAGISGTVFTIPNSVTSIGDCAFFYCRNLTSITIPNNVTSIRRSAFAYCTSFTNVTIPNSVTSIEDCAFYLCTGLTSVTIPNSVTSIGCNAFAYCTSLTTINVDSGNSAYSSQDERIV

SEQ ID NO: 5131 - DNA, 909 bp, Unknown
  Obtained from environmental sample
  misc_feature (1)..(909): n is a, c, g, or t
atggatttagacagcgcggaaaaaggcggatatccgcatttcatgttaaaagaaatcatggaacagccgaaagtattccgggatactattaaatccgcgttaactacatataaaagcgttattgataatatagaagtggcaaactttaacaaaatcgtaattaccgcctgcggctcggcgtataacaccggagttgtcgctaaatatatatttgagcgtttatgcggcttcccgtttatagagacggagcttgcgagcgagttccggtacagggacacggttatagacgacaagacgcttgtgatattaatcagccaatccggagagaccgccgacactattgccgcaatgcgcaaagcaaagtcaaaaggcgctgtaacgctgtcaattgtcaatgtggtaggcagtaccatcgccagagaagctgatttttgcctgcttacaaccgcgggccccgaaattgccgtagcgacgacaaaagctttttccgcccaacttgtattattgtacgttctagcggtaaggtttgccgctaaattgggaaaaatatcggatgcagcggagaaagagttatggcggcaaatcaacgccctgcccgaaaaagtgtcaggcttgcttgagaaagtagacgcaattcaaatgtacgccgccaactgtgtaggctgcaagagcattttttttatcggcaggaacatagattatgccatctctcttgaaggctcacttaaactaaaagaaatctcctacatccattccgaagcctacgccggcggcgaattaaagcacggcccgatttctctgatagaggaggacactctggtagtagccatctcaaactacgccgctctttacggcaaaataatgagcaatatagagcaggaaaaagccgcggcgcgaaggttctgttaa

SEQ ID NO: 5132 - protein, 302 aa, Unknown
  Obtained from environmental sample
  DOMAIN (43)...(178): SIS domain
  misc_feature (1)..(302): Xaa is any amino acid
MDLDSAEKGGYPHFMLKEIMEQPKVFRDTIKSALTTYKSVIDNIEVANFNKIVITACGSAYNTGVVAKYIFERLCGFPFIETELASEFRYRDTVIDDKTLVILISQSGETADTIAAMRKAKSKGAVTLSIVNVVGSTIAREADFCLLTTAGPEIAVATTKAFSAQLVLLYVLAVRFAAKLGKISDAAEKELWRQINALPEKVSGLLEKVDAIQMYAANCVGCKSIFFIGRNIDYAISLEGSLKLKEISYIHSEAYAGGELKHGPISLIEEDTLVVAISNYAALYGKIMSNIEQEKAAARRFC

SEQ ID NO: 5133 - DNA, 888 bp, Unknown
  Obtained from environmental sample
  misc_feature (1)..(888): n is a, c, g, or t
gtggacggcgaggccctctccaccctggtgctcaacagcctgaggcagacccttaaaaccgtggcggtaaaggcccccggtttcggcgaccgccgcaaagccatgctggaggacatcgccgtcctcaccggcgggcaggttattaccgaagagcttggcatgaaactggaaaacaccgagctttcacaccttggcaaggccaagactattaaaatcgacaaggacaataccacgatcatcaacggcggcggaaaagccaaggatatcaaggaccgcattgcccagatcaaagtccagattgaagacacgacaagcagctacgacaaggaaaaactccaggaacggcttgctaaactcgccggcggcgtcgcggttatcaatgtaggcgcggccaccgaggttgagctgaaagagaagaagcaccgcgtggaggacgccctgtccgccacacgcgccgcaatcgacgaaggcattgtatcgggcggaggcatcgccctgattcaggcctctcttgccctggacaaggccgacaccaaaggcctcaccgatgacgagaaagtcggcttcaaaatcgtaaagcgcgcccttgaggaaccaatccgccagatagcggaaaacgccggtttggacggcgccgtcatcgcggaaagagccaagagcgaaaagaaaggcatgggctttgacgccgccaaaatggaatgggtggacatgatgaaggcgggtattatcgacccggcgaaagtgacccgctcggccctgcagaacgccgcgtccattgccagcctgctgttgaccaccgaatgcgccattaccgacatccccgaanagaaagaagctccggccatgcctcggcgtcgaatgngtcgtatgggaaggatggactactaa

SEQ ID NO: 5134 - protein, 295 aa, Unknown
  Obtained from environmental sample
  DOMAIN (1)...(274): TCP-1/cpn60 chaperonin family
  misc_feature (1)..(295): Xaa is any amino acid
MDGEALSTLVLNSLRQTLKTVAVKAPGFGDRRKAMLEDIAVLTGGQVITEELGMKLENTELSHLGKAKTIKIDKDNTTIINGGGKAKDIKDRIAQIKVQIEDTTSSYDKEKLQERLAKLAGGVAVINVGAATEVELKEKKHRVEDALSATRAAIDEGIVSGGGIALIQASLALDKADTKGLTDDEKVGFKIVKRALEEPIRQIAENAGLDGAVIAERAKSEKKGMGFDAAKMEWVDMMKAGIIDPAKVTRSALQNAASIASLLLTTECAITDIPEXKEAPAMPRRRMXRMGRMDY

SEQ ID NO: 5135 - DNA, 576 bp, Unknown
  Obtained from environmental sample
  misc_feature (1)..(576): n is a, c, g, or t
gtgctgcgaaggagttccctgggagccgccgtctgtgaaatggcggcctgtaaacggnccgacntggtaaaagncctgatactaatcgatggctgttttcnccttaatgataaaattgacaaggagcttcttaagctgatgctgccttccgtgggcaaaaaatggtaccggtcctttcgtaacagccataaggcagcctgggaatcactgtatccgtattatggcgatttggatgccatgagcgccgaggatcgcgaattcatccgcgagagggtaatcgccagggtggaaagcgaaaaccaggaacggggatatttgtccaccatgcggagcatgaacatcttttttatgtttaacggaaggtctcttacccgcgggataaagacatatccggggaaaatcgctatactgtggggcgagaaagacagtatcttgccgcatggaaaggccgtttcttttcgcggcctgcggcctgacgcgcaaatgacgttaataacaggcgcgggacaccttccccaccaggaaaaacacgaggaaacggcggtccatatgctgcggtttttaaaggaggtataa

SEQ ID NO: 5136 - protein, 191 aa, Unknown
  Obtained from environmental sample
  misc_feature (1)..(191): Xaa is any amino acid
MLRRSSLGAAVCEMAACKRXDXVKXLILIDGCFXLNDKIDKELLKLMLPSVGKKWYRSFRNSHKAAWESLYPYYGDLDAMSAEDREFIRERVIARVESENQERGYLSTMRSMNIFFMFNGRSLTRGIKTYPGKIAILWGEKDSILPHGKAVSFRGLRPDAQMTLITGAGHLPHQEKHEETAVHMLRFLKEV

SEQ ID NO: 5137 - DNA, 831 bp, Unknown
  Obtained from environmental sample
  misc_feature (1)..(831): n is a, c, g, or t
atgaaacttcggtatgcagatggagtatatacctgtccaaaatgcggaagcaaaaaatcatggcaagtgagaaaaaacatttacgaatgcgcggaatgtcatcatcaggaatcgatattatccgggacattatttcaggacacacataaaccattgatgctttggtttcgggcactctggtatgtaacgtcactgaagactgggaccagcgcactcggattacaacggattttaggcataggtagttacaagacagcatggacttggctacacaagatacggagggcaatggtacgtcctggtcgggacaggctttcagggcgtgttgaagttgatgaaacatatttcggagccccagaaaaaggcggaaaacgtggccgaggtactgaaaacaaggtattagctgctattgcggtagaaacgaacgaaaagattgtaggccggattcgtgtcagtatgctgacagatgcatctcaagacagcctccataaattcatacaagaaagtgtggaatctgggagtacagtagtaactgatggatggcttggatatagtggtcttgaagcaattggatataatcatgaaataacagttcatcaggatttagatgttttacttccatatgtccacactgttatttctttgatgaaacggtggattatgggaacgcttcaaggttcttgttctagcgaacatcttcaatattattttgatgagtatacctttcgtttcaaccgtcgaaaatcaaaaagtagaggacagttgttttatcgcttgcttcaaaacggctgttcaaatagaaccggtaatttacaaaaatattattgctaa

SEQ ID NO: 5138 - protein, 276 aa, Unknown
  Obtained from environmental sample
  misc_feature (1)..(276): Xaa is any amino acid
MKLRYADGVYTCPKCGSKKSWQVRKNIYECAECHHQESILSGTLFQDTHKPLMLWFRALWYVTSLKTGTSALGLQRILGIGSYKTAWTWLHKIRRAMVRPGRDRLSGRVEVDETYFGAPEKGGKRGRGTENKVLAAIAVETNEKIVGRIRVSMLTDASQDSLHKFIQESVESGSTVVTDGWLGYSGLEAIGYNHEITVHQDLDVLLPYVHTVISLMKRWIMGTLQGSCSSEHLQYYFDEYTFRFNRRKSKSRGQLFYRLLQNGCSNRTGNLQKYYC

SEQ ID NO: 5139 - DNA, 645 bp, Unknown
  Obtained from environmental sample
  misc_feature (1)..(645): n is a, c, g, or t
atgaagaaagttggattggttctggccattttgatggtggccattatactgttttctaccggttgcaaaaaagaacctacagggggccccatggagcttgttgtagaagtttatgaccgaggcacggacggcggaaggtcgttgtcttatgacaatgcgtggacggactggattaaggaaaaggtaaagaaagacctgaatatcgacgttacctttcttccgataggccgttggtcggaacagggagatatcgtaaacctcatggcggctcaaaacgctcctgatctgtgctatacctatgctgcggacatggtagcaagtttccgtgaccagggcggtctttttgacctcgccccatacatcgacaaagagcttcctgacctgaaaaaaacgctaggtgaagaccctgtgtttcccggaaaagactttatttaccgcaacgccgatcctcagacgggaaaaatttattccattccgagcgcccgtgtggcccttgccctgagaaacgtctttgtccgcaaagactggctggatatactcgggcttccgtcccctacaaccgtcgagcaattttacgatatgcttgtagcgttccgtgacaaagaccctggcaatgtgggagcaaagatgtcattccgtatttga

SEQ ID NO: 5140 - protein, 214 aa, Unknown
  Obtained from environmental sample
  SIGNAL (1)...(24)
  misc_feature (1)..(214): Xaa is any amino acid
MKKVGLVLAILMVAIILFSTGCKKEPTGGPMELVVEVYDRGTDGGRSLSYDNAWTDWIKEKVKKDLNIDVTFLPIGRWSEQGDIVNLMAAQNAPDLCYTYAADMVASFRDQGGLFDLAPYIDKELPDLKKTLGEDPVFPGKDFIYRNADPQTGKIYSIPSARVALALRNVFVRKDWLDILGLPSPTTVEQFYDMLVAFRDKDPGNVGAKMSFRI

SEQ ID NO: 5141 - DNA, 951 bp, Unknown
  Obtained from environmental sample
  misc_feature (1)..(951): n is a, c, g, or t
atgtatcagatcggccgagacgatggtaaatggtattgcacaggcacatctaatccggtttgggaagggctaaaccctggggttcgtcttctggtatccgacgactgcctgcattggaatcatcatagctggcttattgatgcgaccacactgcctgaagattgtgggtacaatggacgattttgggcacccgagattcacttgataaaaaacagctattggttaaccgtcaacagcggcaaagtaaccaaagatgacccaaaaggcatgaagacccacagtatctggctgtttaaatcgttgcaaataaccggtccttatatgctggtcaatggtcccttaacaaagcagtacaataacgatgctacactgtttgaagatgatgacggacaggtatatctttattgcagcgggaatggcttgtttcaggcgaagatcgaccttgaaaaaggcgtgttatcggacggcattgaaaaatttatggataaacttgatattggttttcctgaatggataagaggtggcattgaaggcccatttgtaattaaacaaaacggaatttactttatgtttttttcaacgtggactcgcggatatgaagtggggttgttgcgatctaaaaaccctttaggcccttgggaattggcatcgaatgagcctatttttggcacacggaaaaaagattaccgcccggaatttaattcgccgggccatgtgttcagtgacagttctgatccatactgcgaaacaggccacaatgcgctgtttattggccccgacgganagctgtggaactcatgccattatctgatgtatcanaagcggcagtacccatacagtcagacatttgaggactgggagctgtatcctcagttaggaattgagcctgtctactttagagataatattttccacattgaaggaccgacatggacagaaacacaatactga

SEQ ID NO: 5142 - protein, 316 aa, Unknown
  Obtained from environmental sample
  DOMAIN (1)...(304): Glycosyl hydrolases family 43
  misc_feature (1)..(316): Xaa is any amino acid
MYQIGRDDGKWYCTGTSNPVWEGLNPGVRLLVSDDCLHWNHHSWLIDATTLPEDCGYNGRFWAPEIHLIKNSYWLTVNSGKVTKDDPKGMKTHSIWLFKSLQITGPYMLVNGPLTKQYNNDATLFEDDDGQVYLYCSGNGLFQAKIDLEKGVLSDGIEKFMDKLDIGFPEWIRGGIEGPFVIKQNGIYFMFFSTWTRGYEVGLLRSKNPLGPWELASNEPIFGTRKKDYRPEFNSPGHVFSDSSDPYCETGHNALFIGPDGXLWNSCHYLMYXKRQYPYSQTFEDWELYPQLGIEPVYFRDNIFHIEGPTWTETQY

SEQ ID NO: 5143 - DNA, 702 bp, Unknown
  Obtained from environmental sample
  misc_feature (1)..(702): n is a, c, g, or t
gtggttggcgaagagtcttatcaactggaaattcttccggatgaaattcgtttaagcgcggcgcatggaacgggcatgttccgcggccttcagacgctgcggcagctttttctttcggggtacaatgagggggttctttccattccatgcggcataatcaaggacaaaccccgtttcccctggcggggctttatgctggactgctcgcgttatttttattcagtcgaatttattaagaaattattggacgcgctttcactgcatcatatcaatattttccactggcaccttaccgacgaccagggatggcggcttcccgtcaggcaatacccgctgttaactgaaatcggctcaaaacggcgggatcaccgtttgcacggtgaatttatcggcggcttttataccgaggcggaaattcgggacattgttgagtatgccgcccgccgccatatcgaagtagtgccggagatcgaccttcccggacacaccagcgcggttctcgccgcgtatccggaccttggatgtaccggcggcccttaccgggtggaagaccgttacagcatttttgaggatgtactctgcgcgggaaatgacgacatcttccccctggncgaagtcgtattcgacactttggcggaacttttccccgtcgagtatgtgcacataggcggcgatgaggtgtgctttaaccgctgggcctga

SEQ ID NO: 5144 - protein, 233 aa, Unknown
  Obtained from environmental sample
  DOMAIN (59)...(233): Glycosyl hydrolase family 20, catalytic domain
  misc_feature (1)..(233): Xaa is any amino acid
MVGEESYQLEILPDEIRLSAAHGTGMFRGLQTLRQLFLSGYNEGVLSIPCGIIKDKPRFPWRGFMLDCSRYFYSVEFIKKLLDALSLHHINIFHWHLTDDQGWRLPVRQYPLLTEIGSKRRDHRLHGEFIGGFYTEAEIRDIVEYAARRHIEVVPEIDLPGHTSAVLAAYPDLGCTGGPYRVEDRYSIFEDVLCAGNDDIFPLXEVVFDTLAELFPVEYVHIGGDEVCFNRWA

SEQ ID NO: 5145 - DNA, 807 bp, Unknown
  Obtained from environmental sample
  misc_feature (1)..(807): n is a, c, g, or t
atgctgcgcaccgtcctggagtaccccagcgtcattgctccccacctgtttacctggcagttgcatggttatacagacaaaggtacaaaatattcggagtttataaaggattgggaaagcgagcatgacggctataccggattcgccataaataaaaatggccttaaaacggctccgtttacccgtgatcccgaagacggcgacagcgctaccgacggtgacatggacattatctattcattgattattgctgacaagcaatggggaagcgacggacgttacaattacctggaaattgcccgcgcgatgctggctgatttatggcaatattgcgtacattctacttataaaaccatgcttctgggcgactgggccagcaaagggggcgataagggaaatcctgcccttgcggcaatccagatgaacgctacccgcccgtccgattttatcatcagccatcttaaggcgtataaggcgattgacagcgctcacaactggcaggaagtcatagacgctacttacggcgttattaaaggtgtctacgcggatgttacagcaaagcatggcaggagcaggggcttactgcctgatttcgttataagaaacaattccaatactgcctggatagttccggaagggcatgtgcttgaagaagataccgacggatcatactcatacaattcatgccgtattccctggcgccttggcacagactatctgctgtacggcggtaacaccacattagcgggccttgatatatttgccgagactattcaaccgcttgataagttagcgacagagatatag

SEQ ID NO: 5146 - protein, 268 aa, Unknown
  Obtained from environmental sample
  DOMAIN (1)...(268): Glycosyl hydrolases family 8
  misc_feature (1)..(268): Xaa is any amino acid
MLRTVLEYPSVIAPHLFTWQLHGYTDKGTKYSEFIKDWESEHDGYTGFAINKNGLKTAPFTRDPEDGDSATDGDMDIIYSLIIADKQWGSDGRYNYLEIARAMLADLWQYCVHSTYKTMLLGDWASKGGDKGNPALAAIQMNATRPSDFIISHLKAYKAIDSAHNWQEVIDATYGVIKGVYADVTAKHGRSRGLLPDFVIRNNSNTAWIVPEGHVLEEDTDGSYSYNSCRIPWRLGTDYLLYGGNTTLAGLDIFAETIQPLDKLATEI

SEQ ID NO: 5147 - DNA, 750 bp, Unknown
  Obtained from environmental sample
  misc_feature (1)..(750): n is a, c, g, or t
atgagcgccgcgagtctgcaacaacggattgcgaaggccaacgacgaagggcgcgttgccctcatccctttcatcaccgccggtttcccggaaccggagcgttttgtccgcatcctgcgcgacctggacgaaagcggcgcggatgtcattgaagtcggcgtgcccttctccgatcccgtggcggacggcccggtggtggaggaagcctcccgcaaggctctggctgcgggcgtcagtctcgaatggacgatccgccggcttgcggaactgcgtccccgactcgcggcggggctggttctcatgggctattacaacccctttctgcaatacgggcttgagcgtctggcgaaggacgcggcggaagccggagtgcggggggtcatcgtgccggatttgcctttggaggaggacggcccgctacgcgccgctctggccccgcacaagctggatctcatcgccctggtggggccgaacacgtccaacgagcgtatgcgcgcctatgccgcgaccgcttccggctatgtgtatgcggtttccgtcacgggaaccacgggggtgcgcaacgaattgccggcggatgcggcgctgaccgcgcaacgcgcgcgggaggctttcagcctgccggtggctctgggtttcggcatccacagcccggagcaaatccggccatgcccgcgccgccccatgccgtggtgttcggcagcgcgctattgcggcatctggccgccgggggatcggcaaaagatttag

SEQ ID NO: 5148 - protein, 249 aa, Unknown
  Obtained from environmental sample
  DOMAIN (10)...(246): Tryptophan synthase alpha chain
  misc_feature (1)..(249): Xaa is any amino acid
MSAASLQQRIAKANDEGRVALIPFITAGFPEPERFVRILRDLDESGADVIEVGVPFSDPVADGPVVEEASRKALAAGVSLEWTIRRLAELRPRLAAGLVLMGYYNPFLQYGLERLAKDAAEAGVRGVIVPDLPLEEDGPLRAALAPHKLDLIALVGPNTSNERMRAYAATASGYVYAVSVTGTTGVRNELPADAALTAQRAREAFSLPVALGFGIHSPEQIRPCPRRPMPWCSAARYCGIWPPGDRQKI

SEQ ID NO: 5149 - DNA, 399 bp, Unknown
  Obtained from environmental sample
  misc_feature (1)..(399): n is a, c, g, or t
atgctggaatttaaagaaaaaataaccaattatcaatttaaggatgcggcgcgtgaagcggcttctttgtttacatcaagggatctgttattcgaaaaaggcgaacagggtattactgttataatgcctggcgtcgatcttgaaagcggtcttgataaagcgcaaaaattccagcttcgtatcaaagaaaaacttttctctaataacaaagacgactgtgcctacatcggactttcttcgcgcgcaggccgccttatgaacgcagaaaggatgatgatggaaaccaacgaagcgctcaataaagcaaaggcagatcgtgacacgtcaattatcgcgttcaagagcgaccttgaaaaatacagaaagtttattgtttctcaaaatcctgcgcgttcctga

SEQ ID NO: 5150 - protein, 132 aa, Unknown
  Obtained from environmental sample
  misc_feature (1)..(132): Xaa is any amino acid
MLEFKEKITNYQFKDAAREAASLFTSRDLLFEKGEQGITVIMPGVDLESGLDKAQKFQLRIKEKLFSNNKDDCAYIGLSSRAGRLMNAERMMMETNEALNKAKADRDTSIIAFKSDLEKYRKFIVSQNPARS

SEQ ID NO: 5151 - DNA, 870 bp, Unknown
  Obtained from environmental sample
  misc_feature (1)..(870): n is a, c, g, or t
atgatggacgagaaggaatctattctcattcccccctttatcgtagtggatcatgagggaggaaaagtaaaccgtttcctgccgggcgccgtggatctgcctgccgcgtattcctattgggaaaaagcccaaatcgaaggcagtggaagcgcgattgcccaaataagcacggacagttttaacgctggaataaaacttcgcgggcttggcgttaatttcaatttggctccggtcgcggaattcttaaataaagacaatacaaaatttcttgaggggcgttcctacggccctgattcggaatttaccgttgaagcagcgagggcctttattacaggcatggagacagccggcgttatctgcgccctaaaacattttccgggaagcgccggagcggacccgcattattttccgggtaaactaaacggcagcaaagaagcccttgagcagcttgtctttccctttgccgccctcattcagggcaacaaggcaagggctatcatggtttcccactcggctgttccggcatgggacgcggaaaatatcgccagcctgtcgcctgcggtactgggcgaatggctgcggcaggagcttggatttaagggcataatcatcagtgacgacttttccatgggcgcggcaacaggctcaggccgcacaaggccggaagacgcggcagtccaatccctgattgccggcgctgacatggtgctggtatggcccccggacctgcggcgcactcaccgggcgattcaggcggcccttgccgacggcaggctttcacgtcagcggctggaagaatcggcggggcggattatttatgagaaggtaatgggcttgctaaataaaacagtaatgagctatgagaaatga

SEQ ID NO: 5152 - protein, 289 aa, Unknown
  Obtained from environmental sample
  DOMAIN (2)...(238): Glycosyl hydrolase family 3 N terminal domain
  misc_feature (1)..(289): Xaa is any amino acid
MMDEKESILIPPFIVVDHEGGKVNRFLPGAVDLPAAYSYWEKAQIEGSGSAIAQISTDSFNAGIKLRGLGVNFNLAPVAEFLNKDNTKFLEGRSYGPDSEFTVEAARAFITGMETAGVICALKHFPGSAGADPHYFPGKLNGSKEALEQLVFPFAALIQGNKARAIMVSHSAVPAWDAENIASLSPAVLGEWLRQELGFKGIIISDDFSMGAATGSGRTRPEDAAVQSLIAGADMVLVWPPDLRRTHRAIQAALADGRLSRQRLEESAGRIIYEKVMGLLNKTVMSYEK

SEQ ID NO: 5153 - DNA, 873 bp, Unknown
  Obtained from environmental sample
  misc_feature (1)..(873): n is a, c, g, or t
atgatggcgagaggttctgccattggttcgccgggcggactggaaaaaaccgttacctcaggcattgtttcggctttgagccgccgtttcctgcagataggcgatgttattcaaatagacgcggcagtgaaccctggcaattccggcggtccggtagtggatacgtccggtcgtttggtgggcattgtttttgccggcattgaacagtaccaggggctgaacttcgccgtccccgccgaacggcttgccgccgcccttcccgccatgatgcggggcggcaaggcggagcgtccctggctgggtctggccctcagtgaaacttcccgcggggctgaaataatttatgtcgcccccaacacccccgcgtcccatcaccgtgtgcctgaaggcagcttcatcaaaacagtcaacggccgcgcgatacaggctcctcagagcctgcttattcccgccttgcaggactctatttttcaatcgcgtcccggcgagatggtggcgctggaaacccaggaacctgacggcggactcaagcgccgtctggtgatgactgttccccgtcccgaactccccctcggtgacgcggcaaaactggacagccgtgaacggcttgccgcccctctctttggcatgatactttcccccggtcagggaaaatcctggtcttccacctaccaggttaaaaaagttgtccgcggttctatcgccgatgaggcaagcatttccgatcaggaccctgtttacatacggggcttccgcatttttgaaaaggaaggctatgcccttatggaaatagatattaaaaaacgcagtatgggctatttggaaaccaccatgcagctcctcgcccgccttgattcaccggatacgctgtaa

SEQ ID NO: 5154 - protein, 290 aa, Unknown
  Obtained from environmental sample
  misc_feature (1)..(290): Xaa is any amino acid
MMARGSAIGSPGGLEKTVTSGIVSALSRRFLQIGDVIQIDAAVNPGNSGGPVVDTSGRLVGIVFAGIEQYQGLNFAVPAERLAAALPAMMRGGKAERPWLGLALSETSRGAEIIYVAPNTPASHHRVPEGSFIKTVNGRAIQAPQSLLIPALQDSIFQSRPGEMVALETQEPDGGLKRRLVMTVPRPELPLGDAAKLDSRERLAAPLFGMILSPGQGKSWSSTYQVKKVVRGSIADEASISDQDPVYIRGFRIFEKEGYALMEIDIKKRSMGYLETTMQLLARLDSPDTL

SEQ ID NO: 5155 - DNA, 846 bp, Unknown
  Obtained from environmental sample
  misc_feature (1)..(846): n is a, c, g, or t
atggcgcttgaatgtaaaataacaaagaaacttggtagttttacccttgatgttgatataaccgcaggtacaggcgttaccgcgttcatgggcgcgtcgggaagcggcaagagtatgactctgcgctgtatatccggcgtgtcgaaacccgacgagggacggattatactcgacggcgttaccttgtttgattctgaaaaaaagataaacctgccgccgcaagaacgcaaagttggatttttattccaggactacgccctgtttcccaacatgacgattcttcaaaatattatgtgcggcgcgaacagggaagataaaaaaaagagaaaaagcctcgctgaagatttggctgagacctttcacataacggcgcacatgggtaaatatccgcatcagctttcaggcggagaaaaacagcgcgccgcaattgcgcggatattcgcgggaacgcccgacattctgatgcttgacgaaccgttttccgcgctggacagccatttgcggtgggaactggaaaatgagcttgcgtctgtttttcagcgtttcggcaagacggttttgtatgtgtcgcataaccgcgacgaggtgtaccgcctgtgtgataatgtggttatactgaataacggcaaggcggaagtaagcggcgggaaatgggacgtatttaaaaaccccttaactgttcaggcggcgcgtcttacaggctgtaaaaatatcgcttcgtgtacggcgcaaggggcgaagataatcgtcccggattgggacatggaatttgacgcggaccggaaaaccgctgaatttgtggggattcgcgcaaattatataacgccccccctgccttgcggataa

SEQ ID NO: 5156 - protein, 281 aa, Unknown
  Obtained from environmental sample
  DOMAIN (24)...(209): ABC transporter
  misc_feature (1)..(281): Xaa is any amino acid
MALECKITKKLGSFTLDVDITAGTGVTAFMGASGSGKSMTLRCISGVSKPDEGRIILDGVTLFDSEKKINLPPQERKVGFLFQDYALFPNMTILQNIMCGANREDKKKRKSLAEDLAETFHITAHMGKYPHQLSGGEKQRAAIARIFAGTPDILMLDEPFSALDSHLRWELENELASVFQRFGKTVLYVSHNRDEVYRLCDNVVILNNGKAEVSGGKWDVFKNPLTVQAARLTGCKNIASCTAQGAKIIVPDWDMEFDADRKTAEFVGIRANYITPPLPCG

SEQ ID NO: 5157 - DNA, 537 bp, Unknown
  Obtained from environmental sample
  misc_feature (1)..(537): n is a, c, g, or t
atgctggattacgccctcagccttgaggtccccgccatgatccgctacccaaaagccccctgccccgccgaggcgcctgaattttcgcttcccctggagaaaggcaggggggtatgggttaggcgtaatccgcacagccgtatctgtctggcctttaccggaagcctttatccgcaggcgctcggcgttctgcaaatacttgaaggcaggggaataatttcggacgcgtacaacctccgtttcctcaatcaggttgacgaggaataccttgttgagattctgaacagctacgaccttgtggtatttgccgaggaaggggttcgccgtggcggcttcggcgaatatgccgccgccctcgcccgctgccgcaactgccgcgcgcgcgtgattattttcgcggtggacggcgattttgccgccaacggcgacgcccttggaaccagggaggaactgctccgggccaacgggcttgacgctgagggaatagccggcaagatagcagggagtagggatcaagggttcggggttttacggtga

SEQ ID NO: 5158 - protein, 178 aa, Unknown
  Obtained from environmental sample
  DOMAIN (37)...(162): Transketolase, C-terminal domain
  misc_feature (1)..(178): Xaa is any amino acid
MLDYALSLEVPAMIRYPKAPCPAEAPEFSLPLEKGRGVWVRRNPHSRICLAFTGSLYPQALGVLQILEGRGIISDAYNLRFLNQVDEEYLVEILNSYDLVVFAEEGVRRGGFGEYAAALARCRNCRARVIIFAVDGDFAANGDALGTREELLRANGLDAEGIAGKIAGSRDQGFGVLR

SEQ ID NO: 5159 - DNA, 843 bp, Unknown
  Obtained from environmental sample
  misc_feature (1)..(843): n is a, c, g, or t
atgcctgtttcatggacaccgacaacttcaattatcgtatatatcaagcacattgacgacaggccggcctttattaaggataatgtctggatttttaagcgcaaagaacaaggtatttgggatgaaaactgttttgaagatgaggcgaattgcgctgaatggaaattagacggtggtgatattaatatccttcaatcatacggaacccataagggtaataagtttgatgaaagtgaagtcggatcggcgattgtctttatagaaagcgatgttctgaaagattgtgatattattgatttacctggttatggtacaggccatgaaaatgaatcccaatctataacactcgaagtcacaagcaaagctgatattttgatatatatgtctttggcgaacggttttatgcgtgatgaagatttttgttatcttcagaaagcccttaacgatcttcagtctattgaatccaccgatcatcttaaaatctccttccttgacaggctatttgttgttgcatcacacgctaaaacaatagatggtggtaatcctgattcattgaaaaatattctggacaggggatgctcagatttttataaatccctttctgataatttcctggaagagagagggtgtactaaagaagcattgagaaaacgtttttttacttttagtcctgagatacctgatttgtgcgctgttcttaataaaactctacaatcggtaattgaaatattgccaaaacttatcaaggagaaggcgatattttttattaaggattttgctaagtcaaaaggtatcaatcttgatgcagagatcaaaaactttcaaaacatgatttcagactag

SEQ ID NO: 5160 - protein, 280 aa, Unknown
  Obtained from environmental sample
  misc_feature (1)..(280): Xaa is any amino acid
MPVSWTPTTSIIVYIKHIDDRPAFIKDNVWIFKRKEQGIWDENCFEDEANCAEWKLDGGDINILQSYGTHKGNKFDESEVGSAIVFIESDVLKDCDIIDLPGYGTGHENESQSITLEVTSKADILIYMSLANGFMRDEDFCYLQKALNDLQSIESTDHLKISFLDRLFVVASHAKTIDGGNPDSLKNILDRGCSDFYKSLSDNFLEERGCTKEALRKRFFTFSPEIPDLCAVLNKTLQSVIEILPKLIKEKAIFFIKDFAKSKGINLDAEIKNFQNMISD

SEQ ID NO: 5161 - DNA, 945 bp, Unknown
  Obtained from environmental sample
  misc_feature (1)..(945): n is a, c, g, or t
atggctatgcttattgcatggcaaatttgtancaaggtctcttatccgcaagataaacggttttcaaaaaatgtttttatcgtgacacccgggcttaccgtaaaagaccgtttacaggttttacagacgggcgggggaaataattactatattgagtttaatgtcgtccccgcttcattacttgataaattataccaaggcaaagtagtaatcaataattggcaaactttggcatgggatagtgtcgaagatttaaaaaagaaaaaatcagttgacaaaagaggtccaaaaagcgatgaagcttatgcccgtgaagtattaggcgatattgcaaacagtcagaatattttagttattaacgatgaggcgcatcatgcttggaggcgcaaccccgaaatcaaagaaaaaatgaccaaagaatataaggaagctgaaaaagaagcgacaatatgggtaagcggtcttgaccgtattcacaacgcaaggaaaatattgacttgttacgatttttctgcaaccccttttgctccttcaggcaagaaaaacgattccgaagccttgtttacatggattgtaagcgacttcggcttaaatgacggaattgaatccggtttggttaaaactcccagagttgtagtccgtgatgacaacactcccgatgcaaaaaatttccgttcaaagttgtatcatatatacgctaatgacgatgtaaaagacaatatcaaccaatcggcaaaacctgaaataccacttcctgaccttgttatacaggcatataaccttttgggcgcagactggcgggaaacatatatcgcatggaaaaaagacggctccgatgttcctcctgtaatgataaccgtagccaaccgtaccgagacagcggcgcggattgaatatgctttccggacaaaacaaatactacagaagaatatctcggccatctga

SEQ ID NO: 5162 - protein, 314 aa, Unknown
  Obtained from environmental sample
  misc_feature (1)..(314): Xaa is any amino acid
MAMLIAWQICXKVSYPQDKRFSKNVFIVTPGLTVKDRLQVLQTGGGNNYYIEFNVVPASLLDKLYQGKVVINNWQTLAWDSVEDLKKKKSVDKRGPKSDEAYAREVLGDIANSQNILVINDEAHHAWRRNPEIKEKMTKEYKEAEKEATIWVSGLDRIHNARKILTCYDFSATPFAPSGKKNDSEALFTWIVSDFGLNDGIESGLVKTPRVVVRDDNTPDAKNFRSKLYHIYANDDVKDNINQSAKPEIPLPDLVIQAYNLLGADWRETYIAWKKDGSDVPPVMITVANRTETAARIEYAFRTKQILQKNISAI

SEQ ID NO: 5163 - DNA, 873 bp, Unknown
  Obtained from environmental sample
  misc_feature (1)..(873): n is a, c, g, or t
ttgggaaggccgcgcctcgcttttttggtaggcgcgggcaacatggattccatggtcgcgcattacactgccgcaaaacgcaagcgctccgatgacgcgtattcgcctacaggaaaaagcggactgcggcccgaccgcgccactttggtttatgtcgagggaatcaggcgcgtatataaggatgtgccggtaattatcggcgggatagaggcaagccttcgccgctttgcccattatgattactggtccgataccgtgcgccgctcgatcttacttgattcaaaagcggatattttggtctacgggatgggagaaaaacccttgcttaacatagcgcgccggttagcggaaggtgaggcaataggcagtataacaaatgaaaggggaacttgtgtccgcgttcacggaagagccgcggttgataaaggcaaaactaatcaatggaaggatgtacgctttctgcccggatatgaggcggtaaaagggaaagacgaggcttctttattcgcctatgccgaacattttatgacgcagaaacaaaacgccgatcctttaagcgcaaaaccgctggcggaagaaaacgacggggatcgctgggttattcaaaatcctcccgctctgcccctctcaacaaaagaactggataatttgtacgagcttccctttacgcgaaaagcccaccctatgtatgacgcgcaaggagggataaacgcgcttaaggaagtttccttctcgttgatttcaagccgagggtgtttcggcggctgttctttttgcgcgattaccgctcatcangggcgggnccgttgtcgggcgcgaaagggaaagcttgctccgcgaagcgcgcgctcttgccgcgcgtcccgactttaa

SEQ ID NO: 5164 - protein, 290 aa, Unknown
  Obtained from environmental sample
  DOMAIN (1)...(245): Radical SAM N-terminal
  misc_feature (1)..(290): Xaa is any amino acid
MGRPRLAFLVGAGNMDSMVAHYTAAKRKRSDDAYSPTGKSGLRPDRATLVYVEGIRRVYKDVPVIIGGIEASLRRFAHYDYWSDTVRRSILLDSKADILVYGMGEKPLLNIARRLAEGEAIGSITNERGTCVRVHGRAAVDKGKTNQWKDVRFLPGYEAVKGKDEASLFAYAEHFMTQKQNADPLSAKPLAEENDGDRWVIQNPPALPLSTKELDNLYELPFTRKAHPMYDAQGGINALKEVSFSLISSRGCFGGCSFCAITAHXGRXRCRARKGKLAPRSARSCRASRL

SEQ ID NO: 5165 - DNA, 903 bp, Unknown
  Obtained from environmental sample
  misc_feature (1)..(903): n is a, c, g, or t
atggataaaatgattttctgcaagatatgggacgaacgttgggaagaaaacaatcncgcttcaaaaggagaaccttacaacttccagattatttactatcccgaagacaaagaagataaaggtaacacaaaagccaaaacagaacttgaaaagcgtgtgcgggctttgtacgaagaagggcgcaaaaaagaccctgaagttttcaaagacgatataaaattggacaaacataaaatctttaccgttgttcagtatttacaggatattcatttatcgcatacggacttggacgcaaaagggtttgcttttcaaaaattcgtcggcggattctttaaaggcgattttggacagtatttcacgcctaatgccattgtacaatttattgtagattcgattggcgttaagaaggactacaaagtattagatacttcctgcggaagcggcggctttttacttcatgctctcaaagaaataaggagtcaatcagaaaaaatatctgatcctgttacacgtcataaatattggcatgattttgccgctaacaatctgtttggtatagaaataaacgagcaaatttcccgtgtatcaaagatgaacatgattattcacgatgacgggcataccaacgtaataactaatgacggcttaaaaaacaataaaacaattgaaactgaaaaccgcaatctgctttttcaggatggaacttttgatttaatcatgaccaatccgcctttcggctctactatcaaagccaacgaagtaggttattataaagaatatgaattatttgaaaaaaacataggtatatccgaacttaaaagccgtattattgacgatgacaacaaaaacaaatggcgtccatcacaaagtaccgaaatcctttttttggaaagagtgttataa

SEQ ID NO: 5166 - protein, 300 aa, Unknown
  Obtained from environmental sample
  DOMAIN (94)...(293): N-6 DNA Methylase
  misc_feature (1)..(300): Xaa is any amino acid
MDKMIFCKIWDERWEENNXASKGEPYNFQIIYYPEDKEDKGNTKAKTELEKRVRALYEEGRKKDPEVFKDDIKLDKHKIFTVVQYLQDIHLSHTDLDAKGFAFQKFVGGFFKGDFGQYFTPNAIVQFIVDSIGVKKDYKVLDTSCGSGGFLLHALKEIRSQSEKISDPVTRHKYWHDFAANNLFGIEINEQISRVSKMNMIIHDDGHTNVITNDGLKNNKTIETENRNLLFQDGTFDLIMTNPPFGSTIKANEVGYYKEYELFEKNIGISELKSRIIDDDNKNKWRPSQSTEILFLERVL

SEQ ID NO: 5167 - DNA, 378 bp, Unknown
  Obtained from environmental sample
  misc_feature (1)..(378): n is a, c, g, or t
gtgccgacgataagtcaattaatacgtaaagggcgggagcaattggagaatcggagcaagtctccggctctccacagctgtccgcagcgtcgcggcgtttgcacccgcgtcttcacgaccactcccaagaagcccaactccgcgcttcgcaaggtggcccgtgtgcggctgaccaaccacatggaggtcaacgcgtacattccgggcgaggggcacaaccttcaggagcactcgatcgtcctcatcaggggcggccgcgtcaaggatgttccgggcgtgcgctaccatattatccgcggcgcgcttgatacgcagggcgtccagaaccgtaaacgcagccgttcaaagtacggcgtaaaacggcccaaggccaagtag

SEQ ID NO: 5168 - protein, 125 aa, Unknown
  Obtained from environmental sample
  DOMAIN (2)...(123): Ribosomal protein S12
  misc_feature (1)..(125): Xaa is any amino acid
MPTISQLIRKGREQLENRSKSPALHSCPQRRGVCTRVFTTTPKKPNSALRKVARVRLTNHMEVNAYIPGEGHNLQEHSIVLIRGGRVKDVPGVRYHIIRGALDTQGVQNRKRSRSKYGVKRPKAK

SEQ ID NO: 5169 - DNA, 723 bp, Unknown
  Obtained from environmental sample
  misc_feature (1)..(723): n is a, c, g, or t
atgccgatanttcgcaccgcagtcagctcattctcttttctgagggcccgccgctcataccgaaattccccgcgacgcgcgcctgcgtttcaacgaactatcatcttcaacgctatcgtcgctatccacgataaaccccgcagtcggccttatttaatacgggaagtgagcaaacgccttgttcgcttccgccattttgtgcgtgtctatcttcttgcgtacggccccgccctcattcttgaacgcctgaacgaactcgttggccagcttctcggccatattcttctcggaacgctcccgcgcgtaattgatgagccagcggatggccagagaagtgcgcctctcaggcgacacctcgatgggcacctgatagttcgcgccgcctatacggcgggacttcacctcaagcaccggcttaacgttgtccacggcctttttaaagaccgaaagcccgtcctgccccgcgcgctgcccggccatttcgaccgcgctgtaaaaaatgttttccgccagacgcttcttaccgctgcgcgtgacgctgtttataaactgcgtcacaagcgtgctgttgaacctggggtccgccgtaacctcccgcttttccgcgtttcttcttctagacattgtatataccctacttggccttgggccgttttacgccgtactttgaacggctgcgtttacggttctggacgccctgcgtatcaagcgcgccgcggataa

SEQ ID NO: 5170 - protein, 240 aa, Unknown
  Obtained from environmental sample
  misc_feature (1)..(240): Xaa is any amino acid
MPIXRTAVSSFSFLRARRSYRNSPRRAPAFQRTIIFNAIVAIHDKPRSRPYLIREVSKRLVRFRHFVRVYLLAYGPALILERLNELVGQLLGHILLGTLPRVIDEPADGQRSAPLRRHLDGHLIVRAAYTAGLHLKHRLNVVHGLFKDRKPVLPRALPGHFDRAVKNVFRQTLLTAARDAVYKLRHKRAVEPGVRRNLPLFRVSSSRHCIYPTWPWAVLRRTLNGCVYGSGRPAYQARRG

SEQ ID NO: 5171 - DNA, 471 bp, Unknown
  Obtained from environmental sample
  misc_feature (1)..(471): n is a, c, g, or t
atgtctagaagaagaaacgcggaaaagcgggaggttacggcggaccccaggttcaacagcacgcttgtgacgcagtttataaacagcgtcacgcgcagcggtaagaagcgtctggcggaaaacattttttacagcgcggtcgaaatggccgggcagcgcgcggggcaggacgggctttcggtctttaaaaaggccgtggacaacgttaagccggtgcttgaggtgaagtcccgccgtataggcggcgcgaactatcaggtgcccatcgaggtgtcgcctgagaggcgcacttctctggccatccgctggctcatcaattacgcgcgggagcgttccgagaagaatatggccgagaagctggccaacgagttcgttcaggcgttcaagaatgagggcggggccgtacgcaagaagatagacacgcacaaaatggcggaagcgaacaaggcgtttgctcacttcccgtattaa

SEQ ID NO: 5172 - protein, 156 aa, Unknown
  Obtained from environmental sample
  DOMAIN (1)...(149): Ribosomal protein S7p/S5e
  misc_feature (1)..(156): Xaa is any amino acid
MSRRRNAEKREVTADPRFNSTLVTQFINSVTRSGKKRLAENIFYSAVEMAGQRAGQDGLSVFKKAVDNVKPVLEVKSRRIGGANYQVPIEVSPERRTSLAIRWLINYARERSEKNMAEKLANEFVQAFKNEGGAVRKKIDTHKMAEANKAFAHFPY

SEQ ID NO: 5173 - DNA, 1011 bp, Unknown
  Obtained from environmental sample
  misc_feature (1)..(1011): n is a, c, g, or t
gtggggcggttggcgtacgcgagggtttatcgggcaagggcgggatttaagagcgtcctctacaatcnccggataaagtcgagggagaaggccgcgaggattttcaggatgcactccaacaagaggcatgccgaaaatggtatggaggcgggcgatatagtcggtttggtcgggcttaaagacacaaccaccggcgacacgatttgcgatccggatttcccgatcgtctttgagcggatgacgtttcccgactcggtgctgtctaggtcgatagagcctaagagcacggcggacgaggagaagctgaatttggcgcttgagaggctggtggacgaagacccgacctgccgggttcgggtggacagcgagacggggcagaggcttatctccggtatgggggagcttcacgtggagattttggttgatcgtttggtcaaggagtttaacgtcgacgtgcatgtcggcaagccgcaggtctcctataaggagacggtgaccgcggcggcggttcaagaatatgaatttaatcagttggtcggcggtaagacccatcacggccatatcactttgggtgtggagccgatggatgccgcggccggcgtggagtttataaacgaagcggcggccgacgcgctgccggcgggattcgccggcgcggtgaggcagggcgtgctggaagccgccgggggcggggcgctttccgggtttccggttgcgggagtgcgcgtcaaattattatcttcagtatatagcgaagccgattctaccgagataggtttcaagatagccggaagcatggccttcaaggaagcgtgcgcgaaagcgtcgcctgcggtgatggagccggtgatgtctgtggaaatagtcgtgccgcccgagtatatgggcgcggtgataaacgacttcaacagccggcgcgggaaggttctggggatagaagcccgtaaggatgttcaggcggtcagcggcttcgccccgctctccgagatgtcctcggccaatctgtcttga

SEQ ID NO: 5174 - protein, 336 aa, Unknown
  Obtained from environmental sample
  DOMAIN (278)...(335): Elongation factor G C-terminus
  misc_feature (1)..(336): Xaa is any amino acid
MGRLAYARVYRARAGFKSVLYNXRIKSREKAARIFRMHSNKRHAENGMEAGDIVGLVGLKDTTTGDTICDPDFPIVFERMTFPDSVLSRSIEPKSTADEEKLNLALERLVDEDPTCRVRVDSETGQRLISGMGELHVEILVDRLVKEFNVDVHVGKPQVSYKETVTAAAVQEYEFNQLVGGKTHHGHITLGVEPMDAAAGVEFINEAAADALPAGFAGAVRQGVLEAAGGGALSGFPVAGVRVKLLSSVYSEADSTEIGFKIAGSMAFKEACAKASPAVMEPVMSVEIVVPPEYMGAVINDFNSRRGKVLGIEARKDVQAVSGFAPLSEMSSANLS

SEQ ID NO: 5175 - DNA, 861 bp, Unknown
  Obtained from environmental sample
  misc_feature (1)..(861): n is a, c, g, or t
atgcgcattaacaacaacagcagtttgatattggaccccgcgaaaacggttaagatgggtgaaaccgtcgccggcgataagagttgggcgtttgacggggcttacgcccttgtcaggacggggaagaaaaaagacggagagttcaacgcggaagattttatgcttgtggggccgaatggggcgcagtataaatttattacgctgaacgccgacggcaccaatgccggaatttccgaccttaaagcaggaaccatcgtttcatccggcaaatacatcattaccgacgaccctaccggaacgctcagcggcataaacgtcacaattggaaacgagaccgcgcttacagccgccgaagtagcgtctctcgcgataggaagcgttttggcgaatggcagcgtcgtcaatgtggctaatgaactcaaaatattggtgagcggcaaagaggttaatattgagtataacggcggcggcctcaaagtaggcggcgaattggtagccgtttccaaaagcataacgcttgaggacggcacggttctaacgaacaacggcggcgggaaaatatcggtaaccgtcggcagtatcaaattagcgcaaaaatgggatgtcgcggcgaatgacgcaatagcgaaagacagcacgttggcctccggtagcgagataaaaaaaggcgcggcgtttgaagccggtacaataattaccaacgccggtgttttcgctcccggcagcattaccttcgcggaaaaaaacttcggcgcgggcgacacatacatacaattttcctcaaacgccggagccgctttggccgctaactacaagaacgccgaggtaggcggcatcgtaacgttcgtttctccgacttaa

SEQ ID NO: 5176 - protein, 286 aa, Unknown
  Obtained from environmental sample
  misc_feature (1)..(286): Xaa is any amino acid
MRINNNSSLILDPAKTVKMGETVAGDKSWAFDGAYALVRTGKKKDGEFNAEDFMLVGPNGAQYKFITLNADGTNAGISDLKAGTIVSSGKYIITDDPTGTLSGINVTIGNETALTAAEVASLAIGSVLANGSVVNVANELKILVSGKEVNIEYNGGGLKVGGELVAVSKSITLEDGTVLTNNGGGKISVTVGSIKLAQKWDVAANDAIAKDSTLASGSEIKKGAAFEAGTIITNAGVFAPGSITFAEKNFGAGDTYIQFSSNAGAALAANYKNAEVGGIVTFVSPT

SEQ ID NO: 5177 - DNA, 567 bp, Unknown
  Obtained from environmental sample
  misc_feature (1)..(567): n is a, c, g, or t
atggccgaggcctgggggcgctgccgcgattttcggcccgcaaaaggcgcgacgccggagatgataaaaaccctggacgctgggcttggaaagctcgcgcgcgcctggataaaagcgggattaaccaaagatgtggagcagagcggagacggagccgccggcggggtgggagctgccttgagaatctgcctgggagcgaaaatggaatcaggcgcgatgctcgttatgcgttacgcaggtttttttgaccaattgaacgggaaagggaaaggcgccgaccttgttatcaccggggaaggcatgaccgacggtcagacggcgggaggtaagctctgctccgtagttgccagagaaagccgtaacgccaaagtcccggtggccttgctttcaggcggcatcggaggagatgccggctccttgcttgcctcgttcgattacgctgtctcaatttcctgcgggcagatcggccttgacgccatgattaaggacagccagagggatctggctcttgccgctgaaaatctaattagggccatacaaatagggaagaagttaaatggaaaatga

SEQ ID NO: 5178 - protein, 188 aa, Unknown
  Obtained from environmental sample
  DOMAIN (1)...(184): Glycerate kinase family
  misc_feature (1)..(188): Xaa is any amino acid
MAEAWGRCRDFRPAKGATPEMIKTLDAGLGKLARAWIKAGLTKDVEQSGDGAAGGVGAALRICLGAKMESGAMLVMRYAGFFDQLNGKGKGADLVITGEGMTDGQTAGGKLCSVVARESRNAKVPVALLSGGIGGDAGSLLASFDYAVSISCGQIGLDAMIKDSQRDLALAAENLIRAIQIGKKLNGK

SEQ ID NO: 5179 - DNA, 876 bp, Unknown
  Obtained from environmental sample
  misc_feature (1)..(876): n is a, c, g, or t
ttgcgcctgtgggacntacagtattcggcatgcggcttaccagtgaacgacctcgtgtccaccgctctagcgaggaacgccggggaaggcattgtctcaagccttcagtattcgctcaggctccaggaacttatccttggggttttcgcggtttccataggaacggtacttttgcctgatttggccgagtacgcgaaatcaggacgctggggtctttttaacaggcggctttcatcgggcatgaatatcatcgcctttattacgataccaattacgtttttttcactggcccagggacagggcatgatcgctttgctttttcaaaccaggagttttaacgaggaatcggcgcggcttactctggcggcttttacatttcatataccgggactttacttcatcgctttaaaccgtgtcctggccccggccttctatgcacagagcgacgcgaagtctcctactattgcgggaattttctcgtttgtcgttaatatggcgcttgccgccgttctggcatttccctttaagggcgcaggcattgcctttgccttgtcgtttgccagcgcggttaatacggcggcgcttctgttttttttaagaaagaataaagatattactcttggcagtacgctaagatccgcccttttgtacaccgcaaagctgatttcattctcggctcttgcccttattcctattcttttgctctcgccgggaatttcggtactcttttcaggaaggggccgcctggtttcccagggcgcgccgcttatgctaaacgcgcttatctacgccggaacaggtttggttcttttggccgttacaagggataagcaacttttgggaataataaagataatgaaagggagtagggggtag

SEQ ID NO: 5180 - protein, 291 aa, Unknown
  Obtained from environmental sample
  DOMAIN (1)...(255): MviN-like protein
  misc_feature (1)..(291): Xaa is any amino acid
MRLWDXQYSACGLPVNDLVSTALARNAGEGIVSSLQYSLRLQELILGVFAVSIGTVLLPDLAEYAKSGRWGLFNRRLSSGMNIIAFITIPITFFSLAQGQGMIALLFQTRSFNEESARLTLAAFTFHIPGLYFIALNRVLAPAFYAQSDAKSPTIAGIFSFVVNMALAAVLAFPFKGAGIAFALSFASAVNTAALLFFLRKNKDITLGSTLRSALLYTAKLISFSALALIPILLLSPGISVLFSGRGRLVSQGAPLMLNALIYAGTGLVLLAVTRDKQLLGIIKIMKGSRG

SEQ ID NO: 5181 - DNA, 681 bp, Unknown
  Obtained from environmental sample
  misc_feature (1)..(681): n is a, c, g, or t
atgcgcgtgttattactttgcgatgattattggcatccgggacagatacccattgacggtgtcgtccctcttgccagccagggatttcaattcgatataattaccaacgcaaacgatttcacgccggatatgctttcaagctatgttgtcgtcttgatggataagtgcgatgaaaccagccaacaggataagacaagctggaaaactgaagcaatacagcaggcgtttattgcttatgttgaaaacggcggagggctgctgattatccatagcggaactgtggcgggtaaacaaacagaggcccttgaccagttgattggctgtcgctttgcctttcaccctaacaattgtttagtaactgtccagccaattaagcctcatcccgttaccgagggtgtaggaatgttttgcgaaaccgatgagcattaccggcttgaaattctggcacaggacgcggacattcttatagcctcatattccccgccccagggtgatacggaaaaatatcaggaagacccttatcacaacacaccggcgtgggtatgtcctgccggatatgtgcgaacccagggtaaaggccgggtctgtgtcctgacgccgggacatctcctgccggtatggcaaaaccctcaataccaacgaaccattgctaacgcattgaaatggtgcggtactcaataa

SEQ ID NO: 5182 - protein, 226 aa, Unknown
  Obtained from environmental sample
  misc_feature (1)..(226): Xaa is any amino acid
MRVLLLCDDYWHPGQIPIDGVVPLASQGFQFDIITNANDFTPDMLSSYVVVLMDKCDETSQQDKTSWKTEAIQQAFIAYVENGGGLLIIHSGTVAGKQTEALDQLIGCRFAFHPNNCLVTVQPIKPHPVTEGVGMFCETDEHYRLEILAQDADILIASYSPPQGDTEKYQEDPYHNTPAWVCPAGYVRTQGKGRVCVLTPGHLLPVWQNPQYQRTIANALKWCGTQ

SEQ ID NO: 5183 - DNA, 672 bp, Unknown
  Obtained from environmental sample
  misc_feature (1)..(672): n is a, c, g, or t
atggctgatacaattccggcaagtaatcaggttactgcaagtaacgttataaaaagaaaccttcgcgttgacaagctgccgcacatctggtgtcccggctgcggccacggaatactgatgcgcgctgtggcgcaggctatcgaaaacaaggagctggacaagaccaaggtctgcatagtttcaggtatcggctgttcctcaagggcggcgggttacatgaattttaacaccctgcacacaactcatggccgcgcccttgccttcgcgaccggcattaaactggcaaacccggagcttatcgttatcgtcattacaggcgacggtgacgcgaccgcaattggcggaaaccattttatccacgccgcccgaagaaacatcggaataacaacgatagtctttaacaacagcatttatggaatgacaggcggacagtactcacccctgacgccgactcatgactttgcgaccaccgctccatacggcaacgtagaccgccccttcgacataataaaactggcggaagcggcgggggcaacatacgtggcgaggatcacaacctaccatgtgaaagaggcggtaaagctgattgaaagggggctggaaaataggggcttctcgcttatcgaaggagtcagcgcgtgcccaactatacctcgccatcatccnngttaa

SEQ ID NO: 5184 - protein, 223 aa, Unknown
  Obtained from environmental sample
  DOMAIN (62)...(210): Thiamine pyrophosphate enzyme, C-terminal TPP binding domain
  misc_feature (1)..(223): Xaa is any amino acid
MADTIPASNQVTASNVIKRNLRVDKLPHIWCPGCGHGILMRAVAQAIENKELDKTKVCIVSGIGCSSRAAGYMNFNTLHTTHGRALAFATGIKLANPELIVIVITGDGDATAIGGNHFIHAARRNIGITTIVFNNSIYGMTGGQYSPLTPTHDFATTAPYGNVDRPFDIIKLAEAAGATYVARITTYHVKEAVKLIERGLENRGFSLIEGVSACPTIPRHHPX

SEQ ID NO: 5185 - DNA, 351 bp, Unknown
  Obtained from environmental sample
  misc_feature (1)..(351): n is a, c, g, or t
atgagggcaagcagcgtttcaggctgcgatatcctgcttgtcgcttacggggaaaccattcgcacagtgaaagcggcggtaaagcttgccgccgaggccggcattaaagcgggcgtattcaggccgatctcaatctggcctttccctgaaaaagctttcaaggcctgtgtcagggacaacaacattaaaaaggtgcttgtcgcagaactcaactacggccagatttcgcttgaggcggaaagaattctaaaaagcgacgccgaagtttcgcacattggaaaaatagacggcgacattctgtatcccaatgaggttttcaaaaagatctgcgaggtagtaaaacatggctga

SEQ ID NO: 5186 - protein, 116 aa, Unknown
  Obtained from environmental sample
  misc_feature (1)..(116): Xaa is any amino acid
MRASSVSGCDILLVAYGETIRTVKAAVKLAAEAGIKAGVFRPISIWPFPEKAFKACVRDNNIKKVLVAELNYGQISLEAERILKSDAEVSHIGKIDGDILYPNEVFKKICEVVKHG

SEQ ID NO: 5187 - DNA, 750 bp, Unknown
  Obtained from environmental sample
  misc_feature (1)..(750): n is a, c, g, or t
atggccgaggtttgcttgaggagtttccatgacatggccgcgcagacaagattggctttgcgttatgatctgcgctataaagacacggaacaggacgagattgacaagaaagcgtgggaaataacgcgccggtttattttaaagattccttcagtaaaagattttctggaaaaagacattgaggcggcttacagcggagacccggcggcgtacagcaaagcggaaattgtcatatcgtatcccggtatttacgccacgatggtttacaggatagcgcatgagctttacctgctgtccgtgcctcttattccaagaattatgagcgaatacgcgcacagcgccacgggcatagacattcatcccggagcggctattggcaaatatttttttatagatcacggcacgggaattgtcataggcgaaaccgcagttatcggaaataacgtaaagttgtatcagggtgtaacgcttggagccttgtccacaaaaggcggacagggcataaaaggcgttaagcgccatcctacaatttgcgataatgttacgatatactccggcgcaagcattttaggaggagacaccgttataggcgagggcgttgtaataggcggaaacgcttttgtaatacggtcggttcccgagaaaacacgcgtaagcgtaaaaaacccggaattgcaatttaagtccggcggcaatatttcctcccacatagaattagaccagattgatttctggcattatgatatttaa

SEQ ID NO: 5188 - protein, 249 aa, Unknown
  Obtained from environmental sample
  misc_feature (1)..(249): Xaa is any amino acid
MAEVCLRSFHDMAAQTRLALRYDLRYKDTEQDEIDKKAWEITRRFILKIPSVKDFLEKDIEAAYSGDPAAYSKAEIVISYPGIYATMVYRIAHELYLLSVPLIPRIMSEYAHSATGIDIHPGAAIGKYFFIDHGTGIVIGETAVIGNNVKLYQGVTLGALSTKGGQGIKGVKRHPTICDNVTIYSGASILGGDTVIGEGVVIGGNAFVIRSVPEKTRVSVKNPELQFKSGGNISSHIELDQIDFWHYDI

SEQ ID NO: 5189 - DNA, 711 bp, Unknown
  Obtained from environmental sample
  misc_feature (1)..(711): n is a, c, g, or t
ttgttcttgccattttgggcggctggatgtttacccagcttagacagtatacgacagaattgttcggccggattccggatatggcgaggtaagcggaggaaaatggtagataacgccgttttacagaatattcttctctttggcccggtatttcttctgattgccgtaagggcgcttgccatgatagaagtcgcccctctgctttcgtccgaagcgattccgcaggtagctaaaatttctcttgccggtcttgccgcttttgcggttcttcctactgcggaaatttttacggcggctaattctccgtccggtttggttaccctgccaggcggcgttttgagcgatttgcgcggcgaaacattcagcctgcgctttttcctgctgattataggcgaggggataatcggccttattatcggttttttcatgatgattattttttccgctttttccacggccggacaatttttctctttgcagatgggcttcggcgcgtctgaaactttcgatcccctgtcgcaaattgaaaatccgctcatgggccaataccttaaccttgtgtccatgcttgtcttcgtgacaatcggcggttttcataagctgttcctcggcggtttctggcgttctgtgcaaacgattaacatcatctctttggttgaaagcagggaaacggttgttaaaatgattgtttccggcttacaaacctgttag

SEQ ID NO: 5190 - protein, 236 aa, Unknown
  Obtained from environmental sample
  DOMAIN (42)...(234): Bacterial export proteins, family 1
  misc_feature (1)..(236): Xaa is any amino acid
MFLPFWAAGCLPSLDSIRQNCSAGFRIWRGKRRKMVDNAVLQNILLFGPVFLLIAVRALAMIEVAPLLSSEAIPQVAKISLAGLAAFAVLPTAEIFTAANSPSGLVTLPGGVLSDLRGETFSLRFFLLIIGEGIIGLIIGFFMMIIFSAFSTAGQFFSLQMGFGASETFDPLSQIENPLMGQYLNLVSMLVFVTIGGFHKLFLGGFWRSVQTINIISLVESRETVVKMIVSGLQTC

SEQ ID NO: 5191 - DNA, 723 bp, Unknown
  Obtained from environmental sample
  misc_feature (1)..(723): n is a, c, g, or t
ttgtttctggcgccttcaatgcttcgcacatgcgtcgagatggtgcaatttttcttcagccgcgccgtagaattagacccaaccaaagacgcgattattcttgttaatcttctgcgctattttaccaggcttgcgtggcctattctgacagtcgcgttnttagccgcgattctttcaaacgtaacgcagattggatttttatttaccacaaagccgattgttcccgatttttcaaaagtgcttccaaagatagggcagtatttcaagcgaattttttcggtagacgggatttacaattttgtaaaatctatcgtaaagatggcgattatcgggtttgtggcgtttattttgatttattctgaaacggataaactgctcaatctgcagaaagccagcgtcccggcggggcttacaatagtatctttaattgccattaagatgcttctcatttcggctattctattgatcgctttgtccataccggattatatgttccagcgctggcgtttcagggaacgtaaccggatgaccagatacgaacagaaagaagaattgaaaatgtacgaaggagatccgtatatacaggcaaggatacgcggccgtttccgggaattgttaaggcagaatatcgcggcttctgttccaaaagcggatgtggtagttacaaacccgacccaccttgctatagctattcagttagaaccgcgtttaaagaaccgatga

SEQ ID NO: 5192 - protein, 240 aa, Unknown
  Obtained from environmental sample
  DOMAIN (1)...(240): FlhB HrpN YscU SpaS Family
  misc_feature (1)..(240): Xaa is any amino acid
MFLAPSMLRTCVEMVQFFFSRAVELDPTKDAIILVNLLRYFTRLAWPILTVAXLAAILSNVTQIGFLFTTKPIVPDFSKVLPKIGQYFKRIFSVDGIYNFVKSIVKMAIIGFVAFILIYSETDKLLNLQKASVPAGLTIVSLIAIKMLLISAILLIALSIPDYMFQRWRFRERNRMTRYEQKEELKMYEGDPYIQARIRGRFRELLRQNIAASVPKADVVVTNPTHLAIAIQLEPRLKNR

SEQ ID NO: 5193 - DNA, 747 bp, Unknown
  Obtained from environmental sample
  misc_feature (1)..(747): n is a, c, g, or t
atgaatgatgatatctatgaactattaaataaaaacaaggatgtaaagctggaatcaatcccttttaaatcccgcactcctgaactctgccttgccgccatgcgtcgggatgttacagaattccgtcatactcccgattccttaaaaacgccggaaatctgtttggcggcggttcagcggcttgcttctctgctggaatatgtccctgtttctttgcggactccggtggtttgtatcgccgctgttcgtcaggaacgccacggcaagagcctttccttagtacctgacaagaataaaaactacgatttttacatgaaggtatttacttcaagagaatatgattggaaagaccatgatattcttgacaacggatttcctgaccttagggctataggtgcgttaagaacggaaactgatgacgcagacagttacatattaagccatgtccgcgatgaatggaaaacgcctgagctatgtatggcggctgttaaattcgacggcgcacagctaagatttgtgccggacgaactgcgtaccaaagaagtctgctatgcagcagttgaatcaaatccctgtgcgctcgcatttatacctgaaagcgaaaaaaccaaccaactgtttttagcggcgatcaaaagccatacatacgctatcgaaatcatacccaggcaatacttaactgaagaaatgtgcaatacagctgtaaataaaagagggacaaatctgaaattgttcccggcaaattaa

SEQ ID NO: 5194 - protein, 248 aa, Unknown
  Obtained from environmental sample
  misc_feature (1)..(248): Xaa is any amino acid
MNDDIYELLNKNKDVKLESIPFKSRTPELCLAAMRRDVTEFRHTPDSLKTPEICLAAVQRLASLLEYVPVSLRTPVVCIAAVRQERHGKSLSLVPDKNKNYDFYMKVFTSREYDWKDHDILDNGFPDLRAIGALRTETDDADSYILSHVRDEWKTPELCMAAVKFDGAQLRFVPDELRTKEVCYAAVESNPCALAFIPESEKTNQLFLAAIKSHTYAIEIIPRQYLTEEMCNTAVNKRGTNLKLFPAN

SEQ ID NO: 5195 - DNA, 711 bp, Unknown
  Obtained from environmental sample
  misc_feature (1)..(711): n is a, c, g, or t
ttgattatgggatacatagagggaataaccgtaatcggcgcgcgtaaagccggagacagcgcacggataataacaaaaaacaatataagccttggattcctgtcctacacttacggccttaacggcattgcccttccggcggataatccgaatcttgtatctcttatcaataaaaataaaatggaaactgaaattgacgcgctgcgtcccttatgtgatttcttgattgtttccatgcattggggcgatgaatacaaaacggaaccgggaaaaacgcaagccgatcttgctctttttatggcagaacacggcgtagaccttattatcggacatcatccccatgtgctacagcgcgcacaaaccattactcttgatgacggaagaaaaacattttgcatctattccctgggaaactttgtctccaaccagagggaaacagaaaggataataggcggaatgttagcagtaacttttacaaaaaagacgcaggaagaagaaaccaaggaattatttatctctgattttgggatgatacctgttatatgccattttgaccgcggctatataaacacaaaagtttatccattatattcatacaccgaggaactgcttaaaaaccacgccataaaaagcaaagacctgacaattgaatcattttatacaatattgaaaagaatggaaacaaagatttatatgcacaatcctttttag

SEQ ID NO: 5196 - protein, 236 aa, Unknown
  Obtained from environmental sample
  misc_feature (1)..(236): Xaa is any amino acid
MIMGYIEGITVIGARKAGDSARIITKNNISLGFLSYTYGLNGIALPADNPNLVSLINKNKMETEIDALRPLCDFLIVSMHWGDEYKTEPGKTQADLALFMAEHGVDLIIGHHPHVLQRAQTITLDDGRKTFCIYSLGNFVSNQRETERIIGGMLAVTFTKKTQEEETKELFISDFGMIPVICHFDRGYINTKVYPLYSYTEELLKNHAIKSKDLTIESFYTILKRMETKIYMHNPF

SEQ ID NO: 5197 - DNA, 729 bp, Unknown
  Obtained from environmental sample
  misc_feature (1)..(729): n is a, c, g, or t
atggcggaacgcgggcttttggatttgatcatctcatgccttcccgatctctcataccgggagaagataatcctttgcgaatcgttaggcgaagaatctgatttaaaccaaagatccggcgttgaggcccttatagggcgcgcgcttaaggcccaggacgtcgattcgtccaggcggacggcccagcggaccgccgaaaaagcgcggctgcggggaatcaacatagtttcatggcatagtcccctgtatccgccgctgttaagggaaatatacgatccgccagttctgctgtttttcagggggaagctccccgatccggaaaaccccctcgtggcgattgtcggaacgcgaaagcccagcacggcctcctcggcgcaggcctttgacattgcaagggggcttggcaggggaggcgtttccgtcgtttcaggcctcgcgcttggcattgacgcctgcgcccacaggggaaacatagagggcggcgctccgactgtcgcggtgctcggttccggggttgatgaggtttatccctcaactaaccgggttctcgcccggcggattctggaaacgggcggcgccctgatttccgagtacgcccccggcatggggccccgcaaatggaattttcccgcgcggaacaggatcattttcggcctttgcccgcgcgtgctgatagtcgaggcccccgcagaaatccggcgcgcttataaccgcgcgattcgcccttga

SEQ ID NO: 5198 - protein, 242 aa, Unknown
  Obtained from environmental sample
  DOMAIN (67)...(242): SMF family
  misc_feature (1)..(242): Xaa is any amino acid
MAERGLLDLIISCLPDLSYREKIILCESLGEESDLNQRSGVEALIGRALKAQDVDSSRRTAQRTAEKARLRGINIVSWHSPLYPPLLREIYDPPVLLFFRGKLPDPENPLVAIVGTRKPSTASSAQAFDIARGLGRGGVSVVSGLALGIDACAHRGNIEGGAPTVAVLGSGVDEVYPSTNRVLARRILETGGALISEYAPGMGPRKWNFPARNRIIFGLCPRVLIVEAPAEIRRAYNRAIRP

SEQ ID NO: 5199 - DNA, 879 bp, Unknown
  Obtained from environmental sample
  misc_feature (1)..(879): n is a, c, g, or t
gtggtggacgatcactttatgggcataactcacattctgagggcgcaggaatggctcccctccactccccttcacgttatcatgtacaacagttttggctgggaaccgccagctttctgccatctcccgatggtcatgggccaggacgggaaaaaactttcaaaacgccacggctccaccggaattgacgaattcagacagcagggatgcctgcccgaggcgctcatcaattacatagccctggtgggttgttcctatgaggaaggcaaagacatttatacgctggatgaacttgcggagcgcttcagcctggaaaaacttgccaaagccccggcaatcttcgattacaaaaaacttgaatggtttaacggtcagtatatcaggatgaaaagcaacacggaacttgctgtcctttctctgcctttggctattgagcaggggctttttggaagcccgtcaaaaaagccagaccccgatcaggaaacgctttacattgccgccatgcccctggtaaaagagcgggcggtattcttaacggaaatacctggaaagctccgctatctgtttgccgaacccgctttgccccaaaaggaagaatttttcccaaaaaagacgaatctggcagaaaccctggaactgctaacaaaagccaagacaatcacaagttctctggcggaagcgacaagcgatgaggaagcggaaagcttcgttaaggcatttgccgaaaaagaagggctaaaactgggagatcttatgatgcccctcagagtagcgattaccggagaacgggtaagccctcccctttttggaagccttcgcctgcttggaagcaaaaagcccttgccccgagtggataangcgctggaaacgctctcataa

SEQ ID NO: 5200 - protein, 292 aa, Unknown
  Obtained from environmental sample
  DOMAIN (1)...(121): tRNA synthetases class I (E and Q), catalytic domain
  misc_feature (1)..(292): Xaa is any amino acid
MVDDHFMGITHILRAQEWLPSTPLHVIMYNSFGWEPPAFCHLPMVMGQDGKKLSKRHGSTGIDEFRQQGCLPEALINYIALVGCSYEEGKDIYTLDELAERFSLEKLAKAPAIFDYKKLEWFNGQYIRMKSNTELAVLSLPLAIEQGLFGSPSKKPDPDQETLYIAAMPLVKERAVFLTEIPGKLRYLFAEPALPQKEEFFPKKTNLAETLELLTKAKTITSSLAEATSDEEAESFVKAFAEKEGLKLGDLMMPLRVAITGERVSPPLFGSLRLLGSKKPLPRVDXALETLS

SEQ ID NO: 5201 - DNA, 354 bp, Unknown
  Obtained from environmental sample
  misc_feature (1)..(354): n is a, c, g, or t
atgcaaaagaatttaaaatccttgctggtggcagccagcctagttgctggcatggttataactttcgtagcctgcggcaagggcggcacagacgtggttgatgattttgacctcgcaggtagcatacgtcaggttgaaaataattccggtaaaggcggcggcacctccagcggaaccgaccaatccggtacctctagcacaggctccggcgataacggctccagtggttctggtggcgatacctccagtgcctctggtggaggctccagcggttctaactctagtaatttcagcaatactccagtagttcaaaaagtaactcccagcattctaactctagtggctcgaacatag

SEQ ID NO: 5202 - protein, 117 aa, Unknown
  Obtained from environmental sample
  SIGNAL (1)...(26)
  misc_feature (1)..(117): Xaa is any amino acid
MQKNLKSLLVAASLVAGMVITFVACGKGGTDVVDDFDLAGSIRQVENNSGKGGGTSSGTDQSGTSSTGSGDNGSSGSGGDTSSASGGGSSGSNSSNFSNTPVVQKVTPSILTLVART

SEQ ID NO: 5203 - DNA, 831 bp, Unknown
  Obtained from environmental sample
  misc_feature (1)..(831): n is a, c, g, or t
atgaggctataccgcgatggaaatttgtttccggtaaagcagcacatccctacattcgaggaatacgcgcaaaattggtgggactgggatacctgcgaatacctgaaaaaccagaaagggaggaaggacattaccaaagcctatgcggacaactgcaaggctatggtcagaaaccagatactccctttctttgggaaaacgttgctggacaaaatcacgtcagaagacatcaacaaatggctgctgggctttaaagatcggacgttcgcggatgacaacggaaaagaaataaagaaatcatacaaaaacacttacgccaatacggtgttcgggactttctggctcatgctgaacgaggcggtcaaccggaaaatcataaaagctaacccggctgccccggtaaaaaaactgaaaaacgaccgcaagccaatcgaaattattacccctgcggaagtgaggctgctgttctcgcaggattggaaaaagatctgggacaatgatcggatttcctacctgggcaacaagctggcggcttgcaccggcatgagggcaggggaaatcctggggctgcggggcgaatatgtctatgacgagtacatccatgtctgcgcccagtacgacgaatacgggtaccggcctaccaaaaccaaagaaaatcggaatatacctattgcgcctgttgtcctggatgaaatcaggcagcttgcccttgaaaacaataacggctatgtcttttcgctggacggcggggctaccccggtgacgaggaagctgctgtacaacaaatttcaccgggcgctgaacaaaatcggggtgagccaaaagaggtga

SEQ ID NO: 5204 - protein, 276 aa, Unknown
  Obtained from environmental sample
  misc_feature (1)..(276): Xaa is any amino acid
MRLYRDGNLFPVKQHIPTFEEYAQNWWDWDTCEYLKNQKGRKDITKAYADNCKAMVRNQILPFFGKTLLDKITSEDINKWLLGFKDRTFADDNGKEIKKSYKNTYANTVFGTFWLMLNEAVNRKIIKANPAAPVKKLKNDRKPIEIITPAEVRLLFSQDWKKIWDNDRISYLGNKLAACTGMRAGEILGLRGEYVYDEYIHVCAQYDEYGYRPTKTKENRNIPIAPVVLDEIRQLALENNNGYVFSLDGGATPVTRKLLYNKFHRALNKIGVSQKR

SEQ ID NO: 5205 - DNA, 711 bp, Unknown
  Obtained from environmental sample
  misc_feature (1)..(711): n is a, c, g, or t
gtgttccacgagttcagttacgtttccaccgaatgtaaagcgggtctggtgcttaaaagcaactgcgaagatacaaccgtcttcggccacaagaactactttgagcttatacatgaatccgaccttgagaatcccaatccgaagatttaccagttaaacgaggttaaaaaaggccagcgctactgtatgctggttacaacttccgccgggctttaccgttacaacatgaacgaccttctggaggtcacgggtttctatcatgaattccccactatcaaatttatccagaaggtaaacggtaccatcagcctgaccggggaaaaactccatgagcggcagtttatcgaagcggtgcatgaaacggaaaagaagaccggcaagatgcttcctttctttgtgggtttcgcggagccggaaaaatcaaattacaaattctattatgaatttgcaaaccagaatgtttccattgccgaggcggaagaatttaccgcccaggttgatcattgcctgcaggaatataaccccgaatacaaggaaaaacgcgcctccaaccgggtgaaggccccggagacagctcttttgggccccgcgtcctttgagcgtttcaaggcggcatgtattgaccgcggctaccgcgacggccagttcaagcttaatcttcttttgcaggatgaaaagaggcacgccatgttcaaagagctggttaaatga

SEQ ID NO: 5206 - protein, 236 aa, Unknown
  Obtained from environmental sample
  misc_feature (1)..(236): Xaa is any amino acid
MFHEFSYVSTECKAGLVLKSNCEDTTVFGHKNYFELIHESDLENPNPKIYQLNEVKKGQRYCMLVTTSAGLYRYNMNDLLEVTGFYHEFPTIKFIQKVNGTISLTGEKLHERQFIEAVHETEKKTGKMLPFFVGFAEPEKSNYKFYYEFANQNVSIAEAEEFTAQVDHCLQEYNPEYKEKRASNRVKAPETALLGPASFERFKAACIDRGYRDGQFKLNLLLQDEKRHAMFKELVK

SEQ ID NO: 5207 - DNA, 486 bp, Unknown
  Obtained from environmental sample
  misc_feature (1)..(486): n is a, c, g, or t
atggcttattttctaacgagcctgtccatgctgtccatagatattcagatggcggagcttaaggaacagggagacggagcagacatgccttccgaacagaagcctgctacaaccggaaatcaatcgaaagagaaaaaaaccatactggcggttgacgacaccccgtttttcctgaccacgctaaagaaaatacttcaagacactggctataagttgctcttcgtaacttcaggcagcgacgcgctgaagtccctcgaaaagcatcatcccgatcttgtccttttggacattgaaatgcccgagatggacggctacgagcttgccgcgcaaataaggaaaagaggagaaaaggcgcctattgtttttttgacaggcaacgccaaaagagaaaacgtggtaagagcggtggaggcgggagcggcggatttcattgtaaagccggtaaataaagaaggagttctcgccaaaatcgaaagatacatatag

SEQ ID NO: 5208 - protein, 161 aa, Unknown
  Obtained from environmental sample
  DOMAIN (46)...(158): Response regulator receiver domain
  misc_feature (1)..(161): Xaa is any amino acid
MAYFLTSLSMLSIDIQMAELKEQGDGADMPSEQKPATTGNQSKEKKTILAVDDTPFFLTTLKKILQDTGYKLLFVTSGSDALKSLEKHHPDLVLLDIEMPEMDGYELAAQIRKRGEKAPIVFLTGNAKRENVVRAVEAGAADFIVKPVNKEGVLAKIERYI

SEQ ID NO: 5209 - DNA, 750 bp, Unknown
  Obtained from environmental sample
  misc_feature (1)..(750): n is a, c, g, or t
atgggaatccgtaaagaagacataataaagttattcaacgcttttgagcgcgccgagacggacaagaacaggggcatagtcgggaccggtttgggactttcgatttgcaagtcttttgtggaaatgatgggcggctatatattagttgacagcgagtatgagcaaggcagtgtttttacggtaataattccggctgttttgggcaacaaggccgaagtaaattccgcgaagaatctaaagaaagagcagactttattcgcgcctaatgccaacattctggtagtagacgacaacgagtttaacatcagggtagcggaaggcctgctcggtttatttaagataaaaccgaagaccgcgtcttccggcaagaaagccatagacattgtacagaagaacaaatttgaccttgtctttatggatcacatgatgccggagatggacggagttgaagcagtaagggaaatacggaaactcggcgtccaatacgcaagcctgccgattgtagctttaacggccaacgcgattcagggagcaaaggaaatgttcctggcgaacggctttaacgggtttatttcaaaaccgattgaaatgcaggaattaaacgagattttaagggaatggctgccgttcgataaaatcgaagaaaaaccccaggcggatttaatcgctgaaaaccatgatgctgaaacagtcagcgatttcatgcgtgcccttgaaaaaattgatgaaatcaaaactgaaatcggctga

SEQ ID NO: 5210 - protein, 249 aa, Unknown
  Obtained from environmental sample
  DOMAIN (6)...(66): Histidine kinase-, DNA gyrase B-, and HSP90-like ATPase
  misc_feature (1)..(249): Xaa is any amino acid
MGIRKEDIIKLFNAFERAETDKNRGIVGTGLGLSICKSFVEMMGGYILVDSEYEQGSVFTVIIPAVLGNKAEVNSAKNLKKEQTLFAPNANILVVDDNEFNIRVAEGLLGLFKIKPKTASSGKKAIDIVQKNKFDLVFMDHMMPEMDGVEAVREIRKLGVQYASLPIVALTANAIQGAKEMFLANGFNGFISKPIEMQELNEILREWLPFDKIEEKPQADLIAENHDAETVSDFMRALEKIDEIKTEIG

SEQ ID NO: 5211 - DNA, 462 bp, Unknown
  Obtained from environmental sample
  misc_feature (1)..(462): n is a, c, g, or t
ttgcggcgattaaaattcgggcgcacggttcactcgcttgcgaaggcgctggcgcgttttccgaatataaaaatggtttttatatcgccgcaggaactgattttgcctgaatatataaaaaatatgttaaaaaaccagggtattgagtttgacgaaagggaaaatcttgaaaaatccatgcctgagttggacgtactgtacatgacccgcgttcaaagggagagattttttaacgaggatgattatatccgcctgaaagatacctatgtgcttaataaggagaaaatgtccgccggtaaggagaagatgattgttttacacccattgccgcgcgttaacgaaatatccgtggagattgactcggatccgagggcggcgtattttaaacaggcgaaatacggtatgtatgtccgtatggcgttactttcttcggttttgggggcggaagatgttaaatattga

SEQ ID NO: 5212 - protein, 153 aa, Unknown
  Obtained from environmental sample
  DOMAIN (4)...(145): Aspartate/ornithine carbamoyltransferase, Asp/Orn binding domain
  misc_feature (1)..(153): Xaa is any amino acid
MRRLKFGRTVHSLAKALARFPNIKMVFISPQELILPEYIKNMLKNQGIEFDERENLEKSMPELDVLYMTRVQRERFFNEDDYIRLKDTYVLNKEKMSAGKEKMIVLHPLPRVNEISVEIDSDPRAAYFKQAKYGMYVRMALLSSVLGAEDVKY

SEQ ID NO: 5213 - DNA, 576 bp, Unknown
  Obtained from environmental sample
  misc_feature (1)..(576): n is a, c, g, or t
ttgttttacacccattgccgcgcgttaacgaaatatccgtggagattgactcggatccgagggcggcgtattttaaacaggcgaaatacggtatgtatgtccgtatggcgttactttcttcggttttgggggcggaagatgttaaatattgatgagataaaaaacggtattgttatagaccatataaaagcagggctggggattcgcatttttaactggcttagtcttgacaaagttccgtataatgtcgcgtttgtaacaaacgccaattcacaaaggtgcggaaaaaaggatataataaaaattgacaatactatttcgattaactttgacgttcttgggttaatcgatccgaatattacggtgagtataatagagaatgagcgcgtaacgaaaaagataaaactccagcttccgcaaaaagtggagaatgtgcttgtctgtaaaaatccgcgctgtataagttctacggaaaaatatttaccgcatatattttatttggaaaaccctgaacagcgcacataccgctgtgaatactgcgacgagataatctcagcgggggactttagtaaatga

SEQ ID NO: 5214 - protein, 191 aa, Unknown
  Obtained from environmental sample
  DOMAIN (140)...(191): Aspartate carbamoyltransferase regulatory chain, metal binding domain
  misc_feature (1)..(191): Xaa is any amino acid
MFYTHCRALTKYPWRLTRIRGRRILNRRNTVCMSVWRYFLRFWGRKMLNIDEIKNGIVIDHIKAGLGIRIFNWLSLDKVPYNVAFVTNANSQRCGKKDIIKIDNTISINFDVLGLIDPNITVSIIENERVTKKIKLQLPQKVENVLVCKNPRCISSTEKYLPHIFYLENPEQRTYRCEYCDEIISAGDFSK

SEQ ID NO: 5215 - DNA, 795 bp, Unknown
  Obtained from environmental sample
  misc_feature (1)..(795): n is a, c, g, or t
atgttgcgccttctttcaccaccttttcggcagacggtctttcggttgacaaactttcctatggcgctctacgtttatctcacggagaaggggtacgggcgcggttaccggaagacgcattgttgcgcggtttccaagagtaccgccgacgagctgttgaaacaaggtcttgacggcggcaacctcacggttatagaaaacgggattgatgttgaaaaatattgtccgagcggcgcggtaataagggaagataatttacttctgtatgtaggcaggctgaaaaaatacaagcgcgtcgattacatcatagaggctatgagcgcgctgaacagagatgggcgtaacgtcaaattggcagttttaggtaccggagacgatttaccgaggctaaaaaaacgcgccgccgagttgagacttacggataaagtgaattttgccggctttgttgatgaggataaaaagattgagtatttaaggaaatcaacaatctttgtcaacccatcggagaaagaggggtgggggataaccaacatagaggcgtcggcttgcgcaacgccggttgcggcgaacgacgcgccggggcttcgcgattcggtggtagataatgagacgggtttgttatatagagagaacgatgtggcttcgcttaccgaatctctgaggaaactgcttgacgacagggaactcagggaacggatgggagcgtcgggccgccgctgggcggagaagttttcttgggacgttagcgccgggagggtatgggagtggctacggaaaatcgcgcgcgaaagttag

SEQ ID NO: 5216 - protein, 264 aa, Unknown
  Obtained from environmental sample
  DOMAIN (71)...(240): Glycosyl transferases group 1
  misc_feature (1)..(264): Xaa is any amino acid
MLRLLSPPFRQTVFRLTNFPMALYVYLTEKGYGRGYRKTHCCAVSKSTADELLKQGLDGGNLTVIENGIDVEKYCPSGAVIREDNLLLYVGRLKKYKRVDYIIEAMSALNRDGRNVKLAVLGTGDDLPRLKKRAAELRLTDKVNFAGFVDEDKKIEYLRKSTIFVNPSEKEGWGITNIEASACATPVAANDAPGLRDSVVDNETGLLYRENDVASLTESLRKLLDDRELRERMGASGRRWAEKFSWDVSAGRVWEWLRKIARES

SEQ ID NO: 5217 - DNA, 969 bp, Unknown
  Obtained from environmental sample
  misc_feature (1)..(969): n is a, c, g, or t
atgatgggttancaaaaacaagcaaaatggtacaaagctgtctcccaggctaagcttcttatggttctgcgcgancatgccggaaaacatanngcggcgggtaaatctgcttcagattttgggatttcacgggttggggtctgtaaagggatacaatccctcattaacgcgggttaccttataaaaactaacgattcgggttattttttggatcctgacaaaaccagtgatttcctttacccatgggagtttggtgagaacgaacaaaacttccgtttctttgaaaaaacggccagtaccatgaacaatgtacgcgatttcgcgtctcagggccttgcggcagggatagtcgtggttgccgacacgcagagcgcgggcagggggcgcaacggcagaatatgggcctcgcggttgggaggcctgtattgcagtttccttgaccggccttctatttcgcttgccgattattccatgccggccatgctgtaccagatagccgttgccagggctgtaagctctgtgtgcgggaaaccggcaaaattgcgctggccgaatgacatctacatagacggacggaaaatcgccggcatcatcaccgagcttgaagccgaaggggatatgataagctggatagcgacaggcataggcgtgaatgttaacaacctaagcccttccgcaaaggcagtcagttgttccgaaattttgcgtcatgcagtatcacggcggtcccttttaacagctattatcaatgaggcggagcagttgaagaaaagcgccggtcctacaatggcttatgcccaggggaacaggtatctggcggcggaatggaattcgctggcggattgtatcggcgcaaatgccgcaattgtggattccgtaaatttatcgcgggatgagaaagccaaattgttggccaggggaatttttgccgggattgaccctgccgggcgcgtattatcaaatctctaa

SEQ ID NO: 5218 - protein, 322 aa, Unknown
  Obtained from environmental sample
  DOMAIN (93)...(190): Biotin/lipoate A/B protein ligase family
  misc_feature (1)..(322): Xaa is any amino acid
MMGXQKQAKWYKAVSQAKLLMVLRXHAGKHXAAGKSASDFGISRVGVCKGIQSLINAGYLIKTNDSGYFLDPDKTSDFLYPWEFGENEQNFRFFEKTASTMNNVRDFASQGLAAGIVVVADTQSAGRGRNGRIWASRLGGLYCSFLDRPSISLADYSMPAMLYQIAVARAVSSVCGKPAKLRWPNDIYIDGRKIAGIITELEAEGDMISWIATGIGVNVNNLSPSAKAVSCSEILRHAVSRRSLLTAIINEAEQLKKSAGPTMAYAQGNRYLAAEWNSLADCIGANAAIVDSVNLSRDEKAKLLARGIFAGIDPAGRVLSNL

SEQ ID NO: 5219 - DNA, 564 bp, Unknown
  Obtained from environmental sample
  misc_feature (1)..(564): n is a, c, g, or t
atgaaagcgtgggctagagaaaattctgatacttttatggaattcctcaatcccgaagataaaggaaccaagtatttgaaaaagggtgggaggctttatgtgtattcgccagacaacgaaggtgtgatgttaatctctgggcacatgctaaaagaatctatgatgggttccgatatgtcttatgaagatgccgttaataacgaccctctttctgctcgctacgaacctgtgcttgctggttcggaagtttggaatgggcaggatgcttgggtgctggaattgaatgcaaagaaaaaaaccgaaagttacccaaaacgcaaattgtggatagacaagaaaaccggagatatgctgcactatgaactttatgctctttctggagcaaagctaaaagaatatagccttataaaagttggcacttttgcaaaccgccgtttcccagttgaaattgaacttcgcgaccttttgaggaaaaacagcaaaacaacttttataatgaaaaacgtggtgatggataaaccaattgcagatgcggtgtttagccaacggaatttggagagatag

SEQ ID NO: 5220 - protein, 187 aa, Unknown
  Obtained from environmental sample
  misc_feature (1)..(187): Xaa is any amino acid
MKAWARENSDTFMEFLNPEDKGTKYLKKGGRLYVYSPDNEGVMLISGHMLKESMMGSDMSYEDAVNNDPLSARYEPVLAGSEVWNGQDAWVLELNAKKKTESYPKRKLWIDKKTGDMLHYELYALSGAKLKEYSLIKVGTFANRRFPVEIELRDLLRKNSKTTFIMKNVVMDKPIADAVFSQRNLER

SEQ ID NO: 5221 - DNA, 405 bp, Unknown
  Obtained from environmental sample
  misc_feature (1)..(405): n is a, c, g, or t
atgagaagcgcggcaaaagctggcgatgatgtttgcctcgcagactcgccaagcggtttagaaataggtccatacnncgtaaatccgccgctgaacttagggaaagaactcgcaaagataaaaggcattgagccctgcatagatacaagcgattccatcgcggaaagtntgcagcatatatctgagaaatcaaaagttcgtttggaagtggaaaaaatggaaaaggctattttgcaaagcgcagaggatttttgcttattattcacggcaagagaagtggcaagggggagtattttgaaactcacgaagaaatttcctataaggaaaataggcaaggcaaaaaagggaagcggaatttttttaggaggaaagaaaattgaggttaagggctggcagcatttttag

SEQ ID NO: 5222 - protein, 134 aa, Unknown
  Obtained from environmental sample
  misc_feature (1)..(134): Xaa is any amino acid
MRSAAKAGDDVCLADSPSGLEIGPYXVNPPLNLGKELAKIKGIEPCIDTSDSIAESXQHISEKSKVRLEVEKMEKAILQSAEDFCLLFTAREVARGSILKLTKKFPIRKIGKAKKGSGIFLGGKKIEVKGWQHF

SEQ ID NO: 5223 - DNA, 642 bp, Unknown
  Obtained from environmental sample
  misc_feature (1)..(642): n is a, c, g, or t
atgatttttaaaaaaaatatagaattaccgcttgaagatttcgtttatgtaggggacagaccggcgttagaaatggatttatcaattataacttatgacgcggcatcggctgaatatattaaactgtcaaatattgatgaattaacaaaatatcagcgtggctcaaaagaatcatggataaatatcagcggattaaaaaacattgattcaataaaagcattaggaaaattatatgatattcacccgttaaccattgaagatattttaaatactgaacaacagtcaaaagttgaaatatttgaaaactatcgttttttctctatcaagacaatacagcgtgaaaagagatttcatcacaatcaaaataaaaaaagaaagccattttggttctttaaaaaggaagaagaaaaaatagatgaatttttaattgatcaggtaagtataattattatgaaagacacgcttataacttttcaggaaatacctgatgatccatttgacggaataagggagaaaatcttaagcggtgtcggagagatacgcaaggcgggagtagattatctaacatacgaaattattgatgcggttatagatgattattttcttgtgttaaatcatcttgaagatgatatgaaaatttga

SEQ ID NO: 5224 - protein, 213 aa, Unknown
  Obtained from environmental sample
  misc_feature (1)..(213): Xaa is any amino acid
MIFKKNIELPLEDFVYVGDRPALEMDLSIITYDAASAEYIKLSNIDELTKYQRGSKESWINISGLKNIDSIKALGKLYDIHPLTIEDILNTEQQSKVEIFENYRFFSIKTIQREKRFHHNQNKKRKPFWFFKKEEEKIDEFLIDQVSIIIMKDTLITFQEIPDDPFDGIREKILSGVGEIRKAGVDYLTYEIIDAVIDDYFLVLNHLEDDMKI

SEQ ID NO: 5225 - DNA, 837 bp, Unknown
  Obtained from environmental sample
  misc_feature (1)..(837): n is a, c, g, or t
gtggaaagctgcgtgaacaaggttggagttgatgtgaatagcgcaagccccgctttgctcggttatgtttccggtgttaataaaaacttggcagatagcattgttaagcacagagacgatcacggtgcatttgcaagtcgcgaggctttgaaagaggtaaagggttttgggcaaaaagcgtatgagcaagccgctggatttttgcgtattcacggagcagaaaatcctttggacaacagtgcggttcaccctgaaaattacggcttggtggagaaaatcgcagaaaaagctggcaagcctttaaatgaactcataggcaattccgaggctttgcattccattgtggcaaacgatttcaccgatgcggagaacggagttggaaaaaacaccattgcagatattttggcagaacttgaaaaaccaggcagagaccctcgcaaggaattccattatgccaaattcaaccccaaaatcaaaaccatgcaagatttgattacaggcagttggttggaaggcgttgttagcaatgtcacgaatttcggcgcatttgtggatattggtgttcatcaagacggcttggtgcatatttccgagatgagcgataattttgtgaaagatgcaaaaacaattttgacaacaggcgatgtggttaaggttagggtagtttccgttgatgctcccaataaacgcatttcactctctatgaagcaggaaagcgagcgtagggtaggcggtggaggctttaaaggtggtggcagagatgccaaaggcggttaccaaggcaagggtggcggtcatcaagccaaaacagtgccgcanngcagcactcttgcctga

SEQ ID NO: 5226 - protein, 278 aa, Unknown
  Obtained from environmental sample
  DOMAIN (206)...(270): Glycine rich protein family
  misc_feature (1)..(278): Xaa is any amino acid
MESCVNKVGVDVNSASPALLGYVSGVNKNLADSIVKHRDDHGAFASREALKEVKGFGQKAYEQAAGFLRIHGAENPLDNSAVHPENYGLVEKIAEKAGKPLNELIGNSEALHSIVANDFTDAENGVGKNTIADILAELEKPGRDPRKEFHYAKFNPKIKTMQDLITGSWLEGVVSNVTNFGAFVDIGVHQDGLVHISEMSDNFVKDAKTILTTGDVVKVRVVSVDAPNKRISLSMKQESERRVGGGGFKGGGRDAKGGYQGKGGGHQAKTVPXXSTLA

SEQ ID NO: 5227 - DNA, 627 bp, Unknown
  Obtained from environmental sample
  misc_feature (1)..(627): n is a, c, g, or t
gtgccgggaacccaatacaccgcgactattacgcttacgcctaaagccgggtatacattgcagggcgtaacagccaatttctttacggttgcgggggcatcatcggtgagcaacaatgccaattcaggcattgttacggcggtattcccgcggaccgcgtcaaccgtcagcacagccgccataacgggagttaccgccccgcttgccgggagaaccccggttaacaccattgacaacacgcagtacagcgggaccgtcgcgtggtctccgtcgggaacttttgtgcagggaacccaatacaccgcgactattacgctcacgccaaaagccgggtatacattgcaaggcgtagcggccaacttctttacggttgcggggacaacaacggtgagcaataccgccaattccggggttgttacggcggtattcccgcagactccggcaaccgtcagcacagccgccatagcgggccttaccgccccggttgccggcgcggccccggttaacgccattaacgaaaacacgcagtacagcggaaccgtcgcatggtctccgacggtatcgggaacttttgtacagggaacccaatacaccgcgactttacgctcacgccactcggccatctga

SEQ ID NO: 5228 - protein, 208 aa, Unknown
  Obtained from environmental sample
  misc_feature (1)..(208): Xaa is any amino acid
MPGTQYTATITLTPKAGYTLQGVTANFFTVAGASSVSNNANSGIVTAVFPRTASTVSTAAITGVTAPLAGRTPVNTIDNTQYSGTVAWSPSGTFVQGTQYTATITLTPKAGYTLQGVAANFFTVAGTTTVSNTANSGVVTAVFPQTPATVSTAAIAGLTAPVAGAAPVNAINENTQYSGTVAWSPTVSGTFVQGTQYTATLRSRHSAI

SEQ ID NO: 5229 - DNA, 879 bp, Unknown
  Obtained from environmental sample
  misc_feature (1)..(879): n is a, c, g, or t
gtgccggctcatctcggattcgacgatatcaaggtgcacgccaaactgtgcctcatcacacgcanggatcggggggagatacagtatattacgcaggtgggaaccggcaactacaacgagattaccgccgagttctacaccgacctcacgctcatcaccgccgaccagaagatcggagcggaggccaaccgcttcttcaggaacatggccgtggcgcacctaaacgacaactacgagtaccttttggtcgcgccggccaacctaaagagcggcatcatggcgctgatagacgagcagattgcgctgggggaaaaagggcgcatactcatgaaacttaactccatgaccgacatagacgtaattcaaaaactctcggaagcatcctgcgccggcgtgaagatagacctaatcatccgcggcatctgctgcctgataccgggcctgcccggagccacggagaacatatcggtaataagcatagtgggccgcttcttggagcattcgcgagtctatagtttcggcgtaggcgcggcgcagaagatgtacatagcgtcagccgacatgatgacccgaaacacaacgcgccgcgtcgaggtggccgcgccgatattagacgagcggataaaaacgctgatcaacaagatgatcgaaacggagttatgcgacaacgtgaaagcgcgccgtctgcgcagcgacggcttctacgaaaagatacaccgcgacggcgagcctgtggacagccaagaactgctgataaaggaagcggcggagcgaatggaactggcgcggcgtcaggagatggccgcgacggacaaaaaaaagagcgtggtgcgctcaaaactcaaggtttggctggagaggcttacggactggatgtga

SEQ ID NO: 5230 - protein, 292 aa, Unknown
  Obtained from environmental sample
  DOMAIN (1)...(257): Polyphosphate kinase
  misc_feature (1)..(292): Xaa is any amino acid
MPAHLGFDDIKVHAKLCLITRXDRGEIQYITQVGTGNYNEITAEFYTDLTLITADQKIGAEANRFFRNMAVAHLNDNYEYLLVAPANLKSGIMALIDEQIALGEKGRILMKLNSMTDIDVIQKLSEASCAGVKIDLIIRGICCLIPGLPGATENISVISIVGRFLEHSRVYSFGVGAAQKMYIASADMMTRNTTRRVEVAAPILDERIKTLINKMIETELCDNVKARRLRSDGFYEKIHRDGEPVDSQELLIKEAAERMELARRQEMAATDKKKSVVRSKLKVWLERLTDWM

SEQ ID NO: 5231 - DNA, 372 bp, Unknown
  Obtained from environmental sample
  misc_feature (1)..(372): n is a, c, g, or t
gtgcttaacagatttgaggcgattgacagtaacgttaagacagtttcgcagcaggaagaaaacgtccgtaacgcaatggaagagcagggcgagggaagcaaacaagtcctgcaaagtacaagcagtttgaacgaacttacccagcaggtaaagagaggttccaatgagatgcttaatgaaacaagggaagtaatagaagaaagcagtaatcttgaaaaaataactcaggaaataaccggcggtatgaacgagatggcgacgggagcggatgagataaacatagcggtgcaccatgtcaacgaaataaccaacaaaaaccgtgagggtattaatactctgatgcaggaagtggctaagtttaaggtagaataa

SEQ ID NO: 5232 - protein, 123 aa, Unknown
  Obtained from environmental sample
  misc_feature (1)..(123): Xaa is any amino acid
MLNRFEAIDSNVKTVSQQEENVRNAMEEQGEGSKQVLQSTSSLNELTQQVKRGSNEMLNETREVIEESSNLEKITQEITGGMNEMATGADEINIAVHHVNEITNKNREGINTLMQEVAKFKVE

SEQ ID NO: 5233 - DNA, 393 bp, Unknown
  Obtained from environmental sample
  misc_feature (1)..(393): n is a, c, g, or t
ttgttggaaaacaatgcgcatatatatattaaacttactatgaaaatcagatttaaattaatgtcaattatggtagcgcttggattattcgccgttgcgtccgtcagtattaccctgcttatcaaagcacgctccagtatctcaggtctttcggaacaatatgtcattactatggcaaatgacgctggcgcggatgttaccaattttattgatacatacatatacaaagtagaaacagtcggtcatgtcatggaacagtaccgttacataataatagccaaccgccgcacattttttaattttattcttgcaggtattacacgggaaaacccggaaattatcgccgcatggtgcgtatgggaacctaacgttttggagggagacgacagttag

SEQ ID NO: 5234 - protein, 130 aa, Unknown
  Obtained from environmental sample
  misc_feature (1)..(130): Xaa is any amino acid
MLENNAHIYIKLTMKIRFKLMSIMVALGLFAVASVSITLLIKARSSISGLSEQYVITMANDAGADVTNFIDTYIYKVETVGHVMEQYRYIIIANRRTFFNFILAGITRENPEIIAAWCVWEPNVLEGDDS

SEQ ID NO: 5235 - DNA, 987 bp, Unknown
  Obtained from environmental sample
  misc_feature (1)..(987): n is a, c, g, or t
atgganaaggaaatgagagtgatatcgctccccattccgttcggaagaacgaaaactacgtggagttatgcgatagctgttatgaccgatacgataatggctcctgtctacgaaatgcttaacataacaataataataagcgttgtggtattggcgctggtagttttggcggcgctgtttcttgcaatgtctatcagtaagcctatcgtcaaagttgccgacactctcaaggatatttccgaaggtgaaggcgatctgacacggactattgccgtcaattcgagagacgagattggcagtctggctttgtacttcaacaatacactgaagaaaatcagaaaccttgtagtaaatgtcaaaggagaggcggcagcattatcgggtataggaactgatcttgcaagcaatatggacgaaacagcgtcagcgataaacgaaattaacgccaatatccacagcattaagggaaggattataaatcaaagtgccagcgtcagcgaaacccacgccactatggaacagcttaccgtaaacattcataaactcaatgagcatgttgaaaatcaaagtatacatatgtcgcaggcttcgtccgctattgaacaaatgatggcgaatatcaactcggttaccggaacgctggtcaataacgctgacaatgtaaaggcgctgaaggaagcctccgaggtggggcgttccggtttgcgggatgttgcggcggatatacaggaaatagcccgtgaatcggaaggacttttggagattaactcggtgatggaaaacatcgcgagtcagactaatttactttctatgaacgctgcgattgaagcggctcacgccggagatgcgggcaaaggttttgccgttgtcgccgatgagatccgcaaacttgccgagagttccggcgaacagtccaaaacaatcggcgctgttctaaaaaagataaaaagttcaatcgacaaaataatgagttctcggccgatctga

SEQ ID NO: 5236 - protein, 328 aa, Unknown
  Obtained from environmental sample
  DOMAIN (194)...(324): Methyl-accepting chemotaxis protein (MCP) signaling domain
  misc_feature (1)..(328): Xaa is any amino acid
MXKEMRVISLPIPFGRTKTTWSYAIAVMTDTIMAPVYEMLNITIIISVVVLALVVLAALFLAMSISKPIVKVADTLKDISEGEGDLTRTIAVNSRDEIGSLALYFNNTLKKIRNLVVNVKGEAAALSGIGTDLASNMDETASAINEINANIHSIKGRIINQSASVSETHATMEQLTVNIHKLNEHVENQSIHMSQASSAIEQMMANINSVTGTLVNNADNVKALKEASEVGRSGLRDVAADIQEIARESEGLLEINSVMENIASQTNLLSMNAAIEAAHAGDAGKGFAVVADEIRKLAESSGEQSKTIGAVLKKIKSSIDKIMSSRPI

SEQ ID NO: 5237 - DNA, 309 bp, Unknown
  Obtained from environmental sample
  misc_feature (1)..(309): n is a, c, g, or t
atgagtaacagtaatatgaacaattgttttcgcatagacggcgataatctcagactggaaataaaagccgtccccggcgcttcaaaaactgaattggcgggaattaaagacggacgcttacggatacggcttgccgccgctcccgaagacggcaaggcaaacgccgaactgctgaattttttatcaaagacgcttgattgccccaagcgtgatttgcggcttctttgcggcgaaaaatcgcggttgaaagcggttgcgttgccgcttgagtgcagagcgaagttggaaaggattattgaaaagttttag

SEQ ID NO: 5238 - protein, 102 aa, Unknown
  Obtained from environmental sample
  DOMAIN (13)...(89): Uncharacterised ACR, YggU family COG1872
  misc_feature (1)..(102): Xaa is any amino acid
MSNSNMNNCFRIDGDNLRLEIKAVPGASKTELAGIKDGRLRIRLAAAPEDGKANAELLNFLSKTLDCPKRDLRLLCGEKSRLKAVALPLECRAKLERIIEKF

SEQ ID NO: 5239 - DNA, 843 bp, Unknown
  Obtained from environmental sample
  misc_feature (1)..(843): n is a, c, g, or t
ttgtacgcgaagtggaatattaatagctatactgttacctatgatgcggacggcggctctcccgccctgtccagtccctctaccgttacctacggcgctgttataacccagccgcccggaatgtccaaaacagggtacacattcgacaaatggtatacaaattccgccaaaaccgtccccgctacattcccgatcacggttaccggcaatgtcagcctgtacgccaaatggaacccaattagctacacggttacttacgttgcaaacgcggcggacgcaacgggggcaacggcagacagcagccacacctacgattctgacaacgcccttagcgccaacggctattcccgcgccggttacacatttgacggctggaacagccaaagcaacgggagcggtacaaattacaccgagggccagagcgtaaaaaatcttacggcaacggcgtgggcggttgtaaccttgtacgcgaagtggagcataaaccggtatgccgtatcctatgattcggacggcggctcccccgcgccgcccagccccattacggcggattatggcagcacgatcctgccgccggaggacatggccaaaacagggtacacattcgacaaatggtacgccaattccgccaaaaccgtccccgctgcattcccgatcacggttaccggcaatgtcagcctgtacgccaaatggaacccaattagctacaccgttgcctatgataaaaacaacgccgacgcgggcggggaaatgtttaattcgagccatatttatggtgagcccaaagccctgaacccaaataattatgcgcgccctggtttttcgttgcgggctgggcgttga

SEQ ID NO: 5240 - protein, 280 aa, Unknown
  Obtained from environmental sample
  misc_feature (1)..(280): Xaa is any amino acid
MYAKWNINSYTVTYDADGGSPALSSPSTVTYGAVITQPPGMSKTGYTFDKWYTNSAKTVPATFPITVTGNVSLYAKWNPISYTVTYVANAADATGATADSSHTYDSDNALSANGYSRAGYTFDGWNSQSNGSGTNYTEGQSVKNLTATAWAVVTLYAKWSINRYAVSYDSDGGSPAPPSPITADYGSTILPPEDMAKTGYTFDKWYANSAKTVPAAFPITVTGNVSLYAKWNPISYTVAYDKNNADAGGEMFNSSHIYGEPKALNPNNYARPGFSLRAGR

SEQ ID NO: 5241 - DNA, 450 bp, Unknown
  Obtained from environmental sample
  misc_feature (1)..(450): n is a, c, g, or t
ttgatgtcctgcattgttgaacttaaaaatatctgctattcggcgcaaaccaggaagctgtgtaagggcatatcttatgagtttgaagaagggaagactaccgccctggtcgggccatcaggctgcgggaaaagcacggtattgaaactggccgccgggctttttgccccggacgaaggagaggtgttgttcaaggggaagaatatattccgtatgaacaggctggagaatctcgcgttcaggcgggaggctgcggtggttttccaggattccgcgttgtgggcgaaccagaatcttttccagatactggatctgcctctgaggctgcattttccctcaatgaccaaacagcagcgggaaaagaggattgaatttgtggtcaccgaagtcggattaaaaaagacctggggatacgcccctcggcgctttccatgggcgagcagaaattga

SEQ ID NO: 5242 - protein, 149 aa, Unknown
  Obtained from environmental sample
  DOMAIN (31)...(148): ABC transporter
  misc_feature (1)..(149): Xaa is any amino acid
MMSCIVELKNICYSAQTRKLCKGISYEFEEGKTTALVGPSGCGKSTVLKLAAGLFAPDEGEVLFKGKNIFRMNRLENLAFRREAAVVFQDSALWANQNLFQILDLPLRLHFPSMTKQQREKRIEFVVTEVGLKKTWGYAPRRFPWASRN

SEQ ID NO: 5243 - DNA, 429 bp, Unknown
  Obtained from environmental sample
  misc_feature (1)..(429): n is a, c, g, or t
atgcnnggaatggtgatcacccacgagatagaggcgtatatatccgtaggcgtcgatccaatcgagcatcttgccgtgccgcgcttcctcggcatgacactgtccctgctgctgcttaatatttacttttccgcgttcgggctggccggatcgtttattatagcccagatatttcattccctgccggcggattactatttttccaaccttttaatgagcctgaaaatacaggatatttttattttgattctaaagagcgtttcctttgggatgatcatatccatcgtggcgataaccgagggccttgctgtcgagagggcaagcaccgaagttcctgtcgcggggctgcgggctgtcagcaatgcctttgcaagctgtatagtattgaatattatcctctcggctatgtatcatatagtattggcctga

SEQ ID NO: 5244 - protein, 142 aa, Unknown
  Obtained from environmental sample
  DOMAIN (1)...(137): Domain of unknown function DUF140
  misc_feature (1)..(142): Xaa is any amino acid
MXGMVITHEIEAYISVGVDPIEHLAVPRFLGMTLSLLLLNIYFSAFGLAGSFIIAQIFHSLPADYYFSNLLMSLKIQDIFILILKSVSFGMIISIVAITEGLAVERASTEVPVAGLRAVSNAFASCIVLNIILSAMYHIVLA

SEQ ID NO: 5245 - DNA, 813 bp, Unknown
  Obtained from environmental sample
  misc_feature (1)..(813): n is a, c, g, or t
ttggttccaaaacctgacactacggcgggaaccaccaagtatttgagagaggacggaacctggatggttccaccaaatgacaacaccacgtacgccgttgcatcgaaaacggcgagcggcctgtgccctcaattaccgaacgagactacgaccgcaaagtatctcaggcaggacggttcctggcaagaaccacctaacaataataccacctacagcaacttcgttaaatcagggagcaccgccgccgccggtctggttccaactccagacactacggcgggaaccaccaagtatttgagagaagacggaacctggacggctccgccaaatgacaacaccacgtacgccgttgcatcgaaaaccgccaacggcctgtgccctcaattaccgaacgaaactgcgaccacgaagtatctcagacaagatggttcctggcaagaaccaccaaatgacaacaccacctacgtcaactttgtaaagtcgggtagcaccgccgccgccggtctggttccgagtcctggaacaaccgctggaaccaccaagtatttgagagaagacgccacttggacggtacccgataccgaatatactttcattatagattccgatgaaaaactttcaaactgggcaaataatactcaaggtaatgattacagcaggattctaatcaaagaaaataaaagcaataaagccagaggttgggtattaacctctacattgtcaggcggaagcagttcatccccaaagattgccattgacatatctgatggcagaacgaaatccgttgtcggtgaatcggcagcaaggtggtga

SEQ ID NO: 5246 - protein, 270 aa, Unknown
  Obtained from environmental sample
  misc_feature (1)..(270): Xaa is any amino acid
MVPKPDTTAGTTKYLREDGTWMVPPNDNTTYAVASKTASGLCPQLPNETTTAKYLRQDGSWQEPPNNNTTYSNFVKSGSTAAAGLVPTPDTTAGTTKYLREDGTWTAPPNDNTTYAVASKTANGLCPQLPNETATTKYLRQDGSWQEPPNDNTTYVNFVKSGSTAAAGLVPSPGTTAGTTKYLREDATWTVPDTEYTFIIDSDEKLSNWANNTQGNDYSRILIKENKSNKARGWVLTSTLSGGSSSSPKIAIDISDGRTKSVVGESAARW

SEQ ID NO: 5247 - DNA, 885 bp, Unknown
  Obtained from environmental sample
  misc_feature (1)..(885): n is a, c, g, or t
atgacgcttctacggcctggggaaatgagcttgtttgcctgtccggttacggagattttcatgtgcttcgaaaaaacgaaaggcagcttcgcgcaaaaaagggagaagacgaaagttctaatgagtaaccgttacaccctgtcccttgttcttaatgggcatgtgccttttgtgcgccaccctgaaattcaaaacccgtctcaggagttctggctttttgaatccatttcggagacttatatcccgcttcttgaagtctttgatcggctggacagggatatggttcctttcaggatagccatttctttttcacctgttttatgccatatgcttaccgatgagtttctcttaaaacgttataatgagtatacgaacaagcagattgctttcggggagcaggagctccgggagaccgcggatgatcctgcccttaattcccttgttaagctttattatgatcgcgcaaatgaaaaaaaagcgttttttactgaaaagtgcgaaaacaatattttaaagaggttcgatcattatcaaaaaaaaggccgccttgaaatcctggctacagccgcgacaagcgcttatctgcctttttatacagggtatcccgaggcggttcaggcccaatttgaggtggcaatttcggcctacaaggcaaatttcggcaggtttccccaagggttctggcttccggaattgggatggaaagcggaattggattattggctcagggcttacaatttcggctatacaattgtggatacccacgctctggctttcgcgaggccctttgcggaaaaaaggagcttctatccggncagaatgccccagggtatcgttgtttttggccgcgattttactccgcccaagatatggcggaaatggtga

SEQ ID NO: 5248 - protein, 294 aa, Unknown
  Obtained from environmental sample
  DOMAIN (48)...(294): Glycosyl hydrolase family 57
  misc_feature (1)..(294): Xaa is any amino acid
MTLLRPGEMSLFACPVTEIFMCFEKTKGSFAQKREKTKVLMSNRYTLSLVLNGHVPFVRHPEIQNPSQEFWLFESISETYIPLLEVFDRLDRDMVPFRIAISFSPVLCHMLTDEFLLKRYNEYTNKQIAFGEQELRETADDPALNSLVKLYYDRANEKKAFFTEKCENNILKRFDHYQKKGRLEILATAATSAYLPFYTGYPEAVQAQFEVAISAYKANFGRFPQGFWLPELGWKAELDYWLRAYNFGYTIVDTHALAFARPFAEKRSFYPXRMPQGIVVFGRDFTPPKIWRKW

SEQ ID NO: 5249 - DNA, 600 bp, Unknown
  Obtained from environmental sample
  misc_feature (1)..(600): n is a, c, g, or t
ttggcacgagtagccatggactgcgcctcttccgaactttacggggaaggcggcaagaaaggctacaaattctggaaatcaaatcccgacaaacttttctccgccgatgaaatgatcgaaatgtacaccaagtgggtgaacaaatatccgattatttccatagaagacccgctggatcaggacgactgggaaggttatgtgaaaatgaccaagagcctcggttcaaagatacagattgtaggcgacgatttctttgttaccaacacaaagaggctggagaagggaataggaatgggcgcgtgtaactcaattttgattaaagtaaaccagattggcaccttaaccgaaacctacgaagccgtagaaatggcgaagaaagccggatacaccgcgattgtttcccaccgctcaggcgagacggaagacagtttcatcgccgaccttgtagtcgcccttgaaaccggacagatcaagaccggttcaatgagccgcaccgaccgtatttgcaagtacaaccagcttatgagaatagaagatgagctggaaggcatttccgaatacgccggccgcaaagcgttctacagcattggcaagaaataa

SEQ ID NO: 5250 - protein, 199 aa, Unknown
  Obtained from environmental sample
  DOMAIN (1)...(196): Enolase, C-terminal TIM barrel domain
  misc_feature (1)..(199): Xaa is any amino acid
MARVAMDCASSELYGEGGKKGYKFWKSNPDKLFSADEMIEMYTKWVNKYPIISIEDPLDQDDWEGYVKMTKSLGSKIQIVGDDFFVTNTKRLEKGIGMGACNSILIKVNQIGTLTETYEAVEMAKKAGYTAIVSHRSGETEDSFIADLVVALETGQIKTGSMSRTDRICKYNQLMRIEDELEGISEYAGRKAFYSIGKK

SEQ ID NO: 5251 - DNA, 300 bp, Unknown
  Obtained from environmental sample
  misc_feature (1)..(300): n is a, c, g, or t
atgtcagaccagagcgtcatacctatagagcaacttttacctcacaaactgccgcttgtagcgcttatgggccgtcccatctttcccggaatttttacgcccatcatgattggcaacccaaccgacgttaaagtcgtggaagacgccgccgcgggagacgcgatggtgggtcttgttatgatgcanaatgaaaccganatcccggtcataacggatttatatacagtgggaacggcggcaaagatagttaaaaaaattatcttcctgacggcggccttnacatttttatttcccacataa

SEQ ID NO: 5252 - protein, 99 aa, Unknown
  Obtained from environmental sample
  misc_feature (1)..(99): Xaa is any amino acid
MSDQSVIPIEQLLPHKLPLVALMGRPIFPGIFTPIMIGNPTDVKVVEDAAAGDAMVGLVMMXNETXIPVITDLYTVGTAAKIVKKIIFLTAAXTFLFPT

SEQ ID NO: 5253 - DNA, 1023 bp, Unknown
  Obtained from environmental sample
  misc_feature (1)..(1023): n is a, c, g, or t
atgatagattggccgagtggaatccttataatcggcggcacgggcaacatctcttcggaggtgaccgcgctcttgatatcgcaaggccacaatatcaccctgctcaacaccggcagacaccccacgccgcaagattgcaaacacatcttggccgaccgtttcaaccccaaggcgtttgacgacgcggcgcgaaacctttccgcagacgcagtcttggactttatggctttcaccccagaccaatgccggtgcgcgtacaaagcgtttcgcggacgaatcgcgcagtatctattcatatccagcgccaccgtctacgccaaaccgcacacaaaactcccgatcaccgaggaaacgccgcgcggcaacccgttctggccctacgcccaagacaaaaccgcctgcgaggagtacttggaatccgttcgcggcgacgactttccggtgacgatagtgcgaccctcccacacattcggacgcacatggataccctccccgataaacggcagcggattcaccgtgtcggcgcggatattggccggaaaaggcttcataatacacgacaaaggagagtcgctgtggacgcttaccgcgtcgtctgacttcgcccgcggactaataggcctcgtggggaacaaggcggcggccggcgaggcgttccacatcacgagcgacgaagcgctcagctggaacgacatctacaaggaattgggggctgccctgggagccgagacaataaacccggtgcacatacctacatcttttatagtgaagagataccccgacgccatagggaaactcctgggcgacaaggccgagaacggagtcttcgacaactcgaagattaagaggtttgttccggggtttaaatgcgagaagaacttcgctgcggcgatcagggagtcggtcgcctggttcatggaaaaggataagcgngagcgnagggagatcgatctgnacgaagacggcctgattgaggcgattatcgaggcgtggggaccgtccaaccgaagtttgattatttaa

SEQ ID NO: 5254 - protein, 340 aa, Unknown
  Obtained from environmental sample
  DOMAIN (8)...(222): NAD dependent epimerase/dehydratase family
  misc_feature (1)..(340): Xaa is any amino acid
MIDWPSGILIIGGTGNISSEVTALLISQGHNITLLNTGRHPTPQDCKHILADRFNPKAFDDAARNLSADAVLDFMAFTPDQCRCAYKAFRGRIAQYLFISSATVYAKPHTKLPITEETPRGNPFWPYAQDKTACEEYLESVRGDDFPVTIVRPSHTFGRTWIPSPINGSGFTVSARILAGKGFIIHDKGESLWTLTASSDFARGLIGLVGNKAAAGEAFHITSDEALSWNDIYKELGAALGAETINPVHIPTSFIVKRYPDAIGKLLGDKAENGVFDNSKIKRFVPGFKCEKNFAAAIRESVAWFMEKDKRERREIDLXEDGLIEAIIEAWGPSNRSLII

SEQ ID NO: 5255 - DNA, 924 bp, Unknown
  Obtained from environmental sample
  misc_feature (1)..(924): n is a, c, g, or t
ttgtataaagtagttaggaacattatgtccgttaaattcaggcgctataaattattagccgattttgataaagtcaataaatacctgactgatgttttcaatatagaaacattaaatggctatttacttccccagtattttgaatatgcccatactcatccgttatttaactttaaactggcgcataggtttggtttatgggaagatgaaaatgagcttgtcgggattgcctgctatgatatgtatcccggcgaatgttttataagcgtaaaaaacagcttcaattcactgttgccggaaatgataagttattcggaagaatatttatctgaaaaaaataatgataaaacatctttagcaatatcaattattgataaagaaattgaaaaaaaagaattattggaaaaatccggctatacaaaaatacactctgaaccggtaactgtattttcatatgagaacccatttccacatcaaattcttcccgaaggattttctgttatttcattggaagacgaaaacgattttaaaaaaatacacgattgtatgtggtatgggtttgatcatggtcccgaacccgatcctgacaatgatattgacagccgaatattagcgcaaagcggaccaaatttccgcaaagatttaactacaataataaaagcgccaaacggagaatatgcgtgcttcgccggaatgtggtttgacaaacaaaatagttatgcgtatttggaaccgttggcgacagtgccaaaataccgacgtatggggttagcgacagttgcgctggttgagggaatgaaaaagacaaaaaagctgggcgcaaaatattgctttggaggaacgggagagttttataaaagcattggttttaaaacaattacnagcccggnaattatggaaaaaggaatggtangaagcagttga

SEQ ID NO: 5256 - protein, 307 aa, Unknown
  Obtained from environmental sample
  DOMAIN (218)...(291): Acetyltransferase (GNAT) family
  misc_feature (1)..(307): Xaa is any amino acid
MYKVVRNIMSVKFRRYKLLADFDKVNKYLTDVFNIETLNGYLLPQYFEYAHTHPLFNFKLAHRFGLWEDENELVGIACYDMYPGECFISVKNSFNSLLPEMISYSEEYLSEKNNDKTSLAISIIDKEIEKKELLEKSGYTKIHSEPVTVFSYENPFPHQILPEGFSVISLEDENDFKKIHDCMWYGFDHGPEPDPDNDIDSRILAQSGPNFRKDLTTIIKAPNGEYACFAGMWFDKQNSYAYLEPLATVPKYRRMGLATVALVEGMKKTKKLGAKYCFGGTGEFYKSIGFKTITSPXIMEKGMVXSS

SEQ ID NO: 5257 - DNA, 870 bp, Unknown
  Obtained from environmental sample
  misc_feature (1)..(870): n is a, c, g, or t
ttgattgcgagcccttcttgggcgtccggtgggccgctttgccaccgcatcggaggcggcagcttcacccttaacggccatcattaccggcttgagaaaaatgacggggagaataccctgcatagcggacggcgggcttttgataaaatgttatgggaatccgagtctttcgaggaaaaaggcggcgtttttgtccgttttgagcttgacagcccggacggcgattgcggcttccccggaaacgtcaaggcggccgtcacttacggccttacaaaatcaaacgagttagtcgcaatttacgaggcaaaggccgacgccccgaccccggttaaccttaccaaccacgcgtatttcaacctttccggagaaggaaacggaaatatcctgtcgcacgaagtccggctggattcatcctctttccttgaaattgacgattcgctcatccccaccggacgcctgctcccggtgcacgacagcccttttgatttcaggcagaggaaaccaattaagcaggaccttacatccgaatacggcggttcgggcggcccttcggctccggagggttacgaccattgttttaccgttgacggcgatccggggaaactccggccctgcgccgaggtcatggagcctgacagcagcctttcaatgaaagtcttcaccactcagccagccgtccagttctacacgggcaatatgcttacaggcattcccggtaaggcgggatcgctgtataccaaacatacaggcttttgcctggaaacccagcatttccccgattcacccaataaaccggatttcccttcgtgtataatcggacccaacagggattatggcgagaagtcggtatttgcgtttgaattggattag

SEQ ID NO: 5258 - protein, 289 aa, Unknown
  Obtained from environmental sample
  DOMAIN (2)...(285): Aldose 1-epimerase
  misc_feature (1)..(289): Xaa is any amino acid
MIASPSWASGGPLCHRIGGGSFTLNGHHYRLEKNDGENTLHSGRRAFDKMLWESESFEEKGGVFVRFELDSPDGDCGFPGNVKAAVTYGLTKSNELVAIYEAKADAPTPVNLTNHAYFNLSGEGNGNILSHEVRLDSSSFLEIDDSLIPTGRLLPVHDSPFDFRQRKPIKQDLTSEYGGSGGPSAPEGYDHCFTVDGDPGKLRPCAEVMEPDSSLSMKVFTTQPAVQFYTGNMLTGIPGKAGSLYTKHTGFCLETQHFPDSPNKPDFPSCIIGPNRDYGEKSVFAFELD

SEQ ID NO: 5259 - DNA, 831 bp, Unknown
  Obtained from environmental sample
  misc_feature (1)..(831): n is a, c, g, or t
atgaagagaattggttttatcgtattggcgctcctgctctgcggggcaatggttctgacgggctgcaagaaaaaagaacccggacagcagcaatctggtgcccaataccacatcggtattgtaaccggcacggtttcccagtctgaagacgaccttcggggggcggaagagcttatcaagcgttacggctccgtggcgcagggcgggatgatccagcatgtcacctacccggataacttcatggatcagcaggaaaccaccattacccagattaccaccctggcttccgaccccctgatgaaggccgtcgttgtaaatcaggccattcccggcaccgccgaggcctttaagcgcatcaaggaaaggcggcctgacataatactcctggccggcgagcctcatgaagaccccttggtaatccagcagtccgcgtctctggccataagctgcgattttatttcccgcggctacacaatcccctgggcggcgaaagagcttggagcggacacctttgtacatatcagctttccccggcacatgagctatgaaagcctggggctccgccgccagatttttgaggctgcctgtaatgacctgggaataaagtttgtgtttgttaccgccccggatcccacatccgacgtgggcgtggcgggcgcgcagcagtacatactggaacagactccccagtggataaaccagtacggcaaaaacgcggttttcttctgtaccaacgacgcccatactgaacccctgcttaagcagcttttcgcttacggcggattgtttgtggaagccgacttcccagcccgctcagctcggccaatctga

SEQ ID NO: 5260 - protein, 276 aa, Unknown
  Obtained from environmental sample
  SIGNAL (1)...(21)
  misc_feature (1)..(276): Xaa is any amino acid
MKRIGFIVLALLLCGAMVLTGCKKKEPGQQQSGAQYHIGIVTGTVSQSEDDLRGAEELIKRYGSVAQGGMIQHVTYPDNFMDQQETTITQITTLASDPLMKAVVVNQAIPGTAEAFKRIKERRPDIILLAGEPHEDPLVIQQSASLAISCDFISRGYTIPWAAKELGADTFVHISFPRHMSYESLGLRRQIFEAACNDLGIKFVFVTAPDPTSDVGVAGAQQYILEQTPQWINQYGKNAVFFCTNDAHTEPLLKQLFAYGGLFVEADFPARSARPI

SEQ ID NO: 5261 - DNA, 627 bp, Unknown
  Obtained from environmental sample
  misc_feature (1)..(627): n is a, c, g, or t
atggaaacacagactgataaagcaaaacaggagaaaatgaaacaggcggcgggcagggcggctgttgattcgctggtaaaaagcgggatgaagcttggccttggcaccggttccaccgccattcacgcgatccgcagggtgggcgaactcctgtcgcagggagtgttaagtgacatacgcgcctttgtcacaagtttccagtcggaaattgaatgtgaaaaactgaagataccttttttcccgttgaattcacgggaactgtccggcaaacttgaccttaccatagacggcgcggatgaggttgatccgcaaaattatctgataaaaggcggcggcggcgcgatgcttattgaaaaactcgccgcctacgcttccgccgcttataccattacggttgacgaatcaaaggttgtcaaccgtggtttgggtacggggttccctgttccggtggaagtgatcccggaggcaagaaccagcgcgtgtctggcgcttgaggctatgggcgcggcagtcactttacgcgaggccctgaggaaagccggccctgttatcaccgagcatggaaatctgatactggatattcgcttcgcgaaagctgttgatcccgtggcgatggagcggaaataa

SEQ ID NO: 5262 - protein, 208 aa, Unknown
  Obtained from environmental sample
  DOMAIN (59)...(208): Ribose 5-phosphate isomerase A (phosphoriboisomerase A)
  misc_feature (1)..(208): Xaa is any amino acid
METQTDKAKQEKMKQAAGRAAVDSLVKSGMKLGLGTGSTAIHAIRRVGELLSQGVLSDIRAFVTSFQSEIECEKLKIPFFPLNSRELSGKLDLTIDGADEVDPQNYLIKGGGGAMLIEKLAAYASAAYTITVDESKVVNRGLGTGFPVPVEVIPEARTSACLALEAMGAAVTLREALRKAGPVITEHGNLILDIRFAKAVDPVAMERK

SEQ ID NO: 5263 - DNA, 399 bp, Unknown
  Obtained from environmental sample
  misc_feature (1)..(399): n is a, c, g, or t
atgaccgccgccgaagccacggtaaaaaaaggcggagtgatcatccacctctctgaatctggcgacggccatggggctcctgaattccacaaaacctttgttgaagaaaaaaatcttgatcgtatgctggatacgtttatgaaaactcccagagaaaacaccaggccggatcaatgggaatcacaaatccttttgcggatattaaagcgcgcccatgttatttatatttccgacgctccggatgaaataatccgggattttcagatgacgcccgcgcgttcaattaatgacgcgttgaagatggcggaagaaatgctggggaatcccggcgcttccattacggtaattcccgacggggtctcggtggtaattaaacaaatattttcccgggattcatga

SEQ ID NO: 5264 - protein, 132 aa, Unknown
  Obtained from environmental sample
  misc_feature (1)..(132): Xaa is any amino acid
MTAAEATVKKGGVIIHLSESGDGHGAPEFHKTFVEEKNLDRMLDTFMKTPRENTRPDQWESQILLRILKRAHVIYISDAPDEIIRDFQMTPARSINDALKMAEEMLGNPGASITVIPDGVSVVIKQIFSRDS

SEQ ID NO: 5265 - DNA, 888 bp, Unknown
  Obtained from environmental sample
  misc_feature (1)..(888): n is a, c, g, or t
gtgcttttctggggtttctcgtttatctcgataaaaatcaccgtggcggtttttccgcctatgaccctgggagccttaaggttcgcactggcagttgtcattcttttttttcttaaaagaaaaatcgcgccgaaagaaaaactcataaaaaaagatattccccttcttgccggagcagggattaccggagttaccctgtacttcttttttgagaataacggtgtgtcgttgattcccgcttcggaggcgtcgatctttgttggtgcgattccggttattactatgatttcggaagcaatgtgggaaagaatatctttacgctggaaaagagaattgtatatcgtagagaaaataaatgatggtaaaaagcatcaatcgcttttttttaaaactattctgcctggcataggagctttaatttctcttgccggagtcgcgcttgtagccggagtttcatttgtcttctctggaacagctcttggctatatttttatgtctggagcctgcgtcagttgggtaatttactgttttcttacccgctcgctttttatcagccacagcaggatcttcattgtgttctggcagtcactatttggttttataggatttttgccttttacgttttttgaaagctcctggagtatgcctagtttggaagtatgggggcatttgctttttctgggattgttttgttcagcccttggctattggttttacgcaatggcactggaagatctgggagttgggcaggcaacaatttttataaattttatacccgtggtcagtgttcttggcgctttttttgttctgggagagaggctaaaacctctgcagtggttggagccgctttggtgctgcagggggttccttacaatgctgacaccttaa

SEQ ID NO: 5266 - protein, 295 aa, Unknown
  Obtained from environmental sample
  SIGNAL (1)...(31)
  DOMAIN (2)...(150): Integral membrane protein DUF6
  misc_feature (1)..(295): Xaa is any amino acid
MLFWGFSFISIKITVAVFPPMTLGALRFALAVVILFFLKRKIAPKEKLIKKDIPLLAGAGITGVTLYFFFENNGVSLIPASEASIFVGAIPVITMISEAMWERISLRWKRELYIVEKINDGKKHQSLFFKTILPGIGALISLAGVALVAGVSFVFSGTALGYIFMSGACVSWVIYCFLTRSLFISHSRIFIVFWQSLFGFIGFLPFTFFESSWSMPSLEVWGHLLFLGLFCSALGYWFYAMALEDLGVGQATIFINFIPVVSVLGAFFVLGERLKPLQWLEPLWCCRGFLTMLTP

SEQ ID NO: 5267 - DNA, 600 bp, Unknown
  Obtained from environmental sample
  misc_feature (1)..(600): n is a, c, g, or t
atgggaaaaacactgactcagaaaatttttgacacccacattgcggatcagccatttgaaggtatctttgtactgcggcttgacagggtattctgccatgaaattactactccttcggctataaacgatctggtttcaaaaaatctcgacaaggtttttgatccgtctaaaattaaggcggtgattgatcatgtatcgccggcaaaggactcgcaaacagcgctgcagggaaaaactttgcgggactggactcgtcggcacaatatcagggatttttatgacataggaagaaatggcgtttgtcatgcaattttccccgaaaaaggatttgtccgtcccggctttacgattatcatgggcgacagccacacctgtacccacggggcgttcggcgcttttgccgccggagtgggaactaccgatcttgaggtaggtatattgaagggcgtttgcgccttccataaacctgaaactttgcggatcaacctgcctggaaaattgccgcagggcgtttttccaaaagatgtaatcctggctatcattgcgaaaattagcgtttcaggcgcttcgggaaaagttaggaattgcacggccctgtaa

SEQ ID NO: 5268 - protein, 199 aa, Unknown
  Obtained from environmental sample
  DOMAIN (4)...(198): Aconitase family (aconitate hydratase)
  misc_feature (1)..(199): Xaa is any amino acid
MGKTLTQKIFDTHIADQPFEGIFVLRLDRVFCHEITTPSAINDLVSKNLDKVFDPSKIKAVIDHVSPAKDSQTALQGKTLRDWTRRHNIRDFYDIGRNGVCHAIFPEKGFVRPGFTIIMGDSHTCTHGAFGAFAAGVGTTDLEVGILKGVCAFHKPETLRINLPGKLPQGVFPKDVILAIIAKISVSGASGKVRNCTAL

SEQ ID NO: 5269 - DNA, 639 bp, Unknown
  Obtained from environmental sample
  misc_feature (1)..(639): n is a, c, g, or t
atgattcagacagattatatcaatattgtcaaaaaaatcgccattgaaaacgggaaagagattttccttgagcctaaaaaactgaaggcatttttatcggatcataccaaaaatgaatataaggaggaaaatgcccttttattgtccgtacttaatactgactgcataaaatatattgacaaggcggaaaaccttgccgagtgcaagcaatttattttgaagcgcctgaataatgaatatggccttgtttccgccaaaagctcagaaatgctggatatgctatttcttgtgcttcgcggcaagacagtacagccgctgggtgaatcaagaaaaagcattgccaggtttcaaacgtgtatttcaattggctattatgcggacggcagtcatatcgttgggctgaaagcggacggtaaagttgtcgctgtcgggtcgaatgattcaggccaatgcgatacccagcaatggcggaatattgtcgccgtttccgccggttccaggtttaccgcaggcttaaaatcggatggctctcttgtccttgccgggcttgctggttctgaacaactgacgccaaaggcattaccgcagtttcccttggcacagtcatattgtggctctaagaacggacgggttgggtga

SEQ ID NO: 5270 - protein, 212 aa, Unknown
  Obtained from environmental sample
  misc_feature (1)..(212): Xaa is any amino acid
MIQTDYINIVKKIAIENGKEIFLEPKKLKAFLSDHTKNEYKEENALLLSVLNTDCIKYIDKAENLAECKQFILKRLNNEYGLVSAKSSEMLDMLFLVLRGKTVQPLGESRKSIARFQTCISIGYYADGSHIVGLKADGKVVAVGSNDSGQCDTQQWRNIVAVSAGSRFTAGLKSDGSLVLAGLAGSEQLTPKALPQFPLAQSYCGSKNGRVG

SEQ ID NO: 5271 - DNA, 432 bp, Unknown
  Obtained from environmental sample
  misc_feature (1)..(432): n is a, c, g, or t
atgcacgcccgcggctgcatcgtgggtattacccgcggaaccaaccgctgtcacatcatcagggcggcggaggaatccatcgcctaccaggtgacggaccttgtgcgggcaatggaaaaagactcgggttttaacataccggaattgaaagcggacggcggcgcaagccgcgacaatttcctgatgcagtttcaggctgatatttccggctgcgcaataatccgccccgtgatccgcgaaaccaccgccctgggcgcggcctgtcttgccggtatagcgacaggtttttggaaaggcactgatgaactggaaagcagatggaaaagcgacgccgttttcagcccttccatggatattcaaaaacgggcgtccctgctttccggctggcacaaagccgtaagccgcagccacggttgggcggaaaacagttag

SEQ ID NO: 5272 - protein, 143 aa, Unknown
  Obtained from environmental sample
  DOMAIN (1)...(123): FGGY family of carbohydrate kinases, C-terminal domain
  misc_feature (1)..(143): Xaa is any amino acid
MHARGCIVGITRGTNRCHIIRAAEESIAYQVTDLVRAMEKDSGFNIPELKADGGASRDNFLMQFQADISGCAIIRPVIRETTALGAACLAGIATGFWKGTDELESRWKSDAVFSPSMDIQKRASLLSGWHKAVSRSHGWAENS

SEQ ID NO: 5273 - DNA, 750 bp, Unknown
  Obtained from environmental sample
  misc_feature (1)..(750): n is a, c, g, or t
gtggatgtgcctgtttacgaagcagtcgctctttccagcgcggagggtctaaagccgtatgattttaatatccgcaagggcgaggtcaacggttttaccggcctgctcggttcaggacgcagcgaaagcgtgcgagcaatttttggcgccgacagagttaccggcggcatggtgaaggtaaacgggaaaaaggtcaggatatcaaaacctatcgatgccatgaaaaataaaatcggttatctgccggaagaccgcaagaacgacggcatcatagccgatttatcggttcgggacaatattatcctcgcactgcaggttatgaaaggttttttcaggccgttttccaaatccgaagcaaaagcttttgccgatgaatatatcaggatgcttgggatcaaaaccccttctgtaaatacgccgatgaaatccctttcgggtggaaaccagcaaaaggtcatactggcccgatggctcttaacacatccggaataccttatattggatgaacccacgcgcggcatagatgtcgggacaaaggtggagatacaaaagcttgtactgaaactggccgaagagggcatgagcattacttttatctcgtcagagatcgaagaaatggtgcgtacttgttcgcgtctcatcgttatgcgtgacaggaacattgtgggcgagctctgcggcggcgaagtcacgcaggataacattatgcacacgattgcggggggagcaggcgaaaatgaagttctttga

SEQ ID NO: 5274 - protein, 249 aa, Unknown
  Obtained from environmental sample
  DOMAIN (27)...(219): ABC transporter
  misc_feature (1)..(249): Xaa is any amino acid
MDVPVYEAVALSSAEGLKPYDFNIRKGEVNGFTGLLGSGRSESVRAIFGADRVTGGMVKVNGKKVRISKPIDAMKNKIGYLPEDRKNDGIIADLSVRDNIILALQVMKGFFRPFSKSEAKAFADEYIRMLGIKTPSVNTPMKSLSGGNQQKVILARWLLTHPEYLILDEPTRGIDVGTKVEIQKLVLKLAEEGMSITFISSEIEEMVRTCSRLIVMRDRNIVGELCGGEVTQDNIMHTIAGGAGENEVL

SEQ ID NO: 5275 - DNA, 798 bp, Unknown
  Obtained from environmental sample
  misc_feature (1)..(798): n is a, c, g, or t
atgtcgctggctatagcgtggggcataggtctggcgttcgggttggtgcagggatttttggtggcctacctggagattcagccatttatcattactctggccgggatgttttttgccagagggatggcaaccatcatcacaaaatactcgcattcggttaagctggaaagttttatagctctcaaagaaacaaaaatagagattgaagccctgggctataccgccagaagcgggatgttgataccggtgacaatagatataggggtgatcgtcgccctggtggtggtactggttgttgcctttgtattaaaatggacaagattcggacgcaatttgtacgctgtcggcggtaacagccaaagtgcgctgacgcttggtatcaacgtcaaacgcacaaagtttttttcctaccttatttgcgggttcctggccggtataggcggtttcgtcttccttctaaagacagggtcgggttactcgcagcacgccatgttttatgaaatgaaagccatcgcctcgtccattatcggcggtacgctgctgaccggaggcgtcggcaatattgtcggttctccgattggcgtattggcgcttatgactattgacacgattgttcgggcttccggcattaccaccggaggccgggaatacctacaagatatcacaaccggcgcaatgctgttcctcgcgcttatactgcaaagcgtggttctttcgcgccgaggaaagggcagtttcaaacagatgattcccaaatggctgaagctcaatgtaaaatcagttgagaaaggcagctaa

SEQ ID NO: 5276 - protein, 265 aa, Unknown
  Obtained from environmental sample
  DOMAIN (1)...(231): Branched-chain amino acid transport system / permease component
  misc_feature (1)..(265): Xaa is any amino acid
MSLAIAWGIGLAFGLVQGFLVAYLEIQPFIITLAGMFFARGMATIITKYSHSVKLESFIALKETKIEIEALGYTARSGMLIPVTIDIGVIVALVVVLVVAFVLKWTRFGRNLYAVGGNSQSALTLGINVKRTKFFSYLICGFLAGIGGFVFLLKTGSGYSQHAMFYEMKAIASSIIGGTLLTGGVGNIVGSPIGVLALMTIDTIVRASGITTGGREYLQDITTGAMLFLALILQSVVLSRRGKGSFKQMIPKWLKLNVKSVEKGS

SEQ ID NO: 5277 - DNA, 936 bp, Unknown
  Obtained from environmental sample
  misc_feature (1)..(936): n is a, c, g, or t
atggagttcaaactcaggatgacgcccgaacaggtgcaggaacaggcggtttcctccgtaaagtacgcaaaaaaattctgcaacgacgttgagttttccgccgaagacgctttcagaagcgatcctgattttgtctgtaaagttttcggagcggtaattgaagccggcgcgcttactgtaaattttcccgatacggtcggctatgcgatgcccgccgaattcggcgagcgcgtccgttatataaaggaacataccccgcatctggaaaaggcggttctctcggtgcattgccacaacgatttggggctggctgttgcgaacagtatcgccgcgatagcgaacggcgcggatcaggttgagtgtacggttaacggaataggcgagcgggcgggaaacgcgtctttggaagaagtggtaatgggcctgcgcgtccgcagcgattttttttccgcagacacaagggtagacagcacgcagatatacgcggcaagccgccttgtgtcccaggtgaccggggtgaaagttcagccgaacaaggctgtcgtgggcgacaacgcgttcgcgcatgaagcgggaattcaccagcacggggtattggcgaaaagggaaacctacgagatcatgactccgcagtcaatcggcattccgcaaaaccgcatggttctcggcaaacattcgggccgccacgcttttgaagagcgtcttaaagatttaggcctgaccgttgacgcggaagccctggaaaaaatcttcgcggactttaaaaaccttgccgacaaaaagaaagttgtcagcgaccgcgacattgaagctctggcaatggacagggcggtatcggttcccgaaacatggaagctggatcattgggcggtgaacaccggctccgctttgggcgcggctggcgtatacgttacagcacaaagacctcggcgataa

SEQ ID NO: 5278 - protein, 311 aa, Unknown
  Obtained from environmental sample
  DOMAIN (3)...(173): HMGL-like
  misc_feature (1)..(311): Xaa is any amino acid
MEFKLRMTPEQVQEQAVSSVKYAKKFCNDVEFSAEDAFRSDPDFVCKVFGAVIEAGALTVNFPDTVGYAMPAEFGERVRYIKEHTPHLEKAVLSVHCHNDLGLAVANSIAAIANGADQVECTVNGIGERAGNASLEEVVMGLRVRSDFFSADTRVDSTQIYAASRLVSQVTGVKVQPNKAVVGDNAFAHEAGIHQHGVLAKRETYEIMTPQSIGIPQNRMVLGKHSGRHAFEERLKDLGLTVDAEALEKIFADFKNLADKKKVVSDRDIEALAMDRAVSVPETWKLDHWAVNTGSALGAAGVYVTAQRPRR

SEQ ID NO: 5279 - DNA, 720 bp, Unknown
  Obtained from environmental sample
  misc_feature (1)..(720): n is a, c, g, or t
ttgttttccggcaagttcgcgcagtttttcctgcaagatacagaattcgatgatcatcttatgagctttttccagcgcctcgatcatcagttcttcgctaacctctttcgcgccgccttccaccatggtaatgccgtctttagtgccggcgaccacaatttccagagtggatttttcaatctgctcataagtggggtttacaataagttcgccgtccacctgacagaccctgactcccgcgacggggccgttaaacggaatatcggaaatatgaacggcggcggaagacgcaatgatcgaaagcatatcgggaggatttacctgatctgtggaaagggttgtcgggatcagttgaatttcgcgcccgaaacttttttcaaaaagggggcgcatgggcctgtctataaggcgggaaacgagtatctccttgtccttgggacggctttctctcttaataaacccgccgggaattttccccgcagcgtaatatttttcgttatattcaacggtaagaggcacataatcaatgccttctatcgcatcatgagacgcgcaaactgtggcgattaccgccgagcccgcgtactgcgcgaaaacagaaccattcgcctgtttcgctatcctgccggtttccagaacaaggtcttttccggctatttgaagtgttactttttgtatcattatttacgcagccctaattctttgatcagcttgcggtaa

SEQ ID NO: 5280 - protein, 239 aa, Unknown
  Obtained from environmental sample
  misc_feature (1)..(239): Xaa is any amino acid
MFSGKFAQFFLQDTEFDDHLMSFFQRLDHQFFANLFRAAFHHGNAVFSAGDHNFQSGFFNLLISGVYNKFAVHLTDPDSRDGAVKRNIGNMNGGGRRNDRKHIGRIYLICGKGCRDQLNFAPETFFKKGAHGPVYKAGNEYLLVLGTAFSLNKPAGNFPRSVIFFVIFNGKRHIINAFYRIMRRANCGDYRRARVLRENRTIRLFRYPAGFQNKVFSGYLKCYFLYHYLRSPNSLISLR

SEQ ID NO: 5281 - DNA, 486 bp, Unknown
  Obtained from environmental sample
  misc_feature (1)..(486): n is a, c, g, or t
ttgcccgtggaaattacggaagattccggcgaagacccaagagcggagcttgttgaaagattaatagaataccaaaaatataaaaaactttcggaactcatggaagaaaaagaaaaggaaaatgaatggataattgagcgcaaaagacttcagcataatctgccgttttccgacgataatatttggcaaaaagtcgatatttgggacttgttaaagagtttttcgtcattaacggttaaccttccggcggaaagaataatcgatctttatgaagaagttacagtaaatgaaaaaacaaccctgcttaatgaattcctggaaaacagaggggagtgcagatttacggaattaattacaagagcgggtacgctggacgttgtatgcgctttcttggcagtccttgaagccgcaaaaatgcgtatgatagtgatctaccaaaaccgcctgtttggcgatatacttattaaacccgctatacaagattaa

SEQ ID NO: 5282 - protein, 161 aa, Unknown
  Obtained from environmental sample
  DOMAIN (3)...(158): ScpA/B protein
  misc_feature (1)..(161): Xaa is any amino acid
MPVEITEDSGEDPRAELVERLIEYQKYKKLSELMEEKEKENEWIIERKRLQHNLPFSDDNIWQKVDIWDLLKSFSSLTVNLPAERIIDLYEEVTVNEKTTLLNEFLENRGECRFTELITRAGTLDVVCAFLAVLEAAKMRMIVIYQNRLFGDILIKPAIQD

SEQ ID NO: 5283 - DNA, 450 bp, Unknown
  Obtained from environmental sample
  misc_feature (1)..(450): n is a, c, g, or t
gtgaacttattgttccagtcttgccagcttcatgacgtaggcaaaatatccattgacgacaatattctgaaaagccccggaaagctcagtgatgaagaatttaatgtaatgaaaaaacacacaagttttggcgagcagataattgaaaaggttgaaactttggcgaaggaaagcgacttcttaaactacgcgaaaatttttgccgccagtcatcatgaaaactgggacggctcaggttatccacgggggcttaaagaaaatgaaatacccctgctgggccgcattatggcggttgccgacgtatacgacgcgcttgtttcagaacgcccttacaaaaaagcctttacccacgaggaagcggtgcggattatcaccgaaggcagcggaactcagtttgacccggcgctggttattgtcttcatcaacgcggcggataaattcaaaaaataa

SEQ ID NO: 5284 - protein, 149 aa, Unknown
  Obtained from environmental sample
  DOMAIN (4)...(105): HD domain
  misc_feature (1)..(149): Xaa is any amino acid
MNLLFQSCQLHDVGKISIDDNILKSPGKLSDEEFNVMKKHTSFGEQIIEKVETLAKESDFLNYAKIFAASHHENWDGSGYPRGLKENEIPLLGRIMAVADVYDALVSERPYKKAFTHEEAVRIITEGSGTQFDPALVIVFINAADKFKK

SEQ ID NO: 5285 - DNA, 819 bp, Unknown
  Obtained from environmental sample
  misc_feature (1)..(819): n is a, c, g, or t
atgcggaagactcccgcccagatagacggaatgcgccgtagcggcgcgttcaacgggcggctcatggactacatacgcccgttcgtaaaggccggcgccgttaccgaagagctgaacacgctgatccacaactacaccgtcgaaaacggccacatcccggcttgcctcggctacaagggaagcaaatgccccttccccaaatcgtgctgcatctcgcttaacgacgtggtctgccacggcatcccgtcgccgaacgaaatcatcaaggagggcgacatcgtaaacatcgacctcaccaccatcgtcgacggctttcacggcgattcctccgagacgttcatgataggcgacgtgggcaaagacgcgcgccgactggtcagcgtgacggcaagggccctcatcctcggcatagacgcagtgaagccgggggctcatctccgcgccatcggcgaggccatagaacccttcgtcaacgcccaaggctgctctgtagtcaggcagtacaccggccacgggataggcgctaagttccacgagattttctccgtctaccaccacatagagccgcgggccgaggacatcatcatgctgccgggtatgactttcacaatagagcctatgataaacctaggcggcttcgaggtaacgaccgaccgtaatggggacgggtggacggtgaggactgacgacgggtcgctctccgcccagtttgagcatacggttttggtaaccgaaaccggcgcggaggtgctaacgctcacgccgtcgcagagggcggcgggggtcaggctcatcgtggacggggaggcgtaccgttga

SEQ ID NO: 5286 - protein, 272 aa, Unknown
  Obtained from environmental sample
  DOMAIN (9)...(253): metallopeptidase family M24
  misc_feature (1)..(272): Xaa is any amino acid
MRKTPAQIDGMRRSGAFNGRLMDYIRPFVKAGAVTEELNTLIHNYTVENGHIPACLGYKGSKCPFPKSCCISLNDVVCHGIPSPNEIIKEGDIVNIDLTTIVDGFHGDSSETFMIGDVGKDARRLVSVTARALILGIDAVKPGAHLRAIGEAIEPFVNAQGCSVVRQYTGHGIGAKFHEIFSVYHHIEPRAEDIIMLPGMTFTIEPMINLGGFEVTTDRNGDGWTVRTDDGSLSAQFEHTVLVTETGAEVLTLTPSQRAAGVRLIVDGEAYR

SEQ ID NO: 5287 - DNA, 459 bp, Unknown
  Obtained from environmental sample
  misc_feature (1)..(459): n is a, c, g, or t
atggttacgattcccgccggcgtagaaaacggcaagcgcgtggtaattccaaaacagggcgacgctggtcccaacggcggaccgccgggagacttatacgtttttataagagtcaaaccgcacgaatattttgaacgccaagccgctgatctttactgcgccgttcctatttcgataactcaagccgctcttggcgcggacattcacgttacaacgcttgataacaagacaataaaagtaaaagtaccggcgggtattcaaaacggaaaaatgctccgtatccacaacgagggcgtgccgatgggtaatcaaagaggcaatctctacatcaaactttttgtgcaaatccccgaaagactttcccgcaaaggcaaagacctccttgaagaacttgccaaaatcgagggacaggacgatagccctaaacctattccgctatcacagcttggggatgtgtaa

SEQ ID NO: 5288 - protein, 152 aa, Unknown
  Obtained from environmental sample
  DOMAIN (12)...(132): DnaJ C terminal region
  misc_feature (1)..(152): Xaa is any amino acid
MVTIPAGVENGKRVVIPKQGDAGPNGGPPGDLYVFIRVKPHEYFERQAADLYCAVPISITQAALGADIHVTTLDNKTIKVKVPAGIQNGKMLRIHNEGVPMGNQRGNLYIKLFVQIPERLSRKGKDLLEELAKIEGQDDSPKPIPLSQLGDV

SEQ ID NO: 5289 - DNA, 894 bp, Unknown
  Obtained from environmental sample
  misc_feature (1)..(894): n is a, c, g, or t
gtgctgcagtttgcggacacgcttgccgacgcctcgcttgccgtaccgttttcggtatatatggagcagataggcaagatagagggacagtcttgggaggactcgcggcttgccgtaactaccgattccgttggcgcgtttcggttttactcgctgccctccggacaagcgacggtcagcgttcaagccccggactacgagccgtattccactaccgagagcatctccaagttggaggaggtgaaggttctctactacgttacgcgcttggactactccggctacgagcttgtggtctacggcaaggcggaggagaaggaagtaagccgtcaccgcatatccttggcggaggtgaagcgtgtgccggggcttggcggcgacgcggtccgcgtggttcaggcgatgccgggcgtggcccgtccggcgttcggcggcacggaggtcgtggtgcgcggcgctccgagctgggcctcccgctactacatagacgggatgagcgttccgctgctctaccacatgagcggcgcggcggccatctatccgtcggacgcgctcgacggagttgatttttacccgggcggcttctcgtcgcgttacggcggcgcggtcgcgggggtgatagagatgaacacgcgcaaaccgaaaaccgacaggctgcaaggctacgctgatttaagcatgctcaccggcgcgctttttctcgaaggccccataaacgatagggtctcgttcatggcctcggcgcggcgctacttcgcgggcgatcttttgagcctctacttcaagatttccgatccggaacacacatcaatatctatggcgccgttttattgggactacctgctgagaacagatgcggacttagacaagaatcaccgggctttcgtctcataa

SEQ ID NO: 5290 - protein, 297 aa, Unknown
  Obtained from environmental sample
  DOMAIN (102)...(206): TonB-dependent Receptor Plug Domain
  misc_feature (1)..(297): Xaa is any amino acid
MLQFADTLADASLAVPFSVYMEQIGKIEGQSWEDSRLAVTTDSVGAFRFYSLPSGQATVSVQAPDYEPYSTTESISKLEEVKVLYYVTRLDYSGYELVVYGKAEEKEVSRHRISLAEVKRVPGLGGDAVRVVQAMPGVARPAFGGTEVVVRGAPSWASRYYIDGMSVPLLYHMSGAAAIYPSDALDGVDFYPGGFSSRYGGAVAGVIEMNTRKPKTDRLQGYADLSMLTGALFLEGPINDRVSFMASARRYFAGDLLSLYFKISDPEHTSISMAPFYWDYLLRTDADLDKNHRAFVS

SEQ ID NO: 5291 - DNA, 369 bp, Unknown
  Obtained from environmental sample
  misc_feature (1)..(369): n is a, c, g, or t
atgccgtcaatcacagaaaataaacaaggtttaaaagttcttataacaggaagtgttttacaattatttttgggaataatttatgtttggagcgtatttaaaaatccggtaagcgcgtattacggatgggaaccgtccgcagttgggcttactgctaatttcatgctctgcttttttgtcatcggcatattagccggcggcaaggcgcaggtaaaaatcggcgtaaagttcacgactttgatcggcggacttatggtcgctgttggaatgttggcgaccgcgctgattcccacaggcggaaatgcgcccgtctttcttatctatcttttctacggaatcatcggcggcttcggcggggcgcgggtataa

SEQ ID NO: 5292 - protein, 122 aa, Unknown
  Obtained from environmental sample
  misc_feature (1)..(122): Xaa is any amino acid
MPSITENKQGLKVLITGSVLQLFLGIIYVWSVFKNPVSAYYGWEPSAVGLTANFMLCFFVIGILAGGKAQVKIGVKFTTLIGGLMVAVGMLATALIPTGGNAPVFLIYLFYGIIGGFGGARV

SEQ ID NO: 5293 - DNA, 612 bp, Unknown
  Obtained from environmental sample
  misc_feature (1)..(612): n is a, c, g, or t
atgggctcgggcagccgcgccggcaagatggcaatgcacaacgatggtaaaccgcaggttaacaagaaagcctgcgttagctgtaaaatctgcgcccgtttctgcgcccatgacgctatcgtttttaacggtggtaaagcgttcattgatgaaaaaaaatgcgtgggctgcgggcgctgtatcggttcatgcagtaaaaacgctattgaaaataactggaactccaacaaccaaatgctttgttataaaatagtagaatacgcaaaagcggcgcttgacggccgcccgaatttccacattaatgtcgtaaaccaggtttcgccctactgcgactgccacggtgaaagcgatgcagccgtagttccggacatcggcatattcgcgagtttcgacccggttgccctggacaaagcctgcattgacgcggtaaacgccgccccaagcatcaagaccagcattatcggcgaacgcaaacgcgaccacaaagacgcggccggcaatgacgaccattttaccaacatccaccctacaaccgactggcgcgaacagatttcttacgcggaaaaaataggtcttggcagcggggagtatgaattagttactgtgaagtag

SEQ ID NO: 5294 - protein, 203 aa, Unknown
  Obtained from environmental sample
  DOMAIN (18)...(41): 4Fe-4S binding domain
  misc_feature (1)..(203): Xaa is any amino acid
MGSGSRAGKMAMHNDGKPQVNKKACVSCKICARFCAHDAIVFNGGKAFIDEKKCVGCGRCIGSCSKNAIENNWNSNNQMLCYKIVEYAKAALDGRPNFHINVVNQVSPYCDCHGESDAAVVPDIGIFASFDPVALDKACIDAVNAAPSIKTSIIGERKRDHKDAAGNDDHFTNIHPTTDWREQISYAEKIGLGSGEYELVTVK

SEQ ID NO: 5295 - DNA, 813 bp, Unknown
  Obtained from environmental sample
  misc_feature (1)..(813): n is a, c, g, or t
ttgattctctatctggcggtggtgctggtatcgctgggaatcgccatcggctttgtggccttcatcacgctggacattaacaagtcggtcagaatccttaaaaccctgttcaaagggctaaacgaaaacgatttaaccctgtctttaaaggtcaactccatggacgaattcggcgaactgatgacggctttcaacggatttctcaatattctgcgatccacattcggaagtttcaaacagagcgcccaactggtcgcaaattccgttttcgatctttcctcctcgtcaaaggaaatttctaccaccgccaacgagcagtccgccagcgtctccgagattgtcagcacgatggaaggcagcaagaacctgtccgagcagatcgcctacaagaccaccgaggtggcaaacctcgccaaagaaacgcaggagttaagcagcaaaggcgcggaactaagggaagccaaccagaccatgatggaagacataagaaatcaaaaccagaaaatcataagcgagatacgcaacctttcggacatgattatcaggatcagcgaggcgataaggatcatcgacggtatcgccgatcagaccaagctgattgcgtttaacgcctctcttgaggcgtcgtcttccggcgaggcgggggcgcggttctcggtagtagcctcggaaataaggcgtttcgcggataacgtcgtcgaatcaacgcgggaaataaaacagaagatagaagaggtgcagggcgcgtcccaggcgctcatcgcggaagccactcangctcacggcaaatcgagatcggttacgagagaatga

SEQ ID NO: 5296 - protein, 270 aa, Unknown
  Obtained from environmental sample
  SIGNAL (1)...(20)
  DOMAIN (104)...(270): Methyl-accepting chemotaxis protein (MCP) signaling domain
  misc_feature (1)..(270): Xaa is any amino acid
MILYLAVVLVSLGIAIGFVAFITLDINKSVRILKTLFKGLNENDLTLSLKVNSMDEFGELMTAFNGFLNILRSTFGSFKQSAQLVANSVFDLSSSSKEISTTANEQSASVSEIVSTMEGSKNLSEQIAYKTTEVANLAKETQELSSKGAELREANQTMMEDIRNQNQKIISEIRNLSDMIIRISEAIRIIDGIADQTKLIAFNASLEASSSGEAGARFSVVASEIRRFADNVVESTREIKQKIEEVQGASQALIAEATXAHGKSRSVTRE

SEQ ID NO: 5297 - DNA, 891 bp, Unknown
  Obtained from environmental sample
  misc_feature (1)..(891): n is a, c, g, or t
atggccgaggtatgccatattgtggaattcgccaatcaattcgcaaagagaatcacaaaaagatttaagaaaactccaattgcgccaataaagaaagataatggcaatatcagtatctgtaaattatcatctgataaaattgctattcctgttataaataagatacaaaatattaagctatcaggttcaatatgtattatagtaagaactaatgaagaagcattaaacattgtcggcttattaaacaaaaaaggtatcgctgctcgaaagatacaaactaacgatgactttaatttatataaccttgtagaaattagaaattttatagacgatataaataaaaacaatgacagttatacaataactaacgagatttggcagcaggcgaaagataatctaattaaaaaatatggaagcagtaataatttaccaagcgcattaaaactcatcggagattttgaggaaacaaataacggaacaaagtataaaagcgaccttaaacaattcgtacgcgaatctaaacttgaagattttatatcatcttcggaaggctttattcttgtttctacaattcaccaaaccaaaggaagagaatttgacaatgtatttttggcacttagtcgttttccaaaattggataataaacttgaatcgaatgacgcaaaagaaagaaaaatttacgtcgctataacgagagcaaaacagaacctgcatattttatataatgacgactattttgacaaaattaatgttgaaaatattgaaaaaacaactgacaacaatgattatcctgtaccatcgcanataactttgcaactgtctcataaagatgtttacttagattattttgcttacaggcagagagaaataaattctcttataagcggntaa

SEQ ID NO: 5298 - protein, 296 aa, Unknown
  Obtained from environmental sample
  misc_feature (1)..(296): Xaa is any amino acid
MAEVCHIVEFANQFAKRITKRFKKTPIAPIKKDNGNISICKLSSDKIAIPVINKIQNIKLSGSICIIVRTNEEALNIVGLLNKKGIAARKIQTNDDFNLYNLVEIRNFIDDINKNNDSYTITNEIWQQAKDNLIKKYGSSNNLPSALKLIGDFEETNNGTKYKSDLKQFVRESKLEDFISSSEGFILVSTIHQTKGREFDNVFLALSRFPKLDNKLESNDAKERKIYVAITRAKQNLHILYNDDYFDKINVENIEKTTDNNDYPVPSXITLQLSHKDVYLDYFAYRQREINSLISG

SEQ ID NO: 5299 - DNA, 729 bp, Unknown
  Obtained from environmental sample
  misc_feature (1)..(729): n is a, c, g, or t
atgggcgatattcccctcatgacagagagaggaacttttatcattaacggagcggagagggtagttgtttcccagatacaccgctcgcccggcgttattttcagtcatgaaaagggaattttttcatcgcgtatcattccctatcgcggcagttggatagaatttgaaatcgatcaaaagcgcgatttaatttacgcgaagattgacaggaaaaaaagaatcctcggaactattttccttcgcgcgcttgggttctcatcaagagaagaaataatcgaagctttttatgttaccgaaactttaaaaattaaagacgaccgcgagacaaaagaaaaaatttccggcatggttcttgccaagcctgtaatgattaaagatgaaagcggttctaaaggagcggaaaaagttctttacagagcgggcgaaaaacttcacccgcacaatgttgatgaacttataaataacggaattaaatctatttgttatatcgattttgaagccgagggttctcttaactcgacaatgcttcttaattgttttgaacgcgaggatattaaatttgtaaaagaagccggaagcgaacccgctaaagacgacgcattaatggctgtttattcggtattaatgcccggcgaatcaattacggttgatcaggcggaaaaagatttaacgggaatgtttttctcggatcgccgctacgatctcggcaaagtaggccggtataaataa

SEQ ID NO: 5300 - protein, 242 aa, Unknown
  Obtained from environmental sample
  misc_feature (1)..(242): Xaa is any amino acid
MGDIPLMTERGTFIINGAERVVVSQIHRSPGVIFSHEKGIFSSRIIPYRGSWIEFEIDQKRDLIYAKIDRKKRILGTIFLRALGFSSREEIIEAFYVTETLKIKDDRETKEKISGMVLAKPVMIKDESGSKGAEKVLYRAGEKLHPHNVDELINNGIKSICYIDFEAEGSLNSTMLLNCFEREDIKFVKEAGSEPAKDDALMAVYSVLMPGESITVDQAEKDLTGMFFSDRRYDLGKVGRYK

SEQ ID NO: 5301 - DNA, 300 bp, Unknown
  Obtained from environmental sample
  misc_feature (1)..(300): n is a, c, g, or t
atgtcgataactgttccgtcaattccgtgcggaactttaagcgaagtgtcgcgcacttctttcgccttctcgccgaagattgaattaagcagtttgaattcaggcgtagtttcagtttcgcttttcggcgtaactttgccgaccaatatatcgccggagcgcactttcgctccgatgcggataatgccttcgctgtccatgttatcaaggcttttttcggaagtgttgggaatatcacgggtaattttttcggggccaagttttgtttcccttacttcgacaacaaattctttgatgtga

SEQ ID NO: 5302 - protein, 99 aa, Unknown
  Obtained from environmental sample
  misc_feature (1)..(99): Xaa is any amino acid
MSITVPSIPCGTLSEVSRTSFAFSPKIELSSLNSGVVSVSLFGVTLPTNISPERTFAPMRIMPSLSMLSRLFSEVLGISRVIFSGPSFVSLTSTTNSLM

SEQ ID NO: 5303 - DNA, 417 bp, Unknown
  Obtained from environmental sample
  misc_feature (1)..(417): n is a, c, g, or t
ttgatgattntacgttttttacaagaattacagcccgatatggttggaatcggtccctatatttctcataagaatacaccatttagcgatcacaagaacggcgatttacatttatgcctcagactcatagccattatccgccttatgtttcctgacgcgttgatacctgctacaaccgcgcttggaactattgataaaagaggccgtgaattaggattaactgcgggagcaaatgtggttatgcccaatcttagtcccgtcaatgtaagaaaacaatatgagctgtatgacaataaaatatgcgtttacgagggagcggcgcagtgccggggctgtctggagaacagagttgcgtctgcgggttatcatatggtaacgaacatcggtaataaaaacagcgtaaaaaaatacgtataa

SEQ ID NO: 5304 - protein, 138 aa, Unknown
  Obtained from environmental sample
  misc_feature (1)..(138): Xaa is any amino acid
MMIXRFLQELQPDMVGIGPYISHKNTPFSDHKNGDLHLCLRLIAIIRLMFPDALIPATTALGTIDKRGRELGLTAGANVVMPNLSPVNVRKQYELYDNKICVYEGAAQCRGCLENRVASAGYHMVTNIGNKNSVKKYV

SEQ ID NO: 5305 - DNA, 447 bp, Unknown
  Obtained from environmental sample
  misc_feature (1)..(447): n is a, c, g, or t
ttggcatatcaaaacgcagtatccacttataaagagaccaagataaagacggcgggtcaaggtcagcttattatcatgctgtataacacggcgatacggcagcttgacgaggccctgtttttattgcaggcgaacgacaccggaaaaagagatccgggcaagatcgaaaaaatcggcaaggccgtggttaagacacaggaaatcatttccgaactgatggtttccctggattttgagcagggcggtgaaattgccgttaacctcttttctttgtatacctggttcaaccgggaacttatggaagccaatatcaaccaggacgcgagacgtatattgattgtaaaaaatcatatcgaaaaccttcgcaacgcgtggcaggaagttgtgtcttcaaacgcttttgaaactgccggcaccgaggttttaggcgttaacatcgcgatgtga

SEQ ID NO: 5306 - protein, 148 aa, Unknown
  Obtained from environmental sample
  DOMAIN (3)...(132): Flagellar protein FliS
  misc_feature (1)..(148): Xaa is any amino acid
MAYQNAVSTYKETKIKTAGQGQLIIMLYNTAIRQLDEALFLLQANDTGKRDPGKIEKIGKAVVKTQEIISELMVSLDFEQGGEIAVNLFSLYTWFNRELMEANINQDARRILIVKNHIENLRNAWQEVVSSNAFETAGTEVLGVNIAM

SEQ ID NO: 5307 - DNA, 306 bp, Unknown
  Obtained from environmental sample
  misc_feature (1)..(306): n is a, c, g, or t
atgttcgtgttcgaggatatcgtcatgcttgacgaccggtcaatccagaaggttatgcgggaagtggactcgcaggaacttgccaaggcgctcaagagcgtggataccgaggtacaggacaagattttcaagaatatgtccaagcgcgcggctaccatgcttaaggaagacatggaatacatgggcccggtacggttgaaggatgttgaggaagcgcagcaaaaaatcgtttcgattatccgccaccttgaagacgtcggtgaaattgttattgcccgctcgggtgaagacgagatggttgtgtaa

SEQ ID NO: 5308 - protein, 101 aa, Unknown
  Obtained from environmental sample
  DOMAIN (1)...(92): FliG C-terminal domain
  misc_feature (1)..(101): Xaa is any amino acid
MFVFEDIVMLDDRSIQKVMREVDSQELAKALKSVDTEVQDKIFKNMSKRAATMLKEDMEYMGPVRLKDVEEAQQKIVSIIRHLEDVGEIVIARSGEDEMVV

SEQ ID NO: 5309 - DNA, 555 bp, Unknown
  Obtained from environmental sample
  misc_feature (1)..(555): n is a, c, g, or t
atggccaaggcagtattcagaccaggcgagctcgttcttattgatgagagagtcattatcagcgcccccacagactttggggcggcgcagaatgaacctgtctcccatgaggaagaggttgagccggcccagccggtggaagtgtacacggggccgaccgccgaggatctgcgccatgaagccgaagcgttcagaatcgagtgggatatcgaacggcaggcgatgatagagtccgcccaggccgaagccaatgaaattgttcagaaggcggacatggcggcctcaaggcaaaagcaggagaaaatcgaagaggcggacgccatccttgccaaggcaaaagaagaagcggaaaagttagtcagtgaagcgaagctgttggccgagaaacttgaaacggaaacgcgcggcatgcttgatgaggaaaaaaccgccgcctttaaccgggccagggaagatggcaggatcgaaggctatgccgaaggcaagaccgaagtagaccgcctgatagggcggacccatacagtccttgaacggggccaaggacaagcgcggtga

SEQ ID NO: 5310 - protein, 184 aa, Unknown
  Obtained from environmental sample
  misc_feature (1)..(184): Xaa is any amino acid
MAKAVFRPGELVLIDERVIISAPTDFGAAQNEPVSHEEEVEPAQPVEVYTGPTAEDLRHEAEAFRIEWDIERQAMIESAQAEANEIVQKADMAASRQKQEKIEEADAILAKAKEEAEKLVSEAKLLAEKLETETRGMLDEEKTAAFNRAREDGRIEGYAEGKTEVDRLIGRTHTVLERGQGQAR

SEQ ID NO: 5311 - DNA, 711 bp, Unknown
  Obtained from environmental sample
  misc_feature (1)..(711): n is a, c, g, or t
gtgaacttttggccaaacaagaacattgacgagtatatggagataccggagcgcatagagaagcgaatagctacgatgacgatagccgtttccgaaatatccggcggcggcacggataacaaggtcaaggcggaccgtgcggaagcactcgaacaagagcaggtaaaaagatgtttaaggatgatgcagaacagcatagaagatgttgagccggaaacctttggcctaagccacctatccttagaggtcttccggcaagatctgaccaaagaatcgatagagaaatacaagaatttgcccaatggcatccatagcggcttcacggcggatcaacggggcctgatagcgctgttgcaacatagaaaaaacaacgacaaaaagatagcctttataaatgagaatggcgaagatatactctcaagccggcaagagatactgcagtttttgcatgacaataaagacaagcagagatacgtcccggcgttaatagaagagtgcgacggcgccgagatagataagctgtcggcggctttgataaaatggcttgaatcaaaagtcggcgcggaaataaaaacggtaatggaaggcctatttgccggcggtcaggccgcgttggacctatcggcaaagcaaaaagctcacttggaggagacgcttgccccggacaaatgggatttgatttgctgggaggttatcgggggagagtcttga

SEQ ID NO: 5312 - protein, 236 aa, Unknown
  Obtained from environmental sample
  misc_feature (1)..(236): Xaa is any amino acid
MNFWPNKNIDEYMEIPERIEKRIATMTIAVSEISGGGTDNKVKADRAEALEQEQVKRCLRMMQNSIEDVEPETFGLSHLSLEVFRQDLTKESIEKYKNLPNGIHSGFTADQRGLIALLQHRKNNDKKIAFINENGEDILSSRQEILQFLHDNKDKQRYVPALIEECDGAEIDKLSAALIKWLESKVGAEIKTVMEGLFAGGQAALDLSAKQKAHLEETLAPDKWDLICWEVIGGES

SEQ ID NO: 5313 - DNA, 369 bp, Unknown
  Obtained from environmental sample
  misc_feature (1)..(369): n is a, c, g, or t
atgcgttgcccccattgcgggaacattgaagacaaggtaattgagtccagaacgctggcaaacggggatgcggtacgaagacgcagggagtgtattaactgcaactatcgttttacgagttacgaaaagattgatgaaagacagtttatggtggttaaaaaagaccaaagaagggagccttttgaccgcgaaaaactggaaaaaggagtggttcgggcgctggaaaaaaggccgttttcgcagatgcagattgagagtctgataaacgaaattgaagatgagtcggcgattttaagcaagggaaaccgtgagatttccacttccgtaatcggcgatttggttctgaaaaagctagngcgagctggataa

SEQ ID NO: 5314 - protein, 122 aa, Unknown
  Obtained from environmental sample
  DOMAIN (49)...(122): ATP cone domain
  misc_feature (1)..(122): Xaa is any amino acid
MRCPHCGNIEDKVIESRTLANGDAVRRRRECINCNYRFTSYEKIDERQFMVVKKDQRREPFDREKLEKGVVRALEKRPFSQMQIESLINEIEDESAILSKGNREISTSVIGDLVLKKLXRAG

SEQ ID NO: 5315 - DNA, 876 bp, Unknown
  Obtained from environmental sample
  misc_feature (1)..(876): n is a, c, g, or t
gtgcctgaaatatcgcttacccaccaaacggcgcagatgattggaaaccgtttcggctctcttgccgccacatacatttcggggatgactccctcaactcgtctttccgaatggatcagaataaaaagcggaaaagcgccgattgtcgtaggaccaagaagcgcagtattcgctcccgtgcctaatctcggtcttatcataatcgacgaagaacacgacggctcatataaatcgggtaacacgcctcgttatcacgcaaggcagatcgcccttcaccgctgttcaaaagaaggggcgcgtcttgttatgggctctgccactccttcggcggaagcgtggaaacttatgcaggaaggcggcataaaaagacttgatctttcacgccgtctttcaggcggaggaatgcctgaaataaaagcggtaagcctcgcaaaaaccgaaggatgtctttcaaaggaattaaaagacgaaattctgcttactcatcaaatgggaaggcagacgattctttttttgaaccgcagaggtttcgctcatttttatcaatgtcccgaatgcggctgggaacaaacctgcaagcgctgttcggtatcgcttacatggcataaaaaacgaaaccgctgtatttgccactactgcggctacagcgaagcgccgcctaccgtctgccccaactgcggctgtgtggaagcgggctaccgcggcttcggcacggaaatgatcgaggaagaagtgcgcagaacttttccaaacctgcgccttagccgtgttgacgccgataccgcttcaaaaaaaagcggcggcggcggtcttgaggaaacgcttaaattattcaaaaaaggagaaattgacatttgcttggctcggccgatctga

SEQ ID NO: 5316 - protein, 291 aa, Unknown
  Obtained from environmental sample
  misc_feature (1)..(291): Xaa is any amino acid
MPEISLTHQTAQMIGNRFGSLAATYISGMTPSTRLSEWIRIKSGKAPIVVGPRSAVFAPVPNLGLIIIDEEHDGSYKSGNTPRYHARQIALHRCSKEGARLVMGSATPSAEAWKLMQEGGIKRLDLSRRLSGGGMPEIKAVSLAKTEGCLSKELKDEILLTHQMGRQTILFLNRRGFAHFYQCPECGWEQTCKRCSVSLTWHKKRNRCICHYCGYSEAPPTVCPNCGCVEAGYRGFGTEMIEEEVRRTFPNLRLSRVDADTASKKSGGGGLEETLKLFKKGEIDICLARPI

SEQ ID NO: 5317 - DNA, 693 bp, Unknown
  Obtained from environmental sample
  misc_feature (1)..(693): n is a, c, g, or t
atgtgcgaattgcgggtcgccgtttccgacaacgggatcggcatatcacctgagcagcaggcgaagctcttcaacgcctttgagcaggcggacagcggcacgagccgcgagtttggcggcaccggtttgggcttggtcatatccaagcgcatcgtggaactcatgggcgggaaaatttggattgagtcggagttgggaaaaggctctaagttcatcttcaccgtcaaagcggcacggggtgccgcgaccgacgacgagcatcacgaggcggatggcggcgtacttccggcgagcaccgtaggcgcggcgtttgagggcaaaaatattctggtggcggaggatgtggaaatcaatcgcgagattctgaatatgctcttagagggtaccggcattacgatagcgttcgcggagaacggggcggaggcgctgcagatggtaaccgacgcgccgtgcaaatacgacgcggtattcatggacgtgcacatgccgaagatggacggtctggaggccacgcggcgcatacgcgccctgccggaactcgtaaataggaagagggcgctgcccataatagcgatgacggccaacgtctttaagagcgacattgacggatgcctcgaggccggaatggacgaccatataggaaaacccatcgatatcgatgtggtcacggagaaattgaggaagtatctatga

SEQ ID NO: 5318 - protein, 230 aa, Unknown
  Obtained from environmental sample
  DOMAIN (1)...(78): Histidine kinase-, DNA gyrase B-, and HSP90-like ATPase
  misc_feature (1)..(230): Xaa is any amino acid
MCELRVAVSDNGIGISPEQQAKLFNAFEQADSGTSREFGGTGLGLVISKRIVELMGGKIWIESELGKGSKFIFTVKAARGAATDDEHHEADGGVLPASTVGAAFEGKNILVAEDVEINREILNMLLEGTGITIAFAENGAEALQMVTDAPCKYDAVFMDVHMPKMDGLEATRRIRALPELVNRKRALPIIAMTANVFKSDIDGCLEAGMDDHIGKPIDIDVVTEKLRKYL

SEQ ID NO: 5319 - DNA, 846 bp, Unknown
  Obtained from environmental sample
  misc_feature (1)..(846): n is a, c, g, or t
atgctgacaaccagggacatataccctgttgttctgccatacctggacaatggacgcctggtttttcccgatcaatttgtaatgaccgccaaagacgcgtttacccgcactattgatgaagattcttccaattatcggattgccgccattatcattgatccgggccatgggggaaaagatcctggagccattggcaaagtggaaatcaacggaagaaaacaggaaataatcgaaaaaaatattaccttcaacgcgtcaaagatactaaaagatctgctggtaaaggcatatcccgacaagcgcatactgatgacccgcgaaagcgatatcgccatgagcctggaagaacgcaccgtgatcgccaacgctgtacccataagaaaaaacgaggcgataatttatatctccatacacgccaattacgtgtcagaccaaagggccagaggcttcgaggtatggcatctcaacccggaataccggcgcaccctgctggacgaatcctatttttcagattcgccagagctgcgaaaaataatgaacacccttaccgaagaggcgttcatggctgaaagcatcaggatcgcccaatcgatcctcgattcccttaaaaccacaatgggccggtccatgccttcacgagggcttaaggccgaggagtggtttgtcgtcagacgcagcaatatgcccgcggtgcttgtggagcttggctttgtcagcaacaaagacgacgccctgcttatgaccaccaacgagcacttgcgcaaaatggtcgaagcggtgtataaaggaatagcggattttataacgatttttgaacgttcaggaggattcatcgcttcacgatga

SEQ ID NO: 5320 - protein, 281 aa, Unknown
  Obtained from environmental sample
  DOMAIN (50)...(266): N-acetylmuramoyl-L-alanine amidase
  misc_feature (1)..(281): Xaa is any amino acid
MLTTRDIYPVVLPYLDNGRLVFPDQFVMTAKDAFTRTIDEDSSNYRIAAIIIDPGHGGKDPGAIGKVEINGRKQEIIEKNITFNASKILKDLLVKAYPDKRILMTRESDIAMSLEERTVIANAVPIRKNEAIIYISIHANYVSDQRARGFEVWHLNPEYRRTLLDESYFSDSPELRKIMNTLTEEAFMAESIRIAQSILDSLKTTMGRSMPSRGLKAEEWFVVRRSNMPAVLVELGFVSNKDDALLMTTNEHLRKMVEAVYKGIADFITIFERSGGFIASR

SEQ ID NO: 5321 - DNA, 897 bp, Unknown
  Obtained from environmental sample
  misc_feature (1)..(897): n is a, c, g, or t
ttgcataccatcaaattgatcagagaatattatcctcaatataagaatcacaaaatagcgataatttctccctgcatcgccaaacgtcgggagtacgacgaaaccggcatgggagattacaacgttacgatgatcgcgttaagaaaacttctggacgagcataacacagacctttccgtttttcccaagatagaatataccggagtcagcgcggagcgcgcggcggggtttcccattcccggcggacttttggatactgccgaacgtttcgagccgggaatcaggcggcgcacggaaaagattgaaggggtatacgcgatttatccttatctgagagaaatatcggaaatattgaaaaccgacgcccaactgccgctgttggttgactgcctgaactgcgaaaaaggctgccttggcggtccgggaaccgggaacgccgaaaaaccgctggctttgcttaaagaacctgtacaaagacgtatagctaaactggaagaagaacttaattctaaatccggagaaaaagcgttcagtaaataccatgatgttttgaaaaggtactggaagaaagacctgtataacagaagctaccgtaatctttccgaaaacaatacgatcaaacagccaagcgaggaagaaataactaaaatcttccgcagcatgaagaaattcggagaggaagatatatataactgtacctgctgcggttacggaaactgcaaagctatggcgaaggcgatcttcaacaaacttaacaaagcggaaaattgcgcccattatattcttgccctgctcacggaaaaaaccaatacagaagagcttaaccgtcagcttcaggaacatatcgctcaggcgtccggccttatcgaaggaattaacaaattatttaataactga

SEQ ID NO: 5322 - protein, 298 aa, Unknown
  Obtained from environmental sample
  misc_feature (1)..(298): Xaa is any amino acid
MHTIKLIREYYPQYKNHKIAIISPCIAKRREYDETGMGDYNVTMIALRKLLDEHNTDLSVFPKIEYTGVSAERAAGFPIPGGLLDTAERFEPGIRRRTEKIEGVYAIYPYLREISEILKTDAQLPLLVDCLNCEKGCLGGPGTGNAEKPLALLKEPVQRRIAKLEEELNSKSGEKAFSKYHDVLKRYWKKDLYNRSYRNLSENNTIKQPSEEEITKIFRSMKKFGEEDIYNCTCCGYGNCKAMAKAIFNKLNKAENCAHYILALLTEKTNTEELNRQLQEHIAQASGLIEGINKLFNN

SEQ ID NO: 5323 - DNA, 606 bp, Unknown
  Obtained from environmental sample
  misc_feature (1)..(606): n is a, c, g, or t
ttggggtattacggaattttgccttttgaaaaagagcactatatcagaaccgatacaaaacttgaatggtttcataccctgtttaacctgcctgtctcggacaattggaacctcaaagccgtatttggcatacataccggattgtctttcatttttccccaattccgtgacaggccctacattgaagaagcaaattcacttgctgtggacgggatgtttaatggtcgcggctggatgaccgagtacaggcgcaagggctatgccctatgggagaattgggcagaaatacgcatacctctggcacccggcatcattgcctgggatttctttttcgacgcggcgggggtaaaaagaacgccgcagtccctgtttaccgatttttttggagatgactacagggatcccgaaaacccggaagaaccggttacttttttcatgcgttttagtttaggcggcgggttcaggtttactatcccccaattcccgtttagattcagcattgcaaaaagatttttaataagagacgggagagtagaatgggttcagggcggcatcggaggctcgggactggattttgtggtttcttttgcaatctctacatactga

SEQ ID NO: 5324 - protein, 201 aa, Unknown
  Obtained from environmental sample
  misc_feature (1)..(201): Xaa is any amino acid
MGYYGILPFEKEHYIRTDTKLEWFHTLFNLPVSDNWNLKAVFGIHTGLSFIFPQFRDRPYIEEANSLAVDGMFNGRGWMTEYRRKGYALWENWAEIRIPLAPGIIAWDFFFDAAGVKRTPQSLFTDFFGDDYRDPENPEEPVTFFMRFSLGGGFRFTIPQFPFRFSIAKRFLIRDGRVEWVQGGIGGSGLDFVVSFAISTY

SEQ ID NO: 5325 - DNA, 423 bp, Unknown
  Obtained from environmental sample
  misc_feature (1)..(423): n is a, c, g, or t
atgtattcgggacgcagttcgttatcgccaatcaggttcgccagggcgtacgcggcggcgattttcatatcttcgttgatgtcgctcgcgcggacgtccagagccccgcggaaaatgccgggaaaggcgagcacgttgttgatctggttcgcgaaatcgctgcggcccgttcccactatagcggctcccgcggctttagcctcgtcgggcatgatctccgggacggggttggacatggggaacagtatcgcgtcacgcgacattgatttcaccatttctgccgttaccagattgggcgcggaaacgccgatgaacacgtcggcgccccgtataacatcggcaaggcttccctttttcattcccctgttcgatatttccgcaatcctggctttttcatcattcaggttcggcattcccctgtga

SEQ ID NO: 5326 - protein, 140 aa, Unknown
  Obtained from environmental sample
  misc_feature (1)..(140): Xaa is any amino acid
MYSGRSSLSPIRFARAYAAAIFISSLMSLARTSRAPRKMPGKASTLLIWFAKSLRPVPTIAAPAALASSGMISGTGLDMGNSIASRDIDFTISAVTRLGAETPMNTSAPRITSARLPFFIPLFDISAILAFSSFRFGIPL

SEQ ID NO: 5327 - DNA, 603 bp, Unknown
  Obtained from environmental sample
  misc_feature (1)..(603): n is a, c, g, or t
gtgcgcgagtgcatgatcgttgcgggagaaggtgcgggaaactgggccgccggaaaagggcttgcctttccgtacattagtcaggaaattgaattacagggaaaagttcccggcggcctgtccggttcttggcagttgcgccgctgtatgaggccgcgtgttctttcgacaaagccggggcggcatcagggtcttggccttgacacttacacgcaggttacaagccctctgcgccgttacacagatcttttggctcatcttcaaatacgcacattcctgcgcggcggcaaactgctttcttcggaagaagtaatggcgcatctgggagcgggggaggccgccgcaatcgccgtttcccatgcggaacgcttttcaaaaaaccactggaaaatggtttatcttttagataaaaaagattccgtttgggatgccgttgcccttgaacaaaagggaaaccgctgggcggtaataattccgtcccttgctctggaaacgcaggtttccctgcaaagggatgttttacctaacgaagaaataaaattaattttgaaatctgtacatattcccaaaggggaggcggtatttgtgcaggccgacaggtag

SEQ ID NO: 5328 - protein, 200 aa, Unknown
  Obtained from environmental sample
  misc_feature (1)..(200): Xaa is any amino acid
MRECMIVAGEGAGNWAAGKGLAFPYISQEIELQGKVPGGLSGSWQLRRCMRPRVLSTKPGRHQGLGLDTYTQVTSPLRRYTDLLAHLQIRTFLRGGKLLSSEEVMAHLGAGEAAAIAVSHAERFSKNHWKMVYLLDKKDSVWDAVALEQKGNRWAVIIPSLALETQVSLQRDVLPNEEIKLILKSVHIPKGEAVFVQADR

SEQ ID NO: 5329 - DNA, 873 bp, Unknown
  Obtained from environmental sample
  misc_feature (1)..(873): n is a, c, g, or t
ttggcggacgcagccagcaaagcagccgatacgaaaaaacaggaagaaagcttttcgtcccttttcggcagccaaactgccatgctgataatgaacttcgccaggatttcccggttgtccgcaacaaacaaaacaattcttgaggcggaaaatgtcagaaatatgcttcttgcgatggctgatgacatccgcgttatcttgataacacttgcggaaaagctctacttgctcagaacgccggatttaataccggaggaaaagcgaaaaggctttgcacaggaatgtcttgatatatatgctccgttagccaaccgcctgggcatttccagaattaaggacgaactggaagacctttctcttaaattccttaaccgtgaagtatatcagcagataaaggatatagtctccgcaaagcgaacggaacggataagatttctttccgaagccagagaagcgctcattactgaggcgaaaaaggccggaataaaaatttccgtctcaagccgcgcaaaacacttttactcgatctacatgaagatgcgaaaacgcaataaaagcgcggaagaaatatttgatctgtttggtataaggatcatctgtgaaaccgttgaacaatgttataccttgttgggaattgcccacagcttgtggaagccaggagccggccgtttcagggactacatcgccaatccaaaatctaacggctatcaaagtctgcatactaccgtaattgttgatgaatggcttcttgaaatccagatacgtaccaatgaaatgcactatttggctgaaaacggaattgcaagccattggctgtataaaaaaggctcaagccanntgaacaaatactactctcggatgtcggcacagtaa

SEQ ID NO: 5330 - protein, 290 aa, Unknown
  Obtained from environmental sample
  DOMAIN (168)...(277): Region found in RelA / SpoT proteins
  misc_feature (1)..(290): Xaa is any amino acid
MADAASKAADTKKQEESFSSLFGSQTAMLIMNFARISRLSATNKTILEAENVRNMLLAMADDIRVILITLAEKLYLLRTPDLIPEEKRKGFAQECLDIYAPLANRLGISRIKDELEDLSLKFLNREVYQQIKDIVSAKRTERIRFLSEAREALITEAKKAGIKISVSSRAKHFYSIYMKMRKRNKSAEEIFDLFGIRIICETVEQCYTLLGIAHSLWKPGAGRFRDYIANPKSNGYQSLHTTVIVDEWLLEIQIRTNEMHYLAENGIASHWLYKKGSSXXNKYYSRMSAQ

SEQ ID NO: 5331 - DNA, 786 bp, Unknown
  Obtained from environmental sample
  misc_feature (1)..(786): n is a, c, g, or t
ttgcagaaggaaaaacttaaatcattgcaattgacgcttgataagttggataaagagttcggcaaggggacaatcatgaagatgagcgacaaggcagtcgaacaggttccatgtattcctaccggttccatagcgctcgacgttgctttgggtattggcggattgcctcgcggtagagtcattgagatattcggacccgaatcgtcaggaaaaacaacgcttgcaatacatgctatcgccgaagcccagaagttgggcggcatagcggcttttattgacgcagaacacgctttcgaccgctcgtatgcgcaaaagttaggcgtaaatatggattcgctttacgtgtcgcagcccgacaatggcgagcaagcgctcgaaattgccgatgcgctgatacgttcgagcgcaattgacattttggtaatcgactcggttgccgcgctcactccaaaagccgaaatagaaggcgatatgggcgattcgcgaatggggttgcaggcaagacttatgtcgcaggcgttgcgtaaacttacaggaaacatcagcaaaaccaatacttgctgcattttcatcaatcagttgcgcgataaaataggcgtaatgtttggaaatccggaaacgacaacgggaggtaacgcgcttaaattttacgcttcggtgcgtatagacattcggaaaacaacgactatcaaggaaaaggacggtgaaaatgtaagcggaaaccgcgtgaaggttaaaattgtgaaaaacaagttagncacctccgttccgtcgagccgaatttga

SEQ ID NO: 5332 - protein, 261 aa, Unknown
  Obtained from environmental sample
  DOMAIN (7)...(261): recA bacterial DNA recombination protein
  misc_feature (1)..(261): Xaa is any amino acid
MQKEKLKSLQLTLDKLDKEFGKGTIMKMSDKAVEQVPCIPTGSIALDVALGIGGLPRGRVIEIFGPESSGKTTLAIHAIAEAQKLGGIAAFIDAEHAFDRSYAQKLGVNMDSLYVSQPDNGEQALEIADALIRSSAIDILVIDSVAALTPKAEIEGDMGDSRMGLQARLMSQALRKLTGNISKTNTCCIFINQLRDKIGVMFGNPETTTGGNALKFYASVRIDIRKTTTIKEKDGENVSGNRVKVKIVKNKLXTSVPSSRI

SEQ ID NO: 5333 - DNA, 330 bp, Unknown
  Obtained from environmental sample
  misc_feature (1)..(330): n is a, c, g, or t
atgccgcccaacttctgggcttcggcgatagcatgtattgcaagcgttgtttttcctgacgattcgggtccgaatatctcaatgactctaccgcgaggcaatccgccaatacccaaagcaacgtcgagcgctatggaaccggtaggaatacatggaacctgttcgactgccttgtcgctcatcttcatgattgtccccttgccgaactctttatccaacttatcaagcgtcaattgcaatgatttaagtttttccttctgcaagtcttttaatgcattatcctttcttttcttccattatgttacatcacattttttaaaaattatttga

SEQ ID NO: 5334 - protein, 109 aa, Unknown
  Obtained from environmental sample
  misc_feature (1)..(109): Xaa is any amino acid
MPPNFWASAIACIASVVFPDDSGPNISMTLPRGNPPIPKATSSAMEPVGIHGTCSTALSLIFMIVPLPNSLSNLSSVNCNDLSFSFCKSFNALSFLFFHYVTSHFLKII

SEQ ID NO: 5335 - DNA, 429 bp, Unknown
  Obtained from environmental sample
  misc_feature (1)..(429): n is a, c, g, or t
ttggccgctgtggtcaggccgggcggcaccggttggcgcgccggggtacaggggattccggtgggcggcaagaccggcagcgcgcagaacccgcacagcgacctctcgcacgcgatgttcatcgccgtcgccccggtcgacgacccggtgatcgccgtggcggtggccatagagaacgccggcggcggcggcgccgtggcggcgcccgtggccggagcgctcctcaactacttcttctcagaaaccgaagagggaaagagcgtctacaaaaagtataacccggattcggaactgaaaaccaaaaggccgctgacgcaaagacccgcgctctcggcggcagagagcgcggcaaacgcggccgccgacgcggcggacagatccgagtccgtgccggcgcgccggtcaacatcggagggcggtaatgactaa

SEQ ID NO: 5336 - protein, 142 aa, Unknown
  Obtained from environmental sample
  misc_feature (1)..(142): Xaa is any amino acid
MAAVVRPGGTGWRAGVQGIPVGGKTGSAQNPHSDLSHAMFIAVAPVDDPVIAVAVAIENAGGGGAVAAPVAGALLNYFFSETEEGKSVYKKYNPDSELKTKRPLTQRPALSAAESAANAAADAADRSESVPARRSTSEGGND

SEQ ID NO: 5337 - DNA, 570 bp, Unknown
  Obtained from environmental sample
  misc_feature (1)..(570): n is a, c, g, or t
ttgggaatgccggaagaaaggacagaagaggaactctggcagcagtaccgaaaaactcgggatcctgcgatacgagaagcttttataaaacagtacgccccattggtaaagtatgttgccggaaaagtagccgttggaatgcccaacaatgttgagtttgacgatcttgtaggctacggcgtctttggtcttatcgacgcgattgacaaatttgatcctgataaaaatgtaaaatttaaaacttacgccgttacgcgcataagaggcgcgatttttgacgaactgcgtttaatcgactttgttccgcgttccgtcaggcaaaaaacccgcgaaatagaaacaacaatttcatctttggaagctcatttgggtagaaccgcctcggagcaggaaatagccggcgctctcggcatagacgaacaagagtacatgaaagtgattcaaaaaatttcaggcacttcaataatttctttgaatgacttatggtattcaggcgacgacaacgataaagtgtctatcggcgacagcatagaatctccttccagcatgaatcccgatgtgttgtcgtaa

SEQ ID NO: 5338 - protein, 189 aa, Unknown
  Obtained from environmental sample
  DOMAIN (102)...(184): Sigma-70 region 3
  misc_feature (1)..(189): Xaa is any amino acid
MGMPEERTEEELWQQYRKTRDPAIREAFIKQYAPLVKYVAGKVAVGMPNNVEFDDLVGYGVFGLIDAIDKFDPDKNVKFKTYAVTRIRGAIFDELRLIDFVPRSVRQKTREIETTISSLEAHLGRTASEQEIAGALGIDEQEYMKVIQKISGTSIISLNDLWYSGDDNDKVSIGDSIESPSSMNPDVLS

SEQ ID NO: 5339 - DNA, 450 bp, Unknown
  Obtained from environmental sample
  misc_feature (1)..(450): n is a, c, g, or t
atgttcattcagcatagcgggctctgcatgtccggttctatccgcaacattttcctgattaaaaatccggcgatgtttttcggatacgccgcgatcttcgttaccgtgcttgttggcaaccttatattgggcaatttcaaacccggttttgaaggacagcccgtcgcgcataaccaacacctctggaatttcctgggaatggcgcttacaggttacggctctgtctttataggcggatgtccgctaaggcagatgattaaatccggcgaaggaaacagcgacgccggcgtctgcgtactgggattcctgcttgccggtgccgttgcgcataacttcggtattgccgcttctccccagggcgttcccgtcaacggaagaatcgccgtcatcatcggctttgcggtaataacgcttatcgctgtctttaccagaaaaaaagccgcggcgtaa

SEQ ID NO: 5340 - protein, 149 aa, Unknown
  Obtained from environmental sample
  misc_feature (1)..(149): Xaa is any amino acid
MFIQHSGLCMSGSIRNIFLIKNPAMFFGYAAIFVTVLVGNLILGNFKPGFEGQPVAHNQHLWNFLGMALTGYGSVFIGGCPLRQMIKSGEGNSDAGVCVLGFLLAGAVAHNFGIAASPQGVPVNGRIAVIIGFAVITLIAVFTRKKAAA

SEQ ID NO: 5341 - DNA, 813 bp, Unknown
  Obtained from environmental sample
  misc_feature (1)..(813): n is a, c, g, or t
gtgccgttcggtaattacggcgtggcggacacacgatacaagcaaaacttccacattcacgactatttcttccaaaagagcctcgataaagtccgtccgggcggcgttgtggcgttcatcacgtctaaattcacgatggacagcaggaatcccgcggtacgcaaatatatcgcacagcgggctgatctgctcggcgcggtgcgcctgccaaacgatgctttccttaaaaacgccgggacggaaaccacgatggatattctgtttctgcaaaagcgcgataggccgctcgacattgagccagactggatacacctcggaatgacggaggacggcatatcctgtaaccgttatttcatcgacaaccccgaaatgctctgcggcgtgatggggcttgacgagcatatgaacaacaagtacgggcgcggcgattatacggcttgcctgccgatagagggcgcggacttgggcgaacagctcaatgccgcgcttttgaatgtgcggggaacgtataccgtgacggagttggacgatttggacggcgtggatgaccacgccatacccgccgactattccgtcaagaatttcagctacgctgtggtggaaaacaccgtatatttccgcgaaaactcgctgatgtacccggtggatttgcccgcgacgacgcttgaccgcataaaaggcatgattggactccgcgactgcgttcaggaacttatcgccttgcaactggacgactacggcgatgacgagattaagaagaagcaagcggagttgtcgaacttgtacgacggtttgtcgccgggttcggcctga

SEQ ID NO: 5342 - protein, 270 aa, Unknown
  Obtained from environmental sample
  misc_feature (1)..(270): Xaa is any amino acid
MPFGNYGVADTRYKQNFHIHDYFFQKSLDKVRPGGVVAFITSKFTMDSRNPAVRKYIAQRADLLGAVRLPNDAFLKNAGTETTMDILFLQKRDRPLDIEPDWIHLGMTEDGISCNRYFIDNPEMLCGVMGLDEHMNNKYGRGDYTACLPIEGADLGEQLNAALLNVRGTYTVTELDDLDGVDDHAIPADYSVKNFSYAVVENTVYFRENSLMYPVDLPATTLDRIKGMIGLRDCVQELIALQLDDYGDDEIKKKQAELSNLYDGLSPGSA

SEQ ID NO: 5343 - DNA, 648 bp, Unknown
  Obtained from environmental sample
  misc_feature (1)..(648): n is a, c, g, or t
atgttagaagagtacgactgctggctgcagaagagaataatttcaacgggagtaagtgtgccgaatacggtctttgccgggaagggcggggaagtatttgagcaggcggtaaaagagattacaggcgggatagaaagacttttgggatttaagcctgatgtgagcagaaaagttgactcgaacaagagcgcgatatttcttggattagttggcgtgaaaggaggagtacctgcctgctgtgaagaagacggagcggacaattgcaaacttacggaaaacggttttgtaataaaggttattgataataagatttttatcaccggcaatgatgagcccggcctgttatacggcgtattccggtttcttatgcttcttgctcttggacagataaaaacaggttttaaattatgcgattctcctgtctcagtgttaaggatgatcaaccactgggataattttgacggcactgtagagcgcggctatgcgggcaattcattgtattacaaaaacggtcaatttgatttcgacaaaaagcgcatagaagactacgcgcgcctgctggcctctgtcggtataaaccgcgtttccatcaataacgtaaatgtccgcgccaacgcaaaactccttattacggaaagaatatcttaa

SEQ ID NO: 5344 - protein, 215 aa, Unknown
  Obtained from environmental sample
  DOMAIN (122)...(215): Glycosyl hydrolase family 67 middle domain
  misc_feature (1)..(215): Xaa is any amino acid
MLEEYDCWLQKRIISTGVSVPNTVFAGKGGEVFEQAVKEITGGIERLLGFKPDVSRKVDSNKSAIFLGLVGVKGGVPACCEEDGADNCKLTENGFVIKVIDNKIFITGNDEPGLLYGVFRFLMLLALGQIKTGFKLCDSPVSVLRMINHWDNFDGTVERGYAGNSLYYKNGQFDFDKKRIEDYARLLASVGINRVSINNVNVRANAKLLITERIS

SEQ ID NO: 5345 - DNA, 888 bp, Unknown
  Obtained from environmental sample
  misc_feature (1)..(888): n is a, c, g, or t
gtgcggatttctcattttgaggggatgccggacaatgggccgcatttatctattacatttgacaagcaaaaagattttaagccaacagtgcggataaaagatgacagctctgttttagaaagcggtgaactttcggtaactgtcagacacggcgataaatggaataatgtattttcgggcggcacaaagacgctgaccggaaatgacggcaggtctaccggctttttggttgataataaaaaatcattcattaaggaagaattaaatttatcagttggagaacttgtgtatgggcttggcgagcgtttcggccccttggttaagaacgggcagactgtggatatatggaatgccgacggaggcagcgcgagtgaacaggcgtataaaaatataccgttctacatgacaaataaaggttacggcgtttttattaacgattccggaaaagtttcgtttgaagtcggcagtgaaaaaacttcgcgcgttcagttctgtgtaagcggggaagttttagaatattactttatttacggtcctgagcctaaaaaaattttagaactctatacagctcttacgggaaggcccgccatgccgcctgaatggagtttcggcctgtggctttcaacttcatttacaacttcgtacgatgaaaatacggttatgagctttatcaacggcatggaagagcggaaaatccctctttctgtttttcattttgactgtttctggatgaaagggtttaattggtgcgactttacatgggataaagaagtttttccggagcctgcgggaatgttgtcgcggattaaggcaaaggggataaaaatctgcgtatggattaatccgtatatcgcgcagaggtcttctcgtgccgctcggccgatctga

SEQ ID NO: 5346 - protein, 295 aa, Unknown
  Obtained from environmental sample
  DOMAIN (174)...(295): Glycosyl hydrolases family 31
  misc_feature (1)..(295): Xaa is any amino acid
MRISHFEGMPDNGPHLSITFDKQKDFKPTVRIKDDSSVLESGELSVTVRHGDKWNNVFSGGTKTLTGNDGRSTGFLVDNKKSFIKEELNLSVGELVYGLGERFGPLVKNGQTVDIWNADGGSASEQAYKNIPFYMTNKGYGVFINDSGKVSFEVGSEKTSRVQFCVSGEVLEYYFIYGPEPKKILELYTALTGRPAMPPEWSFGLWLSTSFTTSYDENTVMSFINGMEERKIPLSVFHFDCFWMKGFNWCDFTWDKEVFPEPAGMLSRIKAKGIKICVWINPYIAQRSSRAARPI

SEQ ID NO: 5347 - DNA, 423 bp, Unknown
  Obtained from environmental sample
  misc_feature (1)..(423): n is a, c, g, or t
atgaacccagccctccttcgccaatctattcactctttcgccgaggcaagtttctcacgctccggggggccgggcgggcagaatgtgaacaaggtcagtactaaggtgacgctgcgcctgcaagttgcggaattggtcgggctttcggaagcggaggtggaacggatcaagtccgtgctggcgaacaggctcacaaaagagggtgaattagttttaacttcggacgaggagcgctctcagcggacaaatcttgagagggcgtattttcgcatggaggcgttgatttcggcggcggcaaggctgccgagggcgcgaaagcctacgaagccaagcaaggcggcaaaagaaaagcgcctccttgcaaagaggcgccaatcacaaaaaaaggcggaaagggcgaaacaaacagattgtttcacgtga

SEQ ID NO: 5348 - protein, 140 aa, Unknown
  Obtained from environmental sample
  DOMAIN (5)...(139): Peptidyl-tRNA hydrolase domain
  misc_feature (1)..(140): Xaa is any amino acid
MNPALLRQSIHSFAEASFSRSGGPGGQNVNKVSTKVTLRLQVAELVGLSEAEVERIKSVLANRLTKEGELVLTSDEERSQRTNLERAYFRMEALISAAARLPRARKPTKPSKAAKEKRLLAKRRQSQKKAERAKQTDCFT

SEQ ID NO: 5349 - DNA, 756 bp, Unknown
  Obtained from environmental sample
  misc_feature (1)..(756): n is a, c, g, or t
ttgaaaaaagttttaatcaacggtgattttttctgccgccgtcttaccggcatagagcgttacgcgtatgaaattactctacggcttgataagctcagcaaacccggcgaaattgcggttataacgccatataatgcggtaaatatgccggaattttcaaaccttgaattaatcaggcacaggaaaaacatcaaatcccatctatggtggcaaatgattaccttgcaatggttccttatcactcacagagaatttatcgttcttgaatttggcaataccgctttgccctttgcgcccggtatcgtgtttctgcacgacatttattgtgaattttttcctgaagattttaacagtttgagggataaacttattcgcctgtacaataaatggcaataccgtctgatagcaaaaaaagcaaagcagattgggacagtttcgtattttagcaaaaatcaaattgcgcggacttacaatataaatcctgacagaatcaccgttatttattccagctggaatcatttcaggaatatcacggcggactattctgtttttaataattttccggttctgtcaaagcagttttatttttcattgggtagtctctcgaaacgaaaaaatataaaatggataatcgactatgcgcgaaaaaacacggattctgtctttgccatttccggcgtgagtctgcccactgtaaaagccgatgagttgaaatattcaacgccacaaaatataattatgatgggctacctttga

SEQ ID NO: 5350 - protein, 251 aa, Unknown
  Obtained from environmental sample
  misc_feature (1)..(251): Xaa is any amino acid
MKKVLINGDFFCRRLTGIERYAYEITLRLDKLSKPGEIAVITPYNAVNMPEFSNLELIRHRKNIKSHLWWQMITLQWFLITHREFIVLEFGNTALPFAPGIVFLHDIYCEFFPEDFNSLRDKLIRLYNKWQYRLIAKKAKQIGTVSYFSKNQIARTYNINPDRITVIYSSWNHFRNITADYSVFNNFPVLSKQFYFSLGSLSKRKNIKWIIDYARKNTDSVFAISGVSLPTVKADELKYSTPQNIIMMGYL

SEQ ID NO: 5351 - DNA, 891 bp, Unknown
  Obtained from environmental sample
  misc_feature (1)..(891): n is a, c, g, or t
ttggttgtgaaagcctgcgcggaactttgcgcacctggcgttgtaaaagcacccggtttcggcgaccgcagaaaagccatgcttgaagacatcgccattctcacaggcggcgaagttatttccgaagagatcggccttaaacttgagaacacggatatttcccaacttggcaaggcgaagactgtcaaaatcgacaaagacaatacaactattatcaacggagccggcaagcagaaagagattcaagacaggatcgcgcagattaaatcgcagattgaagataccacaagcgattacgaccgcgagaaattgcaggaacgccttgcgaaactggccggcggtgtcgccgtgatcaatgtcggtgcggctaccgaagttgaattgaaagagaaaaaacaccgcgttgaagacgctctttccgctacccgtgccgctattgaggaaggcattgtccccggcggcgagattgcgttaatccaggccgcgctcgcgcttgataaagcggacactgccggcctttccgacgacgagaaagtcgggtttaaaattgtaaaacgcgctcttgaagagcctctccgccagattgccgaaaacgccggtcttgacggcgcggttatttcggaaagagcgaagaatgagaagaagggaatcggttttgatgccgctaaaatggaatgggttgacatggtgaaagccggtatcatagacccggcgaaagtaacacgctccgcgcttcaaaacgcggcgtcgattgccagcctgctcctcaccaccgaatgcgccatcacggacatccctgagaagaaggaagctccggctatgcctcccggcggaatgggcgggatgggcggaatggatactaacaaaactgctgccagtttgnttttttag

SEQ ID NO: 5352 - protein, 296 aa, Unknown
  Obtained from environmental sample
  DOMAIN (1)...(266): TCP-1/cpn60 chaperonin family
  misc_feature (1)..(296): Xaa is any amino acid
MVVKACAELCAPGVVKAPGFGDRRKAMLEDIAILTGGEVISEEIGLKLENTDISQLGKAKTVKIDKDNTTIINGAGKQKEIQDRIAQIKSQIEDTTSDYDREKLQERLAKLAGGVAVINVGAATEVELKEKKHRVEDALSATRAAIEEGIVPGGEIALIQAALALDKADTAGLSDDEKVGFKIVKRALEEPLRQIAENAGLDGAVISERAKNEKKGIGFDAAKMEWVDMVKAGIIDPAKVTRSALQNAASIASLLLTTECAITDIPEKKEAPAMPPGGMGGMGGMDTNKTAASLXF

SEQ ID NO: 5353 - DNA, 411 bp, Unknown
  Obtained from environmental sample
  misc_feature (1)..(411): n is a, c, g, or t
atgataccggctttcaccatgtcaacccattccattttagcggcatcaaaaccgattcccttcttctcattcttcgctctttccgaaataaccgcgccgtcaagaccggcgttttcggcaatctggcggagaggctcttcaagagcgcgttttacaattttaaacccgactttctcgtcgtcggaaaggccggcagtgtccgctttatcaagcgcgagcgcggcctggattaacgcaatctcgccgccggggacaatgccttcctcaatagcggcacgggtagcggaaagagcgtcttcaacgcggtgttttttctctttcaattcaacttcggtagccgcaccgacattgatcacggcgacaccgccggccagtttcgcaaggcgttcctgcaatttctcgcggtcgtaa

SEQ ID NO: 5354 - protein, 136 aa, Unknown
  Obtained from environmental sample
  SIGNAL (1)...(28)
  misc_feature (1)..(136): Xaa is any amino acid
MIPAFTMSTHSILAASKPIPFFSFFALSEITAPSRPAFSAIWRRGSSRARFTILNPTFSSSERPAVSALSSASAAWINAISPPGTMPSSIAARVAERASSTRCFFSFNSTSVAAPTLITATPPASFARRSCNFSRS

SEQ ID NO: 5355 - DNA, 921 bp, Unknown
  Obtained from environmental sample
  misc_feature (1)..(921): n is a, c, g, or t
atgaaggattttgacaaacaagccctggccgagagacagcataaagacactatgaaacgtgaaaaagaatacagggaccgcatacttccggttcttcaaagcactttttccgcggatcgtgtaagggacctcagcataaaatntgatataggttataatcaggaaacttataacagaaaagatattcttcctaccatgataaaggaaaggactccgggtattccttatgacgattctgaaagagtcatagaaattcctcttagtgagtctaaatcaactacagattggaaaggaacgggatataacccggaagggccttccggcgttgaagggcaaacagcccctgcttttaaggacatgagtaatctatacggcgagatgaatcaaaaaacagagacaacaaactatgaatttggttatcttaatactgaaggaacaagaagcccgtcgtcgacagatcgcgtaactgtttcagtcaatatagacggaacgtggaagatgaaatacgacgaaaagaaaaatccgataattttaccggataatactctggaacgcgagtatacgccggttccgaaagaagttctggacgctgctacattaaacgtccaaaacgctataggttacgacgcaaaaagaggggattccgttatagtaactaacatccaggttgaccgcactgaacaattcgcaaaggaagacgccgcttacttcaggaagaaacagatgcagactacggtcatcgtcttcctttcaggtttgacattattgttatttggatttatattattcaggatgatctcccgcgagatggagagacgcagaaggcttgcggaagaagagcgggcaagacgggaacagatgctccgcgagagcatgctgcaggaagccgatcaggaagggacggaactcgtgccgatctga

SEQ ID NO: 5356 - protein, 306 aa, Unknown
  Obtained from environmental sample
  DOMAIN (32)...(223): Flagellar M-ring protein C-terminal
  misc_feature (1)..(306): Xaa is any amino acid
MKDFDKQALAERQHKDTMKREKEYRDRILPVLQSTFSADRVRDLSIKXDIGYNQETYNRKDILPTMIKERTPGIPYDDSERVIEIPLSESKSTTDWKGTGYNPEGPSGVEGQTAPAFKDMSNLYGEMNQKTETTNYEFGYLNTEGTRSPSSTDRVTVSVNIDGTWKMKYDEKKNPIILPDNTLEREYTPVPKEVLDAATLNVQNAIGYDAKRGDSVIVTNIQVDRTEQFAKEDAAYFRKKQMQTTVIVFLSGLTLLLFGFILFRMISREMERRRRLAEEERARREQMLRESMLQEADQEGTELVPI

SEQ ID NO: 5357 - DNA, 879 bp, Unknown
  Obtained from environmental sample
  misc_feature (1)..(879): n is a, c, g, or t
atggtatcttatgtattcaacggcagcgaccgctctgtcgcgcttgatacaaggcaaaaaattcttgacgccataagcgagcttgaatacaggccgaataaattcgcccaggctttgagcctgggcggtaagagtgttttagcggaccagaatatcggcatcgtgctgtgcaatgccggaatatttctgcgtccgtattacgcggagatcctggcgggaattcatcaggcggcccatgaaaagaaatttcacatacggtttatacgtttttttgatgaattaaaagatcctgttctgtttacccagctcattaattcagaagaaatatgcggccttctgctgctcgcccttgatcaatgcatgaaaaccaggaatgacaatcagcttgttgaacgtatacaggcgcagatagatcagatagtctgtgtggattgtcagataatggatctgtcctccgtgtcatttgacaggcaggcggcggctttacaggctgtacgttatctttttagccagggcttttacgacatcgcgtatttaggcgaatcggatcaacgggttaccgggtttaaacaggcttacctggaaaaaggggaaaatatatcgggactttacattgactccgcggcggatatggcgtcgggactcaaagccgtacaaaaactgcacaaaattcggggcgccctgcccagagccatctgcgccggttccgacgaagtagccgttggaattctctcctatctgcacgaacagaaaattgccgtgcccggagaaaccgcgctaatcagtattgataatattgaaatcgccgaatacgccaatccccagcttaccagtataaacgtccagaaacaggctatgggttaccgcgccgggaaatga

SEQ ID NO: 5358 - protein, 292 aa, Unknown
  Obtained from environmental sample
  DOMAIN (49)...(291): Periplasmic binding proteins and sugar binding domain of the LacI family
  misc_feature (1)..(292): Xaa is any amino acid
MVSYVFNGSDRSVALDTRQKILDAISELEYRPNKFAQALSLGGKSVLADQNIGIVLCNAGIFLRPYYAEILAGIHQAAHEKKFHIRFIRFFDELKDPVLFTQLINSEEICGLLLLALDQCMKTRNDNQLVERIQAQIDQIVCVDCQIMDLSSVSFDRQAAALQAVRYLFSQGFYDIAYLGESDQRVTGFKQAYLEKGENISGLYIDSAADMASGLKAVQKLHKIRGALPRAICAGSDEVAVGILSYLHEQKIAVPGETALISIDNIEIAEYANPQLTSINVQKQAMGYRAGK

SEQ ID NO: 5359 - DNA, 822 bp, Unknown
  Obtained from environmental sample
  misc_feature (1)..(822): n is a, c, g, or t
atgatgatgggagaaaattatactgttgtaaaacctgaaaaaaaacatgaaaaaaacaaaactgacggcgaatccgttattatttttgacaatgtcaccgtaaaaagaagagggcagaagcggccgttactcgataatatatcgtttcaggcaaaaaaaggcgaaattcttggatttgccggcgtcggcgggaacggacttggcgtaatagaagcagtcctgggaggttttcttcatcctgcaaacggaaaaatatttcacaacggcggagatattaccgctcttgggatacacgccctgcgtaaacaggggctggcgtatgttcccgccgacagactgaatgtcggaagcgcaagggacgcattaatagaggaaaatttaattataaacagaaaagatgaattttcaaaaaaaatgataataaataaaaaggcagtaagggaattttcagataaacttgcgaaaagttataatatagagggcgccagggtaaatgaaaaagcggcttttctttccggcggcaacctgcaaaaattaatacttgcgcgtgaaataaacctgttaagggattatattgttttttcagaaccgacatgggggctggatattgcctcaagtaatttcataatgaatgaaattctggcattacggggaagggacgcggcaattattattatttcgacaaaccttgacgaaattatttccctttcagatcgtatagcagttatgtacagaggaaaaatcgccggaatttttgaaaatacggacgcgtcaataaaggaaaagcgggtattacatgcagggacttggaataaaagatga

SEQ ID NO: 5360 - protein, 273 aa, Unknown
  Obtained from environmental sample
  DOMAIN (54)...(246): ABC transporter
  misc_feature (1)..(273): Xaa is any amino acid
MMMGENYTVVKPEKKHEKNKTDGESVIIFDNVTVKRRGQKRPLLDNISFQAKKGEILGFAGVGGNGLGVIEAVLGGFLHPANGKIFHNGGDITALGIHALRKQGLAYVPADRLNVGSARDALIEENLIINRKDEFSKKMIINKKAVREFSDKLAKSYNIEGARVNEKAAFLSGGNLQKLILAREINLLRDYIVFSEPTWGLDIASSNFIMNEILALRGRDAAIIIISTNLDEIISLSDRIAVMYRGKIAGIFENTDASIKEKRVLHAGTWNKR

SEQ ID NO: 5361 - DNA, 807 bp, Unknown
  Obtained from environmental sample
  misc_feature (1)..(807): n is a, c, g, or t
ttgggaaagtattatctttacaccgccgttgccattactgattctacccgaagatttgagggcgtcnttcgcttttccggtttgataccaggcttttttacccgcctgttaagttcaactatcccttttcttgttttgggttttttgattattttgggaatttgcctaagcctgtatcatttcacaaggtaccagtcacacttggttcaggaaaaacttaacacggaactggaaaagaaaaccgccgagcttaaactaatagctgaaaaagccgaagctgaaacccgccaccgcgaggtgatcttaaacagcatgtttgacggtgtactaaccctggacagcaaattaaatattatccatgcaaaccagcggctttgctccctgtttgaccagaatggggactaccaaaatatgtcccttgtcgaattcagccattccgccgaattggaaaaagcggctgacatagttctttcaaccgggcagccttatgaatttacctttaagcgttataacggcaaacttcagcaatttcagggctttgccgccccgcttgatacaggcccgcataccgcgcccggcataataatggtgttaggcgacattagccgtcttgtcaagcttgagcagattcgcaaggattttgccgccaatgtctcccatgaactgcggacgcccattcaggtgatacaagggtttgccgaaaacatccttaactcgcctgtcgatgaatataagcaaattctccattttgccggcattatcagaaaaaacgccagagcgatggacaatcttacaagcgatctgtaa

SEQ ID NO: 5362 - protein, 268 aa, Unknown
  Obtained from environmental sample
  DOMAIN (210)...(268): His Kinase A (phosphoacceptor) domain
  misc_feature (1)..(268): Xaa is any amino acid
MGKYYLYTAVAITDSTRRFEGVXRFSGLIPGFFTRLLSSTIPFLVLGFLIILGICLSLYHFTRYQSHLVQEKLNTELEKKTAELKLIAEKAEAETRHREVILNSMFDGVLTLDSKLNIIHANQRLCSLFDQNGDYQNMSLVEFSHSAELEKAADIVLSTGQPYEFTFKRYNGKLQQFQGFAAPLDTGPHTAPGIIMVLGDISRLVKLEQIRKDFAANVSHELRTPIQVIQGFAENILNSPVDEYKQILHFAGIIRKNARAMDNLTSDL

SEQ ID NO: 5363 - DNA, 429 bp, Unknown
  Obtained from environmental sample
  misc_feature (1)..(429): n is a, c, g, or t
ttggcggatattatttcctcgttgcctgcctttgttactacggaaactatttcaaatgacgccatactcaatgtaaaaactatggatcacggaatattaaaaggaaaataccaaaaaattttcacgcgggaatgggaagaaaaaaaatcgtttttcatggaaacgtatggtatatcaagctggaatgcgatagcatacaatggaaccgaagaaaagcggggtatttccagctttgccggcgctggccgcggcgggcttaaaatagagttttctgatttgtccggcgagacagtcgcctttatttggatgcggggatcggggacggagcctgttttccgcgtcatggcggacgccgtggggccggataacagccttgagcgaacgcttattgaatggcagcgccgaatgacgcttaaagctgatatatga

SEQ ID NO: 5364 - protein, 142 aa, Unknown
  Obtained from environmental sample
  misc_feature (1)..(142): Xaa is any amino acid
MADIISSLPAFVTTETISNDAILNVKTMDHGILKGKYQKIFTREWEEKKSFFMETYGISSWNAIAYNGTEEKRGISSFAGAGRGGLKIEFSDLSGETVAFIWMRGSGTEPVFRVMADAVGPDNSLERTLIEWQRRMTLKADI

SEQ ID NO: 5365 - DNA, 303 bp, Unknown
  Obtained from environmental sample
  misc_feature (1)..(303): n is a, c, g, or t
atgatggccgggcggcacgcggctgacggcccgaaaggcagggagctcctgtcgaggctgtgccaggccccagatggggtctggctgctcatggacagggcatacgaggggaaagccaccagggagctcgcggagtcgctcggctaccgcccagtcgtccccccgaaaaagaaccgccgcgatccgtgggactacgacgaggagctgtacaagaagcggaacgaagtcgagcgtttttttgcaggtacaagcgcttccggagggtctgcacgcgctacgacaagctcgaccgcatgtttgtga

SEQ ID NO: 5366 - protein, 100 aa, Unknown
  Obtained from environmental sample
  misc_feature (1)..(100): Xaa is any amino acid
MMAGRHAADGPKGRELLSRLCQAPDGVWLLMDRAYEGKATRELAESLGYRPVVPPKKNRRDPWDYDEELYKKRNEVERFFAGTSASGGSARATTSSTACL

SEQ ID NO: 5367 - DNA, 852 bp, Unknown
  Obtained from environmental sample
  misc_feature (1)..(852): n is a, c, g, or t
ttgcccgattgtgacatcaagaaaaaaacaaaacaccatagaagggatcttatctacggggagagtatcgcctcaaaaaagctcttttacagcgaaaagatcaaaggccgtatcggcgagttgacggaaatgctgcgcgaggaaaatttttcgggtatccggaaacgccttgaggaaagcgggatgcgaacgggatttgcctgtattttttcaggcccgccagggacaggaaaaaccgaaaccgcttatcagatagcccgcgaaacaggcagggatataatgcttgttgatatagcgaataccaaaagcatgtggtttggtgaaagcgaaaagcgcattaaggcggttttcgatcgttacaggggaattgtgaaaaacaacggccttgttcccatactcctctttaacgaggccgacgccgtttttggcaaacgcagagaactggcggaatcccgcagtggcccggatcagacagaaaacgctatacaaaacatcatcctgcaagaactggaaaacttaaacgggattcttatcgccactaccaacatgacagtgaactttgacaaagcttttgagcgccgcttcatttacaaaataaattttgaaaagccagaccttgagtcgaaaagaatgatgtggcaaagctttattcccgctcttactgattctgacgccgagaacctcgcggtaaaattcgatttttcaggcggtcagatagaaaacattgcccgaaagagtgcggtttcccttattttaaaaggagccgctccggatatatcctcccttgaaactttttgcagggaagagtcgtttgaaaaaaccgccagcggaataggctttcgtgcttgctag

SEQ ID NO: 5368 - protein, 283 aa, Unknown
  Obtained from environmental sample
  DOMAIN (67)...(252): ATPase family associated with various cellular activities (AAA)
  misc_feature (1)..(283): Xaa is any amino acid
MPDCDIKKKTKHHRRDLIYGESIASKKLFYSEKIKGRIGELTEMLREENFSGIRKRLEESGMRTGFACIFSGPPGTGKTETAYQIARETGRDIMLVDIANTKSMWFGESEKRIKAVFDRYRGIVKNNGLVPILLFNEADAVFGKRRELAESRSGPDQTENAIQNIILQELENLNGILIATTNMTVNFDKAFERRFIYKINFEKPDLESKRMMWQSFIPALTDSDAENLAVKFDFSGGQIENIARKSAVSLILKGAAPDISSLETFCREESFEKTASGIGFRAC

SEQ ID NO: 5369 - DNA, 816 bp, Unknown
  Obtained from environmental sample
  misc_feature (1)..(816): n is a, c, g, or t
atgtataaaccttatgcaacgccggtttccagggttcaggccgatgtaaaagtgcctgaacccagggttaataaagttttgatttttttccttaaggtaatcggcaggctttatctgttatttttttttggtatcgcgagaataatcctgcggggagacaagaacctctttgacgcgttcaagagggccctggcaggagagagccgctgcattatcgcgttccgccattccaatggcggagaacctcaaattctaggatggtttttccttttcaggcttcgcagtttagctgcccggctgggcgttaaattcaacacccagccccacgcggtctttgtttatggttacgaagtggtccgctggggaggctggatcgcccggtttgtcatgccccatataggggccatgccgatataccattccaaagttgacagacagggaatgacccggatttacaaggcccttatggacggcccctatcccctggcgctggccccggaagggcaggtttcctataccgccgaatcggtacccaggctggaacagggtacttttaggattggttttaatgccgcagacaggctggacgcaaaagacagtaaaatccctgtggaagtcttgcctttggcggttcattttcgttttggttcctggggaaaattaaccctggaaacgcttgtcaagaagatagagaaatataccggtactaccggcggaaaaaacgcaaggaattcatcttactccgcgcgttttgagctctgccgggaatctatcctcaaactaaatgaaaaacggtatggtanttcccacagatga

SEQ ID NO: 5370 - protein, 271 aa, Unknown
  Obtained from environmental sample
  misc_feature (1)..(271): Xaa is any amino acid
MYKPYATPVSRVQADVKVPEPRVNKVLIFFLKVIGRLYLLFFFGIARIILRGDKNLFDAFKRALAGESRCIIAFRHSNGGEPQILGWFFLFRLRSLAARLGVKFNTQPHAVFVYGYEVVRWGGWIARFVMPHIGAMPIYHSKVDRQGMTRIYKALMDGPYPLALAPEGQVSYTAESVPRLEQGTFRIGFNAADRLDAKDSKIPVEVLPLAVHFRFGSWGKLTLETLVKKIEKYTGTTGGKNARNSSYSARFELCRESILKLNEKRYGXSHR

SEQ ID NO: 5371 - DNA, 378 bp, Unknown
  Obtained from environmental sample
  misc_feature (1)..(378): n is a, c, g, or t
atggaagatatgataaacggtattgatatcaggaggctcctaagcaaaaacttaaagcgtttaaggggtattgcaaaattgtcccaggttaaccttgctgttgaagctgatctgacacataactttattaatgatatagaaagcggaaagaaatggatttccgccgagactcttgaaaaactatcggttgccctgaaagcggaaccgtatcagttttttatttccgaatcaaaatggaacgacaggggagcggaaattttttcgatctacctcgatgatttccatgattcttttgagaagatggtagaagaatacagacatcgttttattaccgaaggcggtaagggcgaaggctgcgaaaggcccgagaaaacataa

SEQ ID NO: 5372 - protein, 125 aa, Unknown
  Obtained from environmental sample
  DOMAIN (18)...(72): Helix-turn-helix
  misc_feature (1)..(125): Xaa is any amino acid
MEDMINGIDIRRLLSKNLKRLRGIAKLSQVNLAVEADLTHNFINDIESGKKWISAETLEKLSVALKAEPYQFFISESKWNDRGAEIFSIYLDDFHDSFEKMVEEYRHRFITEGGKGEGCERPEKT

SEQ ID NO: 5373 - DNA, 600 bp, Unknown
  Obtained from environmental sample
  misc_feature (1)..(600): n is a, c, g, or t
atgctaaacaggaagaaggggctaaagctctccacgcccggctcaaacggctacgacccgtcaaagggcggcataaccacctacccgccgggggccaaggaaaacggcggcatattcctccacaccaatccgtgggtgatgatagccgaggcggtcatgggcgacggcaaccgcgcctacgagtactacaaccagatcaatccggccaccaaaaacgatattatagacgaatacgagtgcgagccatacgtctacccgcagaacatcttgggcgacgagcacccgctcttcggcctcgcccgtaacagctggctgtcgggaacgtcgtcgtggacgtatcaagcggcgagccgctacataatgggtctgcgcccgcagatggacggcctcttggtcgatccgtgcgtcccgtccgattggaagaagttctccgtggagcgcaatttccgcggatgccgctacgtgataaacgttgagaatccgggccgcgtctgcaagggcgtaaaatcaatatccgttgacgggaaagcgcttgacaagcccgtcgtccccgcctttacggacgggaaaacgcacgaagtcaacgtggtgatgggctga

SEQ ID NO: 5374 - protein, 199 aa, Unknown
  Obtained from environmental sample
  misc_feature (1)..(199): Xaa is any amino acid
MLNRKKGLKLSTPGSNGYDPSKGGITTYPPGAKENGGIFLHTNPWVMIAEAVMGDGNRAYEYYNQINPATKNDIIDEYECEPYVYPQNILGDEHPLFGLARNSWLSGTSSWTYQAASRYIMGLRPQMDGLLVDPCVPSDWKKFSVERNFRGCRYVINVENPGRVCKGVKSISVDGKALDKPVVPAFTDGKTHEVNVVMG

SEQ ID NO: 5375 - DNA, 870 bp, Unknown
  Obtained from environmental sample
  misc_feature (1)..(870): n is a, c, g, or t
gtgccgactctggacgagtacgactctttcgagtgccgcgtggggctggggtacaacaagatcgtctccgtcttctacggcgtcaaaaccgagtgcacgatcttcatcccgcaggacgctcaggtcgagatccgcgacatccgcgtgaccaacgtctccggttcgcccctcgaaatagacgttattccggtgctcgaatacacgcacccggacgcggtcaagcagttcacgaacgccgactgggtcccgcagaccatgcagtcgcgctgcttcgccaacagcgacggggtgcggacgctcgtccagtacccgttcatgttccgcgacataaagatcaattacttcacctccaacgccgccgcctcatccttcgagaccgaccgtagggtgtttctgggcgacaacgagtacggcacgtgggccgcgccgtgcgcgttaaaggccgacgaactcggcaacaacgaggcccacaggggcgacaacatcgccgcgctgatgcaccgcttgggcgcgctcaaaccggacgagagcaggcggatcatcacccagctgggccagaaggacagcttggccgtggcccagcgggagatagagcgtttccgcaacccggacgaggtggacaaggccttcaactcgctgaaggcgttttgggagaagtacctgacggccttgcaggtggacacgcccgatccggcgttcaacagcatggtcaacgttcacaatccgcgccagtgcttcaccacctattattggtcgcgctacttgtcatactaccaactcggcatgggcacgcggggtttgggcttccgcgacagctctcaggacgtgatgggcgtagtcgcccacatgcctgaacaggcaaggaactga

SEQ ID NO: 5376 - protein, 289 aa, Unknown
  Obtained from environmental sample
  DOMAIN (1)...(88): Glycosyltransferase family 36
  misc_feature (1)..(289): Xaa is any amino acid
MPTLDEYDSFECRVGLGYNKIVSVFYGVKTECTIFIPQDAQVEIRDIRVTNVSGSPLEIDVIPVLEYTHPDAVKQFTNADWVPQTMQSRCFANSDGVRTLVQYPFMFRDIKINYFTSNAAASSFETDRRVFLGDNEYGTWAAPCALKADELGNNEAHRGDNIAALMHRLGALKPDESRRIITQLGQKDSLAVAQREIERFRNPDEVDKAFNSLKAFWEKYLTALQVDTPDPAFNSMVNVHNPRQCFTTYYWSRYLSYYQLGMGTRGLGFRDSSQDVMGVVAHMPEQARN

SEQ ID NO: 5377 - DNA, 492 bp, Unknown
  Obtained from environmental sample
  misc_feature (1)..(492): n is a, c, g, or t
atgaatgacggcgagattatcattcacggcagcgcgggcgacgcgctcggctacgccatgcggggcgggaaaatatttgtccgcgacaacgcgggatacagagtcggcattcacatgaaagaatacaaggaaaaaaaaccggtaatcgtcatcggcggcaaggcgggcagctttttgggcgaatacctcgccggcgggatcattatagtgctgggcataggctgccatcacgaggtccccgtctggtattttacgggaaccggaatgcacggcggaaaaatctttgtcagaaccgacaaagaactttcttcgcttccggcgcaggtcgttgaggatgtagccaatgataatgatctgagtgaaattgcgccgtatgtcggcgagtttgcgggttattttggcatggatgcccagcagcttctgaaagacagattctatgtgctgaagcctaacgcgagaaacccgtataagcagttgtatacggcgaattaa

SEQ ID NO: 5378 - protein, 163 aa, Unknown
  Obtained from environmental sample
  DOMAIN (1)...(133): GXGXG motif
  misc_feature (1)..(163): Xaa is any amino acid
MNDGEIIIHGSAGDALGYAMRGGKIFVRDNAGYRVGIHMKEYKEKKPVIVIGGKAGSFLGEYLAGGIIIVLGIGCHHEVPVWYFTGTGMHGGKIFVRTDKELSSLPAQVVEDVANDNDLSEIAPYVGEFAGYFGMDAQQLLKDRFYVLKPNARNPYKQLYTAN

SEQ ID NO: 5379 - DNA, 582 bp, Unknown
  Obtained from environmental sample
  misc_feature (1)..(582): n is a, c, g, or t
atgggaaatgcacagcaagacgaaattatctttattccaacagagataaagcaggcggcggaggctgtaaaaaaagactcagaatttattgatatttatattgatgttacaaatgaaaacagcatatcagataacttcaatgttcgtaccggtataaatgagcaggtaatacgcgatttatatgaagcgaatgtaacccgtccgatggcgatgctggaagcgtttctgcccttgctggaagccggcagcggcaagcggctgtgttacctgacatcagcctcggcgagcattaatgagacgcaggctgtcgacggacttggttacaaaatggcaaaagccgcgcttcacaacttcttacagataacccgtaacgcgcttgcgcccaaaggctacacaatacgcgccttcgacccctgccttgcagctacttcccgcgagcaggaagttcccgcgccactttcagcgcaagccgccctcaattacttcacccgccggcgcggcatggaacgcgatgaccccaaccgcgacgatgaaggaaacctggtcttccgcgacgcctggggcagacagcactcctggtaa

SEQ ID NO: 5380 - protein, 193 aa, Unknown
  Obtained from environmental sample
  misc_feature (1)..(193): Xaa is any amino acid
MGNAQQDEIIFIPTEIKQAAEAVKKDSEFIDIYIDVTNENSISDNFNVRTGINEQVIRDLYEANVTRPMAMLEAFLPLLEAGSGKRLCYLTSASASINETQAVDGLGYKMAKAALHNFLQITRNALAPKGYTIRAFDPCLAATSREQEVPAPLSAQAALNYFTRRRGMERDDPNRDDEGNLVFRDAWGRQHSW

SEQ ID NO: 5381 - DNA, 942 bp, Unknown
  Obtained from environmental sample
  misc_feature (1)..(942): n is a, c, g, or t
atggataaaaccaaagacccaaccgaaaccgaagacggagaggaagaaagaatttgcagaaatgacccaacacataaagaaactaacgctatagcagcgctcaatcatacgcacgactgggaagaagaatggcaaataacaactccggcaacttgtatggtaaaaggtgaaaaatttaggctttgtaagttgaacgcagagcataaagatatagaagacattgaaatagacccaaacgcacatgattggggcaactggatagaaacaactccggcaagttatacagcggcaggcatagaaacaaaaacttgtaaccatgactcatcacatacagaaacacgccccatacctcaaacaccactagtcataccaagcgctagtaattatttattggcacagttacttgacagccttcctgacaacaatccagacaacccatataaaataaaattgagccagagtgaaatcacttatcacacaactggaggaaacatggatgaaatactaagtagtacaaaatacgtcagtcttgatatttcagacagtagttttagttctgaaaatgtcagttatggcgcttttcaaaattgtaccagtcttaccagcgtaactttaaacaactgtagctttggtgggagtggcacttttcgaggttgcaccagtcttacaagcgtaaccgtaggaaacgacgttaccagcattgtgggtggcactttttggggttgtacaagccttatcagcgtaactataggaaacgacgttaccagcattttgggtagcgcttttagagaatgcacaagccttacaaacataacaataccaaacaacgttaccagctttgggggtatagtttttacaggttgtaccagccctaccagcgtaatatttgcaacaggaagcaacataccagacgctaattttggagatcgtgttttttcttga

SEQ ID NO: 5382 - protein, 313 aa, Unknown
  Obtained from environmental sample
  misc_feature (1)..(313): Xaa is any amino acid
MDKTKDPTETEDGEEERICRNDPTHKETNAIAALNHTHDWEEEWQITTPATCMVKGEKFRLCKLNAEHKDIEDIEIDPNAHDWGNWIETTPASYTAAGIETKTCNHDSSHTETRPIPQTPLVIPSASNYLLAQLLDSLPDNNPDNPYKIKLSQSEITYHTTGGNMDEILSSTKYVSLDISDSSFSSENVSYGAFQNCTSLTSVTLNNCSFGGSGTFRGCTSLTSVTVGNDVTSIVGGTFWGCTSLISVTIGNDVTSILGSAFRECTSLTNITIPNNVTSFGGIVFTGCTSPTSVIFATGSNIPDANFGDRVFS

SEQ ID NO: 5383 - DNA, 774 bp, Unknown
  Obtained from environmental sample
  misc_feature (1)..(774): n is a, c, g, or t
gtgagcgcggagaacaggcaaggcgaagagcaaagcctccgcttgcaggtttaccttgcccatgccggcgtcgcgtccagaagggccgccgagaagatcatcacggagggcagggtaagcgtgaacggcgttgttatcagcgaacagggatgcaaagtttctcccggcgatatagtgctgctggacggaaaaccggtacagaccgaaaatcggctcgtttaccttgcccttaacaaaccgccgggctatatttgcagcagctccgacccgcaaggacgtccccttgccattgatcttctgcctgatgaaattaaagaaagactgtacaatgtaggcaggcttgattttatgtcctgcggccttattttttttaccaatgacggcgagtttgcggcccggctgggtcatccaagagccggcattgagaaggaataccttgtggaagctacaggccatatccccgacgctctcatcgacgcttttgaaaaagggataagcatagaaggagagtattataaggccctggctgttgagaggcttggttccagggccgtaagggtagtgctggcggagggcaaaaaccgggaaatccgccgggtattttcccatttccatctgcaccccttccgcctgcgccgcacaagaataggctccgtaaaactggatgatttagaggaaggggaatcgagagagttgaaaaaatttgaaattgaagcgttaaccaaaagaagagagaagaaggaagagagaaaaaaggaaaatatgacatggtaa

SEQ ID NO: 5384 - protein, 257 aa, Unknown
  Obtained from environmental sample
  DOMAIN (73)...(203): RNA pseudouridylate synthase
  misc_feature (1)..(257): Xaa is any amino acid
MSAENRQGEEQSLRLQVYLAHAGVASRRAAEKIITEGRVSVNGVVISEQGCKVSPGDIVLLDGKPVQTENRLVYLALNKPPGYICSSSDPQGRPLAIDLLPDEIKERLYNVGRLDFMSCGLIFFTNDGEFAARLGHPRAGIEKEYLVEATGHIPDALIDAFEKGISIEGEYYKALAVERLGSRAVRVVLAEGKNREIRRVFSHFHLHPFRLRRTRIGSVKLDDLEEGESRELKKFEIEALTKRREKKEERKKENMTW

SEQ ID NO: 5385 - DNA, 852 bp, Unknown
  Obtained from environmental sample
  misc_feature (1)..(852): n is a, c, g, or t
atggacaaattttcaatactcagggaaaaattcggctactcctctttccgtcccgggcaggaagaagtgatcgacgctattcttgccggaacggacgcgcttgctgtgatgcccacgggagcgggaaaatccctctgctaccagataccggcccttttgcttgagggaatgacaatcgttatctcgccgcttatttccctgatgaaggatcaggtaagcgcgcttaaagaagcgggatgcggcgcggcctttctgaacagctctttaagcggcagggaatacgcgcagacgatggatgaaataacaaacggcgaaattaaactgctctacatcgcgcctgaacgtttacaaagaacggagcttcccgaactcgcggttaacagcgttccgcttgtggttgttgacgaggcacattgcgtgtcacagtgggggcatgatttcagaacaagttatctgcaaatagcggattttatcagaggcgttaagcctcggcctgcggtcgcggcttttacagcgaccgctaccgttaacgtaagggaggatatccgcaaattacttgctctgcgcgatcctctttgcgttaataccggtttcgacaggccgaatctttactttgaagtacaaaaaccggaagacaaaaaaaccgcgcttttggaatgtctttccgaacgaaaagaaacaagcggcatcatttactgcgccacgagaaaaaccgttgatgaaacctgccggtttctactaagccgcggctttaacgccgcccgttatcacgccggccttagcgacgaggagcgcagaaaaaatcaggatgattttatttacgaccgcctcgtgccgctcgtgccaatctga

SEQ ID NO: 5386 - protein, 283 aa, Unknown
  Obtained from environmental sample
  DOMAIN (13)...(176): Type III restriction enzyme, res subunit
  misc_feature (1)..(283): Xaa is any amino acid
MDKFSILREKFGYSSFRPGQEEVIDAILAGTDALAVMPTGAGKSLCYQIPALLLEGMTIVISPLISLMKDQVSALKEAGCGAAFLNSSLSGREYAQTMDEITNGEIKLLYIAPERLQRTELPELAVNSVPLVVVDEAHCVSQWGHDFRTSYLQIADFIRGVKPRPAVAAFTATATVNVREDIRKLLALRDPLCVNTGFDRPNLYFEVQKPEDKKTALLECLSERKETSGIIYCATRKTVDETCRFLLSRGFNAARYHAGLSDEERRKNQDDFIYDRLVPLVPI

SEQ ID NO: 5387 - DNA, 498 bp, Unknown
  Obtained from environmental sample
  misc_feature (1)..(498): n is a, c, g, or t
gtgcaaaatgtttattgccttaagcgtatcggtcatatttttcgcgttgattcccgttatggcatcaagttcaaaccggtttggcgtaattatatccgcaagaggtataagctcttttttgaaaataccggggatatccggttttacataaaaaccgcggccgacgtcgcccattacaggatcgcaggcgtaaatggcatcaggcgatttgctgcgcacctttttgacagcgtcgacaattgccatagcgacggaagcgtcgcccagatagccggaaagaaccgcctcgcagcggacgagcacgtccctttcctcaagccccgtaacaagatccgctgtaagctcggctcccagtattttgcctttccacgcgccgtatcctgtgtgattagaaaactcaaccgtgttaatcgcccatacttcatgtccaagacgctgcatcggaaaaacagccgccgtatttccggcatagccgaaaaccacatgagattgaattga

SEQ ID NO: 5388 - protein, 165 aa, Unknown
  Obtained from environmental sample
  misc_feature (1)..(165): Xaa is any amino acid
MQNVYCLKRIGHIFRVDSRYGIKFKPVWRNYIRKRYKLFFENTGDIRFYIKTAADVAHYRIAGVNGIRRFAAHLFDSVDNCHSDGSVAQIAGKNRLAADEHVPFLKPRNKIRCKLGSQYFAFPRAVSCVIRKLNRVNRPYFMSKTLHRKNSRRISGIAENHMRLN

SEQ ID NO: 5389 - DNA, 333 bp, Unknown
  Obtained from environmental sample
  misc_feature (1)..(333): n is a, c, g, or t
atgaacgtcaattcgcagtacaaagacagcgttttttccctgcttttcagcgatccagatgtgttgcgcgagttatattgcgctctggagaacgtaacgctcccgccggataccccggtaatcatcaacactttgcaaaatgttctgtttatggattccatcaacgatatctcgtttgtgataggcgggcggctggttgtgcttgtggagcaccagtccagcattaatcccaatatgggattacgctttctgatgtacatcgccaagatttacgaatccatgaacgaacgcaaaacgctgtatcaacaaagcgaggcatccccgctgtcataa

SEQ ID NO: 5390 - protein, 110 aa, Unknown
  Obtained from environmental sample
  misc_feature (1)..(110): Xaa is any amino acid
MNVNSQYKDSVFSLLFSDPDVLRELYCALENVTLPPDTPVIINTLQNVLFMDSINDISFVIGGRLVVLVEHQSSINPNMGLRFLMYIAKIYESMNERKTLYQQSEASPLS

SEQ ID NO: 5391 - DNA, 909 bp, Unknown
  Obtained from environmental sample
  misc_feature (1)..(909): n is a, c, g, or t
ttgcgggtaaccgaccgcaacggctgtgcatacgccactacgcagcacatcaagacttccaccaggccgcaggtaaataccgtgggtactacgcctgtgctgtgctacggcgataccacaggcgttgcccgcgtggctatggtaacacctgccacgccctntgcgccatacttctttacgtggtcaaatggcgatacgggaatggttaccaaccgctaccactacggagcgcaccacgtaaccgtaaccgataccaacggctgcaccaccaccacctacttcaacatggcgcagcccgattcgcttcgcgcactgctcatcagtagcaagcagccgcactgctacggctataccgatggtcggctgagcgttacaccgctgggaggtgtaggcggctaccgctacctgtggtcaaccagcgacaccaccccgctgcttgatagcgtaccaatcggcacatacaccgttacgctcaccgatgccaatggctgtatgttccgccgctcgttcaccatagggcaacccgatatgctgctggtagatgccggccccgatataaccatttgccccaacaacagcttcacccttgacggacagagttacgctgcgcattgctggtacaacgattctgccgtgctgtcgcaagcgcgaatgttcaccgtgagcaaggagggtacttactacctacgaactaccgatgcgcggggttgccatgcctatgataccgtgcgcgtaacggtaggcgaaaacgccctgcaggccgagttcctgctcgcgtccaacgctacgttaggcgatacgctggtgcttattgagctgtcgaatatgccgcttgatagcatgcaatggagttacagcagcttgagttttacagcgctgaacggtgatgcgtcaatcgccccgccataa

SEQ ID NO: 5392 - protein, 302 aa, Unknown
  Obtained from environmental sample
  misc_feature (1)..(302): Xaa is any amino acid
MRVTDRNGCAYATTQHIKTSTRPQVNTVGTTPVLCYGDTTGVARVAMVTPATPXAPYFFTWSNGDTGMVTNRYHYGAHHVTVTDTNGCTTTTYFNMAQPDSLRALLISSKQPHCYGYTDGRLSVTPLGGVGGYRYLWSTSDTTPLLDSVPIGTYTVTLTDANGCMFRRSFTIGQPDMLLVDAGPDITICPNNSFTLDGQSYAAHCWYNDSAVLSQARMFTVSKEGTYYLRTTDARGCHAYDTVRVTVGENALQAEFLLASNATLGDTLVLIELSNMPLDSMQWSYSSLSFTALNGDASIAPP

SEQ ID NO: 5393 - DNA, 816 bp, Unknown
  Obtained from environmental sample
  misc_feature (1)..(816): n is a, c, g, or t
atggagctggctgacggtagcattaccttttcccttgcaggtggtaccgctccgtaccgcttgcgtgagcgcgatgttgcttccgtgtggacagccggcgtggtggccacagggcttgccgagggctatcgcacttttgtgttcaccgacagcaacagctgcgtttgccttgatacgctacgtgtatatgttccccagcccgactcactgcaccctgccgccgtgcaggtgcagcacacgctgtgcgatgcggataacggcgctatgcaggtgcacatgcaggggggagttcgtccctacagctacgcttggaaggatggctatggtcacagcgtaggcaccgacagcgccattaacggcttgcagcgtagcggagtgtacaccctgcgcgtaactgaccgcaacggctgtgcgtatgccatcacgcagcacattagcacctccaccaagccacaggtaaataccgtgggtactacgcctgtgttgtgctacggcgataccacaggcgttgcccgtgtagctgcggtaacgtctgctacgccctttgcgccatactcctttacgtggtcaaatggtgatacaggagcggttacctaccgctaccactatggagcgcaccacgtaaccgtagccgataccaacggatgcactaccaccacctacttcaacatggcgcagcccgattcgctgcgtcccgctgccctacaggtgcagcacacgctgtgcgacgtggacaacggcgctatgcaggtgtacatgcaggggggagttcgtccctacagctacgcctggacggacagcttcggcacagcataa

SEQ ID NO: 5394 - protein, 271 aa, Unknown
  Obtained from environmental sample
  misc_feature (1)..(271): Xaa is any amino acid
MELADGSITFSLAGGTAPYRLRERDVASVWTAGVVATGLAEGYRTFVFTDSNSCVCLDTLRVYVPQPDSLHPAAVQVQHTLCDADNGAMQVHMQGGVRPYSYAWKDGYGHSVGTDSAINGLQRSGVYTLRVTDRNGCAYAITQHISTSTKPQVNTVGTTPVLCYGDTTGVARVAAVTSATPFAPYSFTWSNGDTGAVTYRYHYGAHHVTVADTNGCTTTTYFNMAQPDSLRPAALQVQHTLCDVDNGAMQVYMQGGVRPYSYAWTDSFGTA

SEQ ID NO: 5395 - DNA, 879 bp, Unknown
  Obtained from environmental sample
  misc_feature (1)..(879): n is a, c, g, or t
atggccgaggtaggcgggcaaacaaaattgcttgcggcgaccgatgttgcagcgcgcggccttgacatagatggccttgcgatggtgataaactacgatctgccgtctgaagcggagaattatgtacaccgtatcgggcggacggcgagggcgggcaaaaccggcagggcgatcactctggcaagcgagcaggacgtatacgagttgcccgcaatagaacggtatatcggcaagaagctcccttcggagatcgcctcggctgaactccacgccgaagacgcgagcgcggggcagcagatacggactgaagtttacgaagaccgccgcgaggaacgccacgtacacggcaagggagcgaggccccatgttcaaaacaaaggcgggggcagccgccatggaggaaaagttcacgatgactatgactccagaaaacatcaggctgataccggggggaaaaaatcggaacaccagcagcagggtcatccgcaatctgatcgccagagaatgaagagcagggagtcgggagacggcaagtatggccgccatgaaggaaaagcccacgacgactccaggggcaggaagcaggggaaacccctggtcggtgaaaagcatgtcagacagcatgagtcgcaggatctatcccatttgagttttgaagaacggatggccttatacaaacagaaatacaataaaggtgataaacccgcccccgcaaagcagcagccccggcaaatgccggcgcagaagccgcacagccagaagcgccccaaacacgaaaagcaggagacgatacacgcccctgtggagcaaaagcccgagcaggaacctcggcaaatgccggtgaagaaagcatactttcgagattgcttgacaaaataa

SEQ ID NO: 5396 - protein, 292 aa, Unknown
  Obtained from environmental sample
  DOMAIN (1)...(52): Helicase conserved C-terminal domain
  misc_feature (1)..(292): Xaa is any amino acid
MAEVGGQTKLLAATDVAARGLDIDGLAMVINYDLPSEAENYVHRIGRTARAGKTGRAITLASEQDVYELPAIERYIGKKLPSEIASAELHAEDASAGQQIRTEVYEDRREERHVHGKGARPHVQNKGGGSRHGGKVHDDYDSRKHQADTGGKKSEHQQQGHPQSDRQRMKSRESGDGKYGRHEGKAHDDSRGRKQGKPLVGEKHVRQHESQDLSHLSFEERMALYKQKYNKGDKPAPAKQQPRQMPAQKPHSQKRPKHEKQETIHAPVEQKPEQEPRQMPVKKAYFRDCLTK

SEQ ID NO: 5397 - DNA, 861 bp, Unknown
  Obtained from environmental sample
  misc_feature (1)..(861): n is a, c, g, or t
atggcacgggtatctggtgatggcggtgaccgggagccgggcggagataccgaacagcgcgaaaaccggaaaacctacggggagagcgagaaccagcacgggaaaggggtagcgcgtgcaaacataagcgcgctgcatgacgtgttcaaccggtttatactggacgtgggcatacataagtacaccgacagcgagataggagaggcgaaggcgcaaatcgcggcgttgaaggggatagtgggggaacgcccggtgctgatgatgtttgaccggaactacgcgtcgctggaattcgcggatttccttgaaaaatcgggagtaaagtacctaattcggctgcaagaagggaattacgcggcggaacgggccgggatgaaaagcgatgacgaaggaatcgaagtggcctgcacgaagcaccggttagggccgttaaagaagaaatcgcccgagcgagcggcggaacttgagcggcagcaaacggtacggttacggatcgtaaatacagtatttgacagcggggagaaagcggcgtttatgacgaacctgaaggaaggcagcgccgatgaaataaaagagctgtaccggaaacggtggtcgatagagcagaaataccacacgctgaaaaacaagctgaagtttgagagcgtaaccgggaaagcgagcatatacgtggagcaggatttttgggcgcaaatgacggtgtataacattgttcaggatctgataaccgcggcggaacgcggcgctgtggaaaaagcgaaagcgaaagcgtttaagtatgaagtacggataaatgagaacatcgcgatagggctgttcaaggaaaagtttataaagctgacaatagaggatgacgcctga

SEQ ID NO: 5398 - protein, 286 aa, Unknown
  Obtained from environmental sample
  DOMAIN (16)...(237): Transposase DDE domain
  misc_feature (1)..(286): Xaa is any amino acid
MARVSGDGGDREPGGDTEQRENRKTYGESENQHGKGVARANISALHDVFNRFILDVGIHKYTDSEIGEAKAQIAALKGIVGERPVLMMFDRNYASLEFADFLEKSGVKYLIRLQEGNYAAERAGMKSDDEGIEVACTKHRLGPLKKKSPERAAELERQQTVRLRIVNTVFDSGEKAAFMTNLKEGSADEIKELYRKRWSIEQKYHTLKNKLKFESVTGKASIYVEQDFWAQMTVYNIVQDLITAAERGAVEKAKAKAFKYEVRINENIAIGLFKEKFIKLTIEDDA

SEQ ID NO: 5399 - DNA, 603 bp, Unknown
  Obtained from environmental sample
  misc_feature (1)..(603): n is a, c, g, or t
ttggaaaccgaccgacgaaaaattgaacagcgcatacacaaacttgaaaaagaaattgaaggggtatcaaaacagcggcaggtacaacgcaaacaaagggaacgtcaggggctgcccgtctgcgccattgtaggttataccaacgccggcaaatcttcgcttcttaacgcgcttacaggcgcggacgtgccggttgaggacaaactttttgcgacgttagacgccactacgcgccgctttgaaccgtctccaggaaagccagtcctgcttaccgatactgtcggctttataaaacggctcccccactcgcttatcaaagcttttcgttcaactttggaagaagcggctctttcaaatctgctgattcatgtccttgacgcctccgatcccgcaatcgaagaatgttataagacgacaatcggcgtattgtcggaattaggcgcgggcgaaatacctgttatcaccgcattgaataaaacagataaactggatgatgttacgcagatttcggaaaaattccccggcagtatcgcgatttccgttaaaagcgggtttgggttgggggaattaaaacgcagaatagcggattcattacagcgttaa

SEQ ID NO: 5400 - protein, 200 aa, Unknown
  Obtained from environmental sample
  DOMAIN (41)...(161): Miro-like protein
  misc_feature (1)..(200): Xaa is any amino acid
METDRRKIEQRIHKLEKEIEGVSKQRQVQRKQRERQGLPVCAIVGYTNAGKSSLLNALTGADVPVEDKLFATLDATTRRFEPSPGKPVLLTDTVGFIKRLPHSLIKAFRSTLEEAALSNLLIHVLDASDPAIEECYKTTIGVLSELGAGEIPVITALNKTDKLDDVTQISEKFPGSIAISVKSGFGLGELKRRIADSLQR

SEQ ID NO: 5401 - DNA, 420 bp, Unknown
  Obtained from environmental sample
  misc_feature (1)..(420): n is a, c, g, or t
ttgtttatcgacgggcgcgatttggaaaacagcccttgtacgctggggcatcttaagttagttgaagaggcaacaggctaccgccctgaaaaaatagtgttcgcaggcggcgcttccaagagcgtcctctggtcgcagatactaacggacgttctggacattcaggtagatgttcctgtagtgaaggaagccaccgctctgggagccgccatcatggcgggcaaaggcgtagggctgtatacggacgttaaggaagcctcccgtaaactggtaaggatagaaaaaacatttacacctaacaaaagaaacaaggaagtctacgagaccgcgttcgaaaaatggaaagccgcctatgccgctcagcttaagctaagcgacgaaaaagtaaccaaatatatgtggcttgcgccgggaatgtaa

SEQ ID NO: 5402 - protein, 139 aa, Unknown
  Obtained from environmental sample
  misc_feature (1)..(139): Xaa is any amino acid
MFIDGRDLENSPCTLGHLKLVEEATGYRPEKIVFAGGASKSVLWSQILTDVLDIQVDVPVVKEATALGAAIMAGKGVGLYTDVKEASRKLVRIEKTFTPNKRNKEVYETAFEKWKAAYAAQLKLSDEKVTKYMWLAPGM

SEQ ID NO: 5403 - DNA, 387 bp, Unknown
  Obtained from environmental sample
  misc_feature (1)..(387): n is a, c, g, or t
gtggcttgcgccgggaatgtaaaggagcgcctaatgttcatagttgacgagaaagacaaagaataccgttttggggactccggtcccaagtaccttatgcagggtccccggatgaatttcgcgctggtacaattcatgcccggtcaggatttccgcgcccattatcacgaggttatggaagaaaacttttttattcttgagggaaatgttaccatcgtcgtagacgggacggcgcatgaattaagtcccggccagcttatacacattgaacccaatgaggttcattatgttatcaataggtcttccgcccccgtccgcatggtttctactcttgcgccttacaagcaggttgataagattgaggttgataatcctgttattgggtaa

SEQ ID NO: 5404 - protein, 128 aa, Unknown
  Obtained from environmental sample
  DOMAIN (41)...(111): Cupin domain
  misc_feature (1)..(128): Xaa is any amino acid
MACAGNVKERLMFIVDEKDKEYRFGDSGPKYLMQGPRMNFALVQFMPGQDFRAHYHEVMEENFFILEGNVTIVVDGTAHELSPGQLIHIEPNEVHYVINRSSAPVRMVSTLAPYKQVDKIEVDNPVIG

SEQ ID NO: 5405 - DNA, 453 bp, Unknown
  Obtained from environmental sample
  misc_feature (1)..(453): n is a, c, g, or t
ttgccgcgaatgttcgacgaaaaaatgcgcagcaggttcgacgagtgggtatacgtcctgaagaaatccgccgtccgcgacgacttcaaagccgccggaataaaggaagccaaagcgaaattagactatatccgcatgactcccgaacaaagaaaggtatactttaggtacatggacaaccgccgaagcgccgacagcgcgatccagacggcggagggcaaaggagaacgcagaggcgagcgcaaaggcctacggaaaggcatcgagaaaggtctacagcaaggcctacagcaaggcctacagaaaggcagacaggaaggcctacagaaaggtcaggaattggaacgcgccaaactcgtcaagagtatgtacgaaacgggcttaaccgttgcaaaaatcgtaaaaagcacaagactttccgaaaccgctgtcaagcggattttaggcttgtag

SEQ ID NO: 5406 - protein, 150 aa, Unknown
  Obtained from environmental sample
  misc_feature (1)..(150): Xaa is any amino acid
MPRMFDEKMRSRFDEWVYVLKKSAVRDDFKAAGIKEAKAKLDYIRMTPEQRKVYFRYMDNRRSADSAIQTAEGKGERRGERKGLRKGIEKGLQQGLQQGLQKGRQEGLQKGQELERAKLVKSMYETGLTVAKIVKSTRLSETAVKRILGL

SEQ ID NO: 5407 - DNA, 930 bp, Unknown
  Obtained from environmental sample
  misc_feature (1)..(930): n is a, c, g, or t
atgggtcagaattcggcacgagntccagcgntaatcataccgaacagcgttaccagcattgggcatggcgcttttgaggacggtagtagcattaaaagcgtaactgtcggaagtggcgttaccagcaatgtggagaacgcttttaacgaatgcaacgatattgccgagataaaagttgacgccgccaataccgcatacagctcgcaagacggcatattgtacaacaaagccaaaacgcgaattatgttattcccaaaaggtataaccggaaatgtaaccatacccaacggcgttaccagcattgagaatagggcttttttgctttgtaccagaattaccggcataactttacccaacagcgttaccagcatcggagatgaggctttttacggttccggccttaccagcgtaacaatacctgccagcgttaccagcattgggaagttagcttttaccgacactcctcttaccgcaataaatgttgatccaagtaatacctcatacagctcgcaggacggcatattgtacaataaagccaaaactcaaattgtgttagtcccacaaggtataaccggaaatgtaaccttacccaacagcgttaccagcattgggtatggagcttttatacgcagaggcattaccagcataactataccgaacagcgtaaccgccattggggagagcgcttttgacagttcaaggattaccagcgtaaccataccggccagcgttaccagcattgggaagttagcttttgccaattgctacagccttacaagcgtaacgtttcaaggcacgattactggagacaacttaggtgattattacctattccaaggcgacctgcgcgacaagtaccttgccggaggcataggaacgtacacaaggccaagcggcggcgcagtgtggacgaaaagtaacaaaaaatga

SEQ ID NO: 5408 - protein, 309 aa, Unknown
  Obtained from environmental sample
  misc_feature (1)..(309): Xaa is any amino acid
MGQNSARXPAXIIPNSVTSIGHGAFEDGSSIKSVTVGSGVTSNVENAFNECNDIAEIKVDAANTAYSSQDGILYNKAKTRIMLFPKGITGNVTIPNGVTSIENRAFLLCTRITGITLPNSVTSIGDEAFYGSGLTSVTIPASVTSIGKLAFTDTPLTAINVDPSNTSYSSQDGILYNKAKTQIVLVPQGITGNVTLPNSVTSIGYGAFIRRGITSITIPNSVTAIGESAFDSSRITSVTIPASVTSIGKLAFANCYSLTSVTFQGTITGDNLGDYYLFQGDLRDKYLAGGIGTYTRPSGGAVWTKSNKK

SEQ ID NO: 5409 - DNA, 705 bp, Unknown
  Obtained from environmental sample
  misc_feature (1)..(705): n is a, c, g, or t
ttggcggagacggtactgttctgtcagcggccagagcggtatccccngtttggcatcccgatttttcccgtaaatttggggacatttggctttattgcggaagtacatccccttaaatggcgggtggcttttgacaggtggatggcaggggaggaggccgtttcccgccgccttatgcttgatgtatctgtagaaaggggcgggcgtaaaatttttcaggaatgcggccttaacgacgttattgtttcatcttccggcattgcaaaaataataaatctgcgccttttttacagtgaagaaggaatgaaaacagaattaaagctgggttcgtaccgttcggacggtcttattatcgccaccccgaccggttcaaccgcttattcagccgctgttggaggccccgttgttgatcctgaacttgaggcgtttatattaagccccatttgcccttttatgcttacaaatcgccctttggtattgcctgcgatcggaaaggtgattgtggaggtggcggatgaacagcaaagcgggataatattgacattggacggtcaggtcaaggagaaaataaagaaaggtgacaggatcttaattgaaaaggcgccttattcctgctttctgattgcctcctgccgtagcggtttttattcggcgctcaggaaaaaattttcatgggcgggagaaggagaagtccggagcgagtag

SEQ ID NO: 5410 - protein, 234 aa, Unknown
  Obtained from environmental sample
  DOMAIN (4)...(210): ATP-NAD kinase
  misc_feature (1)..(234): Xaa is any amino acid
MAETVLFCQRPERYPXFGIPIFPVNLGTFGFIAEVHPLKWRVAFDRWMAGEEAVSRRLMLDVSVERGGRKIFQECGLNDVIVSSSGIAKIINLRLFYSEEGMKTELKLGSYRSDGLIIATPTGSTAYSAAVGGPVVDPELEAFILSPICPFMLTNRPLVLPAIGKVIVEVADEQQSGIILTLDGQVKEKIKKGDRILIEKAPYSCFLIASCRSGFYSALRKKFSWAGEGEVRSE

SEQ ID NO: 5411 - DNA, 714 bp, Unknown
  Obtained from environmental sample
  misc_feature (1)..(714): n is a, c, g, or t
atgagaatagcaattttttcagacgcctactggcccagggttaacggcgtaacagtatcggtcgactcctattcccgcgccctaatgaaggcagggcacgaggttttggttatttgttcctcttaccccgaaggcatagataccttgtcttcattacagtttgaccgtgaagcggacgaagaaacgccaaaagttgtgagggttccttcgatgcctgccttcgtaacaaaggaagacagacttgcgaaattcacaaaatggcactgggtgttcaggcaggtggaatcgcataatccggagataattcatatcaataccgagtttgttattgccgaaattggtttcctttacgcgcgcgctcataacctgccggcaatttataccttccacacaatgtgggaagattacggcccgaattatcttcccatgcttccaatttttcttgtaaggtttatagtccgaagtattatcaaaacaattctgttccaatcgtatagggtgattgtacctaccgcgcagattgaggaagtggtacataattacaaccatagaataaaaaccttcctgcttcctaccgggattgaaccggagctgtttgatcatactgacgaagaaggggaggtttttagaaaaaaactggaagaatctttcccaaagcttaagggaaagcgaattcttttatttgccggaagaatagtaaaagaaaaaatctga

SEQ ID NO: 5412 - protein, 237 aa, Unknown
  Obtained from environmental sample
  misc_feature (1)..(237): Xaa is any amino acid
MRIAIFSDAYWPRVNGVTVSVDSYSRALMKAGHEVLVICSSYPEGIDTLSSLQFDREADEETPKVVRVPSMPAFVTKEDRLAKFTKWHWVFRQVESHNPEIIHINTEFVIAEIGFLYARAHNLPAIYTFHTMWEDYGPNYLPMLPIFLVRFIVRSIIKTILFQSYRVIVPTAQIEEVVHNYNHRIKTFLLPTGIEPELFDHTDEEGEVFRKKLEESFPKLKGKRILLFAGRIVKEKI

SEQ ID NO: 5413 - DNA, 333 bp, Unknown
  Obtained from environmental sample
  misc_feature (1)..(333): n is a, c, g, or t
atggcgcttatcgctatagcgaaatgtctaaaaaataatgtaaaaagagaaactgattttgtcgcaagatttggtggcgaggaatttgtctgcgttttaccgtttattgaaaaggttgaagcattggaatttgcaaaagcattggtacaaaatgttgaagacatgaaaatactacaccccatgagtttacattcaaaatatgtaacaatcagcgtaggcatggcaagtgccgtaccgaatgataataattctcatgaacaattattggatgaagcggataaagccttatattcagcaaaggaatcaggaaggaatagggttgtaatgaattag

SEQ ID NO: 5414 - protein, 110 aa, Unknown
  Obtained from environmental sample
  DOMAIN (2)...(106): GGDEF domain
  misc_feature (1)..(110): Xaa is any amino acid
MALIAIAKCLKNNVKRETDFVARFGGEEFVCVLPFIEKVEALEFAKALVQNVEDMKILHPMSLHSKYVTISVGMASAVPNDNNSHEQLLDEADKALYSAKESGRNRVVMN

SEQ ID NO: 5415 - DNA, 543 bp, Unknown
  Obtained from environmental sample
  misc_feature (1)..(543): n is a, c, g, or t
atgctactcatggatgaaaagccttatgataaaataactgtctcagatatagccgataaagcgggtgttgcgcggcctactttttaccgtaactatcctgataaagacgaagttattntacaatacctcaataattcatttaatgcggaaataatgagtacggaaaaagttgataaaggcggtaaacctaataatattatccttacttttgatgttacatatttgaataagaaccaaaaaaacctaaaaaaaatattgtccactgctgatgttgaagcccgtatctatcgggaattacaagtatatacattgttactgataaaaaattataaaaaacaactttcagcggaagaatacctgatatgccattataaaatatgctatcagataaccggcagtctaaaagttttatttgactggttcataaataatatgcctatgcctattgaaaaacttgttccgatgcttaatgcaatgaatattcccaaaactgtacaatatagcaatattccgggtgttgaagtgcgtattaaagaggaataa

SEQ ID NO: 5416 - protein, 180 aa, Unknown
  Obtained from environmental sample
  DOMAIN (1)...(42): Bacterial regulatory proteins, tetR family
  misc_feature (1)..(180): Xaa is any amino acid
MLLMDEKPYDKITVSDIADKAGVARPTFYRNYPDKDEVIXQYLNNSFNAEIMSTEKVDKGGKPNNIILTFDVTYLNKNQKNLKKILSTADVEARIYRELQVYTLLLIKNYKKQLSAEEYLICHYKICYQITGSLKVLFDWFINNMPMPIEKLVPMLNAMNIPKTVQYSNIPGVEVRIKEE

SEQ ID NO: 5417 - DNA, 795 bp, Unknown
  Obtained from environmental sample
  misc_feature (1)..(795): n is a, c, g, or t
ttggaacttcaaaataaatttgccgcctccctgaatgaacaggctgtaaaaagcagttttctttacaaccagaccgccgcggatatttacgaacgttccagagtttttgggatactgctggaatccgtcagcggtcttcaagcggtccaatttgtagacagcaacggtataagaatccactactccacttccgcccgcgacttactcagccaaaacagcaattccgcctcttaccgaaattatacagacgacagccgcgccctgccttatgacgacattagcgcaggcccgaatgaaaagacaaaatacattatggatgattccggcgacaggataattttttcgtttccgttttatgactccatggatgtttacaggggaacggctctttttactctttccgtcagagcgcttgccgaaaggcttatcaccgccggatgccttaacccaaccgacgatatttcggttatcaggaacccaaggggtgttgttttcggaagcccgaacacgtcgaaatccgttattttggataatatcgcctctgtttggaacgatagctttcatgaatatatcactcttgacgccgaggacgcgggcgttaaatacgcgctgattaccgtaaaaaccggaaacgatctgtttttcgggcgcataataaatgattcaattttttccattcccgactctatgagttttgtttttaagctttcaatattccttacattattccttaccctgtattttctgacaaattttaagcctcatcccgtaacgctggtgcaaaaccnggattaa

SEQ ID NO: 5418 - protein, 264 aa, Unknown
  Obtained from environmental sample
  misc_feature (1)..(264): Xaa is any amino acid
MELQNKFAASLNEQAVKSSFLYNQTAADIYERSRVFGILLESVSGLQAVQFVDSNGIRIHYSTSARDLLSQNSNSASYRNYTDDSRALPYDDISAGPNEKTKYIMDDSGDRIIFSFPFYDSMDVYRGTALFTLSVRALAERLITAGCLNPTDDISVIRNPRGVVFGSPNTSKSVILDNIASVWNDSFHEYITLDAEDAGVKYALITVKTGNDLFFGRIINDSIFSIPDSMSFVFKLSIFLTLFLTLYFLTNFKPHPVTLVQNXD

SEQ ID NO: 5419 - DNA, 927 bp, Unknown
  Obtained from environmental sample
  misc_feature (1)..(927): n is a, c, g, or t
gtgcatcgcgggatatcgaagccagacagcggacgcatagaattaaacggcgtacccttgttcgattccgagaagaaaatcaacttgccgccgcaggcgcggaacacgggttttatgtttcaagactccgcgctctttcccaatatgacggtacggcaaaacatcatggccggcgcaaagaagaagccgcgtccggagcgtatggccgccgccggagcgttggcggaaacgtttcatatatcgcggcacttagacaaatacccgcacgaactctccggcggcgaaaaacagcgctgcgcgttggcgcggatcatggcgggatcacccgacattctaatgctcgacgaacccttcgccgcgctcgacagccacctccgctgggagttggaattggaactcgcggcggcgtttaggcgcttccaaaaacccgtcctatacgtatcacacaaccgcgacgaagtgtacaggctgtgcggcgacatcgcgatcatcgaccacggcaaaaacgaggcggcgcacgacaaatgggaactcttcgagaatccggcgaccgttcaggcggcgcggctcacaggttgcaagaacatcgtagcggcggaaatcaaagatacgcgggtcttcgtgggcgattggggcattgactttgattgcggcgaaacacgcggcgacgtacgccacgtaggtatacgggcaaacaacattatcccggcatcgacggtggaagcggcctccgatgtcgccgcgtcgttcccgtttgagatagtgaacgagattgaggataccttcacctgtatactgatggtgcgcaaacgcggcacggaattgccgcctatccgctgggagatgcgaaagaaagaccgcgccgcgctacgtgatatgccgcaggaactggcgtttttgcggaaacatattctgcttctgtcgtaa

SEQ ID NO: 5420 - protein, 308 aa, Unknown
  Obtained from environmental sample
  DOMAIN (4)...(167): ABC transporter
  misc_feature (1)..(308): Xaa is any amino acid
MHRGISKPDSGRIELNGVPLFDSEKKINLPPQARNTGFMFQDSALFPNMTVRQNIMAGAKKKPRPERMAAAGALAETFHISRHLDKYPHELSGGEKQRCALARIMAGSPDILMLDEPFAALDSHLRWELELELAAAFRRFQKPVLYVSHNRDEVYRLCGDIAIIDHGKNEAAHDKWELFENPATVQAARLTGCKNIVAAEIKDTRVFVGDWGIDFDCGETRGDVRHVGIRANNIIPASTVEAASDVAASFPFEIVNEIEDTFTCILMVRKRGTELPPIRWEMRKKDRAALRDMPQELAFLRKHILLLS

SEQ ID NO: 5421 - DNA, 975 bp, Unknown
  Obtained from environmental sample
  misc_feature (1)..(975): n is a, c, g, or t
atgtctgacccgacggccgttcttccggagggggaggaagatgccggtttccggctggggcagggtcttgcccgtctgaatatcaccgccgactctcctgtcatgcttctgtataacgcgatgtgccatgaccatctcgggaaagcgcgcatgatgctggccacgcggattctggcgggactggaaaaagccctgggtttcctgcccgatctcaccggggcggggatgatgggcgaccatgtgggcagcccgacaagccaatacatcggcggcgcaacaggggaaaactacgcgatggccctcgcgttcagcgaaaatatccacattgacagcgccatcatgcacggctgccgtccggcttccctgtattataccgtcaccaaagccgacggccccacgatactggagataaaccgcaaaccggcgctggcgtttatagatgaactgctgggcgccggcattacgccggaacaatatccctttttcctgctgttcgggatcaactacggggaacgctggggcgaatatgacgaagataactacgcgagccgcttgtgcctcgggatagaccgggagcgcgggggcattgtcatgttcgagtcggacatggtggaaggaacggaattccagatcatgttccgcaccttcgatctggaatacatgaagcccaagctcgaatcgctctttgaccggctgaacggcagaacacccgtgttcgccatgtatatcgactgtgcgggacgttgcgcgggctatggcggaaccgatctggaggacgcgctggtcttgcaacaggttgtaggggatcgcgttcccgtattgggaatttatacgggcgtggagatagcctccatcgccggacgcccccggggccttgactggaccggcgtattctgcctgttctcgcaagacggcgaggcaaccccgaagaacgccgccgtcccgacaaaaaaaaagcgccaaaactcgccataa

SEQ ID NO: 5422 - protein, 324 aa, Unknown
  Obtained from environmental sample
  DOMAIN (6)...(206): Domain of unknown function (DUF1745)
  misc_feature (1)..(324): Xaa is any amino acid
MSDPTAVLPEGEEDAGFRLGQGLARLNITADSPVMLLYNAMCHDHLGKARMMLATRILAGLEKALGFLPDLTGAGMMGDHVGSPTSQYIGGATGENYAMALAFSENIHIDSAIMHGCRPASLYYTVTKADGPTILEINRKPALAFIDELLGAGITPEQYPFFLLFGINYGERWGEYDEDNYASRLCLGIDRERGGIVMFESDMVEGTEFQIMFRTFDLEYMKPKLESLFDRLNGRTPVFAMYIDCAGRCAGYGGTDLEDALVLQQVVGDRVPVLGIYTGVEIASIAGRPRGLDWTGVFCLFSQDGEATPKNAAVPTKKKRQNSP

SEQ ID NO: 5423 - DNA, 921 bp, Unknown
  Obtained from environmental sample
  misc_feature (1)..(921): n is a, c, g, or t
gtgctatccggcaatatttccgacgcggaattcagccggataaaagcttggctgatcaatccgatagagagccgtgaggctctgctggacaaaccggccacgcttttggagaaatatgcagcgccgcaagacgtggccgtgcttaacggttttatctcgctcacccaatccgccatggaaaagatgcgtgatgatttaggcatagcaatggatttgcccgatttgcaattttgtcaggcgtatttccgcgacgaggaaaaacgcgaccccaccattacggaattgcgcgtgctggatacttactggtctgaccactgccggcatactacatttttaacggaattgaccgatataaaatttgagtctgaaccgctacgcaaaagttatgcggactatcttaaattgcgctccgagttaggccgcgcggggaggccggttacgttaatggatatggcgactatcggcacgcgggcgcttaaagcgcgcggactgctgggcagtctggacgaatccgaggaaataaacgcctgttcggtcaaaataaaagttgatgtggacggacaggagcgcgattggctgttgatgttcaagaatgaaacacacaatcaccccaccgagattgagcctttcggcggcgcggccacctgcctgggcggggcgatacgtgatccgctttccgggcgcgcctatgtgtatcaggctatgcgcttgaccggcgcggcagaccctttacagcacgcaaccctgcccggcaagctgccgcagcgcaaaatctgccgcaccgcggcggcgggatacagttcctacggcaatcaaatcggcttggccaccggccacgttcacgagatatatcatccgggttacgcggccaagcgtatggaaatcggcgcggtatcgctcgtgccgctcggccgattctga

SEQ ID NO: 5424 - protein, 306 aa, Unknown
  Obtained from environmental sample
  misc_feature (1)..(306): Xaa is any amino acid
MLSGNISDAEFSRIKAWLINPIESREALLDKPATLLEKYAAPQDVAVLNGFISLTQSAMEKMRDDLGIAMDLPDLQFCQAYFRDEEKRDPTITELRVLDTYWSDHCRHTTFLTELTDIKFESEPLRKSYADYLKLRSELGRAGRPVTLMDMATIGTRALKARGLLGSLDESEEINACSVKIKVDVDGQERDWLLMFKNETHNHPTEIEPFGGAATCLGGAIRDPLSGRAYVYQAMRLTGAADPLQHATLPGKLPQRKICRTAAAGYSSYGNQIGLATGHVHEIYHPGYAAKRMEIGAVSLVPLGRF

SEQ ID NO: 5425 - DNA, 825 bp, Unknown
  Obtained from environmental sample
  misc_feature (1)..(825): n is a, c, g, or t
atgaacgagattgtgattatagacccgcagaccgtccgtgtgctaaattccatacaggtggcaagttctcaggatgtcgagttaggtgaagacgctcttgctctgttaaacgcgcctcccgatgatattttcagcgatatatnttcggcgcatgaagatgatacaaccgaggaaatattttccgccgagacgcttcaggcttatttgtcggaaaataaaccggaagataatgttaacctttcaggcggcgactggaattttatcattcttaaacttgaaaaaagcaaaaacgctcatttctttatttcgtccttaaacaaaaagctggaaccttacggcgttaccgctgtagactggcgtattgccgcgggaacttccgcgattttattgcttttaattcaggctctgtttaatatcggaatttttcttgtttgtattgccggcgtaataaccgtaattaatattttgttaatcggggttttccgccgtacccgcgaaatcggcacattacgcgcaatcggggcgggcgacttatatattgcgtccctaattcttcaggaaaatcttctgcttacggcctttgccggcgccgcgggaattttcggcggcattttattcataaaatggataaactccctttctttgataattccaaatgagcttatttcttccctgcttggcggaaatgttttaagccttggcttaattccggctattgcggtgtcggccttcattttagcggttatactgggaattgttgtctccatttaccctataaacgttaccgtccgggtggagcctatggaagcggtgcgtaatggttaa

SEQ ID NO: 5426 - protein, 274 aa, Unknown
  Obtained from environmental sample
  DOMAIN (85)...(267): Predicted permease
  misc_feature (1)..(274): Xaa is any amino acid
MNEIVIIDPQTVRVLNSIQVASSQDVELGEDALALLNAPPDDIFSDIXSAHEDDTTEEIFSAETLQAYLSENKPEDNVNLSGGDWNFIILKLEKSKNAHFFISSLNKKLEPYGVTAVDWRIAAGTSAILLLLIQALFNIGIFLVCIAGVITVINILLIGVFRRTREIGTLRAIGAGDLYIASLILQENLLLTAFAGAAGIFGGILFIKWINSLSLIIPNELISSLLGGNVLSLGLIPAIAVSAFILAVILGIVVSIYPINVTVRVEPMEAVRNG

SEQ ID NO: 5427 - DNA, 369 bp, Unknown
  Obtained from environmental sample
  misc_feature (1)..(369): n is a, c, g, or t
atgtgcaaattcggcgcgctctcgatgacagataacaggctccccaagattgattattcaaagtgtaccggctgcggtctttgctcgggcgaatgtcccatggggcttttcaaaactgtcgagaggaaacaaaaaggcgcgatggtgctttgttccaatttaaatcccgtaagaccgactatagcgaaaacttgcaagattgcgtgttttaagtgcgggctttgcgtgaagaattgcccggagcattgcatcagtcttgatacgcttattcctgttgtggatttgagtaagtgcacttcttgcgggacttgcgcacagaagtgtccttgtaaggtgtttaagattattgagaaggatattgtagtgtag

SEQ ID NO: 5428 - protein, 122 aa, Unknown
  Obtained from environmental sample
  DOMAIN (91)...(114): 4Fe-4S binding domain
  misc_feature (1)..(122): Xaa is any amino acid
MCKFGALSMTDNRLPKIDYSKCTGCGLCSGECPMGLFKTVERKQKGAMVLCSNLNPVRPTIAKTCKIACFKCGLCVKNCPEHCISLDTLIPVVDLSKCTSCGTCAQKCPCKVFKIIEKDIVV

SEQ ID NO: 5429 - DNA, 792 bp, Unknown
  Obtained from environmental sample
  misc_feature (1)..(792): n is a, c, g, or t
ttgcagaatttcgccggatttcccgtattttcaaatacaaggcagatttatcttgattcgggagaagcgttctacagtaaagttctggaagaacttgaaaaagcaaaacgttacatttttttggagttttttatcttaaaagaaggcgtaatgcttaattccatacttgatattctggaacgaaaggccgacgacggtcttgatgtaagaataatgtacgatgatttaggatgtatttttaccctgccggataattatcataaaatgctggagcaaaggggaattaaatgttttgtttttaatcccttcagacctattgttacgtcattgcagaacaacagggaccacagaaaaattatttccatagacggcaggatagtgttcacgggcggccttaatcttgcggatgaatatataaatattgtggatcgtttcggccactggaaagacgcggcgataatgcttgagggggacggcgcgtgggctttcacgttgatttttctgcagatgtggaaccttaagccaggggacaaggacaattacgaggcgtttttcccgtggaaagacaacatcattgaacatacggaaaaaggagtcgccgaaggttacgaagaatggggttatgttcagccgtacgccgacagtcccatagaccatgaatttgtangcgagcatgtttatatcaagataattaatcaggcaaaaaagtttgtttacataaatacgccgtatctgatagttgacgacnatctgctctccgccctggacaccgccgcaaaaagcggaagttga

SEQ ID NO: 5430 - protein, 263 aa, Unknown
  Obtained from environmental sample
  DOMAIN (111)...(138): Phospholipase D Active site motif
  misc_feature (1)..(263): Xaa is any amino acid
MQNFAGFPVFSNTRQIYLDSGEAFYSKVLEELEKAKRYIFLEFFILKEGVMLNSILDILERKADDGLDVRIMYDDLGCIFTLPDNYHKMLEQRGIKCFVFNPFRPIVTSLQNNRDHRKIISIDGRIVFTGGLNLADEYINIVDRFGHWKDAAIMLEGDGAWAFTLIFLQMWNLKPGDKDNYEAFFPWKDNIIEHTEKGVAEGYEEWGYVQPYADSPIDHEFVXEHVYIKIINQAKKFVYINTPYLIVDDXLLSALDTAAKSGS

SEQ ID NO: 5431 - DNA, 621 bp, Unknown
  Obtained from environmental sample
  misc_feature (1)..(621): n is a, c, g, or t
ttgctgtacaccgcaatacacgagtacgcccatcatttacacgcctgttcgcgcggaggcactctttcggcgcgcgcgcataattcagagttctgggcaatcttccatgaactgctggaaaaagccgaaaaaaagaagatatatcaggatgtattttcagtatcgcccgaacttttaaaattaacggaagtcatccgtactaaatatcttgccaataacggcgctcttgtaaaagaaatgggaaaacatttattaaaagcccatgatctttgcaccggtatcggagtgcgttttgaggattatgttgacaggatgctgcgtattcccagaactgccgcgaatatggcgataaaaatgtttcagtacgatattactcccgaagtgggcgcggacaatatgcgctttcttgcgggtatccgcaacagtgaagaacgcaaagccgccgagaaagctcttgttaaaggaaaaagccccgataccgtgaaaattcaggttcgcggcaagagtgagcccgagaatccgacagagcgtcttgaaaaagaaaaaacaagacttgaacgcacaattaccagtcttacaaaacggctggaagaagtaaaaaaagaacttgcgcagaaataa

SEQ ID NO: 5432 - protein, 206 aa, Unknown
  Obtained from environmental sample
  misc_feature (1)..(206): Xaa is any amino acid
MLYTAIHEYAHHLHACSRGGTLSARAHNSEFWAIFHELLEKAEKKKIYQDVFSVSPELLKLTEVIRTKYLANNGALVKEMGKHLLKAHDLCTGIGVRFEDYVDRMLRIPRTAANMAIKMFQYDITPEVGADNMRFLAGIRNSEERKAAEKALVKGKSPDTVKIQVRGKSEPENPTERLEKEKTRLERTITSLTKRLEEVKKELAQK

SEQ ID NO: 5433 - DNA, 609 bp, Unknown
  Obtained from environmental sample
  misc_feature (1)..(609): n is a, c, g, or t
atgaaaaagacagttttactagttgttctttttgccgtaattaccgccctcatctatatcggatgcggcgataacagcgtccaaaataagaacccggagatcaccgatcttctcaacttcttcaccggcggtagcgcaagttacaccctaacagtcaacgtaacgccgagcaacagcggctccgtgtcacgcagcccaagcaacacctcttacaaagccggtagccaagttaccgtaaccgccgcggaatcaaacggctataaattcaccggatggtccggtgcgtccaacgacaccaccaccaccgtaaccataactatggacggcaatcagacgctgaccgcaaattttgtttcaacatccgtcacaacgtataccctcacggtcaacgcaacgccaagcggaggcggcaacgtatcacgcgaaccgagtaaaactctttatagcgccggagaacaagttaccgtaaccgctgagactgtagacggctatacttttaccggatggaccggcgcaacaaacgagacaagcgcatccgtaaccataaccatgaacagcgacatgacgctgaacgccaatttccaacagaatacatactcgctctcctag

SEQ ID NO: 5434 - protein, 202 aa, Unknown
  Obtained from environmental sample
  SIGNAL (1)...(21)
  misc_feature (1)..(202): Xaa is any amino acid
MKKTVLLVVLFAVITALIYIGCGDNSVQNKNPEITDLLNFFTGGSASYTLTVNVTPSNSGSVSRSPSNTSYKAGSQVTVTAAESNGYKFTGWSGASNDTTTTVTITMDGNQTLTANFVSTSVTTYTLTVNATPSGGGNVSREPSKTLYSAGEQVTVTAETVDGYTFTGWTGATNETSASVTITMNSDMTLNANFQQNTYSLS

SEQ ID NO: 5435 - DNA, 876 bp, Unknown
  Obtained from environmental sample
  misc_feature (1)..(876): n is a, c, g, or t
ttggtttccaaacaaaaagcggacgcaaaacttttctggaaaaatttaaggcaggcgttttccgagcatcttgccgttgaaggcgttattgaatcgcaggttaaaggcggcttcgacgttaatctcggcgcgggagttcacgcgttccttccggtcagccagtccgacatacaaaaagttgaagctcccgaaaaacttcttaacttaaaatcccgtttctatgtcgaacgcctgtattccgacggaaaaattaacatcgtggtaaacaggcgcaagtgcatggaagaagagcatgacaccaaacgcaaagccttttttgaaaatactcccatcggctccgacattaccggcgttgtaaaaagtttcacttccttcggcgcgtttatagaccttggcggttttgacggcctgcttcacattaacgacatgagctgggggcacgttacgcgccctaaagattatgtgaaaaaaggccaggaaataaaattaaaagttatacgcatagacaataaagaaaaaagaatcaatctttcgcttaagcattacacggacgatccctgggttcattttgaggaaaaataccatgtcaacgacattgtaaagggcaaggttacaaagcttaccgaattcggcgcgtttatcgagcttgaagaaggcatagaaggcctcgcccacatttccgaattttcatggattaagaaaattcaaaaaccgcaggatctgttaaaaagcggcgacgttgtcgagtgcatgatcttgggttacgatcttcaggctggcagggtgtccctcggtttaaacaggttaaggataatccttgggaaacaatcgaggaaaaataccccgtcggcacaagaatttaaacgcaagtggtaa

SEQ ID NO: 5436 - protein, 291 aa, Unknown
  Obtained from environmental sample
  DOMAIN (193)...(267): S1 RNA binding domain
  misc_feature (1)..(291): Xaa is any amino acid
MVSKQKADAKLFWKNLRQAFSEHLAVEGVIESQVKGGFDVNLGAGVHAFLPVSQSDIQKVEAPEKLLNLKSRFYVERLYSDGKINIVVNRRKCMEEEHDTKRKAFFENTPIGSDITGVVKSFTSFGAFIDLGGFDGLLHINDMSWGHVTRPKDYVKKGQEIKLKVIRIDNKEKRINLSLKHYTDDPWVHFEEKYHVNDIVKGKVTKLTEFGAFIELEEGIEGLAHISEFSWIKKIQKPQDLLKSGDVVECMILGYDLQAGRVSLGLNRLRIILGKQSRKNTPSAQEFKRKW

SEQ ID NO: 5437 - DNA, 375 bp, Unknown
  Obtained from environmental sample
  misc_feature (1)..(375): n is a, c, g, or t
atggaccctatttatcatatcaaccaggaacagttccgcctggacctgcccgccttccgggtgggggatacggtggccgtttccgtgcgcatcaaggaaggcgacaaggaacggctccaggtcttcaagggcgtggtcatccgccaccatcggggcaacgccgccgatgccagcttcacggtgcgcaaggtatcctacggcgtcggggtggaacgcatctttcccttgaactcgcccaacctggaccggatcgaagtggtgacccagggccgggtgcggcgggcccgcctctactatctgcgggatcttaagggcaaagccgccaaggtccgggcgcgcaacaagtttttcttggccgacaaggcggctgattaa

SEQ ID NO: 5438 - protein, 124 aa, Unknown
  Obtained from environmental sample
  DOMAIN (1)...(114): Ribosomal protein L19
  misc_feature (1)..(124): Xaa is any amino acid
MDPIYHINQEQFRLDLPAFRVGDTVAVSVRIKEGDKERLQVFKGVVIRHHRGNAADASFTVRKVSYGVGVERIFPLNSPNLDRIEVVTQGRVRRARLYYLRDLKGKAAKVRARNKFFLADKAAD

SEQ ID NO: 5439 - DNA, 402 bp, Unknown
  Obtained from environmental sample
  misc_feature (1)..(402): n is a, c, g, or t
atgttccaccagtggaggggcttggccgtggaccagggcctctctttcgccgacctcaagggcatcctgaccgcctttgccacggccatgttctccccggatacaaaaatccggctccgccccagtttcttccctttcaccgagccttcggccgaggtggatatcgcctgcgtcctctgccgcggccggggctgccggctctgcaagggcacgggctggctggagatactcggcagcggcatggttgatccggccgtttacggtttcgtgggctatgatccggcccggataagcggcttcgccttcggcctgggcattgaacgggtggccatgctgaaatacggactggaagacatacgcatgctctatgagagcgacctgcgattcctgacccagttctga

SEQ ID NO: 5440 - protein, 133 aa, Unknown
  Obtained from environmental sample
  DOMAIN (1)...(133): tRNA synthetases class II core domain (F)
  misc_feature (1)..(133): Xaa is any amino acid
MFHQWRGLAVDQGLSFADLKGILTAFATAMFSPDTKIRLRPSFFPFTEPSAEVDIACVLCRGRGCRLCKGTGWLEILGSGMVDPAVYGFVGYDPARISGFAFGLGIERVAMLKYGLEDIRMLYESDLRFLTQF

SEQ ID NO: 5441 - DNA, 885 bp, Unknown
  Obtained from environmental sample
  misc_feature (1)..(885): n is a, c, g, or t
gtgaagggacagatccgtctggaaaacccaaaaatctggtcccacgaaacgccgcatctctatgtgatgtcagtgagccttttccgggatggacgacacattgaaagttccgccttttgtacgggcttcagaaacattcgcatagagagacgggagcttttaattaacgaaaggccggtgttgattaagggtgttaaccgccacgagcatgatgaaaaaaccggcaagaccctttcaacggaagggatgatgagggacatcacgctccttaaaacgcataacttcaacgcggtgcgtacctgccactaccccgacgatgaacgctggtacgagctctgcgacaggtacggaatatacctgctggacgaggccaatattgagcatcactgtttttacgatcagctttgctgggacactgtctgggcttatgcctacgccaaaaggattcaacggatggttgagcgcgacaagaaccacccttcggtgatcatttggtcgctagggaacgaaagcggagacggcgcgaaccacgatatgggcgcggcctggattcggcgttacgatcctttccggcctgtcagttacgaaggcgcggtcaggctcaagcgtaaccagggccccattggcctggactcccttaaccacagtaaaaacctcacagacatcgtctgccccatgtacccagaaatagaaaccatcacggattttgtgaagaacattgaagatcaccgcccgcttatcatgattgaatattcccacgccatggggaattccaacggctctttgtcggattactggaaagcgattgagagccaccatggattgcagggtggctttatatgggagtggatcgatcacgggcggaagcattttccctcgcgataa

SEQ ID NO: 5442 - protein, 294 aa, Unknown
  Obtained from environmental sample
  DOMAIN (46)...(293): Glycosyl hydrolases family 2, TIM barrel domain
  misc_feature (1)..(294): Xaa is any amino acid
MKGQIRLENPKIWSHETPHLYVMSVSLFRDGRHIESSAFCTGFRNIRIERRELLINERPVLIKGVNRHEHDEKTGKTLSTEGMMRDITLLKTHNFNAVRTCHYPDDERWYELCDRYGIYLLDEANIEHHCFYDQLCWDTVWAYAYAKRIQRMVERDKNHPSVIIWSLGNESGDGANHDMGAAWIRRYDPFRPVSYEGAVRLKRNQGPIGLDSLNHSKNLTDIVCPMYPEIETITDFVKNIEDHRPLIMIEYSHAMGNSNGSLSDYWKAIESHHGLQGGFIWEWIDHGRKHFPSR

SEQ ID NO: 5443 - DNA, 918 bp, Unknown
  Obtained from environmental sample
  misc_feature (1)..(918): n is a, c, g, or t
ttggccgagaggctaccttcatcttacgaaggcttttctgatttttgtgactgcatcgaaaccataaaagacgaattcgacgagatactttcacttcatgcgaagggcaaaccttttacgctaaaaaccagagtggcaatcctccatgcctggggaagcctgcgatcctggaccttgtcgggacacatgcacgagactggcgagcatgacctgatacacatcaatgaagccctttcgggtctcccttttgaaacagtttttatctcttttgaagatatggaaaacggagttccaagcggaatagacctgataatcaatgccggattgaaaggcactgcctggagtggcggcgaaaaatggagaaatgaaaaagttgtggaaagtcttacggcatgggtatataaaggcggcgtctttatcggggtgaacgaaccttcggctattgatggttttgacactgcgttcagaatggcccatgtgctggggctagacatggaaaacgcggggagccattgccacggcaaatggcagtacgctgttgacgaagtaagcggcatcgtcccatgcggggccgatttgggaagcaaaaaagtgcggcttaccgacggcagtgctagggtgcttgcagaaaaaggcggctgtccggcaattacggtaaacagttttggcaacggcaagggcgtttatgtttcttccatgatttccacagaggagagcaggctcgccaataccaggcttttgctaaatatcattctttattccatgggaaaagcccttgagcaagactgtgttacagataaccctaacacagagtgcgcctggttcanggaagccggatgcatggttttgataaacaacagcgctaccccccagcgttccagcgttaaagctggcggacaaaatttcacacagaactag

SEQ ID NO: 5444 - protein, 305 aa, Unknown
  Obtained from environmental sample
  misc_feature (1)..(305): Xaa is any amino acid
MAERLPSSYEGFSDFCDCIETIKDEFDEILSLHAKGKPFTLKTRVAILHAWGSLRSWTLSGHMHETGEHDLIHINEALSGLPFETVFISFEDMENGVPSGIDLIINAGLKGTAWSGGEKWRNEKVVESLTAWVYKGGVFIGVNEPSAIDGFDTAFRMAHVLGLDMENAGSHCHGKWQYAVDEVSGIVPCGADLGSKKVRLTDGSARVLAEKGGCPAITVNSFGNGKGVYVSSMISTEESRLANTRLLLNIILYSMGKALEQDCVTDNPNTECAWFXEAGCMVLINNSATPQRSSVKAGGQNFTQN

SEQ ID NO: 5445 - DNA, 609 bp, Unknown
  Obtained from environmental sample
  misc_feature (1)..(609): n is a, c, g, or t
atgacagaagggctctcgttttcgttaatgttggtctttacagccggcttgctttcgtttctatctccctgcgtgctgcccctgattccctcatacttaagcatactcggcgggcttggtattgataaagaaacaaaagagagcgcaaggttccacctaattttctctgcggctggttttgtctttggcttcagcattgtgtttattacccttggtatcctggtttcaaaaacattttttttaatgggaggcatttctaaatacatccactgggcggcgggaatcatagttattgtcctgggccttaatgtaatttttgatttccttaaattcgtcaactacgaaaagcgcccctttctgcaaaaatggatgaagccaggtatgcggggaacgctcgctgccttcatcgccggcgcagcttttggcacgggttggacgccctgcatcggtcccatccttacgggcgttcttttaatggcggctcagagcggaaagaccgtagcggcggttttttatctggctgtgtattctgcggggcttgccgtaccctttctccttgctgccctgtttatggatttctttatagaacgggggctccactatgcgtaa

SEQ ID NO: 5446 - protein, 202 aa, Unknown
  Obtained from environmental sample
  DOMAIN (12)...(201): Cytochrome C biogenesis protein transmembrane region
  misc_feature (1)..(202): Xaa is any amino acid
MTEGLSFSLMLVFTAGLLSFLSPCVLPLIPSYLSILGGLGIDKETKESARFHLIFSAAGFVFGFSIVFITLGILVSKTFFLMGGISKYIHWAAGIIVIVLGLNVIFDFLKFVNYEKRPFLQKWMKPGMRGTLAAFIAGAAFGTGWTPCIGPILTGVLLMAAQSGKTVAAVFYLAVYSAGLAVPFLLAALFMDFFIERGLHYA

SEQ ID NO: 5447 - DNA, 765 bp, Unknown
  Obtained from environmental sample
  misc_feature (1)..(765): n is a, c, g, or t
atggctactaacccgtatattttatggaaaattcctttgggaattaacgcgggcaactacggcgaaattgagtttattcccggtatttcagtcgttataccgcatgaattctcaaagtggcctttagcagaaataagaaaagggcctgtattggaattcagccaaaatttcggtttcagcaagatagactggattgataatttcagaaacgggctggacgtatctttaattaattcattagacttcaatttttataaactaaaaaacaaaaaaaacccttgggaggataatatatcaatttacggcataggtcattttaaaattacgaattttttcggagtttctgcaaaactgatgtaccgccagtggttcttttccgattacggatacacgatggccggcgacgcgcttcgcggcgttattgacagggaaattttcgcggattgcatgatttccttaaaccttaatttaaatttcagactttttaaattcaagccttccgtttggctgaataagccaaaattgcgcgtctttaactttgagttttttgtttctcctttttttgacgttgccgtatatcacgattcttcatataaaaataattttaatttaaaaaatatcgttcctaccggcgggttggaatttattattttccccgaatttttcagaagtttatttttacgcgtctcgctcggatggaatttaaaaaataggcctaaatataataatatggaaatatacattgggacggattttttcttttaa

SEQ ID NO: 5448 - protein, 254 aa, Unknown
  Obtained from environmental sample
  misc_feature (1)..(254): Xaa is any amino acid
MATNPYILWKIPLGINAGNYGEIEFIPGISVVIPHEFSKWPLAEIRKGPVLEFSQNFGFSKIDWIDNFRNGLDVSLINSLDFNFYKLKNKKNPWEDNISIYGIGHFKITNFFGVSAKLMYRQWFFSDYGYTMAGDALRGVIDREIFADCMISLNLNLNFRLFKFKPSVWLNKPKLRVFNFEFFVSPFFDVAVYHDSSYKNNFNLKNIVPTGGLEFIIFPEFFRSLFLRVSLGWNLKNRPKYNNMEIYIGTDFFF

SEQ ID NO: 5449 - DNA, 807 bp, Unknown
  Obtained from environmental sample
  misc_feature (1)..(807): n is a, c, g, or t
atgtacgccttagccctttatcgtatactcccctcaatataccgtatgcttcaaaatatcggcgaaataacattttatcaaaaaacacttgaaaatgtaaatgaaaaccttcatcaacagttagaaaatgaagaatccgcgcctttgaattttaataattctatccgttttgaaaatatttgctttaaatacattaccggaaacgaagttattaacgatgtttcgtttttattaaaaaaaggggaaaagatcgccataacaggcgaaagcggcggcggcaaatccacattaatagatattataaccggtattcacaagccggtttccggtaaaatatttattgacgatactgttttaaccgataaaaacattcgttcatggcggatgaaaataggatatatcccgcaaagcatctatctttttgacggaactgtcgcggaaaatgtttcatttggttctaaaccggacaatgataaaataattaaatctcttcaaaaggcaaatatttgggattttcttgttcaaaaagaaggcataaatacccgcgtaggcgacggcggcattcaactgtcaggcggacagcagcagcgaatcggcattgcccgcgctttgtacgacgaccccgaagtgcttgttcttgacgaggcgacatcctcgcttgacgacgaaacagaaaaaaagatcatggacgaaatttactctgtaagtgaaaataaaacattaattgtaatcgctcacagactaagcactgtagaacgctgtgatagaagaattataattgaaaacggaaggatattgaatgattaa

SEQ ID NO: 5450 - protein, 268 aa, Unknown
  Obtained from environmental sample
  DOMAIN (81)...(263): ABC transporter
  misc_feature (1)..(268): Xaa is any amino acid
MYALALYRILPSIYRMLQNIGEITFYQKTLENVNENLHQQLENEESAPLNFNNSIRFENICFKYITGNEVINDVSFLLKKGEKIAITGESGGGKSTLIDIITGIHKPVSGKIFIDDTVLTDKNIRSWRMKIGYIPQSIYLFDGTVAENVSFGSKPDNDKIIKSLQKANIWDFLVQKEGINTRVGDGGIQLSGGQQQRIGIARALYDDPEVLVLDEATSSLDDETEKKIMDEIYSVSENKTLIVIAHRLSTVERCDRRIIIENGRILND

SEQ ID NO: 5451 - DNA, 519 bp, Unknown
  Obtained from environmental sample
  misc_feature (1)..(519): n is a, c, g, or t
atgaacagaaagccgtttttttatgacatcactttgcgggatgccaatcaggcactcgctaaaccttggaacaaagaagaaaaagaggtggtgttcaaacagttgcttaaactaggtgttcaagcggttgaggttggctttcctatcgcgagcgaaatggattttgagtcttgtgagaatttggcaaggatagcaccggaaaatgtggttatatcggctttggctaggtcaaaaaacgctgatattcaaaaggcttgggacgcaattaaagatgcacccaaaccgcgcatacacgtgtttttggcgatgagcccgctaagtatggaaaatgttttgcaattggaaccagctgtggttagggaacaagccatagaagccgttgcttttgcgaaatccttggtgggtgaaaagggcgatgttgaatttagccccgaacattttggggattgcgttgaaaattttgattttgtgcttgaatcccttaaacaaatagtaaaagcggggtgcaaccacaattaa

SEQ ID NO: 5452 - protein, 172 aa, Unknown
  Obtained from environmental sample
  DOMAIN (13)...(171): HMGL-like
  misc_feature (1)..(172): Xaa is any amino acid
MNRKPFFYDITLRDANQALAKPWNKEEKEVVFKQLLKLGVQAVEVGFPIASEMDFESCENLARIAPENVVISALARSKNADIQKAWDAIKDAPKPRIHVFLAMSPLSMENVLQLEPAVVREQAIEAVAFAKSLVGEKGDVEFSPEHFGDCVENFDFVLESLKQIVKAGCNHN

SEQ ID NO: 5453 - DNA, 762 bp, Unknown
  Obtained from environmental sample
  misc_feature (1)..(762): n is a, c, g, or t
atgcttgaatttaaacgtatagaagaactcagtcatgcccttgaaagcgttttcatcgccttgcgcgaaaaacaaataagcatatccgataacgcggtaaaacttatactatcatctttggatcttcttaaatcaggtttcagcgaattgcaaaaatcaaaaaatgacaatatagaaatagacaactatgtaaaaaatatgtcccttctcgctgaaaacaaagaatttactctgccaaagcaggaagaatccgccgaagcggaaaaacacaaagaatcaaaaacagaaacaattcgtctttctcttgataaaatagacgaaataattaagaacattatgtctttgcatactcttgaaacaaaagcgaaaatcctttctcaaaacagcgctcaaattgtcgctcaaattaaaaaactttcaaaatcatttaaggagaataaaagtattgatccagcgcaggcggttatgctgaaaaaactggaaaggatgtgcggcaggttaaattcttcattaaatgactatgttacagacaccggtaacgggataaaaaccgcctatgacggcgtaatatcgcttcgcactcttccaatatcaacaattttcgacagttatcctcgttttgtttatgaacttgcccaagagcttggaaagaacgtacaactgaccgtagaaggcaaagaaaatgaaatagataaaaatattatcgaagcgttatctgaagtaataatgcacatggtaagaaactccctcggccgattctga

SEQ ID NO: 5454 - protein, 253 aa, Unknown
  Obtained from environmental sample
  misc_feature (1)..(253): Xaa is any amino acid
MLEFKRIEELSHALESVFIALREKQISISDNAVKLILSSLDLLKSGFSELQKSKNDNIEIDNYVKNMSLLAENKEFTLPKQEESAEAEKHKESKTETIRLSLDKIDEIIKNIMSLHTLETKAKILSQNSAQIVAQIKKLSKSFKENKSIDPAQAVMLKKLERMCGRLNSSLNDYVTDTGNGIKTAYDGVISLRTLPISTIFDSYPRFVYELAQELGKNVQLTVEGKENEIDKNIIEALSEVIMHMVRNSLGRF

SEQ ID NO: 5455 - DNA, 762 bp, Unknown
  Obtained from environmental sample
  misc_feature (1)..(762): n is a, c, g, or t
atggtcgccccggcttgcgcctcttcttgccgaacaattaccgctctttataaaacagggttatactgtcatgactgcatcggatataatcaagtcaaaatgaaagttcttggtattgaaacctcatgcgatgaatgttccgctgccgttgtggaggacggagaaaaaatactttccaatgtaatcgctacacaaattccttttcatgctccgtggagcggggtagttcctgaaatcgcaagccgcaaacatacagaatggatttacgctgtcgcaaaagaagcgcttgaaaaggcggaacttgacgtaaaaggtattgacgctgttgccgtaacaaaccgtcccggcttgtcaggctcacttttagtcgggctttctttcgcaaaggctttcgcctgggcgcttaacataccttttatcgccattgatcacatgcttgctcatctttatgccccacgccttttgccggacaacaggcctgaatacccttttttgggactccttgtctcaggcgggcatacaatcatctgccgcgccgatgactttgacgacataacaatactgggaacgaccattgatgacgccgtgggcgaggcgtttgacaaggtggcgaaattctacaatttcggctacccgggtgggaaggtaattgatgatttgtcgcataacggagatagcggagcttttaattttcctcttccttcgcttcacaagggcgatcaccgctatgacgtgtcttattccgggcttaaaccgctgtaa

SEQ ID NO: 5456 - protein, 253 aa, Unknown
  Obtained from environmental sample
  DOMAIN (56)...(253): Glycoprotease family
  misc_feature (1)..(253): Xaa is any amino acid
MVAPACASSCRTITALYKTGLYCHDCIGYNQVKMKVLGIETSCDECSAAVVEDGEKILSNVIATQIPFHAPWSGVVPEIASRKHTEWIYAVAKEALEKAELDVKGIDAVAVTNRPGLSGSLLVGLSFAKAFAWALNIPFIAIDHMLAHLYAPRLLPDNRPEYPFLGLLVSGGHTIICRADDFDDITILGTTIDDAVGEAFDKVAKFYNFGYPGGKVIDDLSHNGDSGAFNFPLPSLHKGDHRYDVSYSGLKPL

SEQ ID NO: 5457 - DNA, 795 bp, Unknown
  Obtained from environmental sample
  misc_feature (1)..(795): n is a, c, g, or t
atgtccgcgcaaattgacgatgaaatgacgcngactattcattttattatttacagaaaatgcacccctacatggataatgccggaaaacacactgggaagcatcaacctgacatatattattgacggcgcggcgcagtacacgataaacaatgaaatatttgacttggaaaaaggcgacttgctggtacttcccaagggctgcgtccgcaaggcaatcatttttcccgaccgcctgatgcattgtttttccgtggattttaccctgagaaattcccgcaaccatgaattgcccccgcctttgcctttgaaaacaagcctgggctgccatgaatatattattcacctgtttcatgaattatcttttacatgggcaggcaaacagcccggctatattatgaaatccaaaggcctgtttttgcaaatccttcaccgttttctggaaatcattgtctacaagacgggcccctacacaggggattaccgcatttccagagtaataaattttatcactgcgaattattccgaacacattaccgtcaaaatgatggcggatatggtaaacttaaattccacatacttcggggtgctgttcaagcagacaatgggcatgagccttaataaatatttaattcaaacccgcgtaacgaatgccgagcacatgcttagttcaggcgaatacaaggtaggcgacgtcgccgaagtatgcggctttaccgacatttcgcatttctacaaacagttcaagcagatcaagggttttccgccgtcgcattgcatgcctaagaaattctag

SEQ ID NO: 5458 - protein, 264 aa, Unknown
  Obtained from environmental sample
  DOMAIN (217)...(261): Bacterial regulatory helix-turn-helix proteins, AraC family
  misc_feature (1)..(264): Xaa is any amino acid
MSAQIDDEMTXTIHFIIYRKCTPTWIMPENTLGSINLTYIIDGAAQYTINNEIFDLEKGDLLVLPKGCVRKAIIFPDRLMHCFSVDFTLRNSRNHELPPPLPLKTSLGCHEYIIHLFHELSFTWAGKQPGYIMKSKGLFLQILHRFLEIIVYKTGPYTGDYRISRVINFITANYSEHITVKMMADMVNLNSTYFGVLFKQTMGMSLNKYLIQTRVTNAEHMLSSGEYKVGDVAEVCGFTDISHFYKQFKQIKGFPPSHCMPKKF

SEQ ID NO: 5459 - DNA, 819 bp, Unknown
  Obtained from environmental sample
  misc_feature (1)..(819): n is a, c, g, or t
atggcacaactacacaggaaagggcaagaaaaactccgcgggaaaatcatggaaatggttaggcggaatcttaaaacgctcaaagcagcatcactagagcttggtatcagctatagccaggcaaaacggatttaccagcgctatctaaagggaggggacgaagcgctcgtacatggcaacataggcaagccgtccaataacaagacggatgaaggcaccgtaaaaaaagcggtagaactgtaccaagagaaatattacgatttcggccctacactggcgcaggaaacgcttcttgaaagagacggccttgaaataagcataagcacattacggcgggcattattatctgccgggttgtggaaacaaaaaaagaactcaagcgaataccggagccgccggacgcccagggcgcgttttggagagctggtacagtttgacgggagccatcatgattggtttgaaggccgaggagcctgttgctgccttattacgatgatcgacgatgccactaaggtacggctgtccctgttcttcgacgaagaaaccctgtttggggcaatgacagtcctaaaattttggatagaacggtatggaatacccgaatcgctttattgcgacaagaaaaatgcatttgtattgaccagggaaccgaccgaggaagagattttagccggtattcataagcccaaaagccattttggcaaagcgtgcgacaggctggggatcgaagtaataccagccaacagtcctcaggcaaaaggccgtgtggaaagaaacacggcgttgaccaggaccggctggttaggccctgcggcttga

SEQ ID NO: 5460 - protein, 272 aa, Unknown
  Obtained from environmental sample
  misc_feature (1)..(272): Xaa is any amino acid
MAQLHRKGQEKLRGKIMEMVRRNLKTLKAASLELGISYSQAKRIYQRYLKGGDEALVHGNIGKPSNNKTDEGTVKKAVELYQEKYYDFGPTLAQETLLERDGLEISISTLRRALLSAGLWKQKKNSSEYRSRRTPRARFGELVQFDGSHHDWFEGRGACCCLITMIDDATKVRLSLFFDEETLFGAMTVLKFWIERYGIPESLYCDKKNAFVLTREPTEEEILAGIHKPKSHFGKACDRLGIEVIPANSPQAKGRVERNTALTRTGWLGPAA

SEQ ID NO: 5461 - DNA, 393 bp, Unknown
  Obtained from environmental sample
  misc_feature (1)..(393): n is a, c, g, or t
atgaaaaccatcaaatttttgacattatctgaattactgctgatattggatgatcaaataaagaattatggcggactatatggtattagggacatcaatttattgagttctgcaatatatatgccagaatccagttttgaaggcttatatttgcatgagacagtcccagcaatggcagcagcgtatgcttttcatatttgccaaaatgatccgtttattgacggaaataaaagggttgcactagcaagttcgttggtatttttagatataaatggttatgaattaaattgcaaagatgaaacgttatataacaaaataatggatgtcgccaaaagtgaaataaaaaaagaagatttaataaaattttacgaacgatattcgaaaaagaaatag

SEQ ID NO: 5462 - protein, 130 aa, Unknown
  Obtained from environmental sample
  DOMAIN (5)...(123): Prophage maintenance system killer protein
  misc_feature (1)..(130): Xaa is any amino acid
MKTIKFLTLSELLLILDDQIKNYGGLYGIRDINLLSSAIYMPESSFEGLYLHETVPAMAAAYAFHICQNDPFIDGNKRVALASSLVFLDINGYELNCKDETLYNKIMDVAKSEIKKEDLIKFYERYSKKK

SEQ ID NO: 5463 - DNA, 858 bp, Unknown
  Obtained from environmental sample
  misc_feature (1)..(858): n is a, c, g, or t
ttggcgccggtaatccgcggcaagaaaggcgaacatcaaaaaattattgaagatgcccgcaaggctggttttgcgcgcgccagaattgacggcgttccggtgaaccttgatgaaagcatcaaactggacaagcaaaaaaaacacagcattgagattgtggttgaccgcatcgtgattgagcaggatatccgctcacggctggcggaatcgacagaaaccgccctgcaaaccgccgacgggcttgtgctggttctggcaagcgacgaaggcaaaaattccgagcattttttttcgcagaagaacgcctgcccggactgcggcgtttccattcccgaattgcaaccgcgccttttttcatttaataacccctttggggcctgccccagctgcaccggcctgggggcaaaactggaatttgaccccgagttggtaattcccgacccttccctttcctttaatgaaggcgggatcgttccttataatcccgacagcgcctggcaccgcagccgttttgaaagtcttgccaaacattataaattcaatctggatacgcctttgtcaaaactgcccaaaaaaatactggacgctattctctggggcagcaaggacgagataaaaatccgttacgataaccgcgagggaacaggacattttgagtatcagtcaaaattccccggcgtgctggaagaccttaaacgccgctacctggaaacccagtcgccgggcatcaaggaatggcttgaaaagtttatgagccagaaaccctgtgaggactgcggcggcaagcggctcaagccggaagtgttaggcgttacagtcgccggaaaaaatatttgggaactttcccggcttcggtga

SEQ ID NO: 5464 - protein, 285 aa, Unknown
  Obtained from environmental sample
  misc_feature (1)..(285): Xaa is any amino acid
MAPVIRGKKGEHQKIIEDARKAGFARARIDGVPVNLDESIKLDKQKKHSIEIVVDRIVIEQDIRSRLAESTETALQTADGLVLVLASDEGKNSEHFFSQKNACPDCGVSIPELQPRLFSFNNPFGACPSCTGLGAKLEFDPELVIPDPSLSFNEGGIVPYNPDSAWHRSRFESLAKHYKFNLDTPLSKLPKKILDAILWGSKDEIKIRYDNREGTGHFEYQSKFPGVLEDLKRRYLETQSPGIKEWLEKFMSQKPCEDCGGKRLKPEVLGVTVAGKNIWELSRLR

SEQ ID NO: 5465 - DNA, 687 bp, Unknown
  Obtained from environmental sample
  misc_feature (1)..(687): n is a, c, g, or t
ttggcacagagaatatccagcataaacagcctaagcgcgctttgcgaaaaaacaggcgcaaatatagacgaaattgcaaacgccattggcaaagattcacgcattggctcaaaattcctaaaagcatccattggttttggcggttcttgttttaaaaaagatattttgaatttggtgtacttgtgtgaacattatggactgccagaagttgccgcttattgggaaagtgttgttaaaataaatgaatggcaaacaacccgctctgtcaagcgggttttgcgttctatgttcaacaccatagcaggcaaaaaggtggctgtttttggttttgcctttaaagcaaacacaaacgatacccgcgaaagccccgctcacttggttgtaagggggcttttggaagagcgggcaattcctgttatcaccgattgcaaagccctgacagatgccaaactagatttaagtgatgttttagacaaggttcaattaacagaagacccttacgaggcggcaaaagatgcccatgccattttgctctgcaccgaatggcaacaatacgcagatttggactggaaaaaaatctatgattctatgagcaagccagctttggtttttgatggtcgcaatattttaaatggagaagagctaaagaaaatgggttttgaatttataagcattggcaaggcgtaa

SEQ ID NO: 5466 - protein, 228 aa, Unknown
  Obtained from environmental sample
  DOMAIN (106)...(212): UDP-glucose/GDP-mannose dehydrogenase family, UDP binding domain
  misc_feature (1)..(228): Xaa is any amino acid
MAQRISSINSLSALCEKTGANIDEIANAIGKDSRIGSKFLKASIGFGGSCFKKDILNLVYLCEHYGLPEVAAYWESVVKINEWQTTRSVKRVLRSMFNTIAGKKVAVFGFAFKANTNDTRESPAHLVVRGLLEERAIPVITDCKALTDAKLDLSDVLDKVQLTEDPYEAAKDAHAILLCTEWQQYADLDWKKIYDSMSKPALVFDGRNILNGEELKKMGFEFISIGKA

SEQ ID NO: 5467 - DNA, 936 bp, Unknown
  Obtained from environmental sample
  misc_feature (1)..(936): n is a, c, g, or t
atgcgggagatattacgcgaactgatgagggcccgcgttatggcggtgcaaatcaaaaacccctacctctcccaggccataaaattgctgatgaacagcttcgcgggcgtgctcggatccacgggctgccgcttcttctccgaagaggtctcgccatccatcacgcttacgggccagcacatccttaaaacctccatcgagcacatagagaagacctacggcaagaaggtgatatacggcgacaccgactccatcttcgtaaacctgggggccggcgaggagaacggggccgcgaagctaggggcgcatatctccaaagagaccggcgcgtggctcaaagacaccctctcggagcagtacggggctaagtcggcgctggaactcaagtacgaggagcactaccgccgcttcttcatccccccgctgcgcggcggcggcgcggggcacgggaccaagaaacactactgcggggcggtgataaaggagagcggggagatggagctaactttcaagggcatggaatcggcccgcagcgactggaccgacctggccaaggagttccagcgcgacctgttcgtcatgctcttctccgataagcccttggaaacctacatagcctctaccgccgaacgcctggagcgcggggagttcgacgataaactcatctacaggaaacacctgagaaaggacctggacgcctacacctcgaacatccccccccacgtccaggcggcgaaactgctcgacgcgccggggcgggtcgtcaaatactacatgaccaagagcggcccccagcctgcggaaaaactctcggcgcccatagactaccaacactacatggacagccaactgcggcccatagcggactccatactgctgtggatgggaagcgatttcgaccgggtggtgtcggggcagcaggagttgatgttttag

SEQ ID NO: 5468 - protein, 311 aa, Unknown
  Obtained from environmental sample
  DOMAIN (1)...(310): DNA polymerase family B
  misc_feature (1)..(311): Xaa is any amino acid
MREILRELMRARVMAVQIKNPYLSQAIKLLMNSFAGVLGSTGCRFFSEEVSPSITLTGQHILKTSIEHIEKTYGKKVIYGDTDSIFVNLGAGEENGAAKLGAHISKETGAWLKDTLSEQYGAKSALELKYEEHYRRFFIPPLRGGGAGHGTKKHYCGAVIKESGEMELTFKGMESARSDWTDLAKEFQRDLFVMLFSDKPLETYIASTAERLERGEFDDKLIYRKHLRKDLDAYTSNIPPHVQAAKLLDAPGRVVKYYMTKSGPQPAEKLSAPIDYQHYMDSQLRPIADSILLWMGSDFDRVVSGQQELMF

SEQ ID NO: 5469 - DNA, 618 bp, Unknown
  Obtained from environmental sample
  misc_feature (1)..(618): n is a, c, g, or t
gtgttcgatgttgcccagcggataatttttatgcttaccatttcgttcgtggacatcgacagggatgaacagggaaaaccccgggcgcattttttaatcaaacgggctgtcgggatggccggcgaccgttttacaatggaaaaaggcgagatgaaaatccgttttgcgggggatgaccgctggacagacgagagggagtattcggcggcgcgcggatggaagcataacatcagccgcctgatggaaaaagacaaatacggggcgctggaatcggtaggaaaggccatggcatggcaggacctcggcttgccagttcctgaacgcctgcaaaaagcggcgtcttcggcaaacagcatccgtgatcctgatggttttgcccttgaaaacgccagacttgaaaccctgcgatgcgccatgccgcaagaccgccgttatgcgaaagagctggctaaacgttcgctcggctggtatgtgccggaaggcagaatgcttccgctcggcgacaaccgtgacaattctcgggacggacgttacttcggccccgtgcggctttcaaaggtgcttggcaaaggctccgcaattatgtggcctctcgcgcggattgggttgatccgctag

SEQ ID NO: 5470 - protein, 205 aa, Unknown
  Obtained from environmental sample
  misc_feature (1)..(205): Xaa is any amino acid
MFDVAQRIIFMLTISFVDIDRDEQGKPRAHFLIKRAVGMAGDRFTMEKGEMKIRFAGDDRWTDEREYSAARGWKHNISRLMEKDKYGALESVGKAMAWQDLGLPVPERLQKAASSANSIRDPDGFALENARLETLRCAMPQDRRYAKELAKRSLGWYVPEGRMLPLGDNRDNSRDGRYFGPVRLSKVLGKGSAIMWPLARIGLIR

SEQ ID NO: 5471 - DNA, 789 bp, Unknown
  Obtained from environmental sample
  misc_feature (1)..(789): n is a, c, g, or t
atggtaacaatcatcggagccgggacaactgcatacctgttggacccatggggccaggttacggaggtaactaatgcagtcggggaaagctccagtagaacgttgaacggcgcagggaatgtgcttcgcgaacaggcatcgtccgggggcttttacgagtaccgctacgacgcgctcgggcggctttaccaggcgggtcgggaaggcgggccagccatccaggcacggtacaaccttgacggaagcattgcggaaaagaccgacaggttggggaaaataacgcagtatgcctatgatggcagagggctattaacgaaggaaaccacagccctgggagagcagcgttatttttacgacgatgccgggcgcttaacaaggcaggagattgcaagccgtaacagcgtaacttaccgtagcgattggaattacaacgactcccaacggactgttaccgtaacagcaggagggatctattctgagacgctttaccataacgcctggggggaagtaataataaaaactgacggtgaaggaaatgaaattaagtatgagtatgataaggcaggaaaactgataaagagcatcgacgcttatgggagggctacttcctattcatataacgagcttggaaaaatcgcgaaggtaatttttgccgacaacatagcggaggcttacgaatacgatcacatgggaaaccttcaggaaatccgcgatgccattggcgtttcatgggcaggggagtacgaccaggcggggcggcttactaaagaaacggaaggccgggaatag

SEQ ID NO: 5472 - protein, 262 aa, Unknown
  Obtained from environmental sample
  DOMAIN (164)...(201): RHS Repeat
  misc_feature (1)..(262): Xaa is any amino acid
MVTIIGAGTTAYLLDPWGQVTEVTNAVGESSSRTLNGAGNVLREQASSGGFYEYRYDALGRLYQAGREGGPAIQARYNLDGSIAEKTDRLGKITQYAYDGRGLLTKETTALGEQRYFYDDAGRLTRQEIASRNSVTYRSDWNYNDSQRTVTVTAGGIYSETLYHNAWGEVIIKTDGEGNEIKYEYDKAGKLIKSIDAYGRATSYSYNELGKIAKVIFADNIAEAYEYDHMGNLQEIRDAIGVSWAGEYDQAGRLTKETEGRE

SEQ ID NO: 5473 - DNA, 921 bp, Unknown
  Obtained from environmental sample
  misc_feature (1)..(921): n is a, c, g, or t
atggataaactcatcatcaagggggcgcgggagcataaccttaaaaatatcgatctggaactgcccagggacaaattaatagtcgtttccggcctgtccggatcgggcaagagttccctggcctttgacacgatttttgccgaagggcagcggcgttatgtggaaagcctttccgcttacgcgcggcagtttctggggcgcatggacaagcccgatctggattatatcgaggggctttctccggctatttcgattgagcagaagaccacccaccgcaacccccgttccaccgtcggaaccgtcaccgagatttacgattactaccgccttctctacgcgaggataggcatagcacattgcccggtctgcggcagggaaatacgcgaacagcctgtagattccattatcgaaagtattctgcagatgcctgcgggaacaagggtacaattgctcgcgcccgtgatacgcggaaaaaagggagagcaccagaaaataatagaggatgcccgcaaggcgggtttcgccagggcaaggattgacggcgtgcctgttgagcttgacgaaagtataaagctggacaagcagaaaaagcacagcgttgatattatagtagaccgcctggtgattgggcctgacatacgctccaggcttgccgaatccgtggaaaccgctctgcaaacatccgacggtctgttgctggtgttgagccggaaccccgacagttcttccaaaagcgagaccgaaaatttcttttcacagaaaaacgcctgccccgactgcggcgtttccattccggaactacagccgaggcttttttcatttaacaaccccttcggcgcctggcccagctgttccggccttggctccagactggagttcgatcccgatctggtcatgcccgatcccttcgctttcctttaa

SEQ ID NO: 5474 - protein, 306 aa, Unknown
  Obtained from environmental sample
  misc_feature (1)..(306): Xaa is any amino acid
MDKLIIKGAREHNLKNIDLELPRDKLIVVSGLSGSGKSSLAFDTIFAEGQRRYVESLSAYARQFLGRMDKPDLDYIEGLSPAISIEQKTTHRNPRSTVGTVTEIYDYYRLLYARIGIAHCPVCGREIREQPVDSIIESILQMPAGTRVQLLAPVIRGKKGEHQKIIEDARKAGFARARIDGVPVELDESIKLDKQKKHSVDIIVDRLVIGPDIRSRLAESVETALQTSDGLLLVLSRNPDSSSKSETENFFSQKNACPDCGVSIPELQPRLFSFNNPFGAWPSCSGLGSRLEFDPDLVMPDPFAFL

SEQ ID NO: 5475 - DNA, 603 bp, Unknown
  Obtained from environmental sample
  misc_feature (1)..(603): n is a, c, g, or t
ttgcagagcggtttccacggattcggcaagcctggagcgtatgtcaggcccaatcaccaggcggtctactataatatcaacgctgtgctttttctgcttgtccagctttatactttcgtcaagctcaacaggcacgccgtcaatccttgccctggcgaaacccgccttgcgggcatcctctattattttctggtgctctcccttttttccgcgtatcacgggcgcgagcaattgtacccttgttcccgcaggcatctgcagaatactttcgataatggaatctacaggctgttcgcgtatttccctgccgcagaccgggcaatgtgctatgcctatcctcgcgtagagaaggcggtagtaatcgtaaatctcggtgacggttccgacggtggaacgggggttgcggtgggtggtcttctgctcaatcgaaatagccggagaaagcccctcgatataatccagatcgggcttgtccatgcgccccagaaactgccgcgcgtaagcggaaaggctttccacataacgccgctgcccttcggcaaaaatcgtgtcaaaggccagggaactcttgcccgatccggacaggccggaaacgactattaa

SEQ ID NO: 5476 - protein, 200 aa, Unknown
  Obtained from environmental sample
  misc_feature (1)..(200): Xaa is any amino acid
MQSGFHGFGKPGAYVRPNHQAVYYNINAVLFLLVQLYTFVKLNRHAVNPCPGETRLAGILYYFLVLSLFSAYHGREQLYPCSRRHLQNTFDNGIYRLFAYFPAADRAMCYAYPRVEKAVVIVNLGDGSDGGTGVAVGGLLLNRNSRRKPLDIIQIGLVHAPQKLPRVSGKAFHITPLPFGKNRVKGQGTLARSGQAGNDY

SEQ ID NO: 5477 - DNA, 357 bp, Unknown
  Obtained from environmental sample
  misc_feature (1)..(357): n is a, c, g, or t
ttgagtatgtatgagcgtccgaaatggacgactcccgaactgcccgcaaacccaattactacccccgattgccagtggtgcggaaaaaagatcaacgatattacaacttcaataacagataaagaaacgggtcttcccgtacattttgattgcgtgcttgcgcggattgcggagacggaaaaactggaagcgaacgacagtatttgttacattggcggcggacgttttggggtaatacattacaacaatccgccggagacaaaaggctttaccataaagaaaatatttgagtgggaagccaaagactctgtcagcgaatggcggcgtccgataagcgaatatttttcaattacataa

SEQ ID NO: 5478 - protein, 118 aa, Unknown
  Obtained from environmental sample
  misc_feature (1)..(118): Xaa is any amino acid
MSMYERPKWTTPELPANPITTPDCQWCGKKINDITTSITDKETGLPVHFDCVLARIAETEKLEANDSICYIGGGRFGVIHYNNPPETKGFTIKKIFEWEAKDSVSEWRRPISEYFSIT

SEQ ID NO: 5479 - DNA, 759 bp, Unknown
  Obtained from environmental sample
  misc_feature (1)..(759): n is a, c, g, or t
ttgttccatagagaaaatcaaatttacagttcacacggtggagatgttatgataggtatcatcggagcgatggaagaagaagtgacttttctgtgtgaagccatgggaaagttcaccaaagaaaaaataggagtctttgaatttttcaccggaaagattgaaggaaaagacgtaacaattctgcgctgcggtatcggcaaagtgaacgccgctgtcggctgcgccctgctcattcaaaaattttcccctgagtgtataataaataccggttccgccggcggcattcattccgagctaaaagtcggcgacgccgttatttctacggggcttctttatcacgatgttgacgttaccgcgtttaagtacttacccggtcagcttcccggtcagcctcaagtttttaaggcggacgaaaaacttgtaaaaatcgccgaagacgctgttgatgaattaaaagcggaaaaaattcttcccgctgattttacccaccgccgcggcgtaatcggctcaggcgatatttttatgcacgagcccgaacgtataaacgctgtgcgccgtgttttccccgacgtagacgctgtggaaatggaaggagccgcgatagcgcaagcctgctgtcttttctccgttccctttttggtaatccgcgcgctctctgatattgcgggaacgcagtcgcccgtaagctttgatgaatttcttccgatagcgtccaaacattcttctaaaatagtaatcagaattattaagaaaaaataa

SEQ ID NO: 5480 - protein, 252 aa, Unknown
  Obtained from environmental sample
  DOMAIN (17)...(249): Phosphorylase family
  misc_feature (1)..(252): Xaa is any amino acid
MFHRENQIYSSHGGDVMIGIIGAMEEEVTFLCEAMGKFTKEKIGVFEFFTGKIEGKDVTILRCGIGKVNAAVGCALLIQKFSPECIINTGSAGGIHSELKVGDAVISTGLLYHDVDVTAFKYLPGQLPGQPQVFKADEKLVKIAEDAVDELKAEKILPADFTHRRGVIGSGDIFMHEPERINAVRRVFPDVDAVEMEGAAIAQACCLFSVPFLVIRALSDIAGTQSPVSFDEFLPIASKHSSKIVIRIIKKK

SEQ ID NO: 5481 - DNA, 351 bp, Unknown
  Obtained from environmental sample
  misc_feature (1)..(351): n is a, c, g, or t
atggggtttgtttttaaaaaagcttacgggaatgctactatagaagatcgtgaaaataatatatttacggaagtggatattactctggaaaacggcgataaagtgatgcttgtgnaggtcaaatccaagccgactaccgaagatattaccgagcatgctgaacgtatagcaaaggttaaaacccattcggaaatacacggagaaaagcgtaaatttctcggcgctgtcgcaggtatggtttttaacgataatgaaaaagcctttgcactgaaaaacggtttttatgtcattgaaccttccggggaaacatttaatattactccgcccgatggtcagccaagagaatggtag

SEQ ID NO: 5482 - protein, 116 aa, Unknown
  Obtained from environmental sample
  misc_feature (1)..(116): Xaa is any amino acid
MGFVFKKAYGNATIEDRENNIFTEVDITLENGDKVMLVXVKSKPTTEDITEHAERIAKVKTHSEIHGEKRKFLGAVAGMVFNDNEKAFALKNGFYVIEPSGETFNITPPDGQPREW

SEQ ID NO: 5483 - DNA, 450 bp, Unknown
  Obtained from environmental sample
  misc_feature (1)..(450): n is a, c, g, or t
atgtcagatcggccgaaaggcttctggctaagtgtcgacgaaaatacaggtaaagtaaccgcaggctggcaagtttatcaggatggcggaaaactatacggtaagattctctctttggcgtcagagccaagaggcgttgttgcagacaaatgcaaggaaagctaccggggcttccctgtttcaggaaaggtgaatacaatgcctgtagcgggaaccccatggattttcgggcttacaagagggaagaacggagaatggagcggtggtaacattattaatcccgaagacagtaaaatttataactgtaaaattattttccgtcccgcagacggtaaaaaatttcaatccgatactcttgaaatgcgcggtgaaatcggtctgggtataggccgcagtcagtactggcgaaaaaccgatgcggcgaccgccaatagcctttggccggattaa

SEQ ID NO: 5484 - protein, 149 aa, Unknown
  Obtained from environmental sample
  misc_feature (1)..(149): Xaa is any amino acid
MSDRPKGFWLSVDENTGKVTAGWQVYQDGGKLYGKILSLASEPRGVVADKCKESYRGFPVSGKVNTMPVAGTPWIFGLTRGKNGEWSGGNIINPEDSKIYNCKIIFRPADGKKFQSDTLEMRGEIGLGIGRSQYWRKTDAATANSLWPD

SEQ ID NO: 5485 - DNA, 651 bp, Unknown
  Obtained from environmental sample
  misc_feature (1)..(651): n is a, c, g, or t
ttgttcgctccaacgcaaaagcaaaagttgatggaggagtgtccggcggccgcgatttcggcggacgaaagggcgcggatgatagaggtgtgccgcagggccgccaaaaaaatgggctatacgaacgccggaacgatggagttcatgtacgagaacggcgaattttatttccttgaaatgaacacgcgcttgcaggtcgaacatccggtgaccgaaatggtgtacggcatcgatttggtgcgcgaacaaatccgcatcgcggcgggcgaaaaactgggatatgcccagacggacctgattccgcggggccacgcgatagaattccggattaatgccgaggatccggaaaccttcgcgccgtgcccgggaacgctgtcgcagtaccatccccccggggggctcggcgtccgggtggacagcgcggcctatgcgggataccggattccgtcgagttacgattcgatgatcgcaaagttgataatccacgcggtcgaccggccgacgtgcctgcggcgggcggcgcgcgcgctggacgaattcgtcataaagggcgtgaagaacacgattcccctgcaacagagattgataaagaacaaggacgtccagggcctcgatttcgacaaccgctggcttgaaaaattcctcgaatag

SEQ ID NO: 5486 - protein, 216 aa, Unknown
  Obtained from environmental sample
  DOMAIN (1)...(100): Carbamoyl-phosphate synthase L chain, ATP binding domain
  misc_feature (1)..(216): Xaa is any amino acid
MFAPTQKQKLMEECPAAAISADERARMIEVCRRAAKKMGYTNAGTMEFMYENGEFYFLEMNTRLQVEHPVTEMVYGIDLVREQIRIAAGEKLGYAQTDLIPRGHAIEFRINAEDPETFAPCPGTLSQYHPPGGLGVRVDSAAYAGYRIPSSYDSMIAKLIIHAVDRPTCLRRAARALDEFVIKGVKNTIPLQQRLIKNKDVQGLDFDNRWLEKFLE

SEQ ID NO: 5487 - DNA, 324 bp, Unknown
  Obtained from environmental sample
  misc_feature (1)..(324): n is a, c, g, or t
atgaccatcgacgggccgcacggatcggacttttcgggtctgacccgggcacttggcttcgccgccgacaagacgtcgtcggcccagcaaaaactgctgctcaaccggatgataatcgcgaacgcgaaactcgtcgcggcaaagtccccgggccgccccctgatcattttgctggacgaggcggacagccatttggacaaggccgcgcgcgccgaattgttttcggagctgcccgccaccggcgcgcagattttcctgtcgggaacggacgcggacgttttcaccggcgttccaaacgccataaaaataaccatcggtcaatga

SEQ ID NO: 5488 - protein, 107 aa, Unknown
  Obtained from environmental sample
  misc_feature (1)..(107): Xaa is any amino acid
MTIDGPHGSDFSGLTRALGFAADKTSSAQQKLLLNRMIIANAKLVAAKSPGRPLIILLDEADSHLDKAARAELFSELPATGAQIFLSGTDADVFTGVPNAIKITIGQ

SEQ ID NO: 5489 - DNA, 888 bp, Unknown
  Obtained from environmental sample
  misc_feature (1)..(888): n is a, c, g, or t
atggaaaatacggaaattaaaagatatgaagtaataaattccgctcaattaaatataattcaccaattatataataatgcttttgatttactcaaaatatcaagggttaattttgatgagaagcttttagaaaatgaatacaataaaatatattttctggcggaaattaaaaatcagataatagggtatttaattatagttaataattctattgtattattaatcgtaaatgaattatacagaaataaaggcattggcggtaaattattgtctaacggagaattggaaattaaaggaaaatacgatcaaattaatttggccgctcctgactttttcttatgcggctgtccttttgacacaaaatcaagttattataaatggtttgaaaaaagaggttttatatatgaatggacacctcttgatatgatagttaatttggaaaattttgaatataaagatgaggattatgcctgttctcttgaagatgttatattcaaaaaattggataaagaaagcgatgaaatggtgtcgtgctgtaatggggcaaatagcgtagaagaaggctggggaaattactattatgatgatgatgagggcattattgcggttaaagataatgaagtgattggcggagctttaataataaactcggttttatttgatatgagcttaaaagataccggaagtttcggagttatttgggtattgcctgaatatgaaaaaaaaggaatagggataaaattatatcaaaagggattatttgcgttaaagaacaaaggttgtaaattttgtcatatttattatacttataaaccattggatttatggtatggtaaattaggagcgaaaaaatatattgaatactggattggaagtaaaaaaatatag

SEQ ID NO: 5490 - protein, 295 aa, Unknown
  Obtained from environmental sample
  DOMAIN (200)...(283): Acetyltransferase (GNAT) family
  misc_feature (1)..(295): Xaa is any amino acid
MENTEIKRYEVINSAQLNIIHQLYNNAFDLLKISRVNFDEKLLENEYNKIYFLAEIKNQIIGYLIIVNNSIVLLIVNELYRNKGIGGKLLSNGELEIKGKYDQINLAAPDFFLCGCPFDTKSSYYKWFEKRGFIYEWTPLDMIVNLENFEYKDEDYACSLEDVIFKKLDKESDEMVSCCNGANSVEEGWGNYYYDDDEGIIAVKDNEVIGGALIINSVLFDMSLKDTGSFGVIWVLPEYEKKGIGIKLYQKGLFALKNKGCKFCHIYYTYKPLDLWYGKLGAKKYIEYWIGSKKI

SEQ ID NO: 5491 - DNA, 396 bp, Unknown
  Obtained from environmental sample
  misc_feature (1)..(396): n is a, c, g, or t
ttgcgttggcggggtgtggggcatagaagaagaaaaaatatactctttcaaactgaccgactgcgctatgaccggaaactgaagatcgcccggctggaaggcaattcaacccttgaggacagaaaaaatgaaattgtagcaaagggtaattttatcgaatatgacgaccaggccgaggtaaccgtattccagatttcagtacggttatttaaagataatctggtttgccgttccgaatatgccgtgtaccgccgcaacgaaaaactgctggacctttccggttttccggtagttttcaaaaaagacgatgaattcagggcggatcgtatccgtgtcgatttggataccgatgacgtaaccatggaaggcgacgtttcgggaacaatcaaaaattaa

SEQ ID NO: 5492 - protein, 131 aa, Unknown
  Obtained from environmental sample
  misc_feature (1)..(131): Xaa is any amino acid
MRWRGVGHRRRKNILFQTDRLRYDRKLKIARLEGNSTLEDRKNEIVAKGNFIEYDDQAEVTVFQISVRLFKDNLVCRSEYAVYRRNEKLLDLSGFPVVFKKDDEFRADRIRVDLDTDDVTMEGDVSGTIKN

SEQ ID NO: 5493 - DNA, 468 bp, Unknown
  Obtained from environmental sample
  misc_feature (1)..(468): n is a, c, g, or t
atgatggaagaaaacatcgaaccaactgccgaatccgcattgttgctgccgccgcctgccgaattatccgcattgatgccggtgcacgctgaattggaacggcataccctgggtgtaacgaatatttacaagcgcttcggcaaaaaagaagtggttcgcggcgtaaattttaccatgtgcaacggcgaggttgcgggcctgttggggccaaacggcgcgggaaaaaccaccattttttacatgattgtcggcttttaccggcccagcgccggtttcgtcagcatggacgacattgatattaccgtcaaacccatgtaccggcgggcgcggcagggtattgcctatctgccgcaggaagcctcaattttccgcaaattaaccgttgagcagaacatctgggncattctggaaagccgccgcgatattgacaaagaggcaaaaaaacaacggctggaaaacccctgctga

SEQ ID NO: 5494 - protein, 155 aa, Unknown
  Obtained from environmental sample
  DOMAIN (62)...(147): ABC transporter
  misc_feature (1)..(155): Xaa is any amino acid
MMEENIEPTAESALLLPPPAELSALMPVHAELERHTLGVTNIYKRFGKKEVVRGVNFTMCNGEVAGLLGPNGAGKTTIFYMIVGFYRPSAGFVSMDDIDITVKPMYRRARQGIAYLPQEASIFRKLTVEQNIWXILESRRDIDKEAKKQRLENPC

SEQ ID NO: 5495 - DNA, 477 bp, Unknown
  Obtained from environmental sample
  misc_feature (1)..(477): n is a, c, g, or t
atgagaaacatagccagcattgccattttggccgcatgcatagccgtggttggcgcggcccagacgtcagtcatccagccatcgggtccatcccccgcaaaaatatcaaagaccttcgcgcttcaaagcgacggaaacctcaaaatttccaacgtcaccggagccatcagggtcaccacttgggacaaagacgaagtggcgctaactgccacattcaaacaaggcagcgatgacgagtacccaaagattgaagttgactcccaaaaaaactcccttgtgcttgtggtcaaatttcctaaagccaagggcttctttgccaagttatttggcaagggctataacgggacctgcgaaatggagctgactgtcccccgccgcgtcaatagtgatataagcactgtcaacggctcaatcgcgctaaaacaaattgatgggaggcacgaggtcagcacagtcaatggcgggcatctcttttga

SEQ ID NO: 5496 - protein, 158 aa, Unknown
  Obtained from environmental sample
  SIGNAL (1)...(19)
  misc_feature (1)..(158): Xaa is any amino acid
MRNIASIAILAACIAVVGAAQTSVIQPSGPSPAKISKTFALQSDGNLKISNVTGAIRVTTWDKDEVALTATFKQGSDDEYPKIEVDSQKNSLVLVVKFPKAKGFFAKLFGKGYNGTCEMELTVPRRVNSDISTVNGSIALKQIDGRHEVSTVNGGHLF

SEQ ID NO: 5497 - DNA, 909 bp, Unknown
  Obtained from environmental sample
  misc_feature (1)..(909): n is a, c, g, or t
atgaggaattacaagggttttcgggaacaggatatcctcgaaaaaacagatcttgagatttacgcggatatacgcgatcacgccacggcgctgggctttatggaagtaaataaaagngtgcttgatgaaaaaataactgtgacgacggaagaaacccagattcgcccggataataccaggatttatgtcaggtcaacaaagactccgctgatacataacggaaaaatcgtagggctgctgggaatttccagggatattacggagtacagggcggcggaagaagcggctaaagcggcatccagggcaaaaagcgactttctcgcaaaaatgagccatgagatacgcacccccatgaacgcgataataggtatggcggaacttgccctgcgcgcgaatgatttgaatacggcccgtgaacatataattaccattaagcaggcgggatcaaatctcatttcaatcattaatgacatcctggatttttcaaaaatcgaaaccggaaaactggaaattattcctgtggattatttattttcatccatgattaacgatgtgatcaacattataagaatgaaagtcgttgatacgcagattcgtttcctggttaatattgacagcaagattcccaatgcgctgacaggcgatgaaatacgtatccgccaggtattgctcaatattttgggtaatgccgtcaaatatacggagaagggttttgtgacccttacggtatacggggaacccgcaggcgagaataccgttaatttaactatggaaataatggactccggtaaaggcataaagcaggaagatttggagaagcttttcatcgaatacaggcagcttgatcagaaaaacaacaggggaatcgaaggaacgggattgggcctaccatcgctcgtgccgatctga

SEQ ID NO: 5498 - protein, 302 aa, Unknown
  Obtained from environmental sample
  DOMAIN (214)...(299): Histidine kinase-, DNA gyrase B-, and HSP90-like ATPase
  misc_feature (1)..(302): Xaa is any amino acid
MRNYKGFREQDILEKTDLEIYADIRDHATALGFMEVNKXVLDEKITVTTEETQIRPDNTRIYVRSTKTPLIHNGKIVGLLGISRDITEYRAAEEAAKAASRAKSDFLAKMSHEIRTPMNAIIGMAELALRANDLNTAREHIITIKQAGSNLISIINDILDFSKIETGKLEIIPVDYLFSSMINDVINIIRMKVVDTQIRFLVNIDSKIPNALTGDEIRIRQVLLNILGNAVKYTEKGFVTLTVYGEPAGENTVNLTMEIMDSGKGIKQEDLEKLFIEYRQLDQKNNRGIEGTGLGLPSLVPI

SEQ ID NO: 5499 - DNA, 750 bp, Unknown
  Obtained from environmental sample
  misc_feature (1)..(750): n is a, c, g, or t
atgatggccgagtgtgcattagccctggtatcgacctcactgctcggcatggtagacgcaagcgtgggcgggaaaaccggctttgacctttttggcaaaaagaacctcgttggcactttttatcccgccgcgcatgtgtatattcccttggaaagcctcgcaagcctgcctccggccgaatggaaatccggcatttctgaaatcataaagacggcgattctggagggcgacgagtttctggccctgcttgaggggttgaagggcggttttacggttatgactgagacaatcgcgccctgcatagaccgcgcggtcaggtttaagggccgcattgtcgaggaagatccttttgaaaagggaagcaggcgcatactgcttaaccttggtcatacctttggccacgcgctggaagccgccgtcgggctggggcgcgtatcgcatggggaagcggtcgcctggggcattgcgcgttcctgcgagctgggcctcgctttgggcgtctgtccgccgcccagggcaaaaagaataatgtcgctcttaaaagcctttgattatgagaccgcggctccccatccccttgccgcgggcgccgagttaatacaggccctgggcagtgataaaaagaaacgccggggaaagcttatttttatcgtccccgatgaaaaaagcgccaggcccataaccgcggatacccctgaatttatgaatactgtcagccgaatcattgaaggagaaacatcatttctataa

SEQ ID NO: 5500 - protein, 249 aa, Unknown
  Obtained from environmental sample
  SIGNAL (1)...(20)
  DOMAIN (1)...(210): 3-dehydroquinate synthase
  misc_feature (1)..(249): Xaa is any amino acid
MMAECALALVSTSLLGMVDASVGGKTGFDLFGKKNLVGTFYPAAHVYIPLESLASLPPAEWKSGISEIIKTAILEGDEFLALLEGLKGGFTVMTETIAPCIDRAVRFKGRIVEEDPFEKGSRRILLNLGHTFGHALEAAVGLGRVSHGEAVAWGIARSCELGLALGVCPPPRAKRIMSLLKAFDYETAAPHPLAAGAELIQALGSDKKKRRGKLIFIVPDEKSARPITADTPEFMNTVSRIIEGETSFL

SEQ ID NO: 5501 - DNA, 630 bp, Unknown
  Obtained from environmental sample
  misc_feature (1)..(630): n is a, c, g, or t
ttggtggcggtaaatcacgtcagcatagacgcgtactcgcggctttttattccctattggctcgacgaatacgaaaaagccgtttaccttgacagcgatatgatagcgagggccgatattgccgagctttacgatttgaacatagaacctttttgtattgcggtggccgtaaacgatacggcggcatcgtgtgtcgaaagccgaaaatacgggtattttatgaaacgttcttcggtattcatgcttcttgaaaactggtcgcgttacataagtagcggagttttggtttttgacattaaaaaattcacagagagatttccgtatcgcaattttttccgtttcgctatttattttacgaatcgttacgcgaaacgtctgaatgaccaggatgttctggcgttgcttcttaaagacgactacttcattttgccgtccgtttggaattataactggagtaaacgtacgggagggaataagtatcggatagccgggcccggcgtcaagatagttcattttaccgggagtttgaagccttggaaaaataatatacgcataaacaacaacgtcgacgcgttggaatacagaaaatttgcgtcgggtgttccgctgtttagagataccgtaaattaa

SEQ ID NO: 5502 - protein, 209 aa, Unknown
  Obtained from environmental sample
  DOMAIN (1)...(183): Glycosyl transferase family 8
  misc_feature (1)..(209): Xaa is any amino acid
MVAVNHVSIDAYSRLFIPYWLDEYEKAVYLDSDMIARADIAELYDLNIEPFCIAVAVNDTAASCVESRKYGYFMKRSSVFMLLENWSRYISSGVLVFDIKKFTERFPYRNFFRFAIYFTNRYAKRLNDQDVLALLLKDDYFILPSVWNYNWSKRTGGNKYRIAGPGVKIVHFTGSLKPWKNNIRINNNVDALEYRKFASGVPLFRDTVN

SEQ ID NO: 5503 - DNA, 891 bp, Unknown
  Obtained from environmental sample
  misc_feature (1)..(891): n is a, c, g, or t
gtggcttataatatgggtatccctttttttgtatataacttcacggaagatttcaggaaacaggtaatcaataattttattgaaagctaccgaaagggcgcaacgccaaatccctgtattgactgcaaccgctacatcaaatttgaaaaattacttaacagggcaaaacagcttggaattggttatatcgcgaccggacattacgccggaattgagcatgacgccggtacaggaaggtatcttcttaaaaaagcggctgacaaaaccaaggatcaaagctatgtgttatatgccatgacgcaggagcagttatcgcataccctgtttccgcttggtgcccttaacaagcctgaggttcgcggtatcgcaagggagcagggttttgtaaacgctgacaagcacgacagccaggacatttgctttgtgcgtgacggcagctatgcggaatttattgagcaatataccggcgaaaaaagcgaatcaggcgattttatcgacgcacacggcgttgttattggcaaacataacggtgtgatccgctatacaattgggcagcgaaaagggcttgggctctcccttaaaaaaccgttatatgtgcatacaaagaatgtagaagacaatacagtaaccctttgtacacgggacggcctgttttccaaatcgcttgacgcttctgattttaactttatagcctgtgagaaaattaacagccccattcgcgttaaaacaaaaatacggtacaaccagatcgagcagtggtcaacagtaacgcaaacctcgcacgatacggttcatattgagtttgatgagccgcaatgggcaatagcgaaaggccaggcagctgtattatatgaccgcaatatcgtcgttggcggaggnacgattcaatag

SEQ ID NO: 5504 - protein, 296 aa, Unknown
  Obtained from environmental sample
  DOMAIN (1)...(295): tRNA methyl transferase
  misc_feature (1)..(296): Xaa is any amino acid
MAYNMGIPFFVYNFTEDFRKQVINNFIESYRKGATPNPCIDCNRYIKFEKLLNRAKQLGIGYIATGHYAGIEHDAGTGRYLLKKAADKTKDQSYVLYAMTQEQLSHTLFPLGALNKPEVRGIAREQGFVNADKHDSQDICFVRDGSYAEFIEQYTGEKSESGDFIDAHGVVIGKHNGVIRYTIGQRKGLGLSLKKPLYVHTKNVEDNTVTLCTRDGLFSKSLDASDFNFIACEKINSPIRVKTKIRYNQIEQWSTVTQTSHDTVHIEFDEPQWAIAKGQAAVLYDRNIVVGGGTIQ

SEQ ID NO: 5505 - DNA, 669 bp, Unknown
  Obtained from environmental sample
  misc_feature (1)..(669): n is a, c, g, or t
ttgcgggttttccggtacaggcaggaaaaaaatgctttcaccgaaagggtgaagcaatgcagggatcacatcctttatgttatcgagaaacgctaccaaatagcgccagatgactctgcttcttttgaggaacgccttgacaaggttattaacatagcccttgaaaccgcggagcggatgctgggtgtaaaagccgagggagatttttttgccagaatgtacagggtgcgccagatatgctgggatcgaatctttattccgggagttgataatcttgaaggtatgtctgttgtcgaacgcagctccgtggatttgaatgccggagaagcatggtatattgcgcggcatatggagctcgtggattttagctggtactttcgcattccgcttccgacagaagaaacggttattcataaaaaagttgaatatgttcagaacctctgggattttgccagccgctcgatgggaggcgcgttcaataacagggtaagtattttcccacgaagagtaataatccataccgctccggcaattaacttaagcgagcgccttccatcttttgtcaaagacaagaaaacggaaattgcgttggctatgacggatttggaaaaagcttttctcgattgtattgctgaagcaaatagttttgtcaacggcaggaagaaatag

SEQ ID NO: 5506 - protein, 222 aa, Unknown
  Obtained from environmental sample
  misc_feature (1)..(222): Xaa is any amino acid
MRVFRYRQEKNAFTERVKQCRDHILYVIEKRYQIAPDDSASFEERLDKVINIALETAERMLGVKAEGDFFARMYRVRQICWDRIFIPGVDNLEGMSVVERSSVDLNAGEAWYIARHMELVDFSWYFRIPLPTEETVIHKKVEYVQNLWDFASRSMGGAFNNRVSIFPRRVIIHTAPAINLSERLPSFVKDKKTEIALAMTDLEKAFLDCIAEANSFVNGRKK

SEQ ID NO: 5507 - DNA, 327 bp, Unknown
  Obtained from environmental sample
  misc_feature (1)..(327): n is a, c, g, or t
atgagcgcaaaggaattgaccgacgttttcaacgaggcggtaggggagattgtaacaacgatggtaaacaacggttattcgcagacgcaggaattcgacgccgacactgccgcattgagtctgcttgccgatgccggctacaacccttcgggcctgattgacatgttgaaggagctgcaaaaaacgcaaagcggccattccggcggcttcaacaaaacccaccccacgccggacaagcggatagccagcgcggaaaaaaacctgaaaaaacacaacgttaaggacaccagttcctaccggcgggcgaggtttaacgaggtgcagtaa

SEQ ID NO: 5508 - protein, 108 aa, Unknown
  Obtained from environmental sample
  misc_feature (1)..(108): Xaa is any amino acid
MSAKELTDVFNEAVGEIVTTMVNNGYSQTQEFDADTAALSLLADAGYNPSGLIDMLKELQKTQSGHSGGFNKTHPTPDKRIASAEKNLKKHNVKDTSSYRRARFNEVQ

SEQ ID NO: 5509 - DNA, 390 bp, Unknown
  Obtained from environmental sample
  misc_feature (1)..(390): n is a, c, g, or t
gtgaggagggagcataatatgggacttgttcatgcggaaattacgttaagaaatgccggagatgtaactaatgtacggcgcggtcttataaaagagccggaaatccgccaaacaacggttacggctatggttgacaccggggcggcaacgttagttatcagcgaagccgtttgccgccaattagggcttgagatagaaggcgcttttacagcggaacttgccgacgggacggcgcgggcttatggtttaacagaatcggttcaagtgcaatggaaagaccgcanaatcgcctgtcaggcggtagtggtgcctaacgcaagcgatgtgcttcttggagcgattcccgctgaagccatggacttaattgtaaccccggcgcggcaggaataa

SEQ ID NO: 5510 - protein, 129 aa, Unknown
  Obtained from environmental sample
  misc_feature (1)..(129): Xaa is any amino acid
MRREHNMGLVHAEITLRNAGDVTNVRRGLIKEPEIRQTTVTAMVDTGAATLVISEAVCRQLGLEIEGAFTAELADGTARAYGLTESVQVQWKDRXIACQAVVVPNASDVLLGAIPAEAMDLIVTPARQE

SEQ ID NO: 5511 - DNA, 528 bp, Unknown
  Obtained from environmental sample
  misc_feature (1)..(528): n is a, c, g, or t
atggattttgtcacagaaatatgggaaagagctaaatccaggcagaaaaaactggttttgcccgagggaactgaccttagaacgctgaaagcctcaaaattaatcgccgaagccaaacttgccgcttcggttattgtcctgggcaaagaatctgaagtgcagaaactggctggcaccgaaggggtaaatctttccggggtcaacatttatgatccggcaggctcggcggacatcgaaagatacgccaaagaatttttcgaattgagaaagcacaaaggcatgacaatggagcaggccagaaaagacattcttgcccccctgcgctggggtgcaatgatgctgcatttgggcgatgtggacgcaatggtagcgggagcggagagtaccacggcggacgtgctgcgggcagggcttgccatcgtcggaacgaagcccggcatanaaaccgcttcttctcaatttgttgtcattaccaacgagccatcaatgggcgttaaaggaatcttattttttccgactgcgcggtag

SEQ ID NO: 5512 - protein, 175 aa, Unknown
  Obtained from environmental sample
  DOMAIN (2)...(174): Phosphate acetyl/butaryl transferase
  misc_feature (1)..(175): Xaa is any amino acid
MDFVTEIWERAKSRQKKLVLPEGTDLRTLKASKLIAEAKLAASVIVLGKESEVQKLAGTEGVNLSGVNIYDPAGSADIERYAKEFFELRKHKGMTMEQARKDILAPLRWGAMMLHLGDVDAMVAGAESTTADVLRAGLAIVGTKPGIXTASSQFVVITNEPSMGVKGILFFPTAR

SEQ ID NO: 5513 - DNA, 852 bp, Unknown
  Obtained from environmental sample
  misc_feature (1)..(852): n is a, c, g, or t
atggcttcttttggggcgttcctttcatgccatcaaggattttcncgcgccctggccgcctttaacgattatatccggcaaagaccgcagtcgggagaggcttactttttcgccggtcgtacttacttggcagtcggaatgccatacaaggccgtccctntactgcgcaaagctctggaaaacctgcccggaaaatcttcggatcttcaagccgctgagttcaaatccaaaaccaaggccctgcttggaaccgcttacttaaaatccaaacactctcaggccgccgtggacattttacaggaggctgtcgaagaggcccctgaagacaaacggatctaccgcgcttatctcaattccatgatggtcaggggaatacgactttgcggcatcggcaattatgatcttggccttcaaatgctgcgtttcgtccaggaaaaccggagcgaagcgggaatgggtgaaagtccgcttttaagactggaacttggcagggccgccagagaaaccggaaatctaaaggaggctcttgagcattttactgcggccctgaaaattgcgggcggtaaaggaattggcgatcgcaggatacgttggtcgagggcttcaattctaatggcccttggagaaaccagggaagcgatgaaggaaatcgaaataatccgctccaacgatacggcagtgcctgaccttccctggaacagcgaactggtcgatctctttatgatcaaggctttccttgagaacggcgaatggctgcgggcctccgaatcttgcagggcatggcttaagctgcgcgaggataagccgattatccgcgccctttacgcggaagccctgagaaacccagggtaa

SEQ ID NO: 5514 - protein, 283 aa, Unknown
  Obtained from environmental sample
  DOMAIN (156)...(189): Tetratricopeptide repeat
  misc_feature (1)..(283): Xaa is any amino acid
MASFGAFLSCHQGFSRALAAFNDYIRQRPQSGEAYFFAGRTYLAVGMPYKAVPXLRKALENLPGKSSDLQAAEFKSKTKALLGTAYLKSKHSQAAVDILQEAVEEAPEDKRIYRAYLNSMMVRGIRLCGIGNYDLGLQMLRFVQENRSEAGMGESPLLRLELGRAARETGNLKEALEHFTAALKIAGGKGIGDRRIRWSRASILMALGETREAMKEIEIIRSNDTAVPDLPWNSELVDLFMIKAFLENGEWLRASESCRAWLKLREDKPIIRALYAEALRNPG

SEQ ID NO: 5515 - DNA, 318 bp, Unknown
  Obtained from environmental sample
  misc_feature (1)..(318): n is a, c, g, or t
ttggctccgctgaaaggcagaagcatttttgtctatcatcccagtttcggttatttttttgatgaattcggaattaagcaagaggcggtggaaacgggaggaaaagaaccctctccgaaggatattaacaatttgataaaaaaaataaaagaagagaaagccgccgctattattgtgcagacacaatttccaaccaacgcggcgaaagcgttagcggactcggcggatttggaaataatatacttaaacacttttgcaactgattggctggcaaatattaacgaaataggaaatgcgctgacaaggtgtatacgatga

SEQ ID NO: 5516 - protein, 105 aa, Unknown
  Obtained from environmental sample
  misc_feature (1)..(105): Xaa is any amino acid
MAPLKGRSIFVYHPSFGYFFDEFGIKQEAVETGGKEPSPKDINNLIKKIKEEKAAAIIVQTQFPTNAAKALADSADLEIIYLNTFATDWLANINEIGNALTRCIR

SEQ ID NO: 5517 - DNA, 642 bp, Unknown
  Obtained from environmental sample
  misc_feature (1)..(642): n is a, c, g, or t
gtgcccaccgtgtcatcgcgtgacagcgtgtcattgcatgacacggtgaaacccgaaaccataggcgctggaagcgccgtccgccgcgtggcgctttttgactttggcgcgaagcgggggatagcgcaggcgctggcggctcgcggctgcaaggtgcgctatttttcgtataacgcgagcgcgcaggatatactggcttttaagccgcatgggatcatgctgagtaacggcccgggagatccggcggaaccggccaataacggaattattgagacgcttcgcgctttacaaaagagcaaagtgacgattttcggcatttgccttggacaccaactgctcgccttggcaaacggttatacgacgaagaagctcaagttcgggcatcgcggggccaatcagccggttaaagacacatcgacagggcgcgtgtacatcaccagccagaatcacggctacgccgtcgtggcggataacggctcgttcgtgaacgtcaatgacggaacctgcgaaggcatggattacgggaattcgttttcggtgcagttccaccccgaggcgcggggcggcccgcttgatacggcttttcttttcgaccgttttatggagaggataaataaaagatgtcacttgataggagagtaa

SEQ ID NO: 5518 - protein, 213 aa, Unknown
  Obtained from environmental sample
  DOMAIN (44)...(185): Peptidase C26
  misc_feature (1)..(213): Xaa is any amino acid
MPTVSSRDSVSLHDTVKPETIGAGSAVRRVALFDFGAKRGIAQALAARGCKVRYFSYNASAQDILAFKPHGIMLSNGPGDPAEPANNGIIETLRALQKSKVTIFGICLGHQLLALANGYTTKKLKFGHRGANQPVKDTSTGRVYITSQNHGYAVVADNGSFVNVNDGTCEGMDYGNSFSVQFHPEARGGPLDTAFLFDRFMERINKRCHLIGE

SEQ ID NO: 5519 - DNA, 555 bp, Unknown
  Obtained from environmental sample
  misc_feature (1)..(555): n is a, c, g, or t
ttgatcagatcggccgagatattgagaccgccttccgcgtcgcgcgggaagccgacccggaacattactctttattacaatgataattggctggaatggccgactaaaactgaagcggtatggaaaatgatcaatgatattaacaatcggtataaaaaagaaacagggcaggatcgcaaccttattgaaggcttaggagtacaatcccattacgatgccaaatggttcgatgaaaacagggtacggtcatctctggagaaacttaaaacattaaacattgaattatcgataagcgaactggatgtaaatttcgccgattataaggaaggcagcggaaaggacattatcatgtctgaatatgacgcctcggtacaagcaaggatatatgcgcaacttttcaggatatatcgggaatattccgcgtatatatcacgggtaaccatgtggggcatagacgaccacaacagttggatttccgcgggaactccttgtctctttgaccgttatttaaatcccaaaaaagcatttaacgccgtatttaatcctgaaaattga

SEQ ID NO: 5520 - protein, 184 aa, Unknown
  Obtained from environmental sample
  DOMAIN (1)...(183): Glycosyl hydrolase family 10
  misc_feature (1)..(184): Xaa is any amino acid
MIRSAEILRPPSASRGKPTRNITLYYNDNWLEWPTKTEAVWKMINDINNRYKKETGQDRNLIEGLGVQSHYDAKWFDENRVRSSLEKLKTLNIELSISELDVNFADYKEGSGKDIIMSEYDASVQARIYAQLFRIYREYSAYISRVTMWGIDDHNSWISAGTPCLFDRYLNPKKAFNAVFNPEN

SEQ ID NO: 5521 - DNA, 783 bp, Unknown
  Obtained from environmental sample
  misc_feature (1)..(783): n is a, c, g, or t
atgaaggcaattccgccatttaccgttatttttgaaaatgagcatataatcgcggtcaataaagccgccggaatttcggtgggcggcgaccggtgggacgaatccaaagacagactagacagactagtcgctgaaattattaaccctccatcaaaagtttttaccgtccaccgaatagactgtgatacttccggactggtggtattcgcgaaaaacgaagaaacccaccgccgtctttcaattgcctttgaagggcgggatgttaccaaacggtacattgccattgtccacggccgcccctcctggcaggaaatgacttgcgatcttcccctgattcccaatggcaacaagctccaccagactataattgacaaataccagggcaaaaagtcccttacccgctttgtactgctgggcagcgcggaacattacagcgtaattgaggccctgccggaaaccggcagaacccaccagatacgcgtccacgcggcggccctgggccatcccgttgtctgcgactcaatgtacggaaaggccaggccggttatgctttcggaaataaagagaaactggcatggcgacccatacgaagaaaaaccccttctggcgcggctgggtcttcatgccgccgaacttgccgtgccaaaagaatccattagtctcaacgccccgcttcccagggatatgtccgctctaatcaatcaaattaaaaagatcaagggaacagaaatcttaccccgttccctgttccccttccctagtccctgcgtcttttggaattaa

SEQ ID NO: 5522 - protein, 260 aa, Unknown
  Obtained from environmental sample
  DOMAIN (15)...(165): RNA pseudouridylate synthase
  misc_feature (1)..(260): Xaa is any amino acid
MKAIPPFTVIFENEHIIAVNKAAGISVGGDRWDESKDRLDRLVAEIINPPSKVFTVHRIDCDTSGLVVFAKNEETHRRLSIAFEGRDVTKRYIAIVHGRPSWQEMTCDLPLIPNGNKLHQTIIDKYQGKKSLTRFVLLGSAEHYSVIEALPETGRTHQIRVHAAALGHPVVCDSMYGKARPVMLSEIKRNWHGDPYEEKPLLARLGLHAAELAVPKESISLNAPLPRDMSALINQIKKIKGTEILPRSLFPFPSPCVFWN

SEQ ID NO: 5523 - DNA, 762 bp, Unknown
  Obtained from environmental sample
  misc_feature (1)..(762): n is a, c, g, or t
atgaaggctcttccccaaatgctgcggcttggcgctgaaaagatttccaattcaggcgcccattataatgacttggcgaaaaatgaacatgagcatggcggcacggaccagcagtcttatttgaacgacaaggaaaggctgctcatagcgtgtctgcgccgcggcgacagtaccgaagctcaggatatcgcgcgggacttattggccgatttcagcaatctggctgacggtgattttgagttctttaaaatgaaggcgatagaactggtagtcttggtttcaagaaccgggacaaattccgaaaacgaggcggaacttgtcgaggctaacagccgtaatataaagcagattgaggactccaataccgccggggaattggccgataacgtctgcctaattcttgaaaggatggccgggaaaattttctcttttcaggggattcgccacgcgtccgcgctcagaaaagccgaacgtttcatctgggaaaattacaccaggaagatcagcctgaaggagattgccgacgcgtccgggctttcggcgccttatttcagcacggtatttaaaaatgaaatgggcgaaaatctttcaaactatcttaacaggctcagggtggaaaaagcattggttatgcttggtgaaaccgattctcccattaacaagatttcggcggactgcggttttgaagaccaaagttggttttcaaaagtattcaaaagctataccggtattagtccctatgaataccgtaagtatggctga

SEQ ID NO: 5524 - protein, 253 aa, Unknown
  Obtained from environmental sample
  DOMAIN (155)...(201): Bacterial regulatory helix-turn-helix proteins, AraC family
  misc_feature (1)..(253): Xaa is any amino acid
MKALPQMLRLGAEKISNSGAHYNDLAKNEHEHGGTDQQSYLNDKERLLIACLRRGDSTEAQDIARDLLADFSNLADGDFEFFKMKAIELVVLVSRTGTNSENEAELVEANSRNIKQIEDSNTAGELADNVCLILERMAGKIFSFQGIRHASALRKAERFIWENYTRKISLKEIADASGLSAPYFSTVFKNEMGENLSNYLNRLRVEKALVMLGETDSPINKISADCGFEDQSWFSKVFKSYTGISPYEYRKYG

SEQ ID NO: 5525 - DNA, 849 bp, Unknown
  Obtained from environmental sample
  misc_feature (1)..(849): n is a, c, g, or t
ttgaaagaaggtcaggcaaataccattcaggaaagttctttagccgctaaaatgaaagaaaagggatttcatttggcgtgtcagactttgatcgggaaagaggatttagttattgaggtgccggtatctgcggccatgcgcaaacatcaggtaatgatggatggcggaatgcttttaggcacagatgtttccgaatccctgcgcgaatatcttctgcaagtttggcagctaaaaaccctgtttaaagaaaaacaagaaaacttcctgaaagattatgcgttaaatcctttgtgccgctgggtaaacctcgaaatgaccccggctgatcttcaagataaccgagacgacttgagccgtttgttgctggctctgaaaaaagaaatggatgatcaagatctaaatcccgatatttccctctcgacgcttcgtaatttagctgaaacattaagaagtgaaaattttaaggtatcagtactgcttttagaatcgaacggcagatggcaaattttagatattattcccggccataatccggcgcatctttacggtttggcggtagatatcggaactaccaccgttgtcgtttatctgcttgaccttatttcaggaaaatttattgacaactctggtacttataaccgtcaggcgcgttacggcgatgatgtgatcagccggattatctacgcgaccgaggaaacagacggactaaagaatatcaatctggccattgtcgataccattaacaatctaatccaagaaatgctggtcagacatcgtaaaatccacgaaaatgacattcgcgtcatgatcaacgccggaaatacctcggccgaatctgaccctggttga

SEQ ID NO: 5526 - protein, 282 aa, Unknown
  Obtained from environmental sample
  misc_feature (1)..(282): Xaa is any amino acid
MKEGQANTIQESSLAAKMKEKGFHLACQTLIGKEDLVIEVPVSAAMRKHQVMMDGGMLLGTDVSESLREYLLQVWQLKTLFKEKQENFLKDYALNPLCRWVNLEMTPADLQDNRDDLSRLLLALKKEMDDQDLNPDISLSTLRNLAETLRSENFKVSVLLLESNGRWQILDIIPGHNPAHLYGLAVDIGTTTVVVYLLDLISGKFIDNSGTYNRQARYGDDVISRIIYATEETDGLKNINLAIVDTINNLIQEMLVRHRKIHENDIRVMINAGNTSAESDPG

SEQ ID NO: 5527 - DNA, 795 bp, Unknown
  Obtained from environmental sample
  misc_feature (1)..(795): n is a, c, g, or t
gtgtcgagcgatacggcgtcggtcagcgtgtcgggcccgcggcccatagccaaagccgggccggatgtggtgcccaggcccgatggcagagtgaggcttaaggggacgaacggatcgcccgatgttatgatcgtaaaatacgagtgggactttgacggcgacggcgtcttcgattggggctccggggcgtcgggcgaagtcgagtacatattcagggagtacgccacgccgattttcagagtgaccgacgcctatggcaatacctccgtagacaccatgcgggtggtaatctgccccaaggacatggccgcggtggcgaacggggcgttctgcgttgacagatacgagtggcccaacaagcgcggcgccacaccgcttacggacgtgagttggcaagaggcggccaagacctgcgagagcatcggcaagaggctctgcatacccgacgaatggaaacgcgcctgccgaaacggcggcgattacaggcccgcggacggcaaaacctacccgtacggcgacgagttcaacaacgccaagtgcaacacgctggacaatcccaaatctaagaacgcgctcatgccgtcgggcgtattggccgagtgttcgggcgcgctcggcgtctacgacatgagcggcaacgtctcggagtggacggcgcccacgggcgcttcctccaaagcgcaggccttcggcggcttctaccaaagcggcgaggaggagagcggctgcnagtctagcgtgatgcttgataaagacaaaaagtatatatacacaggcttcagatgctgncagtaa

SEQ ID NO: 5528 - protein, 264 aa, Unknown
  Obtained from environmental sample
  DOMAIN (19)...(264): Domain of unknown function (DUF323)
  misc_feature (1)..(264): Xaa is any amino acid
MSSDTASVSVSGPRPIAKAGPDVVPRPDGRVRLKGTNGSPDVMIVKYEWDFDGDGVFDWGSGASGEVEYIFREYATPIFRVTDAYGNTSVDTMRVVICPKDMAAVANGAFCVDRYEWPNKRGATPLTDVSWQEAAKTCESIGKRLCIPDEWKRACRNGGDYRPADGKTYPYGDEFNNAKCNTLDNPKSKNALMPSGVLAECSGALGVYDMSGNVSEWTAPTGASSKAQAFGGFYQSGEEESGCXSSVMLDKDKKYIYTGFRCXQ

SEQ ID NO: 5529 - DNA, 939 bp, Unknown
  Obtained from environmental sample
  misc_feature (1)..(939): n is a, c, g, or t
atgcagagctacatggatcagttccactggggcagcggctcgctcgacaccgtcgtgacggtgagcgacagcatgatcaaagctgttgcgaaggacaagcccgagctcatcatattctctgaaagcgcgctcttgtgctacctagacaggcgcagcgacataaagcagtcggtattggagtgggcgagagaagccggcgcgccgatcatggccggagcgttgcactgggattacgccaaaaacgcctcaaggggaaaagagtacgatgtgttcaacacggtattcttgaccgacgccgatagagacagcctgatcccctacaacaaaattctcttggtgcctttttctgagataatgccgtttgaggcgaagtttcccatcctgtcgagggtgaacctcggcggcgcgagtttcaagaggggagagagcgagtcggtcttccgcgtaaacgagaatttggagatagccccgtacatctgctacgagataatcttcccggattttgtaaggcggcggcttaaaagttctacgaacctgcttgtcaacgtgacgaacgacggttggttcgggcgcacgtcggggccgtaccagcacgcggctatggcgcagatgcggtctatagagaacggtataacgcttgctcggtcggcgaattcggggataagtatgtttgttgaccaatacgggaggataacggcaaagacggggctctatacgagggatatgatggtgcgggaggtttgcgtttatcgtgtgaagacgctgtatagtatgcgtggggattggtttgtggaggtgtgttttggaattgtgattgcgggtattttattggtggtggcgagagtaggccggcaaattattatccgccggcgcgccgttatgaaaaaccgcagtatgtacgaaaagatgtcgaaacagagaacggcggtcagtaaataa

SEQ ID NO: 5530 - protein, 312 aa, Unknown
  Obtained from environmental sample
  DOMAIN (5)...(185): Carbon-nitrogen hydrolase
  misc_feature (1)..(312): Xaa is any amino acid
MQSYMDQFHWGSGSLDTVVTVSDSMIKAVAKDKPELIIFSESALLCYLDRRSDIKQSVLEWAREAGAPIMAGALHWDYAKNASRGKEYDVFNTVFLTDADRDSLIPYNKILLVPFSEIMPFEAKFPILSRVNLGGASFKRGESESVFRVNENLEIAPYICYEIIFPDFVRRRLKSSTNLLVNVTNDGWFGRTSGPYQHAAMAQMRSIENGITLARSANSGISMFVDQYGRITAKTGLYTRDMMVREVCVYRVKTLYSMRGDWFVEVCFGIVIAGILLVVARVGRQIIIRRRAVMKNRSMYEKMSKQRTAVSK

SEQ ID NO: 5531 - DNA, 543 bp, Unknown
  Obtained from environmental sample
  misc_feature (1)..(543): n is a, c, g, or t
ttgcgattcctgatatactgttccagcgctggcgttcaggaaaaaaataaaatgtcgcggcaggaaatgaaagaagaaatgaaaatgttcgagggagacccgcagatccgcggcaggatacgcagccgcttccgcgatctcctcaaacaaaatattgccgaggcggttccccgcgccgacgtggtaatcaccaacccgacccattacgccgtggcgcttgagtaccatcaggaaaccatgcccgacggccccatggtcacggcgaaaggcgcggacgaggccgcggcgcggatcagaaagctggcgcaggaaaacggcgtcccgatggtggagaacaaacttctcgcccggaatttgtataaggaagtggaagtaggggactatgtcccccaggcgtacctcacggtggttgcgacgatattggtgaaggtaatgcatattaacgaattgcgtcgcaaggcaaaagcccaggaggcggctcaagccgcccaggcggcccaggccgcggcggaagccgctgaaatctacggggcaggcgcatga

SEQ ID NO: 5532 - protein, 180 aa, Unknown
  Obtained from environmental sample
  DOMAIN (1)...(145): FlhB HrpN YscU SpaS Family
  misc_feature (1)..(180): Xaa is any amino acid
MRFLIYCSSAGVQEKNKMSRQEMKEEMKMFEGDPQIRGRIRSRFRDLLKQNIAEAVPRADVVITNPTHYAVALEYHQETMPDGPMVTAKGADEAAARIRKLAQENGVPMVENKLLARNLYKEVEVGDYVPQAYLTVVATILVKVMHINELRRKAKAQEAAQAAQAAQAAAEAAEIYGAGA

SEQ ID NO: 5533 - DNA, 354 bp, Unknown
  Obtained from environmental sample
  misc_feature (1)..(354): n is a, c, g, or t
atgtcctctttgatcgagcaaatcagggaagccggcaaccgaaagccagatggcgtgatcaagggcatacagttgaacggccttctccaattgatgcagtgggagcgcaagacttgtacaataactatccagtctcccgatggcatagggatgctatacgtgcaagaaggcgatctgatccacgccctattcaaggatttggaaggattggacgccgcctatcgggtcttggccataccaagcacccatgtcgagtttacagaggtgtgcagggcgaataggacgatcaatatccccttgactgagctgctgctcaacctagccatgaaaaaggacatggacaacggcaattga

SEQ ID NO: 5534 - protein, 117 aa, Unknown
  Obtained from environmental sample
  misc_feature (1)..(117): Xaa is any amino acid
MSSLIEQIREAGNRKPDGVIKGIQLNGLLQLMQWERKTCTITIQSPDGIGMLYVQEGDLIHALFKDLEGLDAAYRVLAIPSTHVEFTEVCRANRTINIPLTELLLNLAMKKDMDNGN

SEQ ID NO: 5535 - DNA, 447 bp, Unknown
  Obtained from environmental sample
  misc_feature (1)..(447): n is a, c, g, or t
atgtcccacatcaagccattccgtgcctttcggccaaagccagaattagcagcagaagtggcctcggttccatacgacgtgatcaactcactggaagcaaggcagttggcccaaggcaagccccattcgtttctgcatgttgggcggcccgagataaacttgtcagagggcgttgatgaacacagcgacgaggtatatgcagcgggggtgaaggctctaaagggattcataagcgatgggaccctattccaagacaaaaaaccctgtttctacgtctataggcagaaaatgggcgaccacgcgcaagctggcctggtctgcctttgctctgtaaaggaatacgaaagcaacctgatcaaaaacacgaatacacccgcaaagacaaagaggacgacaggacgcgccacgtcacggagcagggagccaacgcagaacctgtttttctga

SEQ ID NO: 5536 - protein, 148 aa, Unknown
  Obtained from environmental sample
  misc_feature (1)..(148): Xaa is any amino acid
MSHIKPFRAFRPKPELAAEVASVPYDVINSLEARQLAQGKPHSFLHVGRPEINLSEGVDEHSDEVYAAGVKALKGFISDGTLFQDKKPCFYVYRQKMGDHAQAGLVCLCSVKEYESNLIKNTNTPAKTKRTTGRATSRSREPTQNLFF

SEQ ID NO: 5537 - DNA, 387 bp, Unknown
  Obtained from environmental sample
  misc_feature (1)..(387): n is a, c, g, or t
atggccgagatctgttgggcacggcgggaccctgataaagggcatgaaactgttcaaggagaacgcggccggcaggtaatttgctccataagcctgcccctgttttccggcgacgcggtatcctactttgacgacgcgtataaaaacggccttttctacaggcttatcggaacaaacgcggtataccatgaagaagtgcttaaacgcgaatggtacattaacgtgaatatatccggcctctttgccaaggttatatcccgcctgcaccagaaacagtccatttccagcctgctggacaacagggagatcatcagccgcctcatgattgataacaaagaaaataaaacgcagcacgaattgcctttttcttcagatgatgaccaatga

SEQ ID NO: 5538 - protein, 128 aa, Unknown
  Obtained from environmental sample
  misc_feature (1)..(128): Xaa is any amino acid
MAEICWARRDPDKGHETVQGERGRQVICSISLPLFSGDAVSYFDDAYKNGLFYRLIGTNAVYHEEVLKREWYINVNISGLFAKVISRLHQKQSISSLLDNREIISRLMIDNKENKTQHELPFSSDDDQ

SEQ ID NO: 5539 - DNA, 867 bp, Unknown
  Obtained from environmental sample
  misc_feature (1)..(867): n is a, c, g, or t
atgagccggagcctcacacccagacgcatgcgccggcagacgtgcatgttcggcatcctgcgtctgtgcgccgcgatcaatatcgcggccctngtcggcgtatgtgtttttctggcttcgcgcggactgcccgcgttttcctgggagtttctcaccgaaccgccccggcgcatgatgacggcgggcggcatctggccgtgcattgtcggcaccttttacctgtccatgggcgcgattctcgtggcctttcctctgggcgtggccaccgccatatacctgcacgaatacgcgggacgcagccgcgtggcgagcgccatacgcctcggggtcaataacctggccggcgttccctcggtcgtgttcggcctgttcgggctggcctttttcgtcacctggtgcgggttcggcgtaagcatcctctccggcgtacttaccctcacggtactgacgctgcctgtcatcatcggcacggcggaagaggccctgcgccaagtgccggacacctaccgcgaagcctccctggctctgggggccacaaaatggcaaaccatcgcgcgcgtggcgctgcccgcagccctgccgggcatgctgaccggggccatcctgggagtcgcgcgcgccgccggggaaacggcggccatcatgtttaccgccgccgtgttttatacccccaggacgccggattccctcttcagtgccgttatggccctgccctaccacatgtacgtgctggcaaccgcgggcacggacattgaaaagacccgtccgctgcaatacggcacggcccttgtcctcatcatgctggtactcggcatgaacgtggcggccatcgtgctgcgcgacaggctgcggcggaatgtccggtag

SEQ ID NO: 5540 - protein, 288 aa, Unknown
  Obtained from environmental sample
  SIGNAL (1)...(29)
  DOMAIN (68)...(287): Binding-protein-dependent transport system inner membrane component
  misc_feature (1)..(288): Xaa is any amino acid
MSRSLTPRRMRRQTCMFGILRLCAAINIAALVGVCVFLASRGLPAFSWEFLTEPPRRMMTAGGIWPCIVGTFYLSMGAILVAFPLGVATAIYLHEYAGRSRVASAIRLGVNNLAGVPSVVFGLFGLAFFVTWCGFGVSILSGVLTLTVLTLPVIIGTAEEALRQVPDTYREASLALGATKWQTIARVALPAALPGMLTGAILGVARAAGETAAIMFTAAVFYTPRTPDSLFSAVMALPYHMYVLATAGTDIEKTRPLQYGTALVLIMLVLGMNVAAIVLRDRLRRNVR

SEQ ID NO: 5541 - DNA, 387 bp, Unknown
  Obtained from environmental sample
  misc_feature (1)..(387): n is a, c, g, or t
atgtcccctgagcgtgttgaggcgatnatcgacgcggtaatggcgcggcaggtttatactctgcataagtaccacaatcccgaaaactccggcgatttacaatttgattttaccacttgcgaaggcagggtagaagatgtaataatggcaatggtttctgtagaaaaaatgtttagatgttataaacctgccaatgccggggaagattcccgcgtattggtagataaaaaggtggatgaattcctaaaaaaacattttcttcaatacagacgttattgcgcaaacacgcgggaataccctgaaaatcccgcgtatatgtattatactcatattagggaagacgagcagtacgatgacctgacgattctgggaattaaaagaaaatga

SEQ ID NO: 5542 - protein, 128 aa, Unknown
  Obtained from environmental sample
  misc_feature (1)..(128): Xaa is any amino acid
MSPERVEAXIDAVMARQVYTLHKYHNPENSGDLQFDFTTCEGRVEDVIMAMVSVEKMFRCYKPANAGEDSRVLVDKKVDEFLKKHFLQYRRYCANTREYPENPAYMYYTHIREDEQYDDLTILGIKRK

SEQ ID NO: 5543 - DNA, 735 bp, Unknown
  Obtained from environmental sample
  misc_feature (1)..(735): n is a, c, g, or t
gtgatggaatgcacacgcataccattgaggaagtggctacttgccgaatattacatcgtgaccgccagaaaaggcatatcagggatggagctttcaaagaaactcggcgtatgccagaagactgcatggtttctgcatcaccgcatccgccacgcccttgattcgggaaattaccagagtttgctcggcggtctcggcaaagtggtgcaatcggatgaaacatactgcggcggccggaacaaaaacaggcacaaagacaagaaagtggagggcagcggtcccgttgggaagtccatcgttctcggcatggctgaaaagggtggcaggaggaaggcaatcgttgtgtcaaacgtggaaagggagacaatacaggcggaaataaacaagcacgtcaggaaacgcacacttttgacaacagatgaaggaaagcattacgttggcatacagaagcagggttacaaacatcgggcggtaaaccactctgcgaaagtctgggtaaacggtatggctagcacgaactctgtggaatctatgtgggcattgctgaaacgagcattttatggtatctaccataagttttcagttgagcatttgccgaagtacatcgctgattctgtttttcccctgaatgaaggtcactgcaagtattcaaactatgcgggagaattgatgcaatcgcccggaaattgcattggaaagcgattgacttgggcccaatgcgtaggggaggcatag

SEQ ID NO: 5544 - protein, 244 aa, Unknown
  Obtained from environmental sample
  misc_feature (1)..(244): Xaa is any amino acid
MMECTRIPLRKWLLAEYYIVTARKGISGMELSKKLGVCQKTAWFLHHRIRHALDSGNYQSLLGGLGKVVQSDETYCGGRNKNRHKDKKVEGSGPVGKSIVLGMAEKGGRRKAIVVSNVERETIQAEINKHVRKRTLLTTDEGKHYVGIQKQGYKHRAVNHSAKVWVNGMASTNSVESMWALLKRAFYGIYHKFSVEHLPKYIADSVFPLNEGHCKYSNYAGELMQSPGNCIGKRLTWAQCVGEA

SEQ ID NO: 5545 - DNA, 777 bp, Unknown
  Obtained from environmental sample
  misc_feature (1)..(777): n is a, c, g, or t
atggcaaaaatcaatataggcatagtgggcgtaggcaccgtgggcggcggggtggttaaagctcttgacgctcggattgactacttcaaaagcgcccttgggctcgatatgcgcctcgcccgtatcgccgacaaagcggcgcagcgcttctcccagcttcctgtccgcgacgcggtctgtaccggcgattccaatgatatacttaatgacgactccgtaaacatcgtggtcgaactcgccgggggcaccggcttcgcccgtacgctcgtgttggaggcgctcaaacgcgggaagcacgtagtcaccgccaacaaagcgctcatcgccgagtacgggccggagattttcgagaccgcggacaaggcgggcgtctcgctctactttgaagcctcggtcggcggcggtatgccagtcatcaagtccatacgggaagggcttatcgggaacgagataatcagtattcggacgataatcaacggcacctgcaactacatcctgacgcanatgtcgactcaggggctgcccttcgccgacgccctcgcggcggctcaggagaacgggtacgctgaggccgatcccacgctagacgtcggcggcggcgactccggccancaggtcgcgatactcgcctcccttgccagcggcggctacgttccctactgcgacctgtcggtagagggtattacggggatcgccnaagaagacatcaagttcgccgccgatctcggctacgtcgtcaaattgctgggcgtcatcaagagaaacgcgacgggctag

SEQ ID NO: 5546 - protein, 258 aa, Unknown
  Obtained from environmental sample
  DOMAIN (4)...(131): Oxidoreductase family, NAD-binding Rossmann fold
  misc_feature (1)..(258): Xaa is any amino acid
MAKINIGIVGVGTVGGGVVKALDARIDYFKSALGLDMRLARIADKAAQRFSQLPVRDAVCTGDSNDILNDDSVNIVVELAGGTGFARTLVLEALKRGKHVVTANKALIAEYGPEIFETADKAGVSLYFEASVGGGMPVIKSIREGLIGNEIISIRTIINGTCNYILTXMSTQGLPFADALAAAQENGYAEADPTLDVGGGDSGXQVAILASLASGGYVPYCDLSVEGITGIAXEDIKFAADLGYVVKLLGVIKRNATG

SEQ ID NO: 5547 - DNA, 909 bp, Unknown
  Obtained from environmental sample
  misc_feature (1)..(909): n is a, c, g, or t
atgaaaatcaatatgagcaacatcaattatataagtacaaggggtaactctaatccgttatcgtttgccggancggtgatggaagggatggtctcttcggggggattgtttgtccctgaaaagattccgcgggtagacttttcaaagttggccgggctatcatacaaagagattgcgattactgtgttgactccgtttatgggcgggtttgacggtggcgagatatcggcttgcgtgaacgaggcctacacgtccgagagtttcgatattcccgaagtggtcaaaacggttcccatcgggaataatcgttatatattagaactatggcacggaccgacggcggcgtttaaagatgttgctttgcagatcatgccgcagtttatgcggttctcaaaggtcaagtgcgctgacaaatcgcgcacgctgattctcgtggcgacctccggcgataccggcaaggcggcgctggaagggttcaaaaatcgggaggggatatcaattgcggtcttctaccctcacggcggcgtcagcgagatacaaaggttgcagatggccacgacggatggaaacaatacgtacgtcttcgcggcgcgggggaacttcgacgactgccagagcggcgttaaggcgttgttcggggatagcgggctgagggatatggcggcggaacacggggtgaagttctcatccgccaattcaattaactgggggcgcctctgtccgcagatcgtctactatgtcaagtcatatctagaccttgtatcaacaaaagtaatatcttacggcgataaaatcgatttctgcgtccccaccggcaacttcggcaacatcctcgccggttattacgccaaagagatgggtctgccgattcgtaaattaatctgcgcgtcgaataagaacaatgtgtga

SEQ ID NO: 5548 - protein, 302 aa, Unknown
  Obtained from environmental sample
  misc_feature (1)..(302): Xaa is any amino acid
MKINMSNINYISTRGNSNPLSFAGXVMEGMVSSGGLFVPEKIPRVDFSKLAGLSYKEIAITVLTPFMGGFDGGEISACVNEAYTSESFDIPEVVKTVPIGNNRYILELWHGPTAAFKDVALQIMPQFMRFSKVKCADKSRTLILVATSGDTGKAALEGFKNREGISIAVFYPHGGVSEIQRLQMATTDGNNTYVFAARGNFDDCQSGVKALFGDSGLRDMAAEHGVKFSSANSINWGRLCPQIVYYVKSYLDLVSTKVISYGDKIDFCVPTGNFGNILAGYYAKEMGLPIRKLICASNKNNV

SEQ ID NO: 5549 - DNA, 423 bp, Unknown
  Obtained from environmental sample
  misc_feature (1)..(423): n is a, c, g, or t
atgaccgcccccggaacagacggagcgggaccggcaaaggcgatgagggccgcgcttgttgacgcggaattaaaagcggaacaaatcggctatatcaaccttcacggtaccggcaccgagcttaacgacaaagccgaagccctcgccataaaggcggtatttgacgaagcgcctccgataagttcaaccaaacccatcaccggccacaccctgggcgccgcgggagcattggaagcggcaatctgctggatggtattgaccgaacaaaaaggcctcccggtacattgctgggacggagtaaaagatgaggaaatccccgttttcccttccaaagaagatggtcaaaaaaaaccatcaatatgcatgagtaacagttttgcttttggcggatgtaatgtcagcttaattttaagaaggagataa

SEQ ID NO: 5550 - protein, 140 aa, Unknown
  Obtained from environmental sample
  DOMAIN (1)...(140): Beta-ketoacyl synthase, C-terminal domain
  misc_feature (1)..(140): Xaa is any amino acid
MTAPGTDGAGPAKAMRAALVDAELKAEQIGYINLHGTGTELNDKAEALAIKAVFDEAPPISSTKPITGHTLGAAGALEAAICWMVLTEQKGLPVHCWDGVKDEEIPVFPSKEDGQKKPSICMSNSFAFGGCNVSLILRRR

SEQ ID NO: 5551 - DNA, 507 bp, Unknown
  Obtained from environmental sample
  misc_feature (1)..(507): n is a, c, g, or t
ttgttgatcgaacgggaagaactgcaaaccctgattccgcacaagggaaaaatgatgctcctcgacagggtaatagagtatgatattgaacatagtatcagggcggaatatactatcaccaggaattgtctcttttatgatcctgttttggacggtgtacccgcgtgggttggttttgaatttatggctcaggcaatttcagttcttacaggaatcagaaaacgtgcaaagggagaaaaacccaatatcgggtttatattaagcatcccgtctatgcggatgggaattccattattcaagaacggcagttcggtagaggttcgcgcagaagaaactgattgtaccaatatgatttttacttttgaaggagaagcccttttggaaggcagaaaggttatggaaggaaaattgatggttatggaagtaagcgatgaanaatttaatgaattaatcgggggacagcggggagggcatattttaatgaacgaagaaaaaaaagtcttgtaa

SEQ ID NO: 5552 - protein, 168 aa, Unknown
  Obtained from environmental sample
  DOMAIN (12)...(136): FabA-like domain
  misc_feature (1)..(168): Xaa is any amino acid
MLIEREELQTLIPHKGKMMLLDRVIEYDIEHSIRAEYTITRNCLFYDPVLDGVPAWVGFEFMAQAISVLTGIRKRAKGEKPNIGFILSIPSMRMGIPLFKNGSSVEVRAEETDCTNMIFTFEGEALLEGRKVMEGKLMVMEVSDEXFNELIGGQRGGHILMNEEKKVL

SEQ ID NO: 5553 - DNA, 873 bp, Unknown
  Obtained from environmental sample
  misc_feature (1)..(873): n is a, c, g, or t
atgagtgataaaaaacgggtggtaattaccgcgggttctataatcagcgcattgggaagcgaatggccggatatattggcaaagttgaaggcgggaaaaaattgcgtccgtagaatggatgattgggacagatatgaacacatgaataccaagcttgcggctccggtggattttaccatgcccgattatccgcgcaaaaaaacccgcggtcttggcagggtagcccagcttgctttgacttccgcggacagagccctggcgcatgccggcataaacgaagacgatccggaactgaaaaacggccgctgcggcattgcctatggctcgtctatgggaagcattgattcccttatggatttctacagtatgctggttatggatgatataaccaaaatgagcgcaaccacatacatcaaggcaatgccccagacctgcgccgcgaatatcggcgtattttttggcctgaccgggaggattattacaactaacacagcctgcacgtcaagcagccagtctattggttttgcctatgagacggtaaagcagggtgttcaggacattatgctggcgggcggagccgaagaattaaccgctgcggacgccgcggtctttgacactctttttgccgcaagttccaaaaatgacagccccggaaaaaccccggcggcttatgataaaaaccgcgacggccttgttataggcgaagggtcgggaacccttatccttgaagaatatgaacacgcaaaaaaacggggagcaaaaataattgcagaaattgtcggattcggaaccaataccgacggcactcacattacctcgccgaaccgccctactatgggcatagccatgaagctgcctctcggccgattctga

SEQ ID NO: 5554 - protein, 290 aa, Unknown
  Obtained from environmental sample
  SIGNAL (1)...(19)
  DOMAIN (5)...(248): Beta-ketoacyl synthase, N-terminal domain
  misc_feature (1)..(290): Xaa is any amino acid
MSDKKRVVITAGSIISALGSEWPDILAKLKAGKNCVRRMDDWDRYEHMNTKLAAPVDFTMPDYPRKKTRGLGRVAQLALTSADRALAHAGINEDDPELKNGRCGIAYGSSMGSIDSLMDFYSMLVMDDITKMSATTYIKAMPQTCAANIGVFFGLTGRIITTNTACTSSSQSIGFAYETVKQGVQDIMLAGGAEELTAADAAVFDTLFAASSKNDSPGKTPAAYDKNRDGLVIGEGSGTLILEEYEHAKKRGAKIIAEIVGFGTNTDGTHITSPNRPTMGIAMKLPLGRF

SEQ ID NO: 5555 - DNA, 516 bp, Unknown
  Obtained from environmental sample
  misc_feature (1)..(516): n is a, c, g, or t
gtggatcagagcggtcacctcccaggcgaggcgttccttcgcctcgttggggttcctgccctgcgcggtcagcgcctcacattccccgattggcagaaaggtgaacataagcaagaatcggcgtatgtcagcgtcctgcacattgcgccagtactgaaaaaattcgtaggggcttgtcagcgccggatcgagaaaaatcgcgcctttttcggtcttgcccattttcttgccgtcagccgtggtgatcaaaggaaaggttatgccaaaaacttccgccccttcaacgcggcgaatcagttccacgccggctacgatattgccccactggtcgtcgccgccaatttgcagacggcagccgtagcggcggtaaagctcaaggaaatcatagctctgcaggagctggtaattaaactcgataaaagagaggccggtttccattcgcattctgtaggcctcgaaactcagcatacggttcaccgaaaaatggcggccaatatcacgcaaaaagtcgagtag

SEQ ID NO: 5556 - protein, 171 aa, Unknown
  Obtained from environmental sample
  misc_feature (1)..(171): Xaa is any amino acid
MDQSGHLPGEAFLRLVGVPALRGQRLTFPDWQKGEHKQESAYVSVLHIAPVLKKFVGACQRRIEKNRAFFGLAHFLAVSRGDQRKGYAKNFRPFNAANQFHAGYDIAPLVVAANLQTAAVAAVKLKEIIALQELVIKLDKREAGFHSHSVGLETQHTVHRKMAANITQKVE

SEQ ID NO: 5557 - DNA, 867 bp, Unknown
  Obtained from environmental sample
  misc_feature (1)..(867): n is a, c, g, or t
ttgcgtgatattggccgccatttttcggtgaaccgtatgctgagtttcgaggcctacagaatgcgaatggaaaccggcctctcttttatcgagtttaattaccagctcctgcagagctatgatttccttgagctttaccgccgctacggctgccgtctgcaaattggcggcgacgaccagtggggcaatatcgtagccggcgtggaactgattcgccgcgttgaaggggcggaagtttttggcataacctttcctttgatcaccacggctgacggcaagaaaatgggcaagaccgaaaaaggcgcgatttttctcgatccggcgctgacaagcccctacgaattttttcagtactggcgcaatgtgcaggacgctgacatacgccgattcttgcttatgttcacctttctgccaatcggggaatgtgaggcgctgaccgcgcagggcaggaaccccaacgaggcgaaggaacgcctcgcctgggaggtgaccgctctgatccacggcaaaaccgaggctgacaaggccttagccggcgcgagggcggcttttggctttggcgccggaggcgcccttggcggggacaagtccgccatgcctcacgcggaattttcccgcgccgcttttgaaaagggctataacgtggtagacctgttctatgatgcgggcctcttttcgacaaaaagcgaagcccgccgtctggtggagcagggcggggcctttgtgtcaggtcccaacggagagctgtccgccgtgggtaatgtggcggcgcttatcggcgttgacaggcttaacgccgagggcgagctggtgctgcgcgcggggaagaagaggtactgccttatacaaatgagcagtgagcagtga

SEQ ID NO: 5558 - protein, 288 aa, Unknown
  Obtained from environmental sample
  DOMAIN (1)...(185): tRNA synthetases class I (W and Y)
  misc_feature (1)..(288): Xaa is any amino acid
MRDIGRHFSVNRMLSFEAYRMRMETGLSFIEFNYQLLQSYDFLELYRRYGCRLQIGGDDQWGNIVAGVELIRRVEGAEVFGITFPLITTADGKKMGKTEKGAIFLDPALTSPYEFFQYWRNVQDADIRRFLLMFTFLPIGECEALTAQGRNPNEAKERLAWEVTALIHGKTEADKALAGARAAFGFGAGGALGGDKSAMPHAEFSRAAFEKGYNVVDLFYDAGLFSTKSEARRLVEQGGAFVSGPNGELSAVGNVAALIGVDRLNAEGELVLRAGKKRYCLIQMSSEQ

SEQ ID NO: 5559 - DNA, 792 bp, Unknown
  Obtained from environmental sample
  misc_feature (1)..(792): n is a, c, g, or t
atgccaaatatttcccccaggggtttttttgacagcgccgaagatcagttacttattaccatgagtgaaatttccaaaatgtttcaaatggacgatcaaaacgataacgatacggctcttatgatcgcccccatggtttacggaaattacggcaaagattcctgttccggcgattattatagccgtaatgttgttaccggcgaaaaagccctgcagggcaattttaaccgccaaagatttaatgaaagcggcgcctccggccagcctatcgataaaattgatcccgctcacctaaaagaacttcagcgcattgcctggactctggaagacaaatttaaggaaatcaggcaaatccgctttaccgtggaaaacggtaaactgtggcttattgaacagcgccttgtggatcaaaaatccacgcaagcggacatcaggctgcttatggatttggccagccgtaaaataattgatccttcccaggtaatcaagtcaattgatcctctccggctgaatgaaattctccatccggtaattgatcctgccagtataaaagaattaaaaggctggaaaggcggtattgccggcgctcccggggcggccattggccgggcttacttcagtacggacgggctgctggatgctcttaaaacagctcagcaaaagggagaagatacccggtttattttggttctggaatcgtcttttgcggaagacgtaaaaggaattgaagtaagcgccggtgttcttccgcggaaggcggctattccgcccatgctctcgtgccgattctga

SEQ ID NO: 5560 - protein, 263 aa, Unknown
  Obtained from environmental sample
  misc_feature (1)..(263): Xaa is any amino acid
MPNISPRGFFDSAEDQLLITMSEISKMFQMDDQNDNDTALMIAPMVYGNYGKDSCSGDYYSRNVVTGEKALQGNFNRQRFNESGASGQPIDKIDPAHLKELQRIAWTLEDKFKEIRQIRFTVENGKLWLIEQRLVDQKSTQADIRLLMDLASRKIIDPSQVIKSIDPLRLNEILHPVIDPASIKELKGWKGGIAGAPGAAIGRAYFSTDGLLDALKTAQQKGEDTRFILVLESSFAEDVKGIEVSAGVLPRKAAIPPMLSCRF

SEQ ID NO: 5561 - DNA, 336 bp, Unknown
  Obtained from environmental sample
  misc_feature (1)..(336): n is a, c, g, or t
atgtaccgcggagaaattatggaagaagctcaagccgcgcaactttaccgcgaagctctgcacccgtacactcagcttttattttcttcggcaacaggcgcacaatataaagatgagagcgtaaaagtaaaaaaaacagataacgcccaaatccttgaatcttcccgtctgcgcgattttaatttatcaggcgcttcctgctcttttgcggcaagatgtccgctggtaacagaacgatgcctcagcgaacatcccgctttaaccgaaattaaaaccggacactttatccgctgtataaatcatgctgccccaaacatttcacccggtaatccgtag

SEQ ID NO: 5562 - protein, 111 aa, Unknown
  Obtained from environmental sample
  DOMAIN (7)...(80): Oligopeptide/dipeptide transporter, C-terminal region
  misc_feature (1)..(111): Xaa is any amino acid
MYRGEIMEEAQAAQLYREALHPYTQLLFSSATGAQYKDESVKVKKTDNAQILESSRLRDFNLSGASCSFAARCPLVTERCLSEHPALTEIKTGHFIRCINHAAPNISPGNP

SEQ ID NO: 5563 - DNA, 396 bp, Unknown
  Obtained from environmental sample
  misc_feature (1)..(396): n is a, c, g, or t
atgacaagcgaatgttccttacaggtacgcacctatgaatgtgacagctacggtcatgtcaacaacgcgaactaccttaattacctggaagttgcccgttacgagcatctcaaggatgtaggttttaattatgaaaaggccattgactcaggttacggggtatttatagcccgcattgaaatcgactataaaaaacccgcgaccaccgacgacgtgcttaccataaaaacctggcccataaaaaaaggcgcggtcagcggaacccttgcccaggaaataaggcgcggcgatgatcttttaatcgaggcgaaagtcacatgggcctttgtgaacgcgaaaacgggcatgcccgtaaaaataccccccgaatgggatatgcccgggttgagtccttag

SEQ ID NO: 5564 - protein, 131 aa, Unknown
  Obtained from environmental sample
  DOMAIN (17)...(102): Thioesterase superfamily
  misc_feature (1)..(131): Xaa is any amino acid
MTSECSLQVRTYECDSYGHVNNANYLNYLEVARYEHLKDVGFNYEKAIDSGYGVFIARIEIDYKKPATTDDVLTIKTWPIKKGAVSGTLAQEIRRGDDLLIEAKVTWAFVNAKTGMPVKIPPEWDMPGLSP

SEQ ID NO: 5565 - DNA, 648 bp, Unknown
  Obtained from environmental sample
  misc_feature (1)..(648): n is a, c, g, or t
ttgatatatttccgttttcactataaagacaaatggcatacgacaaataatattcaagaatacttattaaaaacactattggcaagcgcatttagtggaagccctgatgcgcttattgataaatgcacaagaaaaattgacgaattgaaagcctttgatgttgcggaaatatttggagtaataagagcggatggacgaaatttagagatttccaaagatactatattgaatacttattatggttctaaacaaatacatttactttttaatttatggtataattttaattatcaaccggcttacgatcaaaataaacctcaggtggatcacatatttcctcaaagccagttaaaaaaatttaaggttcagaatcctgcaaccgatcgaaaagatatcctaaaatacaaatgggaagacagagaccaaatcgcaaattgtatgttacttactgcacaagaaaacggcgcaggagaaaagaccgataccttgccggaaatatggtttgccaacaaaccaaaagaatatttagaacaacatttaattccacaagacaaggaattatggaaattggacaattttgaacgatttatagaggaaagaaaaaaactaatcctagtaaaatttgaacatatgataataaaaaattag

SEQ ID NO: 5566 - protein, 215 aa, Unknown
  Obtained from environmental sample
  misc_feature (1)..(215): Xaa is any amino acid
MIYFRFHYKDKWHTTNNIQEYLLKTLLASAFSGSPDALIDKCTRKIDELKAFDVAEIFGVIRADGRNLEISKDTILNTYYGSKQIHLLFNLWYNFNYQPAYDQNKPQVDHIFPQSQLKKFKVQNPATDRKDILKYKWEDRDQIANCMLLTAQENGAGEKTDTLPEIWFANKPKEYLEQHLIPQDKELWKLDNFERFIEERKKLILVKFEHMIIKN

SEQ ID NO: 5567 - DNA, 426 bp, Unknown
  Obtained from environmental sample
  misc_feature (1)..(426): n is a, c, g, or t
atgtcgaagtacgatggaaaaagaaaagattcctcagttgtagtaacccttggcagggagaccaaattcaacggcatgttgaaattcaaggagaccctgcggatacaggggcggttcaagggaaccatcgactcgggcggggatttgattgttgacaaagacgcggttgtagaagcggatcatataaatgtggattcgcttacggtatatggggatgttacaggcgatgtccgcgctgttgacaaggttgatatgatgaccggggccaaggtgcgcggcgacattaccgccgcaagactgcgccttgccgacggcgttttattcgacggccaatgcagcatgaccggtgtggacagggaggttgagattttctcccgccccattgaagatattaaagccgagcttatgaattcaggtagcaggtag

SEQ ID NO: 5568 - protein, 141 aa, Unknown
  Obtained from environmental sample
  DOMAIN (6)...(118): Protein of unknown function, DUF583
  misc_feature (1)..(141): Xaa is any amino acid
MSKYDGKRKDSSVVVTLGRETKFNGMLKFKETLRIQGRFKGTIDSGGDLIVDKDAVVEADHINVDSLTVYGDVTGDVRAVDKVDMMTGAKVRGDITAARLRLADGVLFDGQCSMTGVDREVEIFSRPIEDIKAELMNSGSR

SEQ ID NO: 5569 - DNA, 705 bp, Unknown
  Obtained from environmental sample
  misc_feature (1)..(705): n is a, c, g, or t
atgttgagggtggaaacggtcaattataatgatcccactgtcgcgcaaaaccgcatcccctttgacgaccttacctcgctgtaccctgagcaaaagctggacctggaaacaagccccggcggcataagcgagaggatcatcaacctgttctgccccatagggaagggccagcgcgcgcttattgtcgcgccgccgcgcacgggcaagacgatcatgatgcagaaaatcgccaacgccataaccaagaaccaccccgaggtgtacctgatagtcctgttgatagacgagcgccccgaagaggtcaccgacatgaagcgcaccgtaagggcggaggttatatcctcgacatttgacgagcaggcttcgcgccacgtccaggttacggagatggtgctggaaaaggccaagcgccttgtggaacataaaaaggacgtggtaatcctccttgactccattacaaggcttgcccgcgcctacaaccagactgtccccgccagcggaaaaattctatccggcggcgttgactcgaacgccctgcacaagcccaagcgcttcttcggcgcggcgcgcaacatcgaggaaggcggcagcctgacgataatttccacggcgctggtggaaaccggcagccgcatggacgaggttatttttgaggagttcaagggcaccggcaacatggagatcaaccctcgtgccgaattctga

SEQ ID NO: 5570 - protein, 234 aa, Unknown
  Obtained from environmental sample
  DOMAIN (42)...(233): ATP synthase alpha/beta family, nucleotide-binding domain
  misc_feature (1)..(234): Xaa is any amino acid
MLRVETVNYNDPTVAQNRIPFDDLTSLYPEQKLDLETSPGGISERIINLFCPIGKGQRALIVAPPRTGKTIMMQKIANAITKNHPEVYLIVLLIDERPEEVTDMKRTVRAEVISSTFDEQASRHVQVTEMVLEKAKRLVEHKKDVVILLDSITRLARAYNQTVPASGKILSGGVDSNALHKPKRFFGAARNIEEGGSLTIISTALVETGSRMDEVIFEEFKGTGNMEINPRAEF

SEQ ID NO: 5571 - DNA, 489 bp, Unknown
  Obtained from environmental sample
  misc_feature (1)..(489): n is a, c, g, or t
atgttccacaaggcgcttggccttttccagcaccatctccgtaacctggacgtggcgcgaagcctgctcgtcaaatgtcgaggatataacctccgcccttacggtgcgcttcatgtcggtgacctcttcggggcgctcgtctatcaacaggactatcaggtacacctcggggtggttcttggttatggcgttggcgattttctgcatcatgatcgtcttgcccgtgcgcggcggcgcgacaataagcgcgcgctggcccttccctatggggcagaacaggttgatgatcctctcgcttatgccgccggggcttgtttccaggtccagcttttgctcagggtacagcgaggtaaggtcgtcaaaggggatgcggttttgcgcgacagtgggatcattataattgaccgtttccaccctcaacattccgaaataacgctccccttctttggggctgcgtatctggccgtaaacggtgtcgccggtttttag

SEQ ID NO: 5572 - protein, 162 aa, Unknown
  Obtained from environmental sample
  misc_feature (1)..(162): Xaa is any amino acid
MFHKALGLFQHHLRNLDVARSLLVKCRGYNLRPYGALHVGDLFGALVYQQDYQVHLGVVLGYGVGDFLHHDRLARARRRDNKRALALPYGAEQVDDPLAYAAGACFQVQLLLRVQRGKVVKGDAVLRDSGIIIIDRFHPQHSEITLPFFGAAYLAVNGVAGF

SEQ ID NO: 5573 - DNA, 624 bp, Unknown
  Obtained from environmental sample
  misc_feature (1)..(624): n is a, c, g, or t
ttgtctccggaggaggtaaagctctacgatgagaaggccaagctgggtttgatgggcaacgaatcagacctgcgcaaggtcttaagcgatatgcgtaccgctctctaccagaaggtagagggtgtgggtctcacgatggcggacatcggcataaccacaagcgtcaactactctgacggcggcacgctcgttgtggacgagaacaagctcaaggccgcgctcgacagggatttcgacggcgtggtatcgctcttcaccaagtcgtctagcattccggccacggaaaaggactcgaagaagctggcccagcgcgccgccgagagcggcatagcccagcggttaaacgacattctcaccgcggcggcgggtacgtcgacgggcggcgaaaagggctacctgctgaaaaaagccggtatggtaaacgaccgtacgcaagccgacaacgcgatgacgaagcagttaaacgactacgacaagaagatagacactttactggagcgttggtaccgtcaagagcaaaactactacgccatgttcgcccgcatggagacggcgatgtccaagctacaagcgcagcaaaacagcctggcccaaatcatggcggccggcggcggcggaaagtga

SEQ ID NO: 5574 - protein, 207 aa, Unknown
  Obtained from environmental sample
  DOMAIN (1)...(191): Flagellar hook-associated protein 2 C-terminus
  misc_feature (1)..(207): Xaa is any amino acid
MSPEEVKLYDEKAKLGLMGNESDLRKVLSDMRTALYQKVEGVGLTMADIGITTSVNYSDGGTLVVDENKLKAALDRDFDGVVSLFTKSSSIPATEKDSKKLAQRAAESGIAQRLNDILTAAAGTSTGGEKGYLLKKAGMVNDRTQADNAMTKQLNDYDKKIDTLLERWYRQEQNYYAMFARMETAMSKLQAQQNSLAQIMAAGGGGK

SEQ ID NO: 5575 - DNA, 486 bp, Unknown
  Obtained from environmental sample
  misc_feature (1)..(486): n is a, c, g, or t
atgaaaaaaatctggttttatgaatataaagcaagcagcttttccaaattattgaatcttggtattgccgaagaaaacggagctatttgccgtgtccttttcggtgaaaaatacaaaccggacggatttgaaaaacaggaaacttcgctgataaaggaagcgtcaaaacagcttgatgagtattttaataaaaagcgtaaagtttttaatttgccgctaatattatacggaactgactttcagaaaaaagtctggaatgagcttcagaatattccctacggaaaaacatgcagttacggagaactggcggcaattacaggcaattcaaaagcaagcagggctgttggtatggcgaataaccgtaacccaattgtaattattataccctgccaccgtgtaatcggacatgacggaagtttgacaggttacgcgggcagacttgaactaaagcgccaattgctggaactggagaacgtaaacgattaa

SEQ ID NO: 5576 - protein, 161 aa, Unknown
  Obtained from environmental sample
  DOMAIN (77)...(160): 6-O-methylguanine DNA methyltransferase, DNA binding domain
  misc_feature (1)..(161): Xaa is any amino acid
MKKIWFYEYKASSFSKLLNLGIAEENGAICRVLFGEKYKPDGFEKQETSLIKEASKQLDEYFNKKRKVFNLPLILYGTDFQKKVWNELQNIPYGKTCSYGELAAITGNSKASRAVGMANNRNPIVIIIPCHRVIGHDGSLTGYAGRLELKRQLLELENVND

SEQ ID NO: 5577 - DNA, 606 bp, Unknown
  Obtained from environmental sample
  misc_feature (1)..(606): n is a, c, g, or t
ttgatggccgaggagttcggacccatgagtttagtgcctattgtcgttgagcagaccaaccggggcgaacgctcctatgacatttactcaaggctgctcaatgaccgcatcgttttgttgcatgaagaagtcaacgacatcaccgctagcttggcggtcgcgcaattcctttacttagaagggcaggaccccgataaggacatccaattctatatcaattcccccggcggctctaccacagccgggtttgccatctacgacaccatgcagtatatctcgtgcgacgtttcgacgatatgcgtcggccttgcggcgtctatgggcgcttttttgctgggcgccggcgcgaaggggaagcgctttgcgcttccgaacgccgaaatcatgatccatcagccttccggcggttctaggggcacggcggcggacattaaaattcaggcgaactggattttgaacacccggtcaaagatcaaccggatccttgcggagcataccggccaatcaatagaggtcattgaacgggacaccgaccgcgattatttcatgtccgcggaggaagcgcgggtttacggcttgattgataaggttatcaccaagcggtaa

SEQ ID NO: 5578 - protein, 201 aa, Unknown
  Obtained from environmental sample
  DOMAIN (20)...(201): Clp protease
  misc_feature (1)..(201): Xaa is any amino acid
MMAEEFGPMSLVPIVVEQTNRGERSYDIYSRLLNDRIVLLHEEVNDITASLAVAQFLYLEGQDPDKDIQFYINSPGGSTTAGFAIYDTMQYISCDVSTICVGLAASMGAFLLGAGAKGKRFALPNAEIMIHQPSGGSRGTAADIKIQANWILNTRSKINRILAEHTGQSIEVIERDTDRDYFMSAEEARVYGLIDKVITKR

SEQ ID NO: 5579 - DNA, 549 bp, Unknown
  Obtained from environmental sample
  misc_feature (1)..(549): n is a, c, g, or t
gtgtcagatcggccgagaattatcgagcaggtgggcgatgccagactccgcttgtacctctatcatatcccgcccgtcgccgttgtgtccaccaacgccgagttgatagaacggctgctgaaagcctatcccggcactatcgcgggcatcaaggacagttccggcgattggaacaatacggaaatgctgctgaaaaatttccagtccgacacgttcaacgtgttctgcgggagcgaggtctttttgctgcaaaccatgcgcgggggcgggacgggctgcatcacggcaacggccaacaccaatgcgccggccatcatggacctgtatgcaagctggcgaactcccgaagctgacgacaagcaggccagggtgacggcgacccgcaagatctttgccaagctccccatgatcgcttccatgaaagccgtgatcgcccgcgaactgaacgatccggcatgggccatgccgcgtccgccgctgatgccctgcgcgcctgacaaggttgatgccgtcatggctgaactgaaaagtatggggtattcgtactga

SEQ ID NO: 5580 - protein, 182 aa, Unknown
  Obtained from environmental sample
  DOMAIN (1)...(179): Dihydrodipicolinate synthetase family
  misc_feature (1)..(182): Xaa is any amino acid
MSDRPRIIEQVGDARLRLYLYHIPPVAVVSTNAELIERLLKAYPGTIAGIKDSSGDWNNTEMLLKNFQSDTFNVFCGSEVFLLQTMRGGGTGCITATANTNAPAIMDLYASWRTPEADDKQARVTATRKIFAKLPMIASMKAVIARELNDPAWAMPRPPLMPCAPDKVDAVMAELKSMGYSY

SEQ ID NO: 5581 - DNA, 651 bp, Unknown
  Obtained from environmental sample
  misc_feature (1)..(651): n is a, c, g, or t
atgtggaagccccgggaaaaacggcagaagatggttcacgaatggtttgaaatcgaggtcgcgccgctgttgcgaaaaataagcaatccctgttatctcggccaggacttcgcgcgcagcggtaacctgtcggtgctgtggatcggggaggagcggaccaagcaaaacctggatagccgactcattatcgaactcaacaacgtaccgtatgaccagcaatggcagatactgtggctcataagcaaaacctgcaatctgggatacgcggcaatagacagccgcggcaacggccaggcgttggcggaagcggcggcgcagcggctgccctgcggcgctgaaatggtgatgataacccgcgcctggtacgcggggattttccagcggctcaagagtcatctggagagccgggaatttattgttcccgatgactcattcattctttccgactttgggattattacgctgaaaaacggtcagccggtcgtgccgaatgaggaaagcgccgaccgcgcgggtaaagcgaagcgccacggcgacggcgcggtcgcggcggcgatgtgcctgtacgcctgggaagaaggcagcgcgtcggccccgcctgtagccgccttcaccggttcgcgcggtgatagtatatttcacgggtactga

SEQ ID NO: 5582 - protein, 216 aa, Unknown
  Obtained from environmental sample
  misc_feature (1)..(216): Xaa is any amino acid
MWKPREKRQKMVHEWFEIEVAPLLRKISNPCYLGQDFARSGNLSVLWIGEERTKQNLDSRLIIELNNVPYDQQWQILWLISKTCNLGYAAIDSRGNGQALAEAAAQRLPCGAEMVMITRAWYAGIFQRLKSHLESREFIVPDDSFILSDFGIITLKNGQPVVPNEESADRAGKAKRHGDGAVAAAMCLYAWEEGSASAPPVAAFTGSRGDSIFHGY

SEQ ID NO: 5583 - DNA, 546 bp, Unknown
  Obtained from environmental sample
  misc_feature (1)..(546): n is a, c, g, or t
ttgtcaaacagcgttactgttattgaggaaagcgcttttgaaaactgcgccggccttacggccataaccatacccgacagcgttatcagcattgagcaggaggcatttcgcggctgcgaaagccttaaaagcataacattgccgaaaaatattactgttatagaaagatatgtttttgagaattgtaccaatcttaccggaataaccataccgggcagcgttaaaataatcagaatcagggcgtttaacggaagcggacttaaaagcttaaccatatcgggcaacattaccggaattgaaagcggtgcttttgcaaattgtgaaaaccttacaagcgtaacaatgactgacagtcttgatattgttttgcaaggtatttttaaggattgcggcaacattaccaatgtaattctagataacaaagttacccgcatttgggattacgctttttcaaatttcaaaaaccttaaacaaataaccataccgcccggcgttgtttacattggagactatgctttttttaactgcaccaccttaaaagtataa

SEQ ID NO: 5584 - protein, 181 aa, Unknown
  Obtained from environmental sample
  misc_feature (1)..(181): Xaa is any amino acid
MSNSVTVIEESAFENCAGLTAITIPDSVISIEQEAFRGCESLKSITLPKNITVIERYVFENCTNLTGITIPGSVKIIRIRAFNGSGLKSLTISGNITGIESGAFANCENLTSVTMTDSLDIVLQGIFKDCGNITNVILDNKVTRIWDYAFSNFKNLKQITIPPGVVYIGDYAFFNCTTLKV

SEQ ID NO: 5585 - DNA, 513 bp, Unknown
  Obtained from environmental sample
  misc_feature (1)..(513): n is a, c, g, or t
ttgaaccagttcagggcaaacctgcaaagggcggccacgccgccctaccctaccgacgagaaacgggatcttgcgatgctgccccaaatagggataagcaccagcatactcggttccagcgtgggttataatccggcggggatgcggggctatcttcagattgacgaaaaaaaactggacgcggcgattgagcagcatcttcccgcgatgcggcagttatttggctctgacacgacaggcgatttgattattgacactggcgtcgctttcaacctggacaacctctccaggccttttgttgaaaccggcgggatcatctcattaaaaacaggcaccatagattcgcgaataacccaggacaaaaggagaatcgacacaatggaccgccagcttgccgccaaggaagccgagctcaaggcccagtacagccgcatggaaaacgcgttttcgcgcatggagcagatgacatcctccctggaaaatttcaaccgtcagaatggcaacaacaggtaa

SEQ ID NO: 5586 - protein, 170 aa, Unknown
  Obtained from environmental sample
  DOMAIN (1)...(154): Flagellar hook-associated protein 2 C-terminus
  misc_feature (1)..(170): Xaa is any amino acid
MNQFRANLQRAATPPYPTDEKRDLAMLPQIGISTSILGSSVGYNPAGMRGYLQIDEKKLDAAIEQHLPAMRQLFGSDTTGDLIIDTGVAFNLDNLSRPFVETGGIISLKTGTIDSRITQDKRRIDTMDRQLAAKEAELKAQYSRMENAFSRMEQMTSSLENFNRQNGNNR

SEQ ID NO: 5587 - DNA, 360 bp, Unknown
  Obtained from environmental sample
  misc_feature (1)..(360): n is a, c, g, or t
gtggaagaggcgaccggccaccgcccggaaaaaatagtgttcgctggaggctcttccaagagcgtcctttggtcgcagatactggcagacgtactcggcattccggtggaagttccggttgtgaaggaagccacggcgctgggagcggccattatggcgggtaaaggcatcgggctgtatacggacattaaggaatccgcccgcaaactggtaaagatagaaaaaatatttacacctaacaaaagaaacaaggaagtctatgagacggcatttaagaaatggaaagccgcttatgccgcccaactgcggttaagcgacgaaaaaataaccaggtatatgtggcttgcgccgggaatatag

SEQ ID NO: 5588 - protein, 119 aa, Unknown
  Obtained from environmental sample
  misc_feature (1)..(119): Xaa is any amino acid
MEEATGHRPEKIVFAGGSSKSVLWSQILADVLGIPVEVPVVKEATALGAAIMAGKGIGLYTDIKESARKLVKIEKIFTPNKRNKEVYETAFKKWKAAYAAQLRLSDEKITRYMWLAPGI

SEQ ID NO: 5589 - DNA, 348 bp, Unknown
  Obtained from environmental sample
  misc_feature (1)..(348): n is a, c, g, or t
atgtttataatcaatgaaaaagacagagaataccggtttggggactcaggccccaaatacctcatgcaggggccgcggatgaatttcgctttggtgcaattcatgcccggtcaggacttccgcgcccattaccatgaggtgatggaagaaaatttttatatccttgagggaaccgttaccatcgttgtggacggtacggcgcatacccttaaccccggccagctcatacacatagaacccagggaggttcattatgtgattaataaatcttccgccccagtccgcatggtttccgcccttgcgccttatcagcaggttgataaagtcgaggttgataatccctgctga

SEQ ID NO: 5590 - protein, 115 aa, Unknown
  Obtained from environmental sample
  DOMAIN (30)...(100): Cupin domain
  misc_feature (1)..(115): Xaa is any amino acid
MFIINEKDREYRFGDSGPKYLMQGPRMNFALVQFMPGQDFRAHYHEVMEENFYILEGTVTIVVDGTAHTLNPGQLIHIEPREVHYVINKSSAPVRMVSALAPYQQVDKVEVDNPC

SEQ ID NO: 5591 - DNA, 651 bp, Unknown
  Obtained from environmental sample
  misc_feature (1)..(651): n is a, c, g, or t
atgtctgatgtttgtttgctgggagccacaggctccataggcggttcagcccttgacgttataaggcagcatagggaaagattttctctgcgttccatagcagcatatagcaacgtgcaaaaaatggcggatatttcaaaggaatatcccgatgcaaaactagctctttttgatgagaactccgctacagaattgcagagagtcacgggcaaaaaagtttttgcaggaatggaaggtttgctggaactggttgcggattgcgatttggtggtgaacggtttgacgggttccgtgggttgcgaacccacattgaaggccatagagtgcggcaaaaaaattgccctcgcaaacaaagagacccttgtaatggcaggagagataataaaggaagctctgaaaaaaaatccaaatgcgaagataatgccagtggatagcgaacacaacgctattttccaatgccttgccggatgtaaaaatgctgagattgaaagtttgcagataaccgcgagcggagggcctttcagggaactgcccgcggaaaaattttctgagataacgctcaaagatgctttgaaccaccctgtgtggagcatgggcaaaaaaatcaccatagactccgcttccatgatgaataagggtttggaattatag

SEQ ID NO: 5592 - protein, 216 aa, Unknown
  Obtained from environmental sample
  DOMAIN (140)...(216): 1-deoxy-D-xylulose 5-phosphate reductoisomerase C-terminal
  misc_feature (1)..(216): Xaa is any amino acid
MSDVCLLGATGSIGGSALDVIRQHRERFSLRSIAAYSNVQKMADISKEYPDAKLALFDENSATELQRVTGKKVFAGMEGLLELVADCDLVVNGLTGSVGCEPTLKAIECGKKIALANKETLVMAGEIIKEALKKNPNAKIMPVDSEHNAIFQCLAGCKNAEIESLQITASGGPFRELPAEKFSEITLKDALNHPVWSMGKKITIDSASMMNKGLEL

SEQ ID NO: 5593 - DNA, 795 bp, Unknown
  Obtained from environmental sample
  misc_feature (1)..(795): n is a, c, g, or t
ttgcagataatagtgattatagctgttacgcattattttgtaaaatttntgaaattcctctcaaaagagataagtgcggagagaataataattcagggtttttacccggattgggctcatgcaacttttaatctcttgagatttttgtcttatgccttcatggtgattctcatattcccccttttgcccgattccgaaactgcggtgttcaggggagtctctgtgtttttgggtgttttgttttctctaggttcaaccaccgttatatcaaacgtagtggctggcatggttttgacatatatgcgttcttttaagttgggcgatagggttaaggttggcgaggtgctaggcgacgtggttgaaaaaactccttttgcggttcgcataaaaacatctaaaaaagaagttgtgacagttccaaacggaacgcttttatcctccaatgttgtgaatttcagcacctctggcgatgagagaagcggggttatactttatatgcccgtcacggttagctacgatgttcctttgagaaacgccattgagcttataacgcaagctgctcttaaaacagaaaatgttttaaccaacccacctccctttgttttggtgaaaaatttgggaaacgccgccaccgaactggaacttaacgtttatacgaatgaaccggaaaggcaaccccgcatattctccgacatgaactcgaatataaggagtttgtttgagcagaacggtataaatatggttacgcctgtttttagtcgggtgtttttagagaacccagataatcagcaatag

SEQ ID NO: 5594 - protein, 264 aa, Unknown
  Obtained from environmental sample
  DOMAIN (44)...(248): Mechanosensitive ion channel
  misc_feature (1)..(264): Xaa is any amino acid
MQIIVIIAVTHYFVKFXKFLSKEISAERIIIQGFYPDWAHATFNLLRFLSYAFMVILIFPLLPDSETAVFRGVSVFLGVLFSLGSTTVISNVVAGMVLTYMRSFKLGDRVKVGEVLGDVVEKTPFAVRIKTSKKEVVTVPNGTLLSSNVVNFSTSGDERSGVILYMPVTVSYDVPLRNAIELITQAALKTENVLTNPPPFVLVKNLGNAATELELNVYTNEPERQPRIFSDMNSNIRSLFEQNGINMVTPVFSRVFLENPDNQQ

SEQ ID NO: 5595 - DNA, 774 bp, Unknown
  Obtained from environmental sample
  misc_feature (1)..(774): n is a, c, g, or t
atgaatcagtcccaatgggaacagcagttaggcgaaatggtgncgggcggcgattatgacgtggttatcggttccaatccgtctttacntgaaatntgcgttaatgtgggaaaaaactttccaaatcaaaagtttgtaatagcggacgccgagtacgaaggaaatccgcaaatcagaacatacaactataatcaaagggaacaatcatattttttgggttttttggcgggtcttgttactacaagcgatatgccttatgcaaacgctcaaaagaagattggctttattgccgcgcaggaatatccgcttttaaccaaacaaatggttcccggttttctggaaggcgcaagaaaagttgatccccaaattgaacttgattttcgcgtaataggctcgtgggcggacgcgaataaggcggcggaacttgcctcggcgatgatggactggggcgttgatgttttcacatcgattgcgggcggagcggcgcaggggcttgttaaaacggctgttgataaacatgcgtatttggtttggtataacacaaacgcgtataaaatggcaccgggttttataattggctgcggcattatggaacagaaaaaacttataatggaaatattggaagacgttttagccggtaaaattcaatacggtatttcacagacaatcggagtaaaagaagggtatttgaattttatctatgatgatcccggatataaagaccttcccgcggatattcgcgaaagatttgaaaagtttatgaatgatttttaa

SEQ ID NO: 5596 - protein, 257 aa, Unknown
  Obtained from environmental sample
  DOMAIN (1)...(257): Basic membrane protein
  misc_feature (1)..(257): Xaa is any amino acid
MNQSQWEQQLGEMVXGGDYDVVIGSNPSLXEXCVNVGKNFPNQKFVIADAEYEGNPQIRTYNYNQREQSYFLGFLAGLVTTSDMPYANAQKKIGFIAAQEYPLLTKQMVPGFLEGARKVDPQIELDFRVIGSWADANKAAELASAMMDWGVDVFTSIAGGAAQGLVKTAVDKHAYLVWYNTNAYKMAPGFIIGCGIMEQKKLIMEILEDVLAGKIQYGISQTIGVKEGYLNFIYDDPGYKDLPADIRERFEKFMNDF

SEQ ID NO: 5597 - DNA, 519 bp, Unknown
  Obtained from environmental sample
  misc_feature (1)..(519): n is a, c, g, or t
ttgnccaacggttggcatttaccgagcaatgaggaatgggataaattaatagaagttgcaggaggtcaaagcagtgcaggtaaatatttgaaagctacgagtggctggaacgaaaatggcaacggcgaggacaagttcggcttttctgccataccgggtggtttcggtcgttccggtggtagcttcgactatgttggtaactacggcaactggtggagtagctcggaagacaatggactcgcctacgacaggggtatggtttacgactatgagtatgtcagctacggtggcctcaacggtaagagcgaattgttcagtattcgttgcttgcagggagatgcaaaagaagcggcagcaaaggcggcagcagcaaaggcggcaaaggaagcagtggcagcggcagcagaggaggctgaaaaggcggcaagggaagcagaggtagcaccggaaaaggcgaagtgtcccttcaaaaaaatcggttctccaataacagtagatgctgtgtttttggggaagtga

SEQ ID NO: 5598 - protein, 172 aa, Unknown
  Obtained from environmental sample
  misc_feature (1)..(172): Xaa is any amino acid
MXNGWHLPSNEEWDKLIEVAGGQSSAGKYLKATSGWNENGNGEDKFGFSAIPGGFGRSGGSFDYVGNYGNWWSSSEDNGLAYDRGMVYDYEYVSYGGLNGKSELFSIRCLQGDAKEAAAKAAAAKAAKEAVAAAAEEAEKAAREAEVAPEKAKCPFKKIGSPITVDAVFLGK

SEQ ID NO: 5599 - DNA, 663 bp, Unknown
  Obtained from environmental sample
  misc_feature (1)..(663): n is a, c, g, or t
ttgatactgaaacaaatgaagaataaatttaaacattttatttttaatctctaccggtacaatgaaactcagattcatcagttaaagtatctgttttgggaatgcacccgccgctgtaacataaattgtattcactgcggttctgattgttcggctaacgctcaaaatcaggatatgccctttgatgattttctgaacgcgatactgccttttgagaacgaaaataaaaaagaacctattgtcatcgccattaccggaggggagccttccctgcgcgaagaccttccctattgcgggcgaaaattgcgcgagcacggttttttgtggggcatggtaaccaacggctacaattacaccgctaatttgcactcaaagctgatatctgcggggctaggctcaattacggtaagccttgacggttttgaggcttcacacaactggctccgcggcaatccgcagagttttaacagggcggttaaggcgattgacattatagcggccacgcgcgggcttacctacgacattgtaacctgcgttaatcaaaaaaacataggcgagcttgaagcgcttaaagattttttaatcgggcacaatgtaaaagcatggcggctgtttacgattttcccgatagggcgggcggcaaataccccgacttgcgtttaa

SEQ ID NO: 5600 - protein, 220 aa, Unknown
  Obtained from environmental sample
  DOMAIN (33)...(194): Radical SAM superfamily
  misc_feature (1)..(220): Xaa is any amino acid
MILKQMKNKFKHFIFNLYRYNETQIHQLKYLFWECTRRCNINCIHCGSDCSANAQNQDMPFDDFLNAILPFENENKKEPIVIAITGGEPSLREDLPYCGRKLREHGFLWGMVTNGYNYTANLHSKLISAGLGSITVSLDGFEASHNWLRGNPQSFNRAVKAIDIIAATRGLTYDIVTCVNQKNIGELEALKDFLIGHNVKAWRLFTIFPIGRAANTPTCV

SEQ ID NO: 5601 - DNA, 951 bp, Unknown
  Obtained from environmental sample
  misc_feature (1)..(951): n is a, c, g, or t
ttgaagaatcgggtttccctgaggggaactttccggtctcccaagcctgcctgtaccttgcgaccgcccccaaatcaaataccgccatgtcctactttgacgcgctcaaagaagtggaacgcgaagacgctgaagttccccaaccatttacgcgacgcaagcagggacgctgaaagtttcggtcatggcgaaggttatgtctatccccacgcctaccgtgaccattgggccgcccagcagtatctgccaaacacattacgcggaagaactttttacgttccgtcatcatcaggctatgagggaaaaatacgcgaagatgttttgcgaaaacgcgaattacaggccgcgattgtcttaggctctcaaaaagatacggacgcggacggagaatttttatcatggtcggcggcttcaaaagggcgcgagagttggtttaagcgtcttgaatcgggaagaagcaggctcctgttaagcgacagggacgcaatttttacgtctgcttccgttacgcgccaagatcgggtattaatcccccttgcaaacgacgggcttcttctttgggaaagcctccgccactgccccgaaggcctttcagccgcgcttgtaaacaacgccgccgcaaaagacgccctataccaatacgcctccgtgttagacgaaactgaaaaaccgttaatcgccgtaacagaagaaattttacccaatccaaaagagtgtgatgattggttttcatgctcccagtttgaccatatcctcattcgcgccctaagattaacctgcaccccaacttttcttgcatcccgcgcaaaagctcttcttgcaaaaaacggcaatgtggttttactctgctcccctccccgcctcggcgagcgtctttcacgcatacttttacaggaatgtggtcaaaaagaactttcatcagcgctggaacaggccgaagaactgtcttaa

SEQ ID NO: 5602 - protein, 316 aa, Unknown
  Obtained from environmental sample
  misc_feature (1)..(316): Xaa is any amino acid
MKNRVSLRGTFRSPKPACTLRPPPNQIPPCPTLTRSKKWNAKTLKFPNHLRDASRDAESFGHGEGYVYPHAYRDHWAAQQYLPNTLRGRTFYVPSSSGYEGKIREDVLRKRELQAAIVLGSQKDTDADGEFLSWSAASKGRESWFKRLESGRSRLLLSDRDAIFTSASVTRQDRVLIPLANDGLLLWESLRHCPEGLSAALVNNAAAKDALYQYASVLDETEKPLIAVTEEILPNPKECDDWFSCSQFDHILIRALRLTCTPTFLASRAKALLAKNGNVVLLCSPPRLGERLSRILLQECGQKELSSALEQAEELS

SEQ ID NO: 5603 - DNA, 831 bp, Unknown
  Obtained from environmental sample
  misc_feature (1)..(831): n is a, c, g, or t
ttggagctcttggcaactgttatcacgtccagcaccaagagcaacacctacggctggcttggggctttcccccagttgcggaaatgggtcggcgaccgcgtcgtaaaggacatagcggaattcgcctaccagattgtcaacgaaaagtacgagtctaccctgggggttgaccgcaccgatatcgaagacgataacctgggccagtaccgggtattggcgcgggaaatggccgatgagtttgagcggtttatgaaccgcaatgtggcagccctgatcactggcggctttacaaacatctgctacgacggccaaaaattctttgatgtcgcccatccggtctacccgaatacggacggcaccggcgaagcgacagaagtttccaacatcatcggaaccggaaacggctccccttgggcgctggtatcccttttaggaagcctcaagccttttatcgcacagcagcgcagccagccagagttcgatgaaatcaccgacaccaaaaacgacagcgtcttcatgacggacaagtacatgtacggcatccgctaccgcggtagtttcggctacggcctgtggcagcaggctatcggttcaaaggctcccctaacggcggccaattacgaagcggcaaggcttgccatgcagaccttaaagcgggacggcggcgatcccctgggcatcgtgccgacccacctgattgtcggccccaccaacgaggcggcagcccgcgcgatcctgtcgagggaactcatcaacggcggcgagtccaaccccaactaccacacggcggaactcttggtagtcccgccttataaggagacgcagtcatga

SEQ ID NO: 5604 - protein, 276 aa, Unknown
  Obtained from environmental sample
  misc_feature (1)..(276): Xaa is any amino acid
MELLATVITSSTKSNTYGWLGAFPQLRKWVGDRVVKDIAEFAYQIVNEKYESTLGVDRTDIEDDNLGQYRVLAREMADEFERFMNRNVAALITGGFTNICYDGQKFFDVAHPVYPNTDGTGEATEVSNIIGTGNGSPWALVSLLGSLKPFIAQQRSQPEFDEITDTKNDSVFMTDKYMYGIRYRGSFGYGLWQQAIGSKAPLTAANYEAARLAMQTLKRDGGDPLGIVPTHLIVGPTNEAAARAILSRELINGGESNPNYHTAELLVVPPYKETQS

SEQ ID NO: 5605 - DNA, 480 bp, Unknown
  Obtained from environmental sample
  misc_feature (1)..(480): n is a, c, g, or t
gtgaagggagaagaaacgcctgaataccttgccagtcgggcatcgcggggcgatgaagaaagttttgccgctctctgcgacgttttgaagacaaagctctttcgtaccgcaaagggcgtacttggcaatgaaaccctcgcccttgacgccgtcagtgaagctgtctttcgggcatttaagggaataaagcggctacgcgaacctaaatatgcggaaacatggtttattcgcatcgtattgaatgtggcaaaggatattaagaggaggcaaaaacgtgaggtagttatggagacagtgcctgaaggcgcacattacgataatcatggtgatatggaattttttgctctgattgaatctttacaaagggagcttcgggaaatcatcagtttgaagtattactccggttatacgctggctgaaatatcggaaatactgaacataccggaaggaacggttaaaagccgcttaaacagggcgtaa

SEQ ID NO: 5606 - protein, 159 aa, Unknown
  Obtained from environmental sample
  DOMAIN (110)...(159): Sigma-70, region 4
  misc_feature (1)..(159): Xaa is any amino acid
MKGEETPEYLASRASRGDEESFAALCDVLKTKLFRTAKGVLGNETLALDAVSEAVFRAFKGIKRLREPKYAETWFIRIVLNVAKDIKRRQKREVVMETVPEGAHYDNHGDMEFFALIESLQRELREIISLKYYSGYTLAEISEILNIPEGTVKSRLNRA

SEQ ID NO: 5607 - DNA, 324 bp, Unknown
  Obtained from environmental sample
  misc_feature (1)..(324): n is a, c, g, or t
ttgctattgaacgagtatgcctgccttttccgcggcgaaatggattttaccgccttcgcgattcccggcgacaaaagcaaatcgcgtttccggtatgtcgccaatgcctgcttttttttcgatagagataagctggtctttgaaattaccgccaacgcttttttatggaagatggttcgttccattgccggaactctgatacgttttgaagaaaaaaaattaagctcctcttatttacgcgaagtaattgaatcgcgagatcgaaagctaacagggcccaccgctccgccggaggggctttttttatggaaaattgatttttag

SEQ ID NO: 5608 - protein, 107 aa, Unknown
  Obtained from environmental sample
  DOMAIN (6)...(107): tRNA pseudouridine synthase
  misc_feature (1)..(107): Xaa is any amino acid
MLLNEYACLFRGEMDFTAFAIPGDKSKSRFRYVANACFFFDRDKLVFEITANAFLWKMVRSIAGTLIRFEEKKLSSSYLREVIESRDRKLTGPTAPPEGLFLWKIDF

SEQ ID NO: 5609 - DNA, 525 bp, Unknown
  Obtained from environmental sample
  misc_feature (1)..(525): n is a, c, g, or t
ttgaaacanggttataacatgaactcttataccattgaaccgaatcaggttgtggttgaaggccccgctacccttctgggaaatcttttcgagctttatacagactatattgatctttccgcccgcagaagtaattttaccgagagcgctccgattgtacgcagcgatcccctcattatgatccggggcgacggatacgtcaatttttccgcttccatcagccagatcatctcggtaaggaatatctccaatgttccgattgtcataaccggactggatgagcagtttacaggtgaattggaaacagcgtcagcaaacattcgcattgaaggatatgaccgtgccgctgtggactcttttgttccttcccgtgaatttttaaaggttgattgttcgcaaatcagcgagagcggggattacgttttaagcgttcttgtcggatctgtcccaggtttaagcttcagggtggatccacgggaagcgaaaattcaggttacggatgcgggagaagaagaaagcgagtga

SEQ ID NO: 5610 - protein, 174 aa, Unknown
  Obtained from environmental sample
  misc_feature (1)..(174): Xaa is any amino acid
MKXGYNMNSYTIEPNQVVVEGPATLLGNLFELYTDYIDLSARRSNFTESAPIVRSDPLIMIRGDGYVNFSASISQIISVRNISNVPIVITGLDEQFTGELETASANIRIEGYDRAAVDSFVPSREFLKVDCSQISESGDYVLSVLVGSVPGLSFRVDPREAKIQVTDAGEEESE

SEQ ID NO: 5611 - DNA, 423 bp, Unknown
  Obtained from environmental sample
  misc_feature (1)..(423): n is a, c, g, or t
ttgttcgcaaatcagcgagagcggggattacgttttaagcgttcttgtcggatctgtcccaggtttaagcttcagggtggatccacgggaagcgaaaattcaggttacggatgcgggagaagaagaaagcgagtgatcaaaggcattggcgttgatatggtctatgttcatcgcatgaaaaagtggagggaaatctccggtattttggagcgtttttttcacggagaagaactgtctgccgctttggaaaaaggaaacggcgctgatttttctttagccgtaaggttcgcggcaaaagaagcttttggaaaagcattgggtaccggtcttaggggtattgtacttaaagacataatgataaaaaacaaggataacggtcagcctgaattaaaggtttctggtacggctctatcggccccttga

SEQ ID NO: 5612 - protein, 140 aa, Unknown
  Obtained from environmental sample
  DOMAIN (49)...(115): 4'-phosphopantetheinyl transferase superfamily
  misc_feature (1)..(140): Xaa is any amino acid
MFANQRERGLRFKRSCRICPRFKLQGGSTGSENSGYGCGRRRKRVIKGIGVDMVYVHRMKKWREISGILERFFHGEELSAALEKGNGADFSLAVRFAAKEAFGKALGTGLRGIVLKDIMIKNKDNGQPELKVSGTALSAP

SEQ ID NO: 5613 - DNA, 813 bp, Unknown
  Obtained from environmental sample
  misc_feature (1)..(813): n is a, c, g, or t
atggatgcaggaaaaagatcaataaatgatatttttaatggtaatagaatattagaaatacctttttttcaacgatcttatgtatggggagaagaacaatgggaaagacttcttgaagatatgtatcaaatttgttcaacaaaaaaaacatatttctttggttctgttatattaaaacaacaacaaaccactacaagtcaacaggttggagatagacgtattgtaatagatggacaacaaagattgacgacattaaatattttctttaaagttctttgtattaaatgcaacaaagacagtacgtttgaacgtatatttaaactacttaataatgaaattgcattaattcacaattacaatgacagtaatgcatttaataaaattttaaaattggaaaaactagatgaaatagatgaaaatgattcaatttctttatgttataaatacttctccaaaaatcttaatgaaaagaaattagatattaatactttattatcaaaaatattatttgttggaattgatatagatgaaaacgaagatgagcagcaaatatttgatacaattaattccttgggagtaaaattaactactgcagaattattaaaaaactattttttcaataaggataatatcataatgtatgaatcatattggaaaaacatttatgaactagacgaagaaacaaaagaatattgggacatagaagtaacgacaggcagattaaaaagaacctttattgatttatttttattttcatatttgcaaataaaaatgcaaacaaagctgctgaatgtaagacctctgccgatctga

SEQ ID NO: 5614 - protein, 270 aa, Unknown
  Obtained from environmental sample
  DOMAIN (7)...(215): Protein of unknown function DUF262
  misc_feature (1)..(270): Xaa is any amino acid
MDAGKRSINDIFNGNRILEIPFFQRSYVWGEEQWERLLEDMYQICSTKKTYFFGSVILKQQQTTTSQQVGDRRIVIDGQQRLTTLNIFFKVLCIKCNKDSTFERIFKLLNNEIALIHNYNDSNAFNKILKLEKLDEIDENDSISLCYKYFSKNLNEKKLDINTLLSKILFVGIDIDENEDEQQIFDTINSLGVKLTTAELLKNYFFNKDNIIMYESYWKNIYELDEETKEYWDIEVTTGRLKRTFIDLFLFSYLQIKMQTKLLNVRPLPI

SEQ ID NO: 5615 - DNA, 555 bp, Unknown
  Obtained from environmental sample
  misc_feature (1)..(555): n is a, c, g, or t
atggcgttggcgaacgagggtcagaccatcaaaaaccaccgtgatattttcaaaacgccgtatatattggaatttaccggacttgaagagcgttcggaatacagcgaatccgaactggaacaggcactaatagacaacttacagaaattcctgcttgaactcggcaaaggttttctgttcgaggcgcgtcagaaacggttcacttttgatgaagactactttatcgtagatttagttttctataaccgtcttttgcaatgctatgtgctgattgacctcaaagccgataagttgaagcatcaggacttggggcaaatgcaaatgtacgtcaattactttgaccgatatgtcaaaaccgaaactgaaaagccaacggttggtattttattgtgtaaagaaaagaacgatagcattgttgagttgaccctgccgaaaaattcgaacatttacgcatcggcatacagtctttatctgcctgacagggctctgctgcaacgcaagcttgccgagtggattgaagaattcgaggaagaacgcggaggtaacggcaaatga

SEQ ID NO: 5616 - protein, 184 aa, Unknown
  Obtained from environmental sample
  DOMAIN (2)...(171): Protein of unknown function (DUF1016)
  misc_feature (1)..(184): Xaa is any amino acid
MALANEGQTIKNHRDIFKTPYILEFTGLEERSEYSESELEQALIDNLQKFLLELGKGFLFEARQKRFTFDEDYFIVDLVFYNRLLQCYVLIDLKADKLKHQDLGQMQMYVNYFDRYVKTETEKPTVGILLCKEKNDSIVELTLPKNSNIYASAYSLYLPDRALLQRKLAEWIEEFEEERGGNGK

SEQ ID NO: 5617 - DNA, 870 bp, Unknown
  Obtained from environmental sample
  misc_feature (1)..(870): n is a, c, g, or t
atgcccgagatggacggtttggaaaccatacaaaagttgaaaaccaataattactacaaggacgttccggtaatatttttaaccaactacagggaagactctattgaaagtttcggatttgaacttggcgttgtagattttatctcaaaaccgttttctacgccggtgttgataaaccggattaaaacacagcttgacattgatactttgatccgcgaccggactgaaagaatcaaacgactgcaaaacggcatcatgacggttttagccaacgtggtagaggaacgcgacaaggacacaagggggcataacgaccgtacggcggcgtatgtcaaaatactcatagaagcgatggtagaacatggagtatacgccgatgaaataagaggttgggacatggaaaaagttattttttcttcccggttgcacgatatgggaaaaatcagcgtaatggatacaattcttaacaaacccggcaagttgagcgatgaagaatatgagcagatgaagtaccacaccatggaaggcgtgaagataattgacaggatgataatgcagacgggcgaagaggattttttacaaaacgccaaattatacgccgaataccaccatgaacgctgggatggtacgggttatccgcatgggcttaaggggactgacattccgctacatggccgtgttttagcgatagtggacgcgtatgacgcgctagtatccaaacgcccctacaaggaagcgaatacgcatgaagaagccgtgaaaaacatttcggaaaattccggcaagcaattcgacccgaaaattgttgaggtttttattgccgagcaggataagtttaaggaagcaagcgagtccacgtataccgtttga

SEQ ID NO: 5618 - protein, 289 aa, Unknown
  Obtained from environmental sample
  DOMAIN (114)...(237): HD domain
  misc_feature (1)..(289): Xaa is any amino acid
MPEMDGLETIQKLKTNNYYKDVPVIFLTNYREDSIESFGFELGVVDFISKPFSTPVLINRIKTQLDIDTLIRDRTERIKRLQNGIMTVLANVVEERDKDTRGHNDRTAAYVKILIEAMVEHGVYADEIRGWDMEKVIFSSRLHDMGKISVMDTILNKPGKLSDEEYEQMKYHTMEGVKIIDRMIMQTGEEDFLQNAKLYAEYHHERWDGTGYPHGLKGTDIPLHGRVLAIVDAYDALVSKRPYKEANTHEEAVKNISENSGKQFDPKIVEVFIAEQDKFKEASESTYTV

SEQ ID NO: 5619 - DNA, 591 bp, Unknown
  Obtained from environmental sample
  misc_feature (1)..(591): n is a, c, g, or t
ttgtacgcggtggtgatgcacagcttcaggggaggggtggtcaactacccgcttgtgctggccctggcccaggagctggaagaaatgctgaagctcagggtggaatcgttttccaatgacgattcgcttctcctgttaataccccggctgggtgttgaaggaaatataaaacaaatagaaaatatttttcgtaatgccattacagagcttaataaaagcggcggaaacggccttttccggggggagaggctgttcagaaaccggctggaaacatccggcatcttcggggcgagtttccgcgaggctgcggaaaggagcctcttgttgcccaaagcgggttttggcaagcggaccccgctgtggatcacaaggcagcgttccaagcggctttttgacgcggtaagcggcgaagacggtttcccggttaccgccgaggcgtggcggagctgccttgttgatttattcgacatggaaggtttccgagatttgttaggcgcaattaacgacaacacggtcgctttgtctttttttacagcagcatccccaggcccttttcgcgtgacatggtacgccaggaaacccataccctga

SEQ ID NO: 5620 - protein, 196 aa, Unknown
  Obtained from environmental sample
  DOMAIN (1)...(186): DEAD/H associated
  misc_feature (1)..(196): Xaa is any amino acid
MYAVVMHSFRGGVVNYPLVLALAQELEEMLKLRVESFSNDDSLLLLIPRLGVEGNIKQIENIFRNAITELNKSGGNGLFRGERLFRNRLETSGIFGASFREAAERSLLLPKAGFGKRTPLWITRQRSKRLFDAVSGEDGFPVTAEAWRSCLVDLFDMEGFRDLLGAINDNTVALSFFTAASPGPFRVTWYARKPIP

SEQ ID NO: 5621 - DNA, 717 bp, Unknown
  Obtained from environmental sample
  misc_feature (1)..(717): n is a, c, g, or t
gtgcatttttattgggcgggttttaggttgatggatttattcttatttgttagccccgtggcaagcattatattttccacaatgggcttggttccctggagtttgctgataataggcgtgttttttgtctccgtccggttcaaatttcctctgtggtttataattctggtgatgacggtggatataagctcaggatatgccagtcaaatagcttggaacaccatggaagaccaccagcgaagccgcattttaacctttatagacccaatgcgagacccaaaggggcagggttatcaggttatacagtcgcaggtggcaataggaagcggcgggatgttcggcaagggatttggcgcaggctcgcaaaccaacttggcgtttttgcccgaagagcacacggattttatattcagcgttttgggagagcaattcggttttgctggaacgcttgtggtattagctctgtttttcgttttgcttttgcgagggatatctatatgcaaattgtatcccgatagttttgtgaacctgatgattgcagggatatgcgctacgctgtttttccacgtggtggtaaatgtagccatgactgtaggctttatgccggtgactgggttaccattgccatttctctcttacggtgggtcttttgttttaacttgcatgatttttgtgggtttgctgataaatctgcgcttgaaaggaaaggatatttaa

SEQ ID NO: 5622 - protein, 238 aa, Unknown
  Obtained from environmental sample
  DOMAIN (1)...(237): Cell cycle protein
  misc_feature (1)..(238): Xaa is any amino acid
MHFYWAGFRLMDLFLFVSPVASIIFSTMGLVPWSLLIIGVFFVSVRFKFPLWFIILVMTVDISSGYASQIAWNTMEDHQRSRILTFIDPMRDPKGQGYQVIQSQVAIGSGGMFGKGFGAGSQTNLAFLPEEHTDFIFSVLGEQFGFAGTLVVLALFFVLLLRGISICKLYPDSFVNLMIAGICATLFFHVVVNVAMTVGFMPVTGLPLPFLSYGGSFVLTCMIFVGLLINLRLKGKDI

SEQ ID NO: 5623 - DNA, 891 bp, Unknown
  Obtained from environmental sample
  misc_feature (1)..(891): n is a, c, g, or t
ttgttatccaaaatttttatccgggaggggaacaaaattagcgcttctaaaatcatagactcggataagataatagcttccctatgcgaaggcggctccgtcgctgaccttcttccttcatacgagccgcgtaaggctcagcttgatttgcttgcccttatcacccgcgcctttaacgaagacgcgcttgttatggcggaagcgggtacgggcgtgggcaaatcattcgcctacctccttcctgccatgcactntgcgcttgcaaacaaggaaaaagtggtcatctccaccgccaccattacgcttcaacagcagttatttgaaaaggacatcccacttgtcgcttcaagtatgccagacgtaaaaattaaatccgtcattatgaaaggaaggggaaattacctgtgtctgcgcagacttgacgacacgttacgcgaaggtttgctttttgattttgataaagaagaaattgataatattgtggaatggtcgcagaaaacaaaaacaggggcaaaatcggaacttacatttatgccttccgaaaccctatggaccggcgtatgctctgaatctgatctatgtttgggaaaccactgccattggagggataagtgctttatactcgcccttcgcaaagaagcaaataacgcgcacataatcgttgtaaatcatcatttgctttttgccgatttggcagcaaggtatcagggcgcgggttatgaaagcgcggtagttttaccgccatttaaccgtcttatcatagacgaggcgcacactattgaaaacgcagcgacttcttttttttcgcaggagttcgcgagaacgggaatttttcgccaactttcaagactttacaatacgcgcagggcaaatatgcacggcttactgtaa

SEQ ID NO: 5624 - protein, 296 aa, Unknown
  Obtained from environmental sample
  misc_feature (1)..(296): Xaa is any amino acid
MLSKIFIREGNKISASKIIDSDKIIASLCEGGSVADLLPSYEPRKAQLDLLALITRAFNEDALVMAEAGTGVGKSFAYLLPAMHXALANKEKVVISTATITLQQQLFEKDIPLVASSMPDVKIKSVIMKGRGNYLCLRRLDDTLREGLLFDFDKEEIDNIVEWSQKTKTGAKSELTFMPSETLWTGVCSESDLCLGNHCHWRDKCFILALRKEANNAHIIVVNHHLLFADLAARYQGAGYESAVVLPPFNRLIIDEAHTIENAATSFFSQEFARTGIFRQLSRLYNTRRANMHGLL

SEQ ID NO: 5625 - DNA, 819 bp, Unknown
  Obtained from environmental sample
  misc_feature (1)..(819): n is a, c, g, or t
atggattatcaacaaaaacttaaccaactgggacttgaagtcccttttatcctcctgccgcagtccgcgcagtcttctccgtcggaattggcaaaatggtccgtaattgcgtgcgatcaatttacgcaggatcgtgattactgggaaaaggcaaaaacaatcgccgccggttctccttccacccttaatttgatttttcccgaagtatttctttccgacggcggagccgataaaagaatcgccgacatacattcaaccatgaggcgttacctgcaagaaaatgtttttgcccagccgaggcagggatttatttatatcgaaagagataccccgtattttaaaaaaaggcgcggtttaattgccgcagtcgatttggaacagtacgagtggcagccgcaggcgcgtccgttaatccgctgtacggaaggcactgtccctgagcgcctgcccccgcgaatggatatccgcagagccgcgcctctggaactcccccacgtccttttgcttattgacgacgagacagagagtattctgtccgctatcggcgagcaagtaaaaaatacaccaccatgttacagtacgccgttaatgatggattcgggaaaagtaacaggctggtttctggatactgaaagcggcgaaaaatcattatcttatattgcggacaaattagacgagctttataaacgttctacggggcgttacggcggagagggaaagcctttcctctttgcggtaggcgatggtaaccattctctcgctacggcaaaaggtattgggaggagacaaagcggacatccaagcgggcgaccgccataa

SEQ ID NO: 5626 - protein, 272 aa, Unknown
  Obtained from environmental sample
  DOMAIN (11)...(264): Protein of unknown function (DUF1015)
  misc_feature (1)..(272): Xaa is any amino acid
MDYQQKLNQLGLEVPFILLPQSAQSSPSELAKWSVIACDQFTQDRDYWEKAKTIAAGSPSTLNLIFPEVFLSDGGADKRIADIHSTMRRYLQENVFAQPRQGFIYIERDTPYFKKRRGLIAAVDLEQYEWQPQARPLIRCTEGTVPERLPPRMDIRRAAPLELPHVLLLIDDETESILSAIGEQVKNTPPCYSTPLMMDSGKVTGWFLDTESGEKSLSYIADKLDELYKRSTGRYGGEGKPFLFAVGDGNHSLATAKGIGRRQSGHPSGRPP

SEQ ID NO: 5627 - DNA, 834 bp, Unknown
  Obtained from environmental sample
  misc_feature (1)..(834): n is a, c, g, or t
ttgggtttggatgcagatattcccatgggtgaaaccattcaaattttgcaaagcgattcccaagaaccgcaagaaacttggctttccatagtcaaaacccaaaaagctcaatctgccataaggcaatggcttacaaagactataacaactcaatctgaatttttaggacaaaaaatatggcaaagggagttgcaaggtttaaaaatatcaaaagaaaattacccaaaagattccgatatttgtcaagcttttaaggttcaaaacataagttctttttacgaaagtcttggcaaaagcgaaattcctcttaaaaatgttttcaatttcttaaaacaatattcagacgattcttatgcttggcaaaaactcaagctctttaatgtattcagctcggcagaaaatgcccctataagcataggttacaacgaaagatttttgctgaactatgccccttgttgcaaccctctaccgggggataatgttagaggaattatgaaaagcggcaagggaatagaggtacacaaggaaaattgcaaaattttgaacaaattcccacaggaacagcaaatatccctgcaatgggagcagcaaaatgcagtaaaaccggagttcaaatgcgttttcagggtagaagcggtggataaaatgcaaatggaagatattttcagtgcggtttcaaaacacaacgcgcttgtgaaaaaaactatatttgagaataaagaaggacagctaaggggcaagatagacttgctggcttataattctgctcaggtaaagaacatagagcagtctttaacagccattgctggaattcaaaggataagattgttatga

SEQ ID NO: 5628 - protein, 277 aa, Unknown
  Obtained from environmental sample
  misc_feature (1)..(277): Xaa is any amino acid
MGLDADIPMGETIQILQSDSQEPQETWLSIVKTQKAQSAIRQWLTKTITTQSEFLGQKIWQRELQGLKISKENYPKDSDICQAFKVQNISSFYESLGKSEIPLKNVFNFLKQYSDDSYAWQKLKLFNVFSSAENAPISIGYNERFLLNYAPCCNPLPGDNVRGIMKSGKGIEVHKENCKILNKFPQEQQISLQWEQQNAVKPEFKCVFRVEAVDKMQMEDIFSAVSKHNALVKKTIFENKEGQLRGKIDLLAYNSAQVKNIEQSLTAIAGIQRIRLL

SEQ ID NO: 5629 - DNA, 444 bp, Unknown
  Obtained from environmental sample
  misc_feature (1)..(444): n is a, c, g, or t
atgccaaagaagaagtgcacgccgaacataaagccgcgacttttatcctggagaacgggcttatcagggcgacaaagtacgaagagccggatgaaagatcgaagaaggggccggatggctatacaaccaattgatcttcagaccctttttacccagcttgacaaggtagcgaaaatacaaagcgaccagcgtgaaggcgcggcgctgcatcaggctattcagggcgcgcagcttcagcgcaagacggaagatcaaattaaagcggtaaaccaggcgcagaatatgggtgaagacggcgccgagaaagtaaaagacagggggccgcagacgcataacggcaatggcaagaaaaaacaggaagacgaaaaacctcagcaggaggaagcaaaggcggcagttattcatgaccccagcctgggcaggaatattgatataagcttgtag

SEQ ID NO: 5630 - protein, 147 aa, Unknown
  Obtained from environmental sample
  misc_feature (1)..(147): Xaa is any amino acid
MPKKKCTPNIKPRLLSWRTGLSGRQSTKSRMKDRRRGRMAIQPIDLQTLFTQLDKVAKIQSDQREGAALHQAIQGAQLQRKTEDQIKAVNQAQNMGEDGAEKVKDRGPQTHNGNGKKKQEDEKPQQEEAKAAVIHDPSLGRNIDISL

SEQ ID NO: 5631 - DNA, 771 bp, Unknown
  Obtained from environmental sample
  misc_feature (1)..(771): n is a, c, g, or t
ttgatgatagtcggcgttgtgagtatcatcagtttgtacaatctgaacgatgaatataacgacgctattgtggaacatggcatgccgttgggcgatgccgcgcacgttttggaggctgtccataccatacgcgccgaagtaaggggcagcatcctctttaccggcaataaggagaaggttatagagtttagaaatgagatagaaaggcagtttaagcagtttgaggaggccacggagaaattcggcaaggccctcgatagtcatcccagcgccaaagcgttgatgaccgaggctatggacaaatacgatagagttttcaaaccgagcgtgcgtaaagtattggatggcgccgagaggggggcaccgaaggaggagttgctcgcggaaatgctctccaacacgacgccggcggtggatttgatttcgacaaacttgagaaagtgtacggattttgatttggaggagttgcacgaatctgtgacaatcggggtcagactcgccacaacggttattgttatcatggtcattcttacagggatgtgcttcgccgccatgatacttttggggagacatatctccgacatgatcagcaaaccgcttaatgtggcggtgaagatgttagacgagttgggccatgggcatttggatatgaggctcaacttgggagaccgtaccgacgaggtcggcattatggctaaaaccatgaataagtcgctcacgatctgcggggacgaaatggtcgccacctatgaaaatgatctccgtgagtga

SEQ ID NO: 5632 - protein, 256 aa, Unknown
  Obtained from environmental sample
  DOMAIN (174)...(244): HAMP domain
  misc_feature (1)..(256): Xaa is any amino acid
MMIVGVVSIISLYNLNDEYNDAIVEHGMPLGDAAHVLEAVHTIRAEVRGSILFTGNKEKVIEFRNEIERQFKQFEEATEKFGKALDSHPSAKALMTEAMDKYDRVFKPSVRKVLDGAERGAPKEELLAEMLSNTTPAVDLISTNLRKCTDFDLEELHESVTIGVRLATTVIVIMVILTGMCFAAMILLGRHISDMISKPLNVAVKMLDELGHGHLDMRLNLGDRTDEVGIMAKTMNKSLTICGDEMVATYENDLRE

SEQ ID NO: 5633 - DNA, 897 bp, Unknown
  Obtained from environmental sample
  misc_feature (1)..(897): n is a, c, g, or t
atggtaaccagccagattcttaaagaactgaaagaagggcggatcaccatgctgctgggcgtgccaatgcttttcaacaaagtgctggccggtattatccgggggcttaaggcaaaaggccctgttgtttacgggctaatgtcatttttgatgggcatatcaggacttgttaaaaaagtattgaaggtaaaccccggcaaaaaaatgttcggctttattctggaaaaggccagtcttacttcgataaggatctgtatctgcggtggcggccctcttgccccaagcgtattcaaaaaatacaaccagcttggcatcgactttgtgcagggttacggcctgacagaaacctcccccatcattacgattaaccccgttgagcattacaaggaaaccagcgtaggcaggccctgtccccgcgctgacataaaaatactaaaccccgatgagcgcggcataggcgagataattgtcaaaggccccatggtgatgaaaggctactataatatgccggctgaaacctcggaaacttttactcaggacggctatctcaagaccggggacctgggttacatggacagcgaaaactacctgtacctcaccggcagggaaagaaacttgatcgttaccgaaggcggcaaaaacgtctaccccgaggaaattgaaaacgagttccagctttttgatgagatcgagcagatacttatcaggggttttacgccggacaaganaacaaagtcagaaagcatagaagcccttgtatatcccaacccggatttcaaagatgaaaaagacgttacaccttccgctgaacagatgaaagcccgcattgacaagatcatttccacagtgaaccagcggctcctcccctacagcggattgaaagacaactatccttga

SEQ ID NO: 5634 - protein, 298 aa, Unknown
  Obtained from environmental sample
  DOMAIN (1)...(235): AMP-binding enzyme
  misc_feature (1)..(298): Xaa is any amino acid
MVTSQILKELKEGRITMLLGVPMLFNKVLAGIIRGLKAKGPVVYGLMSFLMGISGLVKKVLKVNPGKKMFGFILEKASLTSIRICICGGGPLAPSVFKKYNQLGIDFVQGYGLTETSPIITINPVEHYKETSVGRPCPRADIKILNPDERGIGEIIVKGPMVMKGYYNMPAETSETFTQDGYLKTGDLGYMDSENYLYLTGRERNLIVTEGGKNVYPEEIENEFQLFDEIEQILIRGFTPDKXTKSESIEALVYPNPDFKDEKDVTPSAEQMKARIDKIISTVNQRLLPYSGLKDNYP

SEQ ID NO: 5635 - DNA, 423 bp, Unknown
  Obtained from environmental sample
  misc_feature (1)..(423): n is a, c, g, or t
atgccggcaaaaaaatatattgtgacattaacagaagatgaaaagaaaacgttgaaagtaataatcaacaaaggaaagtatagcgcggagaaacgcaaacgggcgcaagcacttttacttgcggatgaaaattacacagatgaaatgatagccgataaagcagggatgagcaggagaggtctggaacagttgaggcagcggtttgttgaggacgggtttgaagtaacccttgaagggaaacctcgcggccacaagccaaaagcattaggggcaaaggacgaggcgcgtttaatagcgttagtatgcagccctaaaccagacgggcgcacccgctggagtttgcggctgttacaacagacatggaaaaccctggcatatacagatacaaagacagtatcataccagacaatcagaaggatataa

SEQ ID NO: 5636 - protein, 140 aa, Unknown
  Obtained from environmental sample
  misc_feature (1)..(140): Xaa is any amino acid
MPAKKYIVTLTEDEKKTLKVIINKGKYSAEKRKRAQALLLADENYTDEMIADKAGMSRRGLEQLRQRFVEDGFEVTLEGKPRGHKPKALGAKDEARLIALVCSPKPDGRTRWSLRLLQQTWKTLAYTDTKTVSYQTIRRI

SEQ ID NO: 5637 - DNA, 351 bp, Unknown
  Obtained from environmental sample
  misc_feature (1)..(351): n is a, c, g, or t
atgtttctngccgaacgggaaatatttgccaaactgagaccgtgccttgatgaacttatgggcgatagcatttacataacccagagccatcggacttttctggaagttatggacgcgaaagtttccaaaggacaggggctttctttcgttatggaacgcctgtcgttaaaacgcgaagaggtaatagcgtttggcgacgaagaaaacgatatccccatgttcgcgagcgccggtttntccgtcgctccttccaacgcgaaagacgtggttaaagccaaagctgacattgttgttggttccaacgccgacgacggggtagctgtgtttttggaagattttttttcattatag

SEQ ID NO: 5638 - protein, 116 aa, Unknown
  Obtained from environmental sample
  misc_feature (1)..(116): Xaa is any amino acid
MFLAEREIFAKLRPCLDELMGDSIYITQSHRTFLEVMDAKVSKGQGLSFVMERLSLKREEVIAFGDEENDIPMFASAGXSVAPSNAKDVVKAKADIVVGSNADDGVAVFLEDFFSL

SEQ ID NO: 5639 - DNA, 321 bp, Unknown
  Obtained from environmental sample
  misc_feature (1)..(321): n is a, c, g, or t
gtggatgtccgggagaccgaaaaatcctacatactcgacatggaacttccgggctatgacgaaaaggacattgaaatccacattgacggggcaagcctttccatcgcttcaaaacaggaggaaagctccggcaaggaaggggacaccggcacctggctcctgcgggagaggcatgtcagttccttcagccgttctttcaaactgcctgataacgcaaacccggaagaggttaacgccgaattcaaaaacggcatcctcaaattggagatcggcaaacgggcggaggcccagaaaagggcaatacggatcaatgtcaaataa

SEQ ID NO: 5640 - protein, 106 aa, Unknown
  Obtained from environmental sample
  DOMAIN (2)...(106): Hsp20/alpha crystallin family
  misc_feature (1)..(106): Xaa is any amino acid
MDVRETEKSYILDMELPGYDEKDIEIHIDGASLSIASKQEESSGKEGDTGTWLLRERHVSSFSRSFKLPDNANPEEVNAEFKNGILKLEIGKRAEAQKRAIRINVK

SEQ ID NO: 5641 - DNA, 336 bp, Unknown
  Obtained from environmental sample
  misc_feature (1)..(336): n is a, c, g, or t
atgagcagcgcggatcgcgctttcctgcgcgagagggtaatcgccagggtggaaagcccaaatcaggaacgggggtatttgtccacgctgcggagcatgggacctttttttatgtttaataagaggtttatttcccgcgggataaagacatatccggggaaaatcgctatactgtggggcgagaaagacagggttttacctgttggaaaagccgggctttttcgcggcctgcgccctgacgcgcggatgacggtaatccctggcgcgggacaccttccccatcaggaaaaacctgaagaaacggcggcgcagatgctgcggttcctgaacaaataa

SEQ ID NO: 5642 - protein, 111 aa, Unknown
  Obtained from environmental sample
  misc_feature (1)..(111): Xaa is any amino acid
MSSADRAFLRERVIARVESPNQERGYLSTLRSMGPFFMFNKRFISRGIKTYPGKIAILWGEKDRVLPVGKAGLFRGLRPDARMTVIPGAGHLPHQEKPEETAAQMLRFLNK

SEQ ID NO: 5643 - DNA, 639 bp, Unknown
  Obtained from environmental sample
  misc_feature (1)..(639): n is a, c, g, or t
atgaatggagtgtactttgaaaaagcagatggcaaattagtgatggtagctactgacggcaggcgacttgcgtttataaacaaaaacgttgaaggaattccagatttttctggaatcattattcctcccaagatactcaacatcgtacagaaacgtgccggagatgaaggaatggcaggaatatccataactgataaaactatatttatccaatttggttcatataaattgtcgtcagtgcttattgacggacagtttccaaattacaagagggttatccccgaaaaccaaaccaaaagctttacagttaatcgtaatgaaatgctggatgccttaaagcgagtttctcttttggttgaacaaaagtcccatcgcctttacttggccctctcttccggcgccgtttcgatctactgtgaagaaaacgacataggcaatgctagggaagagattccctgcaaatacgacggagaagaagttataatcgctttgaattaccgctatttggaagagccttttaaggtaattgttacggaagagatcggcgtcctttttagcgatccgaacaagacgataaccattttgccggttccggaaaaagattatttccacatcgtaatgccaatgcagcaagactag

SEQ ID NO: 5644 - protein, 212 aa, Unknown
  Obtained from environmental sample
  DOMAIN (1)...(88): DNA polymerase III beta subunit, central domain
  misc_feature (1)..(212): Xaa is any amino acid
MNGVYFEKADGKLVMVATDGRRLAFINKNVEGIPDFSGIIIPPKILNIVQKRAGDEGMAGISITDKTIFIQFGSYKLSSVLIDGQFPNYKRVIPENQTKSFTVNRNEMLDALKRVSLLVEQKSHRLYLALSSGAVSIYCEENDIGNAREEIPCKYDGEEVIIALNYRYLEEPFKVIVTEEIGVLFSDPNKTITILPVPEKDYFHIVMPMQQD

SEQ ID NO: 5645 - DNA, 732 bp, Unknown
  Obtained from environmental sample
  misc_feature (1)..(732): n is a, c, g, or t
ttgctttctgcgcttgatgataagattgaggcaaatacaaaaataaaccatcatttagaattgacggcgcaggctatgttcaagtcttggtttgtggattttgaaccttggggtggggttatgcctgaagactggggtactagtacaattagtgaaattgctactgaaattgtgtgcggtaaaacaccttctaccaaggttagtgagttttttggaaatgatataccgtttataactatccctgatatgcatgggcgagtatatgttacatcgaccgagcgttcactttctaaagccggtgcaaattctcaacaaagtaagaccgttccgcctaatagtatttgtgtgagttgtatcgcaactgcaggattaatatccctaacttctgtacctagccaaacgaatcagcagataaatacgattgtttgtaaaaatggaattaacccttttttcatctaccttacgatggttggaatgtctgataaaattaaaatgcttggatcaagtgggagtgctacgaacaacttaaataagggtcaattctcaaaaatggagttgttaattcctgaacgtagcattatagacaaatttgcagccatcattagtccattatttgaagaaataaagcgtaatcagcatgaatcttcacacctagccatcttacgcgacactttgttgccccgcttgatgtccggtgacctatctatccccgacctcggaggcgctaaatga

SEQ ID NO: 5646 - protein, 243 aa, Unknown
  Obtained from environmental sample
  DOMAIN (45)...(206): Type I restriction modification DNA specificity domain
  misc_feature (1)..(243): Xaa is any amino acid
MLSALDDKIEANTKINHHLELTAQAMFKSWFVDFEPWGGVMPEDWGTSTISEIATEIVCGKTPSTKVSEFFGNDIPFITIPDMHGRVYVTSTERSLSKAGANSQQSKTVPPNSICVSCIATAGLISLTSVPSQTNQQINTIVCKNGINPFFIYLTMVGMSDKIKMLGSSGSATNNLNKGQFSKMELLIPERSIIDKFAAIISPLFEEIKRNQHESSHLAILRDTLLPRLMSGDLSIPDLGGAK

SEQ ID NO: 5647 - DNA, 597 bp, Unknown
  Obtained from environmental sample
  misc_feature (1)..(597): n is a, c, g, or t
ttgggtaaggcaagtgactttttcgatatttctatcggaaaaacaccgccacgtaaagagccacagtggttcaccactaatccacaagatgtcgtttgggtttctatctctgacatgggtagttgtggtatgttcatcagtaatagttctgaatatcttactgccgaatcagtaactcgtttcaatgttaaggttgtcccaaatggtacagtattgttaagttttaaattgacggttggacgagttgcaattactaacggagatatggctacgaatgaagctattgcccattttaaacttacagaaaatactgtgagagaatacttatatttttatctcaaaacatttgactatcaggctttaggtaacacatcgtccattgcaacggcagtaaattctaaaacaattaaagcgatgccatttttaatgcctaccgagaaggtgttaaaagaatatcatgcggcaactgcccaatttttcgaaaaaattcgggtaaacattgaagaatccgcacgtctcacctctatccgtgacaccttattaccccgcctaatgtccggcgagctatccgtcaccgacctcggaggcgttaaatga

SEQ ID NO: 5648 - protein, 198 aa, Unknown
  Obtained from environmental sample
  DOMAIN (1)...(154): Type I restriction modification DNA specificity domain
  misc_feature (1)..(198): Xaa is any amino acid
MGKASDFFDISIGKTPPRKEPQWFTTNPQDVVWVSISDMGSCGMFISNSSEYLTAESVTRFNVKVVPNGTVLLSFKLTVGRVAITNGDMATNEAIAHFKLTENTVREYLYFYLKTFDYQALGNTSSIATAVNSKTIKAMPFLMPTEKVLKEYHAATAQFFEKIRVNIEESARLTSIRDTLLPRLMSGELSVTDLGGVK

SEQ ID NO: 5649 - DNA, 555 bp, Unknown
  Obtained from environmental sample
  misc_feature (1)..(555): n is a, c, g, or t
atggtcagccagcccgtaacaatcaatgaagcaaaaaattatcctcatgattcatgggtggttataaccggaaatattgtcagcgtactgccgggcggcaggcatttcatgttccgcgatacctccggggaaattcccgttgagataggcccaaaggaatggaggggattgtcagccgtaatatcggacaccgcagaaaaccgccttgaaatttgcggcgaggtaaaaatagaaagagggcagatttttattaaagtgcacgctataaccgcggcagccagaacaagcgccgttcggtacgccgttacgatcaatgaggcgcgaaatctgccccatgattcatgggtagtattaaccggaaatatcgtctattcgctgcctccccctcatgattatacgttccgcgattcttcgggggaaataactattgacattggcccgaaagagtggcgcggcctgtcggtcggagtatccgacagagttgagatctcaggcgagatgaagagagagagggggcaggtttttattaaagtacacgcaataaaaaagatgtaa

SEQ ID NO: 5650 - protein, 184 aa, Unknown
  Obtained from environmental sample
  DOMAIN (85)...(183): Domain unknown function (DUF388)
  misc_feature (1)..(184): Xaa is any amino acid
MVSQPVTINEAKNYPHDSWVVITGNIVSVLPGGRHFMFRDTSGEIPVEIGPKEWRGLSAVISDTAENRLEICGEVKIERGQIFIKVHAITAAARTSAVRYAVTINEARNLPHDSWVVLTGNIVYSLPPPHDYTFRDSSGEITIDIGPKEWRGLSVGVSDRVEISGEMKRERGQVFIKVHAIKKM

SEQ ID NO: 5651 - DNA, 942 bp, Unknown
  Obtained from environmental sample
  misc_feature (1)..(942): n is a, c, g, or t
atgatggccgagaattttagaaaatatgctttcaaaaccattaatttaacgagttcccgcgctaaagaaaaagaaacgcatattacaattaaagtgaatgaaaatattccgccatttataatcggagacgaactgaggctgtcgcaggttattacaaatctgatcaccaacgccataaaattcacgcctgaaaacggcaggattgagttgaacgcggaaaaattggaagatcggaacggcgaaataatccttaagatagaagttgccgacaacggcataggaatttcaccggaacagcagaaaaaacttttcactctttacaagcatacgaacgacgacgctctccaagaaaccgacagcacgggcttggggttggctatttccaaacgtattgtggaactcatgcagggaaaaatatgggttgaatcggaacttggcaagggagcaaaattcatatttaccttaaaagtaaaagaggggatcgccaatgcggacacggtttccaccgattcaagagacaatcttgattttaagaaatattcaatattggtcgcggaagacgttgaaatcaacagggaaattctgttggcattcctggaaaagagcggcattgccattgattttgccatgaatggcaaagaagccatttccaaatatacggaacagccggataaatacaacttgattttcatggacattaacatgcccgaaatgaacggcgatgaagcgacgcgtacgattcgcgcaattgaaagtaaaactaaaaattataatggaaatttacgcaagcaaattccaataatcgccatgactgcggatgtctttcaagaagacattgataaatgcttgtcggcaggaatgaacgatcacatcgcaaaaccaatttgtgcggatgatttacacgcgaaattaaaaaagtatttattatcatcgaaatattga

SEQ ID NO: 5652 - protein, 313 aa, Unknown
  Obtained from environmental sample
  DOMAIN (180)...(305): Response regulator receiver domain
  misc_feature (1)..(313): Xaa is any amino acid
MMAENFRKYAFKTINLTSSRAKEKETHITIKVNENIPPFIIGDELRLSQVITNLITNAIKFTPENGRIELNAEKLEDRNGEIILKIEVADNGIGISPEQQKKLFTLYKHTNDDALQETDSTGLGLAISKRIVELMQGKIWVESELGKGAKFIFTLKVKEGIANADTVSTDSRDNLDFKKYSILVAEDVEINREILLAFLEKSGIAIDFAMNGKEAISKYTEQPDKYNLIFMDINMPEMNGDEATRTIRAIESKTKNYNGNLRKQIPIIAMTADVFQEDIDKCLSAGMNDHIAKPICADDLHAKLKKYLLSSKY

SEQ ID NO: 5653 - DNA, 498 bp, Unknown
  Obtained from environmental sample
  misc_feature (1)..(498): n is a, c, g, or t
ttggagataagtaaaaaagggtataacgcttttgtaatcagatacgagataggcggggaaagctatgcctgcaaggatttagcggcggctattgcctacatcataaccaattcccggacacttgaagtaaatacaaaaaattactccctttggggcggctcgtccggagggcgaatggtcgcactgctttcagcttacggaaccgcgttttatggtgaaaaggattatcccaaaccagccgcggtggtcctgttttataccggacattcagactttactgtaattaatccgccgactttcgccgttttaggcgaaagagacaatatcgcaaatccggtacttacagaacagcgcgtcagtgacatgaatgccgctggcattgacgttgaatttcatctgtacccgaatgtcgggcacggtttcggtcttggcgtcggcactactgcggaaggctggcttaataaagccgtgcgtttttgggaaaagtatttaaattaa

SEQ ID NO: 5654 - protein, 165 aa, Unknown
  Obtained from environmental sample
  misc_feature (1)..(165): Xaa is any amino acid
MEISKKGYNAFVIRYEIGGESYACKDLAAAIAYIITNSRTLEVNTKNYSLWGGSSGGRMVALLSAYGTAFYGEKDYPKPAAVVLFYTGHSDFTVINPPTFAVLGERDNIANPVLTEQRVSDMNAAGIDVEFHLYPNVGHGFGLGVGTTAEGWLNKAVRFWEKYLN

SEQ ID NO: 5655 - DNA, 681 bp, Unknown
  Obtained from environmental sample
  misc_feature (1)..(681): n is a, c, g, or t
gtggctggaaggccaggccatagtcaaaaagacctttgtcccggacaagctcttgaacctggtcataaagcctcagacagattaaaagccggcggaaccgggcttttaatctgcctcataatgaggtgcccgatgtggaccgcgctgaaaaaactcatcgcctccgttctcgtggccgccctgatcctgccggtcgggacggccaaggccgttcctgaaaaaacctcgtcttcccaagcccccccggctcacgcccttcctaaaaaaaacccggcttcggaacaagcctacgaggaaaccgccccgattcgccggagcggcggtgggggcggcggcagctcagtgagccaggcgccgccgaaaaaaaccgcgcctcccgccgcgtctaaaaaacccccggtttcggaacaagcctccgaggaaaccgccccgattcgccagggcagcagaagcagcgggggcgggggaggcggagggaattggggcggagggaattggggcggtatgagcggtgaagcggctttgatcattttagccgtcgtcattgtcatcattgtggtagtgactataactgaacatatcagcaaaaaacaatccagccaggctcaaaaacaagaccctgaaaaagccggcccggaaagagcccaaagacagcggcccggcggccagcctcggccataa

SEQ ID NO: 5656 - protein, 226 aa, Unknown
  Obtained from environmental sample
  misc_feature (1)..(226): Xaa is any amino acid
MAGRPGHSQKDLCPGQALEPGHKASDRLKAGGTGLLICLIMRCPMWTALKKLIASVLVAALILPVGTAKAVPEKTSSSQAPPAHALPKKNPASEQAYEETAPIRRSGGGGGGSSVSQAPPKKTAPPAASKKPPVSEQASEETAPIRQGSRSSGGGGGGGNWGGGNWGGMSGEAALIILAVVIVIIVVVTITEHISKKQSSQAQKQDPEKAGPERAQRQRPGGQPRP

SEQ ID NO: 5657 - DNA, 504 bp, Unknown
  Obtained from environmental sample
  misc_feature (1)..(504): n is a, c, g, or t
atgaacataagcattaaccgggcatatattccctatgccagagttctggcggtggatgatatggatggcaatctggaggtaatcaggggaatgatgaggccatacggtataactgtggactgcgttaattcaggtcagggagcgattgatgtggttaaaaacggaaaaataaagtacaacgcgatttttatggattacataatgccggaaatggacggccttgaaaccacccgtatcatccgtaatgaaatagggagtgaatatgcccgaacagtgccgatcatagcccttactgccgatgccgttgccggcagcgccgaaatgtttttacaaaacggttttcatgcctgtatttccaaaccaataaacatgaaggaaatgaattcggttatcaatacctttgtccgtaataaagaatatgaagcaggcgaagaaagaaaaacaagagtattacaagatatcgaccaaataacatgcaacagctgttttactgttcacgcttag

SEQ ID NO: 5658 - protein, 167 aa, Unknown
  Obtained from environmental sample
  DOMAIN (13)...(132): Response regulator receiver domain
  misc_feature (1)..(167): Xaa is any amino acid
MNISINRAYIPYARVLAVDDMDGNLEVIRGMMRPYGITVDCVNSGQGAIDVVKNGKIKYNAIFMDYIMPEMDGLETTRIIRNEIGSEYARTVPIIALTADAVAGSAEMFLQNGFHACISKPINMKEMNSVINTFVRNKEYEAGEERKTRVLQDIDQITCNSCFTVHA

SEQ ID NO: 5659 - DNA, 384 bp, Unknown
  Obtained from environmental sample
  misc_feature (1)..(384): n is a, c, g, or t
atggcgattctctcaatacagtctcatgtagtgtatggttatgcgggaaataccgcggcggtttttcccatgcagcggctgggccgcgaagtgtgggcgattaataccgttgaattttccaaccatacgggatacggcgcatggaaggggaaagtgctgggagggaaacttgccgaagaactggtagccggtcttgaggacaggggcgtactttcccgctgtgaagcggtgctttccggttatctgggagacgccgccgtggggcgggcaattaccggcgcggtacgcaaagtacgctccgccgcgccccaggccctgtactgctgcgatccggtaatgggcgatgtggacaggggtttttatgtcaaacccggacattcctga

SEQ ID NO: 5660 - protein, 127 aa, Unknown
  Obtained from environmental sample
  misc_feature (1)..(127): Xaa is any amino acid
MAILSIQSHVVYGYAGNTAAVFPMQRLGREVWAINTVEFSNHTGYGAWKGKVLGGKLAEELVAGLEDRGVLSRCEAVLSGYLGDAAVGRAITGAVRKVRSAAPQALYCCDPVMGDVDRGFYVKPGHS

SEQ ID NO: 5661 - DNA, 348 bp, Unknown
  Obtained from environmental sample
  misc_feature (1)..(348): n is a, c, g, or t
atgaacaaatcaactaaactgcttcagcaacagatgcctcaacggcgtctcaacccgctcaatgatttcctgttttacaaaatcatgggcgaaaaaggcgatgaagtccaactccttggtttccttaacgcagtcctgggaaaaaccgggacaggccgttttacctccgtggaaattatcgaanacaaattttttacgccgaaagtcatcggtgacaagaccagcattcttgatgtgcgggctatcctccaggtaaaacaaggtcaatatgaggttcaagtccgtaaccagcgcaacatgaaccggcgcagcctgttttattggagcaaagatacgcggagagtctga

SEQ ID NO: 5662 - protein, 115 aa, Unknown
  Obtained from environmental sample
  misc_feature (1)..(115): Xaa is any amino acid
MNKSTKLLQQQMPQRRLNPLNDFLFYKIMGEKGDEVQLLGFLNAVLGKTGTGRFTSVEIIEXKFFTPKVIGDKTSILDVRAILQVKQGQYEVQVRNQRNMNRRSLFYWSKDTRRV

SEQ ID NO: 5663 - DNA, 720 bp, Unknown
  Obtained from environmental sample
  misc_feature (1)..(720): n is a, c, g, or t
gtgaaggtcgttatcatgattttaacccggttttttctccccagagccgagcatctgcgccaccgctgggaacggatagacgaagcccatataaaggacattattcttccggcgatacaactgtatgaaatcggaggagtgtactttgtccgcgacggtaaccaccgcgtttcagtggcaaagacgcaaagtgttgaattcattgatgccgaggtaaccagtctttcctcggaaattactatcagccctgatatgaccaccgatcaattaaaagaagccatcataagctcggagaaaaatgttttttacgataaaaccaaatttggcgaactgaccggcgatatgtcccttgactttagtacgccgggccgctacgacgtgatttacgatcatatcctggtacacaaatatttcctgaatgaatcgatggaagaagagatacctttttccgacgcccttgtttcatggtacaacaaagtgtacagtccggtactcgccattatccgggaacggtggtttttggcgaattttcccggcagaaccgaaggcgatctgtatgtctggattgtcaagcactgggattttttgaaaaagaaatatcgtggttattctcttgccgaggccgcaggtgatttttcacgaaagtatggtcaaagcaagggaagtttttttcggtttcttgccctgctgctggaccgtatttttgcaaagaagtggtga

SEQ ID NO: 5664 - protein, 239 aa, Unknown
  Obtained from environmental sample
  misc_feature (1)..(239): Xaa is any amino acid
MKVVIMILTRFFLPRAEHLRHRWERIDEAHIKDIILPAIQLYEIGGVYFVRDGNHRVSVAKTQSVEFIDAEVTSLSSEITISPDMTTDQLKEAIISSEKNVFYDKTKFGELTGDMSLDFSTPGRYDVIYDHILVHKYFLNESMEEEIPFSDALVSWYNKVYSPVLAIIRERWFLANFPGRTEGDLYVWIVKHWDFLKKKYRGYSLAEAAGDFSRKYGQSKGSFFRFLALLLDRIFAKKW

SEQ ID NO: 5665 - DNA, 450 bp, Unknown
  Obtained from environmental sample
  misc_feature (1)..(450): n is a, c, g, or t
gtggagaatatgtccgacgtcttttggatgatcccgctgctgccccttgtagggtcagccattaatgggctctttggcaaacgcgctggcaaagcgttcaccaccattgtggcattgggtgccatattgggttcgctggcgctggcgatatgggcctttgccctagtgcaaggcgctccggggagcaggctcgaaatcaacgccggcacatggatcagctctggcgcattaagcgtcccattcggcctagtgttcgaccccctctctgcactgatgagcctcgtggtgacaggaataggcttcttgatacacctttactctgtaggctacatgggcaaagagataggctatgcgcgttatttcagctacctcaacctattcgtctttttcatgctgacgctggtgcttggttctagcctccccctcatcttgtgggctcggccgatctga

SEQ ID NO: 5666 - protein, 149 aa, Unknown
  Obtained from environmental sample
  DOMAIN (65)...(126): NADH-Ubiquinone oxidoreductase (complex I), chain 5 N-terminus
  misc_feature (1)..(149): Xaa is any amino acid
MENMSDVFWMIPLLPLVGSAINGLFGKRAGKAFTTIVALGAILGSLALAIWAFALVQGAPGSRLEINAGTWISSGALSVPFGLVFDPLSALMSLVVTGIGFLIHLYSVGYMGKEIGYARYFSYLNLFVFFMLTLVLGSSLPLILWARPI

SEQ ID NO: 5667 - DNA, 327 bp, Unknown
  Obtained from environmental sample
  misc_feature (1)..(327): n is a, c, g, or t
atgagcatgggcgcgttgattcatggctctctgcaagcgtatttggcagtgtcgcttttccttttcgcgataggtatggccgttgtcctcctgcgccgcagcatgctcattcagttcatgggcatagaattgatgctgaacgccgcaaatttggccctcttggcctttgccaggtggaggggcgtggaagtgtcggctaccgccttttatcttttcatcatcgcggtggccgcttgcgaggccgctgtcgggcttgcgctgataatcggcctgtttaggcacatcggcaccaccaatgccgacagcgcggatagtttgaggcagtga

SEQ ID NO: 5668 - protein, 108 aa, Unknown
  Obtained from environmental sample
  DOMAIN (13)...(108): NADH-ubiquinone/plastoquinone oxidoreductase chain 4L
  misc_feature (1)..(108): Xaa is any amino acid
MSMGALIHGSLQAYLAVSLFLFAIGMAVVLLRRSMLIQFMGIELMLNAANLALLAFARWRGVEVSATAFYLFIIAVAACEAAVGLALIIGLFRHIGTTNADSADSLRQ

SEQ ID NO: 5669 - DNA, 333 bp, Unknown
  Obtained from environmental sample
  misc_feature (1)..(333): n is a, c, g, or t
gtgcgcggtagattcaggaaaagtaacgacggcgtgaacagaggcggccagccggcgaaagtcggcaacgtcatagacgccatgctggagaggatactgcccggcttccgcgccgtctgcaaggagtgggaggtcgtcgacaggtggcacgagatagtgaccggacgcatatcggaagagtcggagtgttcgcgggttgagaacggggtgctgcatgtaaggatagagtcgtcgacttggaggcaggaggccacgtacttgaaagaacagataaaggcttcaattcgacgggttaccgggtgcgaaaccatcaaagacatcgtgttttattga

SEQ ID NO: 5670 - protein, 110 aa, Unknown
  Obtained from environmental sample
  misc_feature (1)..(110): Xaa is any amino acid
MRGRFRKSNDGVNRGGQPAKVGNVIDAMLERILPGFRAVCKEWEVVDRWHEIVTGRISEESECSRVENGVLHVRIESSTWRQEATYLKEQIKASIRRVTGCETIKDIVFY

SEQ ID NO: 5671 - DNA, 939 bp, Unknown
  Obtained from environmental sample
  misc_feature (1)..(939): n is a, c, g, or t
gtgggcgaactcttccgagagttccacgctctccacttcgcctataaggattttcgtctcttccggaacggttacgccggcgatctccgcgattttcgccgctttctgcccgacgattttcgcgttcagcgcccctttgactataatagccttgcgcaccttttcggtctcttccgcgttcaggaagtaacagccgcggcgtttgaattcggctttcaccttatcgtagacgccctgcagagctattaccgactgctcggaagcgcatatcattccgttgtcgaaagttttcgagtggatgatcgagttcaccgcgaggatgatgtccgcgctgtcgtctatgatggcggggacgttgcccgaccccacgccgaccgcgggcttgccggaggagtaggccgacttgaccatggccggtccgccggtggcgaggatgatgtccgcctctttcatcaccgtgttggtcatttcgaggctcggctcgtctatccagccgatgatccccgccggcgctccggcggcgaccgccgcgtccagcacgaccttagccgccgcgcaggtgctgcccttggcccgcgggtgcggcgatatgatgatgccgttgcgggtcttgaggcagatgagcgacttgaaaatcgccgtggaagtcgggttggtggtcggaatcaccgccgccacgaggcctataggctcggcgatacgggtgaggccgccaaccggatcttcctcgataacgccgcaggtcttttcgtacctatactgattgtatatgtactccgacgcgtagtggtttttgatgaccttgtcctcgacgacgcccatgccggtctcccgcacggccattttggccaggggatgcgctccatagcagcggctttggccgccgcgaagaagatcttgtcaacctgctcctggctnggacgcgcgaaaagcttttga

SEQ ID NO: 5672 - protein, 312 aa, Unknown
  Obtained from environmental sample
  misc_feature (1)..(312): Xaa is any amino acid
MGELFREFHALHFAYKDFRLFRNGYAGDLRDFRRFLPDDFRVQRPFDYNSLAHLFGLFRVQEVTAAAFEFGFHLIVDALQSYYRLLGSAYHSVVESFRVDDRVHREDDVRAVVYDGGDVARPHADRGLAGGVGRLDHGRSAGGEDDVRLFHHRVGHFEARLVYPADDPRRRSGGDRRVQHDLSRRAGAALGPRVRRYDDAVAGLEADERLENRRGSRVGGRNHRRHEAYRLGDTGEAANRIFLDNAAGLFVPILIVYVLRRVVVFDDLVLDDAHAGLPHGHFGQGMRSIAAALAAAKKILSTCSWLGRAKSF

SEQ ID NO: 5673 - DNA, 312 bp, Unknown
  Obtained from environmental sample
  misc_feature (1)..(312): n is a, c, g, or t
ttgcgcttgcgcgccgcggaattactcgggctttcggaggcggaaatagagcgggtaaaaacggtactggcgaacaggatcacaaaagagggcgaaattgttatatcttcggaggaggagcgctctcagcggactaaccttgaaagggcgtatttccgcattgaagcgttgattacaggcgcggcaagactgccaaaggtgcgaaaggcgacaaagccaagcaaagcggcaaaagaaaagcgcctccttgcgaagaggcgccaatcacaaaaaaaggccgaaagagctaatcaggcggattgtttcacgtga

SEQ ID NO: 5674 - protein, 103 aa, Unknown
  Obtained from environmental sample
  misc_feature (1)..(103): Xaa is any amino acid
MRLRAAELLGLSEAEIERVKTVLANRITKEGEIVISSEEERSQRTNLERAYFRIEALITGAARLPKVRKATKPSKAAKEKRLLAKRRQSQKKAERANQADCFT

SEQ ID NO: 5675 - DNA, 840 bp, Unknown
  Obtained from environmental sample
  misc_feature (1)..(840): n is a, c, g, or t
gtgcttgatattttcatgggaggcgatgaagacgcgtatagggttctttttgattttgacaaggtggagacaattaaaaattttgacccttttatgcagggcacgggtaatgtgaagttgaaggaattgattattcgtcccatgaaagaagttttatggacggatgacaggattgaagagttgcaaaagaacctgtcttcatttaaagaattttccgacggtggaaagtccgtgattgaaagcctgatctcctatcagagcgtaaaaggcgaagaaatgtttttttcccttgcctttgaaaaaccaagctgtcttcttgattacatcgggcaacggggcgcgttatttttactggatagggaacgactggagaacacgcatgaaaatcttgtccgcgaataccacggattgtattcaagggcggtcagggaaaaatgcgaatatcctcttcccgagagattactttttaattttgaagaattgctcaatgaatactcatcttcagtttcccgcatgatctcattcaggtcgattaaaggggaggcaaaaaaaggagtctcccacattgagctaagctgtgaaccgggacgcagtttttttggcaatatcaattatctaaaagaggagtttgccgctcttcttaacagcggctggcaaatcgccgtggcggcggaatcgcangtacaggccgaccgcataaaaatgatccttgagccgcataaatcattgtctattatggctgttcctcttaccgcangnttcagtctgcctgacataaatttatgcttgtacaggaaaatgaaatttttggcagacgtaaccttccgccccgatctttaa

SEQ ID NO: 5676 - protein, 279 aa, Unknown
  Obtained from environmental sample
  misc_feature (1)..(279): Xaa is any amino acid
MLDIFMGGDEDAYRVLFDFDKVETIKNFDPFMQGTGNVKLKELIIRPMKEVLWTDDRIEELQKNLSSFKEFSDGGKSVIESLISYQSVKGEEMFFSLAFEKPSCLLDYIGQRGALFLLDRERLENTHENLVREYHGLYSRAVREKCEYPLPERLLFNFEELLNEYSSSVSRMISFRSIKGEAKKGVSHIELSCEPGRSFFGNINYLKEEFAALLNSGWQIAVAAESXVQADRIKMILEPHKSLSIMAVPLTAXFSLPDINLCLYRKMKFLADVTFRPDL

SEQ ID NO: 5677 - DNA, 1017 bp, Unknown
  Obtained from environmental sample
  misc_feature (1)..(1017): n is a, c, g, or t
ttgggatttttgaaaagaaatacggcaaatactctctggcaaaagccgcgggggattttcaaaaaaatacggtcaaaanggcagcatattaaggtatatttcctttttgnccgaaaaaatttccgncgcgancaaggnaggggcgtaatggccgtcttgtcaattcaatctcatgtcgtttacggctatgcgggaaatacggcggcggtttttcctctacagcgtctagggcgcgaagtttgggcgattaacacggtcgagttttccaaccacacgggtttcggcgcgtggaggggcaaagttctgggagccgaccttgccgccgaccttgttacagggcttgaggaaagaggcgtgttaaaccgctgcgaggcggttctttccggatacttgggcgacgccgatgtcgccatgacaatttccgacgcggttaaaaaagtgcgcggcaaatcacctaatgccgtttacgcctgcgatcctgtgatgggcgacgtaggccgcggtttttatgttaagcccgatattcctgatatctttaaaaaagagcttataccgcttgccgacattattacgcctaaccagtttgagcttgacgctataacgggaattaaaacaaaaaacaccgccgatacgcttaaagcggttaatatcttgcacgaaatggggccttcagtcgttcttgtaacaagctacaaagacagaaaaggcgagctttccatgtttgcctcaaataaaaaagaaatatataaaattacgacccccgaactgccgtttgacaagaacgtcgccggaaccggggatttgacaatggccgtatttttatcgcggtatcttgaaactaaaaaccttaaaaaaaccctggaattatgcaccgcttccgttttcagcattctggaggcaagctataacgcggcggataaaaaaaagagcgcgcctatagatttaaaaattatagacaaccagaaagaacttgtgtctccctcatattcatttaaggcggaaaaaataaccgcgtaa

SEQ ID NO: 5678 - protein, 338 aa, Unknown
  Obtained from environmental sample
  DOMAIN (105)...(314): Phosphomethylpyrimidine kinase
  misc_feature (1)..(338): Xaa is any amino acid
MGFLKRNTANTLWQKPRGIFKKIRSKXQHIKVYFLFXRKNFRRXQGRGVMAVLSIQSHVVYGYAGNTAAVFPLQRLGREVWAINTVEFSNHTGFGAWRGKVLGADLAADLVTGLEERGVLNRCEAVLSGYLGDADVAMTISDAVKKVRGKSPNAVYACDPVMGDVGRGFYVKPDIPDIFKKELIPLADIITPNQFELDAITGIKTKNTADTLKAVNILHEMGPSVVLVTSYKDRKGELSMFASNKKEIYKITTPELPFDKNVAGTGDLTMAVFLSRYLETKNLKKTLELCTASVFSILEASYNAADKKKSAPIDLKIIDNQKELVSPSYSFKAEKITA

SEQ ID NO: 5679 - DNA, 381 bp, Unknown
  Obtained from environmental sample
  misc_feature (1)..(381): n is a, c, g, or t
atgcgcaggatgaaatatgacgctcttcccgtggcggaacgggaggcgatgcccccggaacaggtgtccgtcggacgccatgtggacgcggaggagtatgcgcgcttgctgcgcgaagtgtacgcggactggccggaaaggccggagggctatgagccgcaatccgcgcgtgagatgatccgcacgttgcggcagagcgtttccatctccgacgaccaggtgagtgaacttgcggaggcgagggcaagggccgtacgcgacgaacttgtcaggattgacggaaggcttgccggccggatcacccttggggcatcccgcgccgtgtccggtgacggcgatgcgcgcaggcttgatttatctgtgttgatcagaattaactga

SEQ ID NO: 5680 - protein, 126 aa, Unknown
  Obtained from environmental sample
  misc_feature (1)..(126): Xaa is any amino acid
MRRMKYDALPVAEREAMPPEQVSVGRHVDAEEYARLLREVYADWPERPEGYEPQSAREMIRTLRQSVSISDDQVSELAEARARAVRDELVRIDGRLAGRITLGASRAVSGDGDARRLDLSVLIRIN

SEQ ID NO: 5681 - DNA, 354 bp, Unknown
  Obtained from environmental sample
  misc_feature (1)..(354): n is a, c, g, or t
gtggcagccacgctaaagacattggagatactcggcaggagcggcgacctcatagccaaggtccacgaaaacggccgctacttccgcgcaggcatggagaaactgggattcaagctacagccaggcgagcatcctatagtccccgtcatgctctacgacgccccgctggcccagaagttcgccaccatgctgctggacgaaggcatctacgtgacgggcttcttcttccccgtggtgccaaaggggcaggcccgcatacgcactcagatgtccgccgcgcacacaaaagaagacctcgacgccgccatggccgcctttgccaaggtcggaagggagttgggtgtgataaagtag

SEQ ID NO: 5682 - protein, 117 aa, Unknown
  Obtained from environmental sample
  misc_feature (1)..(117): Xaa is any amino acid
MAATLKTLEILGRSGDLIAKVHENGRYFRAGMEKLGFKLQPGEHPIVPVMLYDAPLAQKFATMLLDEGIYVTGFFFPVVPKGQARIRTQMSAAHTKEDLDAAMAAFAKVGRELGVIK

SEQ ID NO: 5683 - DNA, 627 bp, Unknown
  Obtained from environmental sample
  misc_feature (1)..(627): n is a, c, g, or t
gtgacagctttagttttacaggcacgccttgattcatcccgccttaactgcaaggcgttgcttcccctgggggacaagcccattgtcttcagggtgatggaagcgcttgcttttttgccctgcgaaaaaaaaatactggcctgcccggaagacagcgtttccgcttttgcgccacttgcggaagaagccggctttgttctgattcccggccctaaagaagacgtgcttgcgcgttactgcctcacgattcgcaagtcaggcgcggacagggtaatccgcgcgaccgccgacaatccctttgttttcattgacgccgccggagcaattgaaggcgaagcgtcggcgctgggcgcggactacgccggctattccggactgcccgtcggcgcgggggtggagtcagtcgcctcggaggcgctcttgcgcgccgaanaggaagccaaagacccttatgaaagggagcatgtctgcccctacctttacaggcatcctgagcttttccgtcttcacaggccgcttgccccaaagcgctggcagggcccggaaagcangatcaccgtggacacaagagaagattacgaccgggccaggtcgctgtatgaacgccttttcttccctgccccctga

SEQ ID NO: 5684 - protein, 208 aa, Unknown
  Obtained from environmental sample
  DOMAIN (3)...(207): Cytidylyltransferase
  misc_feature (1)..(208): Xaa is any amino acid
MTALVLQARLDSSRLNCKALLPLGDKPIVFRVMEALAFLPCEKKILACPEDSVSAFAPLAEEAGFVLIPGPKEDVLARYCLTIRKSGADRVIRATADNPFVFIDAAGAIEGEASALGADYAGYSGLPVGAGVESVASEALLRAEXEAKDPYEREHVCPYLYRHPELFRLHRPLAPKRWQGPESXITVDTREDYDRARSLYERLFFPAP

SEQ ID NO: 5685 - DNA, 369 bp, Unknown
  Obtained from environmental sample
  misc_feature (1)..(369): n is a, c, g, or t
atgacagattggccgagatttcaagaatatattgccgaaggagagaggagtattttattttccacccacattacatctgatttggaaaaagtcgcggattatattacgctaattgatcatggaaagctgttttattcaggtaatacacgagatcttataaataattatttaatagtaaggggaactcctgatattttatctaaagaattgaaaaaaaatattataggactaacaataaatcaatcggtgtttgtcggtatgataaaatcttctgttttacaaggtattcccaaagaaattgtaaatggaataccgactattgatgaaatacttatttatattagtaagggaatatataaatatgaatag

SEQ ID NO: 5686 - protein, 122 aa, Unknown
  Obtained from environmental sample
  misc_feature (1)..(122): Xaa is any amino acid
MTDWPRFQEYIAEGERSILFSTHITSDLEKVADYITLIDHGKLFYSGNTRDLINNYLIVRGTPDILSKELKKNIIGLTINQSVFVGMIKSSVLQGIPKEIVNGIPTIDEILIYISKGIYKYE

SEQ ID NO: 5687 - DNA, 651 bp, Unknown
  Obtained from environmental sample
  misc_feature (1)..(651): n is a, c, g, or t
atggaataccgactattgatgaaatacttatttatattagtaagggaatatataaatatgaatagcatattaaaagttttgaagttggattattctgccgtcaaaacgtcttcctctaagttaattatgatatatttcatatcaatattacttggtctattaacccagccaataatgccaattataatgattatgtttttttgtgtatcgtttagcggatttccattctcaataattgaaaaaaataattgtgaaagattatatgggatgctgccaattcacaaaagagaaattattattgggcgatatttatatggatttatttccggaatattaaatttaataatttcaataatattggcgtatataatagcaatattttctaaacaacaaataaatgtttttgcattatctttatcgataacattggctttctgttattattgttttgcagttagtatttcgtacccaatctattataaaattggtttttccaaatcgtacatatttataacactgcctttgtatatnttagttcttcctattgtatttttatccgagagaactaaatcttatgaaactattgatcagaatttacaatactttctcnaantcatatattttgtttttgctttatggggtttattttaa

SEQ ID NO: 5688 - protein, 216 aa, Unknown
  Obtained from environmental sample
  misc_feature (1)..(216): Xaa is any amino acid
MEYRLLMKYLFILVREYINMNSILKVLKLDYSAVKTSSSKLIMIYFISILLGLLTQPIMPIIMIMFFCVSFSGFPFSIIEKNNCERLYGMLPIHKREIIIGRYLYGFISGILNLIISIILAYIIAIFSKQQINVFALSLSITLAFCYYCFAVSISYPIYYKIGFSKSYIFITLPLYXLVLPIVFLSERTKSYETIDQNLQYFLXXIYFVFALWGLF

SEQ ID NO: 5689 - DNA, 606 bp, Unknown
  Obtained from environmental sample
  misc_feature (1)..(606): n is a, c, g, or t
ttgatttatcaggaatgtagctttggaaaaccgaatgggatttttatgagctattaccctggaggctcgctgaacaaaataggcaggtttgaaagcggtttgcggagcggacaatggattgagtattttgcaaattcaaaaatacggaaaattgagaattggatttctggcattagaaatggggcttggctcaaattggatgagcagggcaaagcactttcaagggcggagttcatagatggcacgggggtttttgaagacacctcttggcaaaataacagaatgaacggagaagttcgcacacaacttagaaacggagaatattacagaatagaaacttacgaaaatggagcaaagcaaagcacggcggattatccaaaagattcacggcagcctttggttctaggtttttggaaagacgggaaaaaagaagggtcttggagaagctggtatagaaatgggatattgaaagattctatgaatttcaaagaaggcgaactttttggcgaacaatttcattacgatagcaccggaaggttatataaaaaagaaagagcaatgggaaaaaatatgcccacagtcgtggaaatgaggaacaaccaatga

SEQ ID NO: 5690 - protein, 201 aa, Unknown
  Obtained from environmental sample
  misc_feature (1)..(201): Xaa is any amino acid
MIYQECSFGKPNGIFMSYYPGGSLNKIGRFESGLRSGQWIEYFANSKIRKIENWISGIRNGAWLKLDEQGKALSRAEFIDGTGVFEDTSWQNNRMNGEVRTQLRNGEYYRIETYENGAKQSTADYPKDSRQPLVLGFWKDGKKEGSWRSWYRNGILKDSMNFKEGELFGEQFHYDSTGRLYKKERAMGKNMPTVVEMRNNQ

SEQ ID NO: 5691 - DNA, 711 bp, Unknown
  Obtained from environmental sample
  misc_feature (1)..(711): n is a, c, g, or t
atgatgtattacgcgaccgaaccgaatcacctcaaaacgatgcacgattatcgcgtgggccaatggtatccgcaagacgagcgttatccgtttatcaacgaggatggatatttcttaaatccgaaatcgattatcacaaccggagcgatgataggccaattggccgaaaacggtaaactcgagggtttctctctgaatctgggagagcttaaaagtaaattgcgcccgaccaccaattactttggtatgcttgacagacagttggattatatcaataccataatcggtcccgacaaaaatcgggcgacgatagaaatagcctctttgaccaaaccggtgaggataggcgtgcgtcagatggacatagaggcctatccgtcgcggcccttctatacgttagatttcaacgagagcaacttggaagagatcgccaaaggacgtgtggaagataaaaacgacgcgggggcggttcgagacgaggtcgaaagaataaaagacggggttctccggtatagaccgcttaaggttactatagaacgtgataaaaatgaggatatagaggtgttgaaaatagacagcgttgttgacggcgagggaaatgaaaagaataaaaacattttttgtttgcaagtgcaaagcatgagtgaaatagacaattattggctggattccggaatcttctcgctgaatcttacccatgtggataactaa

SEQ ID NO: 5692 - protein, 236 aa, Unknown
  Obtained from environmental sample
  misc_feature (1)..(236): Xaa is any amino acid
MMYYATEPNHLKTMHDYRVGQWYPQDERYPFINEDGYFLNPKSIITTGAMIGQLAENGKLEGFSLNLGELKSKLRPTTNYFGMLDRQLDYINTIIGPDKNRATIEIASLTKPVRIGVRQMDIEAYPSRPFYTLDFNESNLEEIAKGRVEDKNDAGAVRDEVERIKDGVLRYRPLKVTIERDKNEDIEVLKIDSVVDGEGNEKNKNIFCLQVQSMSEIDNYWLDSGIFSLNLTHVDN

SEQ ID NO: 5693 - DNA, 891 bp, Unknown
  Obtained from environmental sample
  misc_feature (1)..(891): n is a, c, g, or t
atgtttttcagaatatcattatttttattgtttttgtgtgtctctgcctttgcgcaatttgtggatatgcccttgagctcttcggagagcaatagggttggcagcataagcatagatggagttttatatacagacacccattcgctcaaatctcgcatatctgttaaggaaaatacaagatatcagccctctgttttggcggagcaagttaaaaaatccatagaatccctttatgaaactggaatgttcagcgatgttaaagcatttgccagatatggcgaaaatggggatgtggatttgatttttgaggttgccgagcagcctgctctagacaccctgctcatagaaggcaacgatgatattacggaagaagacctcaggctgaaaatccgagtaattaaaggcaatgtttacagcaaaagcgatttagagcgcgataggcaggcaattctgaaccattatcgctctcaggggtatttgctcgttgaggtttggatcagagaaattcctgttgaggggcacagaaatagggttgtattatacgttagcgagggaaacaaggtaaaagtggattccattatgatttctggcaatgataacatacctagagaggaatttcttgaccgtatgctcacaaaaacggattcttggtggggaggcggtgatttcaaattggatgttttcaattcggatagagacaccgttatcaatgtggctaggcactatggctttttagatgcggaacttttggaatacaacgccaattatatgcccgattccacttgccgtttttatttggggcgtatggcgcgcaatggttcaagcttgccgattctttattccctgctcaacaaaatatgncagacagggnaaatcccctgcactatttag

SEQ ID NO: 5694 - protein, 296 aa, Unknown
  Obtained from environmental sample
  SIGNAL (1)...(18)
  DOMAIN (31)...(107): Surface antigen variable number repeat
  misc_feature (1)..(296): Xaa is any amino acid
MFFRISLFLLFLCVSAFAQFVDMPLSSSESNRVGSISIDGVLYTDTHSLKSRISVKENTRYQPSVLAEQVKKSIESLYETGMFSDVKAFARYGENGDVDLIFEVAEQPALDTLLIEGNDDITEEDLRLKIRVIKGNVYSKSDLERDRQAILNHYRSQGYLLVEVWIREIPVEGHRNRVVLYVSEGNKVKVDSIMISGNDNIPREEFLDRMLTKTDSWWGGGDFKLDVFNSDRDTVINVARHYGFLDAELLEYNANYMPDSTCRFYLGRMARNGSSLPILYSLLNKIXQTGXIPCTI

SEQ ID NO: 5695 - DNA, 915 bp, Unknown
  Obtained from environmental sample
  misc_feature (1)..(915): n is a, c, g, or t
gtgattttgttttttgcagttactgagcgcgaggccggcacagggcaatttggcgcaggtgcggcatatagccaggcagacggcttggtattcacacttaatctctccattcctaattgctgcatgggagatggtcagtcggcaaatatgaatgctgaatacggaattgacaaaaagagcatatcgctcggttttgccgagccttggctttttgatacaccaaccaaaataggaacctctgcgaattattcgtggtggagaggaaattcttatggctactcgcacgatattctccgctatggcggcagcgtttatttgggtcgcagactcacttggccagacgattatttttatgcgcaaaccggcattagctggcaaagaaatgagcagggaccaaacgtaccaggcagccttgttctctttaccggaaacgaagcctcgcttgattttgtaataatcagagacgacaaaaatttgcctattttcccaaccgagggttctcgctatgtgctatcaacttcatgggcaattccaaatttcttggcaggagattttagctttttgcaaaccgacttgagcataaagtggtggttcccgctttattccgataaactcgcccttggcatagtgaatgaatttggtgttataacaggaagttctctgcaataccgcaccctttatcaaatgggcggcgcgcttggctacaagggcttgatgcgtggctatactgctggttctcttggcgcatataggcttggccgcagctaccagtattttggcgcggaactaacactccccgttgcacccaatcgtttttatttgcttcctctgttctttgatgcagggaatgtgtttggtgagcgttattccacaaatgagaaagttagcaaagatatggttctcggccgaatctga

SEQ ID NO: 5696 - protein, 304 aa, Unknown
  Obtained from environmental sample
  DOMAIN (43)...(299): Surface antigen
  misc_feature (1)..(304): Xaa is any amino acid
MILFFAVTEREAGTGQFGAGAAYSQADGLVFTLNLSIPNCCMGDGQSANMNAEYGIDKKSISLGFAEPWLFDTPTKIGTSANYSWWRGNSYGYSHDILRYGGSVYLGRRLTWPDDYFYAQTGISWQRNEQGPNVPGSLVLFTGNEASLDFVIIRDDKNLPIFPTEGSRYVLSTSWAIPNFLAGDFSFLQTDLSIKWWFPLYSDKLALGIVNEFGVITGSSLQYRTLYQMGGALGYKGLMRGYTAGSLGAYRLGRSYQYFGAELTLPVAPNRFYLLPLFFDAGNVFGERYSTNEKVSKDMVLGRI

SEQ ID NO: 5697 - DNA, 366 bp, Unknown
  Obtained from environmental sample
  misc_feature (1)..(366): n is a, c, g, or t
gtggtgaatttcgtagcgctcctgaagcccacgcagaatcgcgattgtatcttcaacggaaggttcggcggtatagatctgctggaagcggcgttccagagcggcgtccttttcgatgtgcttcctgtactcgtcaagtgtggtggcgcctatgcagcggagttccccgcgcgaaagagccggcttaagcaggttactggcatcggtagcaccttcggccgcgccagctcccacgagggtgtgaagttcgtcgataaagaggatgatcttgccgtcagaagcctgaacctcgtggatcaccgccttaaggcgctcctcaaattctcccctgaacttagccccggcgaccaaggccccaaggtctaa

SEQ ID NO: 5698 - protein, 121 aa, Unknown
  Obtained from environmental sample
  misc_feature (1)..(121): Xaa is any amino acid
MVNFVALLKPTQNRDCIFNGRFGGIDLLEAAFQSGVLFDVLPVLVKCGGAYAAEFPARKSRLKQVTGIGSTFGRASSHEGVKFVDKEDDLAVRSLNLVDHRLKALLKFSPELSPGDQGPKV

SEQ ID NO: 5699 - DNA, 924 bp, Unknown
  Obtained from environmental sample
  misc_feature (1)..(924): n is a, c, g, or t
atgacagcaggagttcgccttttcccggtgtggatactcaatacaaagtataacaaagaaaattacctggtttttaatgaacggacagacaggccgccttgtcggaaagctgcccgcggataccggcaaatcatggaaataccggcttttgtttaccggtattttaggcgcggcccttacgcttgtcattcaggctttgcggatattcctgtaggagttttaatgaaaacaaaaacaattaaattttgtttaacgttactgtttgttttttttgtaacgcccgcttttgccgagatttataatcttcaggcgcgtattattgataacgccggcattttaagccagcaggagaaagaaaaccttttgacggtcatctcttccgccgcgtcagcttataactttgatctggtaattgtaacggaaaagaatatcggctcatccactcccggacaatacgcggataatttttttgatgaaaactattacggctttacgggcccggctgggaatagggacggcgctcttttcctgctggtaacggacagccgcgactactggttcagcacctcgggcagcggcataaggatactaaacgccgccgcgtcaaataaacttgaaaacagcgtcgtgaaactgcttagggaaaacaattattacggagcattcaacgcttttctgattaattggaatgaatttcttgcccttaacgcaaaaggcagaaactacaatttctttcatcaatggaatcttgttctggtaataatcgcgtgggttctggccctccttataggctttatcgtcgtgcaaacctggaaaaaggcaatggataccgtccttccccagacccaggccgcggcttacgtggttcccggcagtctcgcgttcaggggagaaaaaggacagcttcctttacagcacggttaa

SEQ ID NO: 5700 - protein, 307 aa, Unknown
  Obtained from environmental sample
  DOMAIN (111)...(236): Domain of unknown function (DUF477)
  misc_feature (1)..(307): Xaa is any amino acid
MTAGVRLFPVWILNTKYNKENYLVFNERTDRPPCRKAARGYRQIMEIPAFVYRYFRRGPYACHSGFADIPVGVLMKTKTIKFCLTLLFVFFVTPAFAEIYNLQARIIDNAGILSQQEKENLLTVISSAASAYNFDLVIVTEKNIGSSTPGQYADNFFDENYYGFTGPAGNRDGALFLLVTDSRDYWFSTSGSGIRILNAAASNKLENSVVKLLRENNYYGAFNAFLINWNEFLALNAKGRNYNFFHQWNLVLVIIAWVLALLIGFIVVQTWKKAMDTVLPQTQAAAYVVPGSLAFRGEKGQLPLQHG

SEQ ID NO: 5701 - DNA, 675 bp, Unknown
  Obtained from environmental sample
  misc_feature (1)..(675): n is a, c, g, or t
gtgcgttctaccataattgcaataatcatagggacatatcttaaacttcccaaccacagattgcttgaattgggaatagcggctatagttcatgaagcgggaatgttaaaattaccttcccagctgtatctgagcaacagggcgcttaatcctcaggagagaaaagcgattttaacgcatcctattcttggttatactttgttgaaatctctggattttccgcttgcggtatgcctttcggcgcttgaacaccatgaacgcaataacggaacgggctatccgcgccagcttgccggagaaaaaatcagtctgtattcaagaattatcgccgttgcctgctcttacgaagcgctaagttccaagcgtccgcacaaggaagcaaaagacggttatacgggcatgcttgaactgttaaagaacgatggcaaacaatacgacgacacagtagtcagggcgcttgttctttcgctttcgatataccctataggcctgtacgttctcctttcaaacggaaagaaaggccaggttattgacgtaaatccggaaaacccgaaattccctattgttgagattttcggggacgttactccggacggaagaaacaaaaccgtgcaaacagcgcctaacgaactgagtattgtgcgtcctcttaaccgttcggagattgaaaattaa

SEQ ID NO: 5702 - protein, 224 aa, Unknown
  Obtained from environmental sample
  DOMAIN (2)...(118): HD domain
  misc_feature (1)..(224): Xaa is any amino acid
MRSTIIAIIIGTYLKLPNHRLLELGIAAIVHEAGMLKLPSQLYLSNRALNPQERKAILTHPILGYTLLKSLDFPLAVCLSALEHHERNNGTGYPRQLAGEKISLYSRIIAVACSYEALSSKRPHKEAKDGYTGMLELLKNDGKQYDDTVVRALVLSLSIYPIGLYVLLSNGKKGQVIDVNPENPKFPIVEIFGDVTPDGRNKTVQTAPNELSIVRPLNRSEIEN

SEQ ID NO: 5703 - DNA, 780 bp, Unknown
  Obtained from environmental sample
  misc_feature (1)..(780): n is a, c, g, or t
atgaacagaaaaaaaatagtaccgatgaccgtaaagaaaaccacgaaaaaggcggccccaaaaaactatccgaaaaagaagactcctccgaaatcaagacggatcacgctagatgatctcgccgctgttgtcgccgaaaccgaggcaagaatggcgagggcacgcgaagagacggaacgtgctttcagaaagtcccgcgaagaaacggaagcacggattgcgaagtctcgcgaagaaacagaggcaagaatcgcgaagtcccgcgaagaaacagataaggcactccaagagctatccgcccaaaacgaaaagactactgcggacatcctaaaaacatccgttattgtccgagaactgtcccgaaacatgggcgggttgaacaacagcttcgggtatgttgtggaactcattgccgtccccaaattgcgctccgcaattaacgcggccggtcatacatttacacatgaaaatgtatgggtggacaaaaaaattaacgcgcttgtcgccggagagaaaaaaactatcggcgaaatagatatgttcttactcaacgaaacagaagctatggccgttgaaatcaaagcgcaacttaatacaagtcacatagaagaacgtttgaaacgactggaaaaaattcgcacctacgaagaagaggccgaaatcaaaggcttgaccctctatggcgcggtagccggagtatacattgacccgaaggctaaagacatggccttaaaaacggcctatacgtcgtggaaatccgcgaggaagaagataaactaa

SEQ ID NO: 5704 - protein, 259 aa, Unknown
  Obtained from environmental sample
  misc_feature (1)..(259): Xaa is any amino acid
MNRKKIVPMTVKKTTKKAAPKNYPKKKTPPKSRRITLDDLAAVVAETEARMARAREETERAFRKSREETEARIAKSREETEARIAKSREETDKALQELSAQNEKTTADILKTSVIVRELSRNMGGLNNSFGYVVELIAVPKLRSAINAAGHTFTHENVWVDKKINALVAGEKKTIGEIDMFLLNETEAMAVEIKAQLNTSHIEERLKRLEKIRTYEEEAEIKGLTLYGAVAGVYIDPKAKDMALKTAYTSWKSARKKIN

SEQ ID NO: 5705 - DNA, 615 bp, Unknown
  Obtained from environmental sample
  misc_feature (1)..(615): n is a, c, g, or t
atggccagaagcagacggcagacatttctcctactgttaattatcattcccttctggactaacttccttataagggtcttcgcgtggatgaacatactgggaaacaacggttttcttaatgaacttttaattcgcatcgggataatcacagattatattccgtttttatacaaccaaaaaaccgtaattttagtccttgtttacatgtatctgccgtacgcgattttaccgttgttttctactatagataaatttgatttttcattactggaagcggcccgcgatctgggagcgaataaactaacatctattattaaaatactgcttccgaatatacgcggcggaatttttacggcggtactttttacatttattcctattttcggggcttatgccgttcctctccttgtaggcggcaaggattcctacatgctggggaatattatcgcggaccagcttttaaaatcgcgtaattggccccgcgccgccgcaatttccatggtgctgactcttgttacaacagcgggcgttctttggatgatgtatatccagaagcgtgaatcttcgcgtaacacagacgccaaaagcgcggaaaacgggaaaacgggaacatag

SEQ ID NO: 5706 - protein, 204 aa, Unknown
  Obtained from environmental sample
  DOMAIN (1)...(190): Binding-protein-dependent transport system inner membrane component
  misc_feature (1)..(204): Xaa is any amino acid
MARSRRQTFLLLLIIIPFWTNFLIRVFAWMNILGNNGFLNELLIRIGIITDYIPFLYNQKTVILVLVYMYLPYAILPLFSTIDKFDFSLLEAARDLGANKLTSIIKILLPNIRGGIFTAVLFTFIPIFGAYAVPLLVGGKDSYMLGNIIADQLLKSRNWPRAAAISMVLTLVTTAGVLWMMYIQKRESSRNTDAKSAENGKTGT

SEQ ID NO: 5707 - DNA, 873 bp, Unknown
  Obtained from environmental sample
  misc_feature (1)..(873): n is a, c, g, or t
atgtcagacattaataaatttgcgggttccgatattgaaattgcccagtcggtgtatcctgaacacgcgctccatattaaggaagtggcaaaaagggcgggtatccccgatgaatttattgagtattacgggaaatacaaggccaaagtaaatcttgattatcttgcggcaaaacaaaatcaaaaagacggcaaactcattttggtaaccgccattactcccactccggcgggagagggtaaaaccaccactacggtaggagtcgcggacggactctgcaaaattggcaaaaaaacccttgtcgcgttacgggaaccttcgctggggccggtgttcggcgttaaaggcggggctgccggcggcggctgggcgcaggttatccccatggaagacatcaacctgcattttaccggcgattttcacgccattgccgcggcaaacaacctgttagccgcaatgattgacaaccacatctatcagggcaataaactcaatattgatccgcgcaaaattgtctggcgcagatgtattgatatgaacgaccgccagcttcgttttatcaatgacggtctgggaggaaaggcaaatggtttcccgcacgaagacggatttgacattaccgccgcctctgaaataatggcaattctgtgccttgcttcgggtattgacgatttgaaaaaaagacttggccgcattattgtcggttatacttacggaaaacaaacggacggcactgaactcgtggttaccgccgcgcagttaaacgctcagggcgcaatggcagccctgcttaaagacgcgctgaaaccaaacctcgtgcaaactctggaaggaaccccgcttttatacacggcgggccgtttgccaatatag

SEQ ID NO: 5708 - protein, 290 aa, Unknown
  Obtained from environmental sample
  DOMAIN (8)...(290): Formate--tetrahydrofolate ligase
  misc_feature (1)..(290): Xaa is any amino acid
MSDINKFAGSDIEIAQSVYPEHALHIKEVAKRAGIPDEFIEYYGKYKAKVNLDYLAAKQNQKDGKLILVTAITPTPAGEGKTTTTVGVADGLCKIGKKTLVALREPSLGPVFGVKGGAAGGGWAQVIPMEDINLHFTGDFHAIAAANNLLAAMIDNHIYQGNKLNIDPRKIVWRRCIDMNDRQLRFINDGLGGKANGFPHEDGFDITAASEIMAILCLASGIDDLKKRLGRIIVGYTYGKQTDGTELVVTAAQLNAQGAMAALLKDALKPNLVQTLEGTPLLYTAGRLPI

SEQ ID NO: 5709 - DNA, 978 bp, Unknown
  Obtained from environmental sample
  misc_feature (1)..(978): n is a, c, g, or t
atggttgttttgggaaacccgccgtatagcggggaaagccaaaataaatgcgaatggattatgcaactgatggatgattacaagaaagaaccgcccgccgactccacgttacaagagaaaaaccctgaccattggttggaagtgcacgaacaaagcgctcaaaaactgtacgagcgtaattctaaatggattaatgacgattactgcaaatttatccgtttaggacagtactttattgataaaaataatgaaggcatattagcgtatatcaataaccatagttttctcgacaatcctacttttaggggtatgcgttggagtttgctgaaaagttttgacaagatttacattcttgatttgcacggtaacagcaaaaagaaagaagtttgtccggacggaagcaaagatgaaaatgtgtttgatattcagcaaggcgtgagtatcaatatttttgtgaaaacaggacgtaaagcgaaaggcgcattggcggaagtttatcatattgatgttttcggaaagagggaagagaagtataaatatctgcgtgatagcaaattttctaaggtcaattttacaaaactcaagccgtcagcgccagaatatttttttgtgcctaaggattatgagaataaggaagagtacgacaagggttttggtattgaagagttgtttccagtgaactctgttggcatcgtaacggcaaaggatgctgtttttgtgaatgtggataaaaatgttttattgaaaaacgtaaaggattgttttgatataaatcctgacaaaaaattaataagacgtattaactatcgtccatttgatagtcaatacgtctattacgatatagaaagaatggaaagagcgcgagaaaaagtcatgtcccatcttttgagtgatgaanatgtgggattgataacaaatagacagattagaacttcgcacatagcccatacttttttgactaaaggtataacgatttaa

SEQ ID NO: 5710 - protein, 325 aa, Unknown
  Obtained from environmental sample
  misc_feature (1)..(325): Xaa is any amino acid
MVVLGNPPYSGESQNKCEWIMQLMDDYKKEPPADSTLQEKNPDHWLEVHEQSAQKLYERNSKWINDDYCKFIRLGQYFIDKNNEGILAYINNHSFLDNPTFRGMRWSLLKSFDKIYILDLHGNSKKKEVCPDGSKDENVFDIQQGVSINIFVKTGRKAKGALAEVYHIDVFGKREEKYKYLRDSKFSKVNFTKLKPSAPEYFFVPKDYENKEEYDKGFGIEELFPVNSVGIVTAKDAVFVNVDKNVLLKNVKDCFDINPDKKLIRRINYRPFDSQYVYYDIERMERAREKVMSHLLSDEXVGLITNRQIRTSHIAHTFLTKGITI

SEQ ID NO: 5711 - DNA, 978 bp, Unknown
  Obtained from environmental sample
  misc_feature (1)..(978): n is a, c, g, or t
gtggtgctgtcgtcncgggagagtnngggcggtatnacggccgagaggattaacgagctgatagagacgctgnagcgggagttctactcgttcgacgtgtgcagtttggtcgcggttatcgaggaattgcaggagtacgggggcgaggggcggatattcttcgaggtcgacgccggcctgtcgtttccgcccagcgacgtggggtatgtggggattgaatccgatctcggcgcgaccgtccgtctgccggttatgaaccttttgggctcctcctccccgctgccgataggcttctccgaccacataaccagagggcgccgcgacgccgatatgtacgccgatttcctctccgtcatgcagaaccgcctccacgctctgtggctcgacgcctgccggaagaatgcgctctggggcccttcgactccggcggctgagcggagtcgaagcccggtcgctgaaaaaatcttcaagtttatgaccgggctgtcgatagaaaaaacgggctttctcggaccggctcaggtcgggctttggccgctggctaaccgggcgaggagcgcccaaggcatgaaagagctgttgtacgcggcgtttggggacattcctattaatatagaggagaacgtcgtccgctgggcggcggtgtcgaacgcccgcccgatcggcggcggggcgcgtctgggcaggaacgcggccttgggcgcgagggtccgcgaccggacgtctaagttcaggataacggtcggcccgctagatttccggacttacgagacgtttatgccgggcggaagcggctgtcggctggttgacgagattttggccgtataccttaacgagccggtgatctgcgagttttcggtaacttgccggcttcgcgacctgcccggggcgcgtctgggcggcggcggcgcgttgggtcggacggcggtgcttggggcggttgggggcggtgggacggccgtatacaaaaaaaaataa

SEQ ID NO: 5712 - protein, 325 aa, Unknown
  Obtained from environmental sample
  DOMAIN (25)...(313): Protein of unknown function (DUF1305)
  misc_feature (1)..(325): Xaa is any amino acid
MVLSSRESXGGXTAERINELIETLXREFYSFDVCSLVAVIEELQEYGGEGRIFFEVDAGLSFPPSDVGYVGIESDLGATVRLPVMNLLGSSSPLPIGFSDHITRGRRDADMYADFLSVMQNRLHALWLDACRKNALWGPSTPAAERSRSPVAEKIFKFMTGLSIEKTGFLGPAQVGLWPLANRARSAQGMKELLYAAFGDIPINIEENVVRWAAVSNARPIGGGARLGRNAALGARVRDRTSKFRITVGPLDFRTYETFMPGGSGCRLVDEILAVYLNEPVICEFSVTCRLRDLPGARLGGGGALGRTAVLGAVGGGGTAVYKKK

SEQ ID NO: 5713 - DNA, 798 bp, Unknown
  Obtained from environmental sample
  misc_feature (1)..(798): n is a, c, g, or t
gtgtacacgatttattnaagttttcacgaagtacagctgaccattcagggctgggaaatagcgtttaacggcattgataactataacctcgctttttcagggaatacggaatttgtgcccgccctcgtctctttcctgactatggaactgacctacgcccccgtaattaccgttatcgcttttattctggccttgctgctcaatcagaacataaagttcagagcgggttttcgcgccctgttcttcatgcccgttattgtaatgagcggcccggtgatgtaccagctgatggatgcgggcggcatgaccttcaccggtataaaagacatggtgttataccagatgacggcgcagttctcaaagccccttgccaacgcgctggtttttctctttcagaatttttccatggtgctgtggtttacaggcatccccatcatcctgtttatcacgggtttgcaaaaaatcaatagcagcatgctggaagccgcaaaaatagattcggcgacttcctggcagattttatggaaaataattatacccattatccggcctattgccatggtttcgattattttaactatcgtgcagcttggcacctattccttaaacccggttttgcccatggtacaggaagcgatttataaaacgacgagcgggcttgggcttgccagcgcgttcgcctggatttatactctggcggccctggcgctgatggggcttgcgttcgctcttttgaaaaaccccagggaagatttagtggaagaacaaaagcgggcgaaaaaaagaagggagatatag

SEQ ID NO: 5714 - protein, 265 aa, Unknown
  Obtained from environmental sample
  misc_feature (1)..(265): Xaa is any amino acid
MYTIYXSFHEVQLTIQGWEIAFNGIDNYNLAFSGNTEFVPALVSFLTMELTYAPVITVIAFILALLLNQNIKFRAGFRALFFMPVIVMSGPVMYQLMDAGGMTFTGIKDMVLYQMTAQFSKPLANALVFLFQNFSMVLWFTGIPIILFITGLQKINSSMLEAAKIDSATSWQILWKIIIPIIRPIAMVSIILTIVQLGTYSLNPVLPMVQEAIYKTTSGLGLASAFAWIYTLAALALMGLAFALLKNPREDLVEEQKRAKKRREI

SEQ ID NO: 5715 - DNA, 942 bp, Unknown
  Obtained from environmental sample
  misc_feature (1)..(942): n is a, c, g, or t
ttgggccggtttggaaatctttcgtattactatcgccccgaccgcgatattattttaatcgagaatgtagtaaacgggtatgtctggaaaacaggcctggacgcaccctttggccaggatttggaacgggctgttgacgcggcgaaaaccccggaagaaaaaataagaattgccgaacctaaggaagtgcgtctgaacgcgacatatacgggctttgccaattcgctgcttactgcggaattttacgatgactcgtttaacatgagcatagtcccgtcggccgccaggaggggggcaaagtccgagctggtaaaaatcgccggagaccactaccgcctggatgtccgttttattgatatggatttaaccatacatttgcatatacttctttccgaccggggcataaaataccggatttacgacagcgaaattgaaggggcgggagcggacagaatggccgcccttatcataacgccgtttatgggcgccgcagggggcgtgcgccaatattttgatcccgcgacaggggaatacgggccggaaatccccaaccccatgaaaccaggctatgcctttgtgccggacggcagcggggcgctgatccggtataacgacaatacggtaagcatcaaccgttacatcgggaaggtgtacggggaaaaccccgccgaagccatgttttattacgacgatactgcctatgccgtgcggaagaaggaacccttaatgccggtgttcggcgtggcaatagggcataaccagcagggttttgttgcctgggcggacgagggcggtgagcagatggaaattgtaatgtcaccaaaggaaaatacgacgaattacaattttatttacccgcgttttgtgtataacggcaaatgtaccaggtgtataacgggagggcgaaaggtatttccnggcttaccccgaccgtttgcataa

SEQ ID NO: 5716 - protein, 313 aa, Unknown
  Obtained from environmental sample
  misc_feature (1)..(313): Xaa is any amino acid
MGRFGNLSYYYRPDRDIILIENVVNGYVWKTGLDAPFGQDLERAVDAAKTPEEKIRIAEPKEVRLNATYTGFANSLLTAEFYDDSFNMSIVPSAARRGAKSELVKIAGDHYRLDVRFIDMDLTIHLHILLSDRGIKYRIYDSEIEGAGADRMAALIITPFMGAAGGVRQYFDPATGEYGPEIPNPMKPGYAFVPDGSGALIRYNDNTVSINRYIGKVYGENPAEAMFYYDDTAYAVRKKEPLMPVFGVAIGHNQQGFVAWADEGGEQMEIVMSPKENTTNYNFIYPRFVYNGKCTRCITGGRKVFPGLPRPFA

SEQ ID NO: 5717 - DNA, 1035 bp, Unknown
  Obtained from environmental sample
  misc_feature (1)..(1035): n is a, c, g, or t
atgggacagcgacgggcacttttgaggaagaagacgtgggaaaatgaggaaaggacggccagttgcccgccggccgtggatgatcccaaaaaaagtcagcgaggagcagctcagacccataagggcgcgggtaaagacagaaacgtgaaaaaccgcagccatttccacgccgccttcttttggggcttttccgcgctgttacttttctcctgcaagactgtgactccggttgacggggttatgattaacagcggaaaagaattcgccgctgaacgggaattcattgaacagttattttcaaggcntgagtttcagaataccttaggactccgtttaattttggataacggagccggagaacagcaaaaaacgcaggctgccggttcgcccgcgctgatcgttgagtttgcggcttcatggacacaagccgaaggaattccagtttcaaaaacatggtttgtaccgcgggaagatccgctggctgaacgtaccggcacaagccttgccgcctgccttgacggaagcgaaacccttgttaccattggggaactcgcgccgccatatatagggcttttggtagacggcctgtgcgtaacggatgaaaattatccgctggtacgctatgtttcaatccgcatcagagaggcgcaaagcgaagttgaaaaaaatgaacggcttcaggaaaagatcgccgcgctggaaaaaacgcttacagaaacgcccaaaccgctggttcggaacgcgccgtcaattatctggatatgcgccgcgggagaccttatgctgggcaggggcgcaggcgatattttgatcaaggaaggagccgaaggcatttttggaaaaacggcggattattttaaacggtctgaccttaacatgctaaaccttgagggagcggtcagcggcagcggcgccaaagtcttaaagagttataatttccgttttgatccactgactcttccgccattaacggaggcggggatacacgcggcgttagtcgcaaataaccatctcgtgccgctcggccaattctga

SEQ ID NO: 5718 - protein, 344 aa, Unknown
  Obtained from environmental sample
  misc_feature (1)..(344): Xaa is any amino acid
MGQRRALLRKKTWENEERTASCPPAVDDPKKSQRGAAQTHKGAGKDRNVKNRSHFHAAFFWGFSALLLFSCKTVTPVDGVMINSGKEFAAEREFIEQLFSRXEFQNTLGLRLILDNGAGEQQKTQAAGSPALIVEFAASWTQAEGIPVSKTWFVPREDPLAERTGTSLAACLDGSETLVTIGELAPPYIGLLVDGLCVTDENYPLVRYVSIRIREAQSEVEKNERLQEKIAALEKTLTETPKPLVRNAPSIIWICAAGDLMLGRGAGDILIKEGAEGIFGKTADYFKRSDLNMLNLEGAVSGSGAKVLKSYNFRFDPLTLPPLTEAGIHAALVANNHLVPLGQF

SEQ ID NO: 5719 - DNA, 549 bp, Unknown
  Obtained from environmental sample
  misc_feature (1)..(549): n is a, c, g, or t
atgtatctgtctataataacaataaacctcaacaacgccgctggtcttgaaaaaacaattcaaagcgttatttctcaaacaaataaagaatttgagtatatagttatagacggcgcttcaactgacggaagcgttgaaataattaaaaaatacagttccggtataaattattgggttagcgaatctgatacaggcatttataacgctatgaataaaggcattcaaaaagctcaagggaattattgtctttttttgaatagcggtgattatttagtttcatcaacaaccctgcaagatgtattcaatgaaataagcaatactgccgcagcagatatcttttatagtgattgtattaaatcagatgattctatttatatttacccggataatataacaattaatgatataataaagatcgggataagtcatcagaatacattaattaagcgttcattgtttttggaacatagtttttataatgaaaaattgcgtattgcgtcagatttagaatattttttaaaggaaatgtggattataaaagtaatttaa

SEQ ID NO: 5720 - protein, 182 aa, Unknown
  Obtained from environmental sample
  DOMAIN (4)...(153): Glycosyl transferase family 2
  misc_feature (1)..(182): Xaa is any amino acid
MYLSIITINLNNAAGLEKTIQSVISQTNKEFEYIVIDGASTDGSVEIIKKYSSGINYWVSESDTGIYNAMNKGIQKAQGNYCLFLNSGDYLVSSTTLQDVFNEISNTAAADIFYSDCIKSDDSIYIYPDNITINDIIKIGISHQNTLIKRSLFLEHSFYNEKLRIASDLEYFLKEMWIIKVI

SEQ ID NO: 5721 - DNA, 309 bp, Unknown
  Obtained from environmental sample
  misc_feature (1)..(309): n is a, c, g, or t
atgatcaaggagcgcaaccaaatagcgcaggcaatccgttccgagggcgaaggcagaaaagccgccctgctgggaagaatggacaatgagcggatggaaatccgttccgcggcgtacgaccgttccgagtcaatacgcggcgaggccgacgcgaaagcggcaagaatttacgcggacgcatacaaccgcgacaggagtttctttgatttttggcgggcggtggaatcctaccgtcagactatgccgaaatttagcaagacgcttaccacagatatggaatatttccggtatctgtattcaccgagataa

SEQ ID NO: 5722 - protein, 102 aa, Unknown
  Obtained from environmental sample
  misc_feature (1)..(102): Xaa is any amino acid
MIKERNQIAQAIRSEGEGRKAALLGRMDNERMEIRSAAYDRSESIRGEADAKAARIYADAYNRDRSFFDFWRAVESYRQTMPKFSKTLTTDMEYFRYLYSPR

SEQ ID NO: 5723 - DNA, 984 bp, Unknown
  Obtained from environmental sample
  misc_feature (1)..(984): n is a, c, g, or t
ttgtatccctattttataggcgatttggtgcggcagtattcgcgttttcccgagttggcgttagcgataaatgtgcttttggcggtgattgccgttttagcgtggggaataggctccgcacntattttgatttatatggaacgcaaggtgtgcgcgcacgtgcagtgcaggcttggtcctatgaggctcggctggcacggggttttgcaaaccgtggctgatgtaacaaagttgctcttcaaagaggtctattccccaaaaggcgtggacacaatagtctattatttagcacctatgatttcccttactgcgcctttcttcacattggctctaattccctttggcgaaaaatggcaggttataaacctgagttttgccgtgccagccattatagccataaatgggttggggctttttgccattcttttgggcggctgggcctccaacaacaaatattcgcttttgagcgcgttgaggagcggcgcgcagatgataagctacgaaatttcacttgcgctgataatgctttttgtggtggtgatttctggcagtgcgtccttgaacgatattatagccgtgcagagtggcacggttttgaattggtggattataaagatgcccgttttagggtttttggtgtttttggtgtttatgtgcgttagcacagccgagcttaaccgcgccccatttgacatagcagaagcggagcaggaacttacagctggtttccatacggaatatacgggaacggcttttgccatgttttatttaaccgaatacataaacataataggtgcttccgcgcttggttcaattttctttttaggtggctggcatgcgccgttgataggcgtggagagcgttgataaggttcttatggcagtcccggatttggtttggatgttcgccaaaatttatttcttgatttggctctacatgatgttccgttggacttggctaagaccgcgagtgaccagcttatga

SEQ ID NO: 5724 - protein, 327 aa, Unknown
  Obtained from environmental sample
  DOMAIN (20)...(327): NADH dehydrogenase
  misc_feature (1)..(327): Xaa is any amino acid
MYPYFIGDLVRQYSRFPELALAINVLLAVIAVLAWGIGSAXILIYMERKVCAHVQCRLGPMRLGWHGVLQTVADVTKLLFKEVYSPKGVDTIVYYLAPMISLTAPFFTLALIPFGEKWQVINLSFAVPAIIAINGLGLFAILLGGWASNNKYSLLSALRSGAQMISYEISLALIMLFVVVISGSASLNDIIAVQSGTVLNWWIIKMPVLGFLVFLVFMCVSTAELNRAPFDIAEAEQELTAGFHTEYTGTAFAMFYLTEYINIIGASALGSIFFLGGWHAPLIGVESVDKVLMAVPDLVWMFAKIYFLIWLYMMFRWTWLRPRVTSL

SEQ ID NO: 5725 - DNA, 780 bp, Unknown
  Obtained from environmental sample
  misc_feature (1)..(780): n is a, c, g, or t
atgtggaattacagactggcgggcgagctgcttacttttttggcggtcgctgtttcagaccttgattatcatactgttcagttccgttttacagggttcccgcatgcactatggcgggttacggttttgcccgtttataaatttccgctgaaaaacttctggtttatgtgcgttatgctgattattgtagtgccgccccagactattatggcttcgctctatcttaatttccgcttttttgatatttttggtttaataaggctgataacccacgagccgctcaacctgcttgacagcgccgctagtttttggctgctttcggctacgggcatgggcctgaaaagcggcttgtatatttttatgttaagacagtatttccggggcatgcccaaagaacttgaagaagcggcttatgttgacggctgcggcaggttcaagacttttatccagataatgcttcccgacgcgatgcccatgcttacttcgtgttttctgttttcctttgtgtggcagtggacagattctttttattcgtcgctgtttttaagcaattacaaaatgctgtcggtgggtttaagcggaatcgcggacaggcttggcgcgtggtggatgtccatgaacgccagttccggcgccgtttattcggcggcgccgatagggtatacccaggcgatgatcgccaccggtatgctggtatgccttgctccgttgattctgctgtatatggcggcgcaaaaggcttttgttgagtcccttagccagacagggattaaaatgtag

SEQ ID NO: 5726 - protein, 259 aa, Unknown
  Obtained from environmental sample
  misc_feature (1)..(259): Xaa is any amino acid
MWNYRLAGELLTFLAVAVSDLDYHTVQFRFTGFPHALWRVTVLPVYKFPLKNFWFMCVMLIIVVPPQTIMASLYLNFRFFDIFGLIRLITHEPLNLLDSAASFWLLSATGMGLKSGLYIFMLRQYFRGMPKELEEAAYVDGCGRFKTFIQIMLPDAMPMLTSCFLFSFVWQWTDSFYSSLFLSNYKMLSVGLSGIADRLGAWWMSMNASSGAVYSAAPIGYTQAMIATGMLVCLAPLILLYMAAQKAFVESLSQTGIKM

SEQ ID NO: 5727 - DNA, 357 bp, Unknown
  Obtained from environmental sample
  misc_feature (1)..(357): n is a, c, g, or t
atgtcgaatgaaaaaagcagaaaagaattaaagattgcggtttcgggaaaaagcggctgcggtaacaccacggtaagccgccttttggcggatgccctggatttaaggtttattaattttaccttccgcaatctagctcaggaaagacgtttaagtttaaaagaggtgcttgagcttgcggcaaaggatgattcctgggacagggaagtagacaccaggcagactgagatggcaagggaacagggcggatgtgtccttggttccaggcttgcaatttggatgctgcctgaagccgacctaaaggtgtttcttaccgcacgtccgaaacgagagcaaagcgatctcgccctgtcataa

SEQ ID NO: 5728 - protein, 118 aa, Unknown
  Obtained from environmental sample
  misc_feature (1)..(118): Xaa is any amino acid
MSNEKSRKELKIAVSGKSGCGNTTVSRLLADALDLRFINFTFRNLAQERRLSLKEVLELAAKDDSWDREVDTRQTEMAREQGGCVLGSRLAIWMLPEADLKVFLTARPKREQSDLALS

SEQ ID NO: 5729 - DNA, 543 bp, Unknown
  Obtained from environmental sample
  misc_feature (1)..(543): n is a, c, g, or t
ttgggcttgaaggggtttttggaaatcgagacagacagggacgttgaaaagtaccgggcttatattgaagctgtccttgcttccgcatcggatcaggcagaagccgagcgcgtgcgggaaggcaggcacacgatggatgatatactttcccatatcgccgttttggaagaatctggccaaagtatatgcgcttatgtgcctgagattgaaagagcgataaaggaaaacctgcgaacgcgctttgccgagatattgggagataaaatcgacgaaaaccggattctggcggaaactgcggttttattgatgaaatataccatttcagaggagctttcaaggctttcttcgcatctaaaggaatttcggctggaaacggaaagaaacccaagccctggtaaaaagcttgattttctttcccaggaaattaaccgcgagattaatactatcagttcaaaaacgcccatgcttgaagtaagcaggatcgtggttgaaatgaaaaacgcgttggaaaatataagggagcagttaagaaatgtcgaatga

SEQ ID NO: 5730 - protein, 180 aa, Unknown
  Obtained from environmental sample
  DOMAIN (93)...(180): Domain of unknown function (DUF1732)
  misc_feature (1)..(180): Xaa is any amino acid
MGLKGFLEIETDRDVEKYRAYIEAVLASASDQAEAERVREGRHTMDDILSHIAVLEESGQSICAYVPEIERAIKENLRTRFAEILGDKIDENRILAETAVLLMKYTISEELSRLSSHLKEFRLETERNPSPGKKLDFLSQEINREINTISSKTPMLEVSRIVVEMKNALENIREQLRNVE

SEQ ID NO: 5731 - DNA, 723 bp, Unknown
  Obtained from environmental sample
  misc_feature (1)..(723): n is a, c, g, or t
ttgccacgcttcaaccttattgaagatataaacaatttaatacaggaattgaacgatactatcagctcgcaggcggaggcggttgatcactcctcaacggaaacagaaggaataatcgcctcgattaaagaaacttcggaaatgtcacttaaacagcaggaatcagtaaaagggttgatagaaattgcgggacgtggacaggaatccatgagaaaaaccattcaatcaatacatgaaatctctcaatctgttgaaggcataagttcggcaatccgcataatttcttcaatagcggcaaacaccaatttgctgtcaatgaatgcggcgatagaatctgcacacgccggagacgccggaaggggctttgcggttgttgccggagaaatacgccgcctttctgacagcaccagagaaaattcggtaagtatttcccgtacacttaaaagtattatcaacggaatatccgacacgacaaaacaatccggcgaaacagatacgcgaatagcccaaatgtccaaagagataagagggtttgccgaaaccatgtctgtttttataaacacatttaatgaattatcggcaaaaagcggaaacattactgcatctcttgtaagcctaaaagagcaaagttcggcggttaaaacgagttatgcacaaatgattgaaatgacagaaaaacttgccaaagcgttgaaagacttatccgaattgtcaaaaaaataa

SEQ ID NO: 5732 - protein, 240 aa, Unknown
  Obtained from environmental sample
  DOMAIN (22)...(236): Methyl-accepting chemotaxis protein (MCP) signaling domain
  misc_feature (1)..(240): Xaa is any amino acid
MPRFNLIEDINNLIQELNDTISSQAEAVDHSSTETEGIIASIKETSEMSLKQQESVKGLIEIAGRGQESMRKTIQSIHEISQSVEGISSAIRIISSIAANTNLLSMNAAIESAHAGDAGRGFAVVAGEIRRLSDSTRENSVSISRTLKSIINGISDTTKQSGETDTRIAQMSKEIRGFAETMSVFINTFNELSAKSGNITASLVSLKEQSSAVKTSYAQMIEMTEKLAKALKDLSELSKK

SEQ ID NO: 5733 - DNA, 480 bp, Unknown
  Obtained from environmental sample
  misc_feature (1)..(480): n is a, c, g, or t
atggcaaatgattttacccattttgatacgcggggtaacgcggttatggtggacgtatcgggaaaagaaacaagcgtgcgtaccgctatagccaggggaagcatatccatgaacgaagaagccatgaaggctgtgcagacagggacagtcaaaaaaggcgatgtgctttccgttgcccgcatcgcggggatcatggcggccaaacgctgtgacgagcttatcccgctctgccatcctctttgttttgacgagtgtacggtggatttttccgtaaatgaaaccaaaaacgaaatagaagcctcatgcaaggttaaactttccggaaagaccggagccgaaatggaagctcttacgggggtttccatagccctgcttactatttacgatatgtgcaaggcgatagacaggactatggtaatcggcaatatccggctttgggaaaaatccggagggaaaagcggccattttagcctccgatag

SEQ ID NO: 5734 - protein, 159 aa, Unknown
  Obtained from environmental sample
  DOMAIN (16)...(151): MoaC family
  misc_feature (1)..(159): Xaa is any amino acid
MANDFTHFDTRGNAVMVDVSGKETSVRTAIARGSISMNEEAMKAVQTGTVKKGDVLSVARIAGIMAAKRCDELIPLCHPLCFDECTVDFSVNETKNEIEASCKVKLSGKTGAEMEALTGVSIALLTIYDMCKAIDRTMVIGNIRLWEKSGGKSGHFSLR

SEQ ID NO: 5735 - DNA, 438 bp, Unknown
  Obtained from environmental sample
  misc_feature (1)..(438): n is a, c, g, or t
ttgttagtcgcaatgggaaaaattatagcggtttgtaccagccaggaaaaagggacggcaaaacataatgcgggcagggccgaatttatcgccggtcacggcatcgccggtgacgcccatgccggttcctggcacaggcaggtgagccttctttcacataataaaattgaggcttttcgactaaaaggggcggaagtagaagacggggcctttggggaaaaccttgtggtggaaggcattgatttcagctgccttcctgtggggacggttcttgaatgtaatgacgtgcttctggaaatgactcanattggaaaggaatgtcacagccattgcgccatatataagaccatgggggactgcatcatgccccgggaagggggttttgcgaaagttctgcgcggcgggtttatcggtggtcgagacgaaatgaaatcatga

SEQ ID NO: 5736 - protein, 145 aa, Unknown
  Obtained from environmental sample
  DOMAIN (33)...(145): MOSC domain
  misc_feature (1)..(145): Xaa is any amino acid
MLVAMGKIIAVCTSQEKGTAKHNAGRAEFIAGHGIAGDAHAGSWHRQVSLLSHNKIEAFRLKGAEVEDGAFGENLVVEGIDFSCLPVGTVLECNDVLLEMTXIGKECHSHCAIYKTMGDCIMPREGGFAKVLRGGFIGGRDEMKS

SEQ ID NO: 5737 - DNA, 480 bp, Unknown
  Obtained from environmental sample
  misc_feature (1)..(480): n is a, c, g, or t
atgatcgtgcttccaagtttcgatcccgcccagcttatgccgcttcttacattacgccaaaacatttataccgacccgcaaaaaccaattcaagtggagccaaaactttacgcgataggggagcctgacaggaaatcgccaatctttgtaacgacaaatttttcattaacatactttttggtatcaggagaaattgagaacagcggtatttccgcatggcttgttatccccgaatgtgagggctttagcgtactgacggcgtgggcggcgggaaaattttcaggttcttcaattgcaaagtttattaaagagataaacattgaaaaccagacggacacgaaacaaattgttatccccggttatgttgcgcaaatatcaggtgagcttgaagaaaatatgcctggttttaaagttcttgtaggtcctggcgaagccggggatttggaaggctttattaaaaatgtgttgctaaaaaaataa

SEQ ID NO: 5738 - protein, 159 aa, Unknown
  Obtained from environmental sample
  DOMAIN (3)...(152): CO dehydrogenase/acetyl-CoA synthase delta subunit
  misc_feature (1)..(159): Xaa is any amino acid
MIVLPSFDPAQLMPLLTLRQNIYTDPQKPIQVEPKLYAIGEPDRKSPIFVTTNFSLTYFLVSGEIENSGISAWLVIPECEGFSVLTAWAAGKFSGSSIAKFIKEINIENQTDTKQIVIPGYVAQISGELEENMPGFKVLVGPGEAGDLEGFIKNVLLKK

SEQ ID NO: 5739 - DNA, 330 bp, Unknown
  Obtained from environmental sample
  misc_feature (1)..(330): n is a, c, g, or t
atgcctaagataacttttttaccggaaaacatagcggtagaggtggaaaaaggcacgccgattttagaagtcgcgcgttctattggaatttttgtagagactccgtgcggcggcaagggaacctgccaaaaatgcagtgtaaaaatcgcgttggaaaacaatcgtgaaagcgttaaaaccgtgctgatttgcaaaaccgcagttcctgatgaaatcattactgtggagattcaaagtcagcttacggaaaatcatctacccgcagaaggntcatttgaaattttaccgatccgtctgaatatttaccagaaggcaaggaagcgtttttaa

SEQ ID NO: 5740 - protein, 109 aa, Unknown
  Obtained from environmental sample
  DOMAIN (4)...(70): 2Fe-2S iron-sulfur cluster binding domain
  misc_feature (1)..(109): Xaa is any amino acid
MPKITFLPENIAVEVEKGTPILEVARSIGIFVETPCGGKGTCQKCSVKIALENNRESVKTVLICKTAVPDEIITVEIQSQLTENHLPAEGSFEILPIRLNIYQKARKRF

SEQ ID NO: 5741 - DNA, 381 bp, Unknown
  Obtained from environmental sample
  misc_feature (1)..(381): n is a, c, g, or t
atgcagaacaatcgaaccgagcgtcttggcagcttgattcaggaacttatcagtaatcttattcttgaaagcagaatcaaagacccaagaatctcacagtttgtttcaataacaagggtaaatgtcacgcgtgacctttcatacgcagatgtgtatgtctccaacatacgggaagcggctaaccttgaacgcaacgcgcaggggcttcaaagcgccgccggttttatccaggcccagcttggcgccgttttaaaaatacggaaaatcccccatttgcgcttccatgccgacaccagcatcagggacggttttgacatggtgcagaagatcgaacaattaacaaataacaatgaacgattaacaattaacaatgagcaatga

SEQ ID NO: 5742 - protein, 126 aa, Unknown
  Obtained from environmental sample
  DOMAIN (5)...(110): Ribosome-binding factor A
  misc_feature (1)..(126): Xaa is any amino acid
MQNNRTERLGSLIQELISNLILESRIKDPRISQFVSITRVNVTRDLSYADVYVSNIREAANLERNAQGLQSAAGFIQAQLGAVLKIRKIPHLRFHADTSIRDGFDMVQKIEQLTNNNERLTINNEQ

SEQ ID NO: 5743 - DNA, 342 bp, Unknown
  Obtained from environmental sample
  misc_feature (1)..(342): n is a, c, g, or t
atggaaggcatgctaagnccagataccaaagaggaagttatagcctcggtagaggtacggaatacctcaagggttccaaagatcggaacaatcgccggatgctttgtacagagcggcgtagtaaagcgcagcgccagcgtcaatgtaatccgcgcggagatagtgatccactcgggcaaaatcgcctcgctcaggcgcttcaaagatgatgcccgcgaagtgacggccggttacgaatgcggcatagggctggagggctttgacgatatacagatcggcgatcaatttgaggtgatcgagattgttgaggtcgcaaggaagttaagcagcagtcagggataa

SEQ ID NO: 5744 - protein, 113 aa, Unknown
  Obtained from environmental sample
  DOMAIN (29)...(97): Elongation factor Tu domain 2
  misc_feature (1)..(113): Xaa is any amino acid
MEGMLXPDTKEEVIASVEVRNTSRVPKIGTIAGCFVQSGVVKRSASVNVIRAEIVIHSGKIASLRRFKDDAREVTAGYECGIGLEGFDDIQIGDQFEVIEIVEVARKLSSSQG

SEQ ID NO: 5745 - DNA, 327 bp, Unknown
  Obtained from environmental sample
  misc_feature (1)..(327): n is a, c, g, or t
gtgctcctggcggaacaactggcacaccagaggttcgtccgtcccggtcctctcgtactagggacaggtcttctcaagactcctgcgcgcgcagcggatagggaccgaactgtctcacgacgttctaaacccagctcgcgtaccgctttaatgggcgaacagcccaacccttgggacctactccagccccaggatgcgacgagccgacatcgaggtgccaaaccatgccgtcgatatggactcttgggcaagatcagcctgttatccccggggtaccttttatccgttgagcgacaccccttccacaaggaggtgccggatcactag

SEQ ID NO: 5746 - protein, 108 aa, Unknown
  Obtained from environmental sample
  misc_feature (1)..(108): Xaa is any amino acid
MLLAEQLAHQRFVRPGPLVLGTGLLKTPARAADRDRTVSRRSKPSSRTALMGEQPNPWDLLQPQDATSRHRGAKPCRRYGLLGKISLLSPGYLLSVERHPFHKEVPDH

SEQ ID NO: 5747 - DNA, 318 bp, Unknown
  Obtained from environmental sample
  misc_feature (1)..(318): n is a, c, g, or t
ttgtggaaggggtgtcgctcaacggataaaaggtaccccggggataacaggctgatcttgcccaagagtccatatcgacggcatggtttggcacctcgatgtcggctcgtcgcatcctggggctggagtaggtcccaagggttgggctgttcgcccattaaagcggtacgcgagctgggtttagaacgtcgtgagacagttcggtccctatccgctgcgcgcgcaggagtcttgagaagacctgtccctagtacgagaggaccgggacggacgaacctctggtgtgccagttgttccgccaggagcactgctggttag

SEQ ID NO: 5748 - protein, 105 aa, Unknown
  Obtained from environmental sample
  misc_feature (1)..(105): Xaa is any amino acid
MWKGCRSTDKRYPGDNRLILPKSPYRRHGLAPRCRLVASWGWSRSQGLGCSPIKAVRELGLERRETVRSLSAARAGVLRRPVPSTRGPGRTNLWCASCSARSTAG

SEQ ID NO: 5749 - DNA, 360 bp, Unknown
  Obtained from environmental sample
  misc_feature (1)..(360): n is a, c, g, or t
ttgttggctcatgtttggttagtggacgcgaatttgtttctagttgccgtggtgtacggcggcttgtgtttgctcgtttcccccgcctttaacaggcggggtttagggtggttaagttgttggctgtttagtactagtcagctacacgagtctttagtcctcgcttccacttctagcctatctaccccatcgtctttggggtgcctacaggaattacttccatggagtcttaatcttgaagttggcttcccgcttagatgctttcagcggttatccgtcccgaacgtagctaaccagcagtgctcctggcggaacaactggcacaccagaggttcgtccgtcccggtcctctcgtactag

SEQ ID NO: 5750 - protein, 119 aa, Unknown
  Obtained from environmental sample
  misc_feature (1)..(119): Xaa is any amino acid
MLAHVWLVDANLFLVAVVYGGLCLLVSPAFNRRGLGWLSCWLFSTSQLHESLVLASTSSLSTPSSLGCLQELLPWSLNLEVGFPLRCFQRLSVPNVANQQCSWRNNWHTRGSSVPVLSY

SEQ ID NO: 5751 - DNA, 639 bp, Unknown
  Obtained from environmental sample
  misc_feature (1)..(639): n is a, c, g, or t
atggacctcgccataggtcagcagcaggtgtttacgccgcttcagttgtcgctgatggtgggaggcatgggcaacggaaaattcatatacaggccccgattgctaagtgaggagcgcaacaaggatggtatcttagtgtaccaaaacctgcctgtcgtaaagaataagatagaagtgggtcagtacgcccttgatgtgattcatgaagcgctcgccgcggtggtcaggccgggcggcaccggttggcgcgccggggtgcaggggattcccgtgggcggcaaaaccggcagcgcccaaaacccgcacagcgacctcacccacgctatgttcattgccgtcgctccggttgacaacccggttatcgccgtggccgtggccatagaaaacgccggcggcggcggcgccgtggcggcgccagtggccggagcgctcctgaactacttcttctccgaaaccgaagagggtaagagcgtctacaaaaagtataattcggattcggaacaaaagcctagaaggtcgctgatgccgaggccggcgtcggcggctgagagcgccgcaaacgcggccgccgacgcggcggacagatccgagtcagcgccggcgagccgtccgtcaataccggagggcggtaatgattaa

SEQ ID NO: 5752 - protein, 212 aa, Unknown
  Obtained from environmental sample
  misc_feature (1)..(212): Xaa is any amino acid
MDLAIGQQQVFTPLQLSLMVGGMGNGKFIYRPRLLSEERNKDGILVYQNLPVVKNKIEVGQYALDVIHEALAAVVRPGGTGWRAGVQGIPVGGKTGSAQNPHSDLTHAMFIAVAPVDNPVIAVAVAIENAGGGGAVAAPVAGALLNYFFSETEEGKSVYKKYNSDSEQKPRRSLMPRPASAAESAANAAADAADRSESAPASRPSIPEGGND

SEQ ID NO: 5753 - DNA, 435 bp, Unknown
  Obtained from environmental sample
  misc_feature (1)..(435): n is a, c, g, or t
atgtctgaagaaaaaaatacactgcttattgttgatgatgagcatgtgaatattaaaatattaaataatatactgggaaaggattatacaattcatgtcgcgggcgatggtataagcgcccttgaaaaagcgatagaatttctacccgatcttattttacttgatataattatgccgggaatagacgggtatgaagttcttgccaaattaaaaaattgtgaagaaaccaaagatatacctgttatatatatatccggtttaaatcatatcgaagaagaagaaaaaggactctctcttggagctgtcgactatattataaaaccgttcagcgcggctataattaaattaagagtgggacatcagattcaaattatcaatcaaatgcggaaaattaaacagttggcttctgcaggcgctaaaagaagagtttcataa

SEQ ID NO: 5754 - protein, 144 aa, Unknown
  Obtained from environmental sample
  DOMAIN (6)...(119): Response regulator receiver domain
  misc_feature (1)..(144): Xaa is any amino acid
MSEEKNTLLIVDDEHVNIKILNNILGKDYTIHVAGDGISALEKAIEFLPDLILLDIIMPGIDGYEVLAKLKNCEETKDIPVIYISGLNHIEEEEKGLSLGAVDYIIKPFSAAIIKLRVGHQIQIINQMRKIKQLASAGAKRRVS

SEQ ID NO: 5755 - DNA, 420 bp, Unknown
  Obtained from environmental sample
  misc_feature (1)..(420): n is a, c, g, or t
ttggaagtacgaaaaaccgaaacaatcgaagtatccaaagacgcggacgcaatcggaaacagggtacgggttaaagttgtaaaaaacaaagtcgccccgcctttccgcaggacggaaatggaacttatgttcggaaaaggaatttccgcggtaggcagtttgctggactgcgccgttaaatacgaccttatcaaaaaaagcggcgcatggtattcctacaacgatgaaaagatcgggcagggaagggataacacaagagaataccttgaacagcgccccgattttacaaaagaactggaattaaaactgcgaaagattattttcccggacagggaattcccgcagtttaaggccgaaaaggttaaaggcgccaaagaaacgaaagcggcggcagaagaaaaacaggaagaaaaaatatga

SEQ ID NO: 5756 - protein, 139 aa, Unknown
  Obtained from environmental sample
  DOMAIN (1)...(109): recA bacterial DNA recombination protein
  misc_feature (1)..(139): Xaa is any amino acid
MEVRKTETIEVSKDADAIGNRVRVKVVKNKVAPPFRRTEMELMFGKGISAVGSLLDCAVKYDLIKKSGAWYSYNDEKIGQGRDNTREYLEQRPDFTKELELKLRKIIFPDREFPQFKAEKVKGAKETKAAAEEKQEEKI

SEQ ID NO: 5757 - DNA, 804 bp, Unknown
  Obtained from environmental sample
  misc_feature (1)..(804): n is a, c, g, or t
atgatggccggnagcgcggcgcttgagcggctaagggaaaaagaagcgtcttttacggacgcgaaccgtcttaaaagttacggtgatattattctttccaacatcgcgaatattaaaccgaatgataaatggttggaaacagagtatgacggcgaaaatatacgcatcgaacttgagccatgtgtcagtccatcggcgcaggcgcagaaatactatgaacagtaccgtaaggcgaaaaacggtcttgcggatattcaaagggaaattgaaagcggagagcgggaacttaaagaagtaacagaacggttagaacgattgttatgcgaaactaatccgttgattctcgcaaaactgctaaggtcaggaagtggggcgcgtactgcgggagcgtcttccgcaaaaaaagaaaaggcgcgtccggggcttacgtttaaacgaggcgattggcttattatagtgggtagggatgcaaatgaaaacgatgaacttttgcgccgtcatgtaaaggggaacgatttatggctacacgcaagggattatcacggctcctatgtgtttataaaacaaagggctggaaaatcggttccgcttgacatcctgctggatgccggaaaccttgcgattttttattcaaagggcagaaataacggcgagggagatttattttacacccatgtaaaatatttaagacgcgctaaaaacggaccaaagggacttgttatcccaactcaggaaaaaaatctccatgttaaagttgaagaagagcgcctgcgctcacttgaaaactgtaaagtaacacattaa

SEQ ID NO: 5758 - protein, 267 aa, Unknown
  Obtained from environmental sample
  DOMAIN (142)...(231): Domain of unknown function (DUF814)
  misc_feature (1)..(267): Xaa is any amino acid
MMAGSAALERLREKEASFTDANRLKSYGDIILSNIANIKPNDKWLETEYDGENIRIELEPCVSPSAQAQKYYEQYRKAKNGLADIQREIESGERELKEVTERLERLLCETNPLILAKLLRSGSGARTAGASSAKKEKARPGLTFKRGDWLIIVGRDANENDELLRRHVKGNDLWLHARDYHGSYVFIKQRAGKSVPLDILLDAGNLAIFYSKGRNNGEGDLFYTHVKYLRRAKNGPKGLVIPTQEKNLHVKVEEERLRSLENCKVTH

SEQ ID NO: 5759 - DNA, 855 bp, Unknown
  Obtained from environmental sample
  misc_feature (1)..(855): n is a, c, g, or t
gtggccgccgtctacgccgccaagatcatgaaagacttagctcttctcaacgacaaataccgcgtgatggtaagcggcacggtacaggaggaagactgtgacggcctgtgctgggaatacattataaaggaagaaaatatcaaacctgagttcgtggtgatcaccgagccgaccaacggcaacatctacagggggcagaggggccgcatggagatacgcgtcgaggtgaagggcgtttcctgccacggttccgctcccgaacgcggcgacaacgcgatctacaagatgggggaaataatcgccgaagttaaggccctgaacaagaaactgaaaaaagacaagttcctcggcaaggggactctggcggtttcgcagatctatttcagttcgccctcccgctgcgccgtcgccgacatgtgcgccatttccattgaccgccgcctgaccgtgggcgagacctataaaagcgccctcgcggaaatcgccgccctgcccaaggtcaaggagtacaaggccaaagtcaccatgtacaaatacgatctgcccagttacaccggcgtggtttatcccatcgactgttacttccccacctgggtcattccggaagacgccaaaccgacaaaagcgatggtaaaagcctataagggaatgttcggcaaacccaaggtggacaagtggactttttcgactaacggcgtctcgatcatggggcggaacaaaatcccctgcataggcttcggccccggcaaggaagagcaggcccacgcccccaacgaaataacctggaaagccgacctggtccgctgcgccgccgtgtacgccgctttgccaagcatatacactggcgaagagtga

SEQ ID NO: 5760 - protein, 284 aa, Unknown
  Obtained from environmental sample
  DOMAIN (64)...(173): Peptidase dimerisation domain
  misc_feature (1)..(284): Xaa is any amino acid
MAAVYAAKIMKDLALLNDKYRVMVSGTVQEEDCDGLCWEYIIKEENIKPEFVVITEPTNGNIYRGQRGRMEIRVEVKGVSCHGSAPERGDNAIYKMGEIIAEVKALNKKLKKDKFLGKGTLAVSQIYFSSPSRCAVADMCAISIDRRLTVGETYKSALAEIAALPKVKEYKAKVTMYKYDLPSYTGVVYPIDCYFPTWVIPEDAKPTKAMVKAYKGMFGKPKVDKWTFSTNGVSIMGRNKIPCIGFGPGKEEQAHAPNEITWKADLVRCAAVYAALPSIYTGEE

SEQ ID NO: 5761 - DNA, 489 bp, Unknown
  Obtained from environmental sample
  misc_feature (1)..(489): n is a, c, g, or t
atgtgtggaggcgttatggaatcgcaaatagagtgtttgtcggaactcctgaaaaatcaacgttttacccttgctgtggcagaatcttgcaccggcgggctgttgggcggtaagattacatccgtcgcaggttcgtccgcgtactttcgaggcggtgtaatcgcatatgacaacggcgttaagcacgacattttgggtgtatcgacggatatattggagcactgcggcgcggtgagcgcgccggtggttgaggagatggcgcgcggcgcggccaagctctttggttgcgattgcgcgttgagcgtctccggaatcgccggtcccgacggaggcacggcggagaagccggtgggtctggtatttgtgggtgtgttctgccgcggggaggcgcgaagccgcagttttgtttttagcggcgatcgggatgcggttagggagcagagcgttgcggccgccgtcggttttttggttgaatgccttacgttatga

SEQ ID NO: 5762 - protein, 162 aa, Unknown
  Obtained from environmental sample
  DOMAIN (6)...(160): Competence-damaged protein
  misc_feature (1)..(162): Xaa is any amino acid
MCGGVMESQIECLSELLKNQRFTLAVAESCTGGLLGGKITSVAGSSAYFRGGVIAYDNGVKHDILGVSTDILEHCGAVSAPVVEEMARGAAKLFGCDCALSVSGIAGPDGGTAEKPVGLVFVGVFCRGEARSRSFVFSGDRDAVREQSVAAAVGFLVECLTL

SEQ ID NO: 5763 - DNA, 915 bp, Unknown
  Obtained from environmental sample
  misc_feature (1)..(915): n is a, c, g, or t
ttgcagcgtttctgcgattttgccgtggccgtgcataacggcaaatataagggaagtaccggtaaggctttcactacagtggtgcagataggaattggcggctccgaccttggaccacgggcgctgtatcttgcgctggataactgggccataaccgaaggcaagaaaaagctcaacgcgaaattcatctccaatgtagacccggatgacgcctccgcggtgattgcctcgtcgccgctggaacagagcctttttgtgctggtttcaaaaagcggcacgacccaggagaccctttccaacgagctttttgtcaaggacaaactgcaaaaagccggtcttgacagctcaaagcacatggtcgccgtcacgagcgagaccagcccccttgcccgcaacccggcgtatctcgattccttctatattgacgattatatcggcgggcgttattcgtcatcatcggcggtaggcggctgcattctttccctcgctttcggcccggacgtattcagggaatttcttgcaggcgcggcggaagcggacaagctggcgttggagtcggatatttttaaaaacgccgcccttcttgacgcccttatcggcgtatgggaacgcaacttcctgaactaccccagtaccgcggtgctgccctacagccagggcctttcccgcttcccagcccatctgcagcagcttgacatggaatccaacggcaagcgggtgaaccgcgacggccagccgatttcgtataacacggggccggtggtgttcggcgagccgggaaccaacgggcagcattcgttctaccagcttctgcaccaggngacaagcgttgttcccctgncatttatcggctttaccgaaaccagcggggcgatgacgtcagcgtcgacggctccgtcagccagaccaagctaa

SEQ ID NO: 5764 - protein, 304 aa, Unknown
  Obtained from environmental sample
  DOMAIN (1)...(304): Phosphoglucose isomerase
  misc_feature (1)..(304): Xaa is any amino acid
MQRFCDFAVAVHNGKYKGSTGKAFTTVVQIGIGGSDLGPRALYLALDNWAITEGKKKLNAKFISNVDPDDASAVIASSPLEQSLFVLVSKSGTTQETLSNELFVKDKLQKAGLDSSKHMVAVTSETSPLARNPAYLDSFYIDDYIGGRYSSSSAVGGCILSLAFGPDVFREFLAGAAEADKLALESDIFKNAALLDALIGVWERNFLNYPSTAVLPYSQGLSRFPAHLQQLDMESNGKRVNRDGQPISYNTGPVVFGEPGTNGQHSFYQLLHQXTSVVPLXFIGFTETSGAMTSASTAPSARPS

SEQ ID NO: 5765 - DNA, 345 bp, Unknown
  Obtained from environmental sample
  misc_feature (1)..(345): n is a, c, g, or t
ttgccccggaggttttgtaatatgacacaagcattacataaatttaaattaaaaaaagaagacactgttcaggttattgccggtaaagacaagggcaaacagggcagagtgttgaaaatcctccgcgacagcgaccgcattcttgtagaaggcgtaaacctcgtcaagaaagcgcagaaaaaaagaaaacagcaggacaggggcggcattctggaaatagaagcagcgcttcattcttcaaacttgatgattgtttgtaaaaaatgcgggcccacccggatcggatacaagatggttggggataagaaaacaagggtttgcaaaaaatgcggggaggctctgtaa

SEQ ID NO: 5766 - protein, 114 aa, Unknown
  Obtained from environmental sample
  DOMAIN (17)...(50): KOW motif
  misc_feature (1)..(114): Xaa is any amino acid
MPRRFCNMTQALHKFKLKKEDTVQVIAGKDKGKQGRVLKILRDSDRILVEGVNLVKKAQKKRKQQDRGGILEIEAALHSSNLMIVCKKCGPTRIGYKMVGDKKTRVCKKCGEAL

SEQ ID NO: 5767 - DNA, 777 bp, Unknown
  Obtained from environmental sample
  misc_feature (1)..(777): n is a, c, g, or t
gtggattccaccgggcttctggctgtcgaaaacgtaccaaaacgcctggcggttataggcggcggggttatcggcgtggaatttgccgggcttttttccgcgttgggagccgaggttactgtaatcgaaatgatggacgagatcattccttttatggacaaggaacaggctcccctgtttcgccgggctctgaaaggagtggacttcaagctgggctgcaaggttgaaaaagtcgaaggagcggctgtgcattacaccgacaaaaaagggaagagcgaaataaaagaagccgaccttgtcctgatggctgttgggcggcgacctgtgactgacacctggggagccgttgcggcgggtgtcgactatagcccgaagggcgtcaccgtggacgacaggatgcggaccaacattcccggtatttgggcggctggggacgttaccggcaaaagcctccttgcccattctgcttatcgcatggcggaagtcgccgttgcggatattcttacgggtgaccatgccgacagcaagactaaccgaatgagatataacgccgtcccgtgggtagtgtacggccttaccgaggctgcgggggttggtatcacagagcaggaagccgaagcgaaaggcatagccattttaaaatcggttcttcccatgagggtttcaggccgtttcgttgcggagaacacccttatgggtcagggggccgtaaaggtaatcgctgacgcgaatgaccgccgcattctgggcattcatgccgtggctcggccgatctga

SEQ ID NO: 5768 - protein, 258 aa, Unknown
  Obtained from environmental sample
  DOMAIN (185)...(257): Pyridine nucleotide-disulphide oxidoreductase, dimerisation domain
  misc_feature (1)..(258): Xaa is any amino acid
MDSTGLLAVENVPKRLAVIGGGVIGVEFAGLFSALGAEVTVIEMMDEIIPFMDKEQAPLFRRALKGVDFKLGCKVEKVEGAAVHYTDKKGKSEIKEADLVLMAVGRRPVTDTWGAVAAGVDYSPKGVTVDDRMRTNIPGIWAAGDVTGKSLLAHSAYRMAEVAVADILTGDHADSKTNRMRYNAVPWVVYGLTEAAGVGITEQEAEAKGIAILKSVLPMRVSGRFVAENTLMGQGAVKVIADANDRRILGIHAVARPI

SEQ ID NO: 5769 - DNA, 1008 bp, Unknown
  Obtained from environmental sample
  misc_feature (1)..(1008): n is a, c, g, or t
gtgtatgccgagggtggaactgcaaaaatactccgaggacgaaattcgcagttaaggagcggaatgagtatatttgatgaaaataaatctttgcctgcactctcgctgaatgcttatgcgatgccgggattccaaggattgtttcaccgagttggagaggagtggatttgctatgattcaggcaatttaagagcgagcatttattttttaagcctggctttgcgagagctgggcgtgggcaagggagttggggttgggataattgcggcaagttcgccgcagtgggttatgtttgaccttgcaacgcagatttgcggcggttataccgttcccatattctcaaatatatcttccgagcattttgaatttcagataaaagaagctaaggtaaaagttttggctatagattcttgggaaaatctgaccccgcaaaatcaaccgcttgtaaagttgatagattttttaattcatttttctctgctgccagatggggcaaaacacaagaatatgttttcttggaatgattgcatacaaaaaggggaaaaactggattcggagcttgaacgcgaaaactttgagaagcgtataaagagcatagatggcgaagagatattttccataatttacaccagcggttcaactggaatgcccaaaggagttcctctaactcaaaacaatatggtctctcatctaaaagccgtatcggattttttccctgttaaacccagcgatttgtgcatgagcattttgcccatagcgcacgtatttgaacggatggttatctattacttttcctcttttggtctgtccgtttattttgtggactcccccaacaatgttgggaaatacctgccggaaattcgtccgtccattttaaccgttgtgccgcgagttttggaaaagctctacaaaaagctgatagatgccctcaatcaaaagcgagggcctgntagatggcttatgaaatacgccatnaacaaagccaaacctcagaccccaacaaagtga

SEQ ID NO: 5770 - protein, 335 aa, Unknown
  Obtained from environmental sample
  misc_feature (1)..(335): Xaa is any amino acid
MYAEGGTAKILRGRNSQLRSGMSIFDENKSLPALSLNAYAMPGFQGLFHRVGEEWICYDSGNLRASIYFLSLALRELGVGKGVGVGIIAASSPQWVMFDLATQICGGYTVPIFSNISSEHFEFQIKEAKVKVLAIDSWENLTPQNQPLVKLIDFLIHFSLLPDGAKHKNMFSWNDCIQKGEKLDSELERENFEKRIKSIDGEEIFSIIYTSGSTGMPKGVPLTQNNMVSHLKAVSDFFPVKPSDLCMSILPIAHVFERMVIYYFSSFGLSVYFVDSPNNVGKYLPEIRPSILTVVPRVLEKLYKKLIDALNQKRGPXRWLMKYAXNKAKPQTPTK

SEQ ID NO: 5771 - DNA, 918 bp, Unknown
  Obtained from environmental sample
  misc_feature (1)..(918): n is a, c, g, or t
atgcagagaccgcgcataaaagaccctattttcacagggcttagagccatagacggctttttacccgttgggcgcgggcaaaggatgggcatatccgcaggctccggtgttggcaanagcgtgacgatgggcatgatagccaggaactgcctgcaaaaggtaaatgttatagccttgataggcgagcgtggcagagaggttagggaatttatagaaaaggatttggggccagaagggataaagcgctccgtggttatagttgcaacaagcgaccagcccgcccttatccgtttaaaagcgagctttttggctatgagcatagcggagtattttagggacgctggcgaagatgtgttctttttgatggactcggttactcgccttgccatggcgcagcgcgagattggcttggcggttggcgagccacccgctacaaaaggctataccccatctgtttttgcgtttttgccaaagctctttgaacgggcgggcaatagcaacaaagggagcataacggggctttacaccgttttggttgacggagatgacttggacgaccctatagcggatgccgtgcgttccattttagacgggcacattgtgctttcccgcgcgcttgccaacaagaaccactaccctgccatagatgttatggcgagcataagccgttgccgcacagacatagctaatccgcaattaaaagagctatccgcaacgcttttgcgaagcctcgcggtttaccgcaaaaacgaagatatgataaacataggtgcttatgccaaaggctcagacccagaggtggatttagctattaaaagacatactgccattgacaaatttttgttgcaaggcataggcgaaaattcaacctacgaagaaatagaagcctcaatgagggaaatagcaaacataaattga

SEQ ID NO: 5772 - protein, 305 aa, Unknown
  Obtained from environmental sample
  DOMAIN (12)...(222): ATP synthase alpha/beta family, nucleotide-binding domain
  misc_feature (1)..(305): Xaa is any amino acid
MQRPRIKDPIFTGLRAIDGFLPVGRGQRMGISAGSGVGXSVTMGMIARNCLQKVNVIALIGERGREVREFIEKDLGPEGIKRSVVIVATSDQPALIRLKASFLAMSIAEYFRDAGEDVFFLMDSVTRLAMAQREIGLAVGEPPATKGYTPSVFAFLPKLFERAGNSNKGSITGLYTVLVDGDDLDDPIADAVRSILDGHIVLSRALANKNHYPAIDVMASISRCRTDIANPQLKELSATLLRSLAVYRKNEDMINIGAYAKGSDPEVDLAIKRHTAIDKFLLQGIGENSTYEEIEASMREIANIN

SEQ ID NO: 5773 - DNA, 816 bp, Unknown
  Obtained from environmental sample
  misc_feature (1)..(816): n is a, c, g, or t
atgtggctgcgttctcatccggaattaaatttagtatctgttccggaattaattaaggataatttaatccgtttctgtttcttgaaaatttttccgtcggcgtttggtatatttatatatgataaaggagactggctaaaagttaaagttaatacattaagccagcttacgatagatacgcttaacagttacacaactctttactacttacctctgttaactgatatttcagacagtactgataatacttatacggctatagttaatgatcttcctcatgacgcggctttatttcaatatcctgattatattccccaaataaatgttactaactttggcgacggaatttttgcggatgaaaaaatctatcattcctcattggtatcctttatgtttttgagtaaatggtttaaatattttcaggaacagggtatttatgacaatacccgtattattctagcttccgatcatggaaaagcggtatcatacgaatataaagacaatattcttctgcctaataatgaccggctttcatcttataattgccttcttatggtaaaagattttatgtcttcaggggaaattaatacagattcaaaatttatgacgcttgctgacgttccctcaattactatgaataatttaattgataatccaaagaacccattttcaaataatcccgttacaacagataaagaaaacggaataattattaccagcgccagagtccttaattttaagattgcggacgaccagtggcttagagtccatgataacgtatttgatccncataantgggaaaaggtggaaaaatga

SEQ ID NO: 5774 - protein, 271 aa, Unknown
  Obtained from environmental sample
  misc_feature (1)..(271): Xaa is any amino acid
MWLRSHPELNLVSVPELIKDNLIRFCFLKIFPSAFGIFIYDKGDWLKVKVNTLSQLTIDTLNSYTTLYYLPLLTDISDSTDNTYTAIVNDLPHDAALFQYPDYIPQINVTNFGDGIFADEKIYHSSLVSFMFLSKWFKYFQEQGIYDNTRIILASDHGKAVSYEYKDNILLPNNDRLSSYNCLLMVKDFMSSGEINTDSKFMTLADVPSITMNNLIDNPKNPFSNNPVTTDKENGIIITSARVLNFKIADDQWLRVHDNVFDPHXWEKVEK

SEQ ID NO: 5775 - DNA, 420 bp, Unknown
  Obtained from environmental sample
  misc_feature (1)..(420): n is a, c, g, or t
atgcttgaacgccttcatgcgcgttataaagaatcaaaaaacattgagtgggattatgaacgtgaaaatatattttctcttaaaaaagccgatataatgatttctgatttttcaggaatcatttttgactatatgtttttatgcgataaaccggtaatttatgtgaatcaggattttgacttacgcccttatgacgcggacgatattgaccatgagttgtggcagtttaagacaatcaaagaaacgggcatcgaattaaaagaagagtttttcccccgcattacagaaattataaaaaacgccggcgacagcgaacaacttgcctcagcccgcagaaaagcccgtgaaacagcatggcagtatcaaggggaagccggaaagcgcacctttaattttatgacggaaattattaatggctga

SEQ ID NO: 5776 - protein, 139 aa, Unknown
  Obtained from environmental sample
  misc_feature (1)..(139): Xaa is any amino acid
MLERLHARYKESKNIEWDYERENIFSLKKADIMISDFSGIIFDYMFLCDKPVIYVNQDFDLRPYDADDIDHELWQFKTIKETGIELKEEFFPRITEIIKNAGDSEQLASARRKARETAWQYQGEAGKRTFNFMTEIING

SEQ ID NO: 5777 - DNA, 825 bp, Unknown
  Obtained from environmental sample
  misc_feature (1)..(825): n is a, c, g, or t
ttgggcctgcccattaccaaaagactggtagacttgatggacggcagaatcgacgttgaaagcgaggaaggcaaaggctcgacattcaagttcagcataatgcagggctttgtagacgacacagttcttggaaaagaaatcgcggaaaaactccgcaaattccaatacattgacgacaaacgcgccgccacacaaaaaattgtaagaatagatttaagttacgccagagtgcttgtggtagacgacatgcagaccaatcttgacgtggcgtcgggactcttgcgcaaatacaaactgcaagtagactgcttaaacaacggaaaagccgcagttgaaataatcagggaagggcagcccgtttacaacgcgatattcatggatcacatgatgcccgaaatggacggcatagaaacggtagacagaatccgcgcgcttggcaccgaatacgcgaaaaaaatcccgatcatcgcccttacagctaacgcaattcacggaaccgaaaagatgttcttcgcccacgattttcaggattttgtaaccaaacccatagacatatcggaaatggacgccgccataaaaaaatgggtgcgcgacgtaacccgcaaagaagtggtgatagcgcctgagccttccgaagaaaaacaaatgacaatagagatacccggagtggacacgcaaaaagccctttccctgtacgccggagacacgggtatttatctgcccctcttgcgttcgtacattaccaacacgccttcgactttggaaaaattgaaaactgtctcaatggagaaccgaaaagtatgtcatacgtctcggccaatctga

SEQ ID NO: 5778 - protein, 274 aa, Unknown
  Obtained from environmental sample
  DOMAIN (75)...(193): Response regulator receiver domain
  misc_feature (1)..(274): Xaa is any amino acid
MGLPITKRLVDLMDGRIDVESEEGKGSTFKFSIMQGFVDDTVLGKEIAEKLRKFQYIDDKRAATQKIVRIDLSYARVLVVDDMQTNLDVASGLLRKYKLQVDCLNNGKAAVEIIREGQPVYNAIFMDHMMPEMDGIETVDRIRALGTEYAKKIPIIALTANAIHGTEKMFFAHDFQDFVTKPIDISEMDAAIKKWVRDVTRKEVVIAPEPSEEKQMTIEIPGVDTQKALSLYAGDTGIYLPLLRSYITNTPSTLEKLKTVSMENRKVCHTSRPI

SEQ ID NO: 5779 - DNA, 846 bp, Unknown
  Obtained from environmental sample
  misc_feature (1)..(846): n is a, c, g, or t
gtgaacctgcacggggggaaaagccggagcctgaaagcaggtgaagtcctaatacagcttcaaaccctggaacagcgtggaattgccgaggccgtccttaccggggtgaatatttgccagtaccgggatcagtcgacgggcctgccggaacttctggaattcctcttaaaagaaaccggggccatacggctaaggctttcttcgatagagccggaaccagctttttttacggacgcgtttctgtatgtcctggaaaacaggcggataaggccgcattttcatctttctctgcaatcgggaagcgcggcgatactggcgaagatgggcaggccgtatagcccggatgatattgagaaaatttcagggctgctccgccgcctccgccacgatccttttttggcctgcgatattatcgccgccttccccggtgaaacagagtgtgaatttaaaaaaacctgtgttttgatggaaaagctctccttcgcgtggatacacgcctttccgtattccaggcggccgggaactgcggctttcgattttcccgccaatgtaagcgcgaaggacgctctaaggcgggtagaactattgacaaatctggcccggaaaggacgccgggaatacatacaacgctggaaaggcgaagaagtggaagccgttgtggaagcaggggaaaatctgcctgaaggcatggttcaggcgcttacggaaaactacctgaaagtccgggtaaattgcgggggtgatatagcacctgcccctggcagccttatccattgccgtatagcggataatcccgaggcaggcaattatgacgccctggcggaatatgtatcccatgtgtattga

SEQ ID NO: 5780 - protein, 281 aa, Unknown
  Obtained from environmental sample
  misc_feature (1)..(281): Xaa is any amino acid
MNLHGGKSRSLKAGEVLIQLQTLEQRGIAEAVLTGVNICQYRDQSTGLPELLEFLLKETGAIRLRLSSIEPEPAFFTDAFLYVLENRRIRPHFHLSLQSGSAAILAKMGRPYSPDDIEKISGLLRRLRHDPFLACDIIAAFPGETECEFKKTCVLMEKLSFAWIHAFPYSRRPGTAAFDFPANVSAKDALRRVELLTNLARKGRREYIQRWKGEEVEAVVEAGENLPEGMVQALTENYLKVRVNCGGDIAPAPGSLIHCRIADNPEAGNYDALAEYVSHVY

SEQ ID NO: 5781 - DNA, 366 bp, Unknown
  Obtained from environmental sample
  misc_feature (1)..(366): n is a, c, g, or t
atgaccgatgtccataacgacgcattggaagatgaagattttgatactattttatccaaggatataaatttttccgggacgcttaattttgaaaagccttttctgataaggggcaagctttccggcaacattgttgcccacgggcttttggtggtggatgaagacgcggtggtagaggcgaatatcaatgcctcaagggtagttatccgcggctcggtaaaaggggatgttaccgcttcagaaaaagtggaaataacagtaaccggcagacttatcggaaatgtgaaggcccctgaaattttcatggagacagggtgcatgtttaacggccgatgtaccatggcggaaagaagccccaaagtatga

SEQ ID NO: 5782 - protein, 121 aa, Unknown
  Obtained from environmental sample
  DOMAIN (6)...(118): Protein of unknown function, DUF583
  misc_feature (1)..(121): Xaa is any amino acid
MTDVHNDALEDEDFDTILSKDINFSGTLNFEKPFLIRGKLSGNIVAHGLLVVDEDAVVEANINASRVVIRGSVKGDVTASEKVEITVTGRLIGNVKAPEIFMETGCMFNGRCTMAERSPKV

SEQ ID NO: 5783 - DNA, 456 bp, Unknown
  Obtained from environmental sample
  misc_feature (1)..(456): n is a, c, g, or t
atgagcacgcaagcccagctcgacgagaacatcgcgctggccgagcgcatagacgcccctaacttcctctccgaggccgagcttggggtaattgataaggtgatagaggtcgtaaacgagtccaataggataccgtgcacgggttgcggctactgcatcccttgtccggttggggtcaacattcccgggtgcttcgcctcctacaacgactcatacaagggcgggcgcttcgcggcgctcaaaccttacgttatggccaccgccgcgttgaccacaaagagcgggctggcgagttcttgcaagtcttgcggtaagtgcgaaacccactgtccgcagggcataaaggtcggcaagtcgttaaaaaaggtagcccgacgcctcgagccgttctggtttagggccggcatatcggcagtcaggtggtttacgggctttaaggcgaagaagggacgctga

SEQ ID NO: 5784 - protein, 151 aa, Unknown
  Obtained from environmental sample
  DOMAIN (93)...(116): 4Fe-4S binding domain
  misc_feature (1)..(151): Xaa is any amino acid
MSTQAQLDENIALAERIDAPNFLSEAELGVIDKVIEVVNESNRIPCTGCGYCIPCPVGVNIPGCFASYNDSYKGGRFAALKPYVMATAALTTKSGLASSCKSCGKCETHCPQGIKVGKSLKKVARRLEPFWFRAGISAVRWFTGFKAKKGR

SEQ ID NO: 5785 - DNA, 936 bp, Unknown
  Obtained from environmental sample
  misc_feature (1)..(936): n is a, c, g, or t
ttgtattataccgcgtttaccaagcttgcctacggcggctgcatcgtaattaccggcatagaatacaataaagtgtttgaggggatcatcgccaccacgcggcgcaacatctatcttaccgccgcagttttgtttctttcggtaatgtgcatctggttcttttcaaaaacaatttcaacgccgctcaaggcattggcggctgcggcaagaagcatagaaggcggtcagttcgagctgcaactgcggcccaaaggccgggacgaaattggattgttaggcgcaagtttccagaaaatgtccagcgccctgcacatattcggcagattcaccaaccgcgaaatcgccgtaaaagccatgcgtggcgaaataaaaccgggcggcctgccaaaacacgccacgatctttttttccgacatacgcggatttacctcaatatcggaaaattttaccaaaacattcggggacgaggcctcggacaaaatagtcttctggctcaacaactaccttaccgaaatggttgagtgcattgaaaagaccggcggcgcggtggacaagtttatcggcgatgcggtaatggcgcactggggcacggtttacaccgcgggcagccccaaaaaagacgcctttaactgcgtcaaggcggcccttatgatgcgccacgcgctgatgatattaaacaaggatcgcagaaaaaccgacgacccgggtaacccgaccatacgtatcggctgcggcatcaacacgggcgttgtcaccgccgggcagatcggaagcgatctgcgcatggagtatacggtaatcggcgatccggtaaacctcgcctctcgtgtcgaatctctgaacaagccgcttggcacgnatattcttattacgaggacacatgnaagctttgtggggatgcttttcataccgaagaaatgccccccgggtacgtaa

SEQ ID NO: 5786 - protein, 311 aa, Unknown
  Obtained from environmental sample
  DOMAIN (123)...(310): Adenylate and Guanylate cyclase catalytic domain
  misc_feature (1)..(311): Xaa is any amino acid
MYYTAFTKLAYGGCIVITGIEYNKVFEGIIATTRRNIYLTAAVLFLSVMCIWFFSKTISTPLKALAAAARSIEGGQFELQLRPKGRDEIGLLGASFQKMSSALHIFGRFTNREIAVKAMRGEIKPGGLPKHATIFFSDIRGFTSISENFTKTFGDEASDKIVFWLNNYLTEMVECIEKTGGAVDKFIGDAVMAHWGTVYTAGSPKKDAFNCVKAALMMRHALMILNKDRRKTDDPGNPTIRIGCGINTGVVTAGQIGSDLRMEYTVIGDPVNLASRVESLNKPLGTXILITRTHXSFVGMLFIPKKCPPGT

SEQ ID NO: 5787 - DNA, 678 bp, Unknown
  Obtained from environmental sample
  misc_feature (1)..(678): n is a, c, g, or t
atggattggtattacatagacccagcaaagccagaaggcaaaaggagaattggaccttggtctaataggcaaatgcttgtatttgcagatcaaggcgcatttgctccagaaactcttgtgtggaaaaatgggtttaacgactggataccttggagcactgttgaagcagcgctcaaagcggaatttcaggtagaagcaataaaagatattctagaagaaaaaattttaccaaagccaagcgaaaaaaaagttaactatgctggcttttgggtgcggctatgtgcttttgtcatagatttcattatcatggatcttatatttattttgctaacaccactgcacgcgcattttggcgttatttcggaagtaacaccgcaaacaacaatggctgaactaatgcctaccctattcttcatatttgctcttatgtttttttacgattccttttttgtaaaaaactattctggaacgcccggcaaaatagcccttgggcttgcagttgtttgctncaacggagaagccatcacttggaaccgcgcatttttgcgggcttttgtggatttctttttcagattcttatttggagcaggctgcctgctcgccgcatttgatgttgaaaaaaagagcctgcacgattttatggcagaacacagagttttgaaaatgcagagagcataa

SEQ ID NO: 5788 - protein, 225 aa, Unknown
  Obtained from environmental sample
  DOMAIN (86)...(221): RDD family
  misc_feature (1)..(225): Xaa is any amino acid
MDWYYIDPAKPEGKRRIGPWSNRQMLVFADQGAFAPETLVWKNGFNDWIPWSTVEAALKAEFQVEAIKDILEEKILPKPSEKKVNYAGFWVRLCAFVIDFIIMDLIFILLTPLHAHFGVISEVTPQTTMAELMPTLFFIFALMFFYDSFFVKNYSGTPGKIALGLAVVCXNGEAITWNRAFLRAFVDFFFRFLFGAGCLLAAFDVEKKSLHDFMAEHRVLKMQRA

SEQ ID NO: 5789 - DNA, 822 bp, Unknown
  Obtained from environmental sample
  misc_feature (1)..(822): n is a, c, g, or t
atggaatatgttgcgattagagagggagttgagccaaaagttgtattagaagaacttgcccaaggcagagcggttttgcctgcgaacaaaaagcatcccgaatgcgagcctatgattataggttcaaaatttttggtgaaaataaatgcgaatataggcaattctgcccttggcagttctatagaagaagaagttgaaaaaatgtcttatgcggttaaacttggcgcagataccgttatggatttaagcacaggcaaaaacataagcgaaacccgtgaagctattttacgaaaatgccccgttccaatcggcaccgttcccatttaccaagcactggaaaaagcgggcggcaatccagctaatttaacttgggaaatttacaaggaaacccttattgagcaagccgagcaaggcgttgattatttcaccattcacgcaggtcttttaagggattgcattccccttgcgctaaaaagaacaacaggcatagtttctcgcggcggttctctaatggcttgctggatgcagaaaaaagaacaggaaaattttttatacacccatttcaaagagatttgcgaaattttaagagaatacgatatagccgtttctctaggcgatggactgcgccccggaagcattgcggattccaacgatgaggctcagtttgcggaattgaaaaccttgggcgaattgacaaaagtagcttgggatttgggtgttcaggttctaattgaaggtccgggacacgtgccgctgaataaaataaaagagaatatggatttgcaattaaagctatgccacggcgcgcccttttcacattag

SEQ ID NO: 5790 - protein, 273 aa, Unknown
  Obtained from environmental sample
  DOMAIN (1)...(273): ThiC family
  misc_feature (1)..(273): Xaa is any amino acid
MEYVAIREGVEPKVVLEELAQGRAVLPANKKHPECEPMIIGSKFLVKINANIGNSALGSSIEEEVEKMSYAVKLGADTVMDLSTGKNISETREAILRKCPVPIGTVPIYQALEKAGGNPANLTWEIYKETLIEQAEQGVDYFTIHAGLLRDCIPLALKRTTGIVSRGGSLMACWMQKKEQENFLYTHFKEICEILREYDIAVSLGDGLRPGSIADSNDEAQFAELKTLGELTKVAWDLGVQVLIEGPGHVPLNKIKENMDLQLKLCHGAPFSH

SEQ ID NO: 5791 - DNA, 942 bp, Unknown
  Obtained from environmental sample
  misc_feature (1)..(942): n is a, c, g, or t
gtgctgcttcttaaagcgcgggaggaaatgaagcaaaaagcccttgaggttaacgcagccaaactggaagaataccaccgtgcccaggacatcgaattcaaacggctggaggcccttgccgacgattccagaaaactggacgcggagcttcgccgttatatgcaagagttaatcggacggcttaaagaagaattctccgattaccggagcgaagcggaagagttacggaaagccgagacagaaaacttctcatcaactgcggcgcgtcttgagggggaaatgactgaaattgaaagggagcttgcggccctgaaattggaaacccgcgaaaatgtttcgggagaattaaagtcatttgagaatgaattttttgccgatcttaccaaacgcggtaacgatatggatctgcgcattatggagtggcaaggcagccttgaaaagcggctttctacaattggagaaaattccgaaacggctctgcgcgaactggaatacgacagggccgaagagatgaagaaaaatctttccgcactggacgcgcgtcttgtgtcggagcttgaacgtctcaaatcaaaggcaggagcttttgaggaggggatactggatcagatgaaagccgctgatgattctgtttcatcttttaaggaacagcttaaccacggtcttgaagacgccagaaaagaagcggaaatctccattaaagctgaaatcgggaattattccattacggcggcggagacggttaaaaaataccagcgagaactcgatgacgcctggaccggactgtcggcgaggctcagggaactggatgaaaacgttgaagaagcgcatcagcggatcagggatttggccgcggagacagacacccgcatcgcttcggtgcgctcttcggtggaagacgcggaacggcatatcagggaagccagggctcggccgatctga

SEQ ID NO: 5792 - protein, 313 aa, Unknown
  Obtained from environmental sample
  misc_feature (1)..(313): Xaa is any amino acid
MLLLKAREEMKQKALEVNAAKLEEYHRAQDIEFKRLEALADDSRKLDAELRRYMQELIGRLKEEFSDYRSEAEELRKAETENFSSTAARLEGEMTEIERELAALKLETRENVSGELKSFENEFFADLTKRGNDMDLRIMEWQGSLEKRLSTIGENSETALRELEYDRAEEMKKNLSALDARLVSELERLKSKAGAFEEGILDQMKAADDSVSSFKEQLNHGLEDARKEAEISIKAEIGNYSITAAETVKKYQRELDDAWTGLSARLRELDENVEEAHQRIRDLAAETDTRIASVRSSVEDAERHIREARARPI

SEQ ID NO: 5793 - DNA, 483 bp, Unknown
  Obtained from environmental sample
  misc_feature (1)..(483): n is a, c, g, or t
ttgctctttgagatagcgcttatttcctcgccggagaattttgcgggcgagcacgaaattgtagaacagatgtttgagggcggcttaaagatgctttatgcgagaaagccgcaaatgccagagccattgctagagagatggactctaggttttgatataaagtggcacaataatatttttccttggcaaggctccgctcatagctttgaggaattggaaaaaacaaattcagacatctgttttttaagccccgtttttgattccatttccaaattcggatacaaagccaaatacaataatcaagaactaaaagaaggtattgcagcttggaaaaaaacacactctcaaaaattatttgcgcttggcggtgttgccgcagaaaatatagcagaacttaaagagcttggatttgacggagccgccctgctaggcacggtatggcacagcccagaccctgtggcagcacttttggaaatactttag

SEQ ID NO: 5794 - protein, 160 aa, Unknown
  Obtained from environmental sample
  misc_feature (1)..(160): Xaa is any amino acid
MLFEIALISSPENFAGEHEIVEQMFEGGLKMLYARKPQMPEPLLERWTLGFDIKWHNNIFPWQGSAHSFEELEKTNSDICFLSPVFDSISKFGYKAKYNNQELKEGIAAWKKTHSQKLFALGGVAAENIAELKELGFDGAALLGTVWHSPDPVAALLEIL

SEQ ID NO: 5795 - DNA, 990 bp, Unknown
  Obtained from environmental sample
  misc_feature (1)..(990): n is a, c, g, or t
ttggttatggacaaagaaataggcttggttcaagggcgttgggggcatttgaacagaggcgaatccgctttgacccttgctcaatccataggcatagatggtcactttgtaattgagcagtctgcccgtagctggggcggcttgtttatgaatttcaacggcaccgcaggcgtttggcgcaggcaagccatagacgaagccggtggctgggaaggcgacaccctaaccgaagatatggatttatcctaccgcagccagctcgctggctggaaaatgaaatttgtttttgacgttattgtgcccgcagaacttccagcagacataaacgctttcaaaagccagcaataccgctgggcaaagggttcaatacaaaccgccataaaagatttgccccgagtttttgcctcaaaagaatctctaaaaatcaaaattcaatcttttttgcacacaacgcattatagcattcatccgttgatgttgttcaccgccatctctgcattccccttgctggcttttggtcattcaagatttgggtatatgccggtgtggctattttctgttttgtttgccgttatagcccttgcagctgtggctccctcaactctttatttcattgctcaaaaattttcaggctcccttggctggaaaaaacgaatggctgcccttcctgtgcttatgagcttaggggtggggattgccgttaacaatacttgcgctgttttatctgctgtctttggcagaaaaagttcctttataagaacccctaagcaaggcggtgcggcaaccataaaaaaattcaagcagaaattccctgctattgctcttattgaattgctttgtggtgtttattgcttttttggcttaagggaatacatagatgcaagaagttttcttataggtcccttcttagctctttatgctgttggaatctctatcgtcggtgttctaagcgtgattcactacatagataatttaagcgggccaacctaa

SEQ ID NO: 5796 - protein, 329 aa, Unknown
  Obtained from environmental sample
  misc_feature (1)..(329): Xaa is any amino acid
MVMDKEIGLVQGRWGHLNRGESALTLAQSIGIDGHFVIEQSARSWGGLFMNFNGTAGVWRRQAIDEAGGWEGDTLTEDMDLSYRSQLAGWKMKFVFDVIVPAELPADINAFKSQQYRWAKGSIQTAIKDLPRVFASKESLKIKIQSFLHTTHYSIHPLMLFTAISAFPLLAFGHSRFGYMPVWLFSVLFAVIALAAVAPSTLYFIAQKFSGSLGWKKRMAALPVLMSLGVGIAVNNTCAVLSAVFGRKSSFIRTPKQGGAATIKKFKQKFPAIALIELLCGVYCFFGLREYIDARSFLIGPFLALYAVGISIVGVLSVIHYIDNLSGPT

SEQ ID NO: 5797 - DNA, 600 bp, Unknown
  Obtained from environmental sample
  misc_feature (1)..(600): n is a, c, g, or t
atgcacgaattaagcattgaagcgacatgggaagaacttttaaccgccgccgaagatggcataaaggaagaaaccgatgaaaaaagcagattgtcaacaaaagaagcgggcggacgctcacttggacggcctcattttgcggcgcttttggtgaaaaaaaagattgtcaagagcgtaaatcaggcatttgcccgttatttaggcgtgggaaagcccttgtatgtacaaaaagaagggttggattttgatgaagcagtcgcattgatacgcgaatccggcggcattcctgttttggcgcatccgatttcgctctttgtggcatgggggcggcttcccgatatgataaaagccttgcaaaaacgagggcttatgggtattgaagcgtggcatccgacagcaaaacccggctcctgccgccgtcttgaggaattaggtaaatccctggggctttatgtcaccgaaggcagcgatttccacggccatgtccgccccgacaggaagctcggctattcaagcaaaagcaggaagatagaagactccgttcttgaagcaataccggaattatttacaaaaacgattccttttattacggaatcttag

SEQ ID NO: 5798 - protein, 199 aa, Unknown
  Obtained from environmental sample
  misc_feature (1)..(199): Xaa is any amino acid
MHELSIEATWEELLTAAEDGIKEETDEKSRLSTKEAGGRSLGRPHFAALLVKKKIVKSVNQAFARYLGVGKPLYVQKEGLDFDEAVALIRESGGIPVLAHPISLFVAWGRLPDMIKALQKRGLMGIEAWHPTAKPGSCRRLEELGKSLGLYVTEGSDFHGHVRPDRKLGYSSKSRKIEDSVLEAIPELFTKTIPFITES

SEQ ID NO: 5799 - DNA, 420 bp, Unknown
  Obtained from environmental sample
  misc_feature (1)..(420): n is a, c, g, or t
gtgggaattagaaatggtattgtcttaatagtggtatgtgtaataagtattgggttcgtttgctgtacgcatttgaccgcttctaccccggctataaaggacaagaacggaaaagtaatcgagtacagtatatctgaacttagacaggtctcattaaatgggcgcagggaatggataagtattcgtggaattaacaaagataatcccgtacttctttttttggccggggggccaggcgggtcacaaatggcggcagtcagacatgaattatcggagcttgaaaaacattttgtcgttgtaaactgggatcagccgggggcgggaaaatcctatggtgcgcttggcacaaagaatattacaataaaaacgtatatagaggatgggtattctcttacaaaatatctgtgcgaaaaactttaa

SEQ ID NO: 5800 - protein, 139 aa, Unknown
  Obtained from environmental sample
  SIGNAL (1)...(27)
  misc_feature (1)..(139): Xaa is any amino acid
MGIRNGIVLIVVCVISIGFVCCTHLTASTPAIKDKNGKVIEYSISELRQVSLNGRREWISIRGINKDNPVLLFLAGGPGGSQMAAVRHELSELEKHFVVVNWDQPGAGKSYGALGTKNITIKTYIEDGYSLTKYLCEKL

SEQ ID NO: 5801 - DNA, 444 bp, Unknown
  Obtained from environmental sample
  misc_feature (1)..(444): n is a, c, g, or t
atggaaaaccttctgaccggcgatgcaagaagcgttactttggacgcggtactcgccccgaatgatcccattgcgcgcgccattatcgaagcctgcagggccgacgccaaataccggagcaaactgccggtagtaaccggacaggacgccgaatttgattccgccttgtccataaagaacggccagcagtacagcaccgtgttcaaggacacagcgaaactcgccgccgccgccattaccctggctgaccaggttctcaaaggccagcccgtcaatatccccggcgcggttcttgcgtcaggcgatcttgagaaaattggcaataccggcaagaaaacggtaaaagcctatctgcttgaccccattctggttactaaatctaacctcaatgttccggtggacgctggtttctacacagacgccgaagccgcccagttgaagtag

SEQ ID NO: 5802 - protein, 147 aa, Unknown
  Obtained from environmental sample
  misc_feature (1)..(147): Xaa is any amino acid
MENLLTGDARSVTLDAVLAPNDPIARAIIEACRADAKYRSKLPVVTGQDAEFDSALSIKNGQQYSTVFKDTAKLAAAAITLADQVLKGQPVNIPGAVLASGDLEKIGNTGKKTVKAYLLDPILVTKSNLNVPVDAGFYTDAEAAQLK

SEQ ID NO: 5803 - DNA, 339 bp, Unknown
  Obtained from environmental sample
  misc_feature (1)..(339): n is a, c, g, or t
atgagcgattatattcttgaaattgaaaatctaaccaaagagtttcccggcgtcaaggcccttgaaaatgtcagtttgaaagtaaaaaaaggggaaatccattccatttgcggggaaaacggcgcgggaaagtccacgctgatgagctgtatttcgggcgtttaccccaatggcgactatgcgggcaaagtttttttcaaaggacacgaaaccaattaccatagcgttaaagacagtgaaaaagaggggcttgccattattcaccangaattggcgctcagtccctatttgtcaatttatgaaaatatttttcctgggacacatggnaaacccacgtag

SEQ ID NO: 5804 - protein, 112 aa, Unknown
  Obtained from environmental sample
  misc_feature (1)..(112): Xaa is any amino acid
MSDYILEIENLTKEFPGVKALENVSLKVKKGEIHSICGENGAGKSTLMSCISGVYPNGDYAGKVFFKGHETNYHSVKDSEKEGLAIIHXELALSPYLSIYENIFPGTHGKPT

SEQ ID NO: 5805 - DNA, 1041 bp, Unknown
  Obtained from environmental sample
  misc_feature (1)..(1041): n is a, c, g, or t
ttggacgagggatatctccgccgttccctttcctttattcttgccatcgcggcacgggaacttttccccgacaggcgcctctacgtcggccactcgctcgggaacagctactactatacgtttgattcgggcgattccccctccgaaaacgagatctccgcccttcaggaaaaaatgaaagccctggtaagggaagacctccccataacattcaagtacctggcctatgaggaggcccttgagattttcaggaaaaacaaccagacggacaccgtcctgcttttggatcagcgcggcacttcgcggataaagataaacgaatgtaaaaacaacattgatatttacgtcgaacctctggcgccgcgtaccggcctgctttctgcttttgagttgaattcctaccaggaaggcttcctgctccgcttccccactgccggtaaaggaagaatcgtcggcccctttactgacgaccctaaaatttttaacgtttttaacgagtataaaaaatggggacgcgtagtcggggtacgggtagcgggcgatttgaattcccttgttgctaaaaggaatatccgcgactacataagaatcgcggaggcgcaccaggccaggaaaatgtcggagatagccgaacggatatacgaacggaaagacacggtgaagaccgtcctgctcgcggggccttcaagctccggcaaaacaaccagcgcgaaacggctttccatcgagcttctggtactggggataaaacccgtcgctatcagccttgacagctattatgtggggaatgaccggactccaaagaatgaaaaaggcgagccggactacgaatgtcttgaagcgctggacatccccctgttaaacgatcatctcctggcgctgtacaggggcgagggagatagcctgcccgtttacgattttaagacgggtacgagcatcagagacgcgggcaaaaagatccgtatggaagaaagcgcacagtgcttattgtcgaaagcatcaatgcccctaacgatgatcttacgcccgctatgggcgtga

SEQ ID NO: 5806 - protein, 346 aa, Unknown
  Obtained from environmental sample
  misc_feature (1)..(346): Xaa is any amino acid
MDEGYLRRSLSFILAIAARELFPDRRLYVGHSLGNSYYYTFDSGDSPSENEISALQEKMKALVREDLPITFKYLAYEEALEIFRKNNQTDTVLLLDQRGTSRIKINECKNNIDIYVEPLAPRTGLLSAFELNSYQEGFLLRFPTAGKGRIVGPFTDDPKIFNVFNEYKKWGRVVGVRVAGDLNSLVAKRNIRDYIRIAEAHQARKMSEIAERIYERKDTVKTVLLAGPSSSGKTTSAKRLSIELLVLGIKPVAISLDSYYVGNDRTPKNEKGEPDYECLEALDIPLLNDHLLALYRGEGDSLPVYDFKTGTSIRDAGKKIRMEESAQCLLSKASMPLTMILRPLWA

SEQ ID NO: 5807 - DNA, 588 bp, Unknown
  Obtained from environmental sample
  misc_feature (1)..(588): n is a, c, g, or t
ttgcaggatgaattttttacgcagatatcgctttcgccggtaatcctnggacgcaagtttcattttgacgaagcgcacagccttcatgtggcaaaacactgcatgacaatntttgattcgcttgtcaaggaacacggaatgagccgcagacaccgggtaatgctggagacagccgccatacttcatgatataggcacatatataaaaacatcgggacatcaaaagcacggccagtacattgtaaacaactcggaaattttcggccttcaccaggatgagcttggcattatctcaaatgttatcaactatcacaggggaggccccccctcgcaggcggatattgaatatatcaaactacagcgcgaagagcgtatacttgtattaaaaatggcgtctatcctgagagttgccgacgctctggaccgcggccattcccagcagataaaaaaaataaccgtcgagcggcggctggaaaccgtagtccttcatgtggacaaagcttatgatcttacgcttgagcttttaggtattgaagaaaaaggcggaatgtttcaggatgtattcggctgtaaaattgttttgagttaa

SEQ ID NO: 5808 - protein, 195 aa, Unknown
  Obtained from environmental sample
  DOMAIN (23)...(143): HD domain
  misc_feature (1)..(195): Xaa is any amino acid
MQDEFFTQISLSPVILGRKFHFDEAHSLHVAKHCMTXFDSLVKEHGMSRRHRVMLETAAILHDIGTYIKTSGHQKHGQYIVNNSEIFGLHQDELGIISNVINYHRGGPPSQADIEYIKLQREERILVLKMASILRVADALDRGHSQQIKKITVERRLETVVLHVDKAYDLTLELLGIEEKGGMFQDVFGCKIVLS

SEQ ID NO: 5809 - DNA, 948 bp, Unknown
  Obtained from environmental sample
  misc_feature (1)..(948): n is a, c, g, or t
atgccctctggggtacccgattcggaaaatgtgttgctgaataaattctgtacatggcttgccgccgtaagacaccgttcgccattaacggtgtatacctaccggctggagcttgtccgttttctggaatttaccggcagacaaaacattgccatacaatcggtaacccctgcgcacattgccgcctactttctgaaacgaaaggaggcggatcgcataggttcacgatctttggcaaaggcaatttccgccgttcgttctttttttggttttattgttgccgaagggacccggcttgataatccgaccgcccttttggaaagtccccgcagggggcgcagtctccccgaaacgatggacaaagaaacggttgaaaaactcctcgactgtatggatacggacagccaactggggctgcgggatcgcgccctttttgagatgatctattccgccggcctgcgcatatccgaaacggtaaatctgaaccttcgcgaccttgattttaccgaaggggttgtcagagtcagggggaagggcggcaaggaacgacttgccgtttttggccccgaagcggctttgtggctcaaacggtacattgaagaatcgcggccttctctggccgacggaggcggcaggggcgcggccctgtttgtcggcagaaacggcaaacgtctttcccgcaaaggaatttggaaaaattattcgcggtacgcggctttggcgggaacaggttcccgcgttcacacactcaggcacagtttcgccaccgggcttttgcagggcggagccgacttgagaaccgtgcaggcgttgttggggcattccgatctggcgacaacgcagatatacacccatgtggatgcccgtatgttaaaagaagccaccgtaagtatatgccccatttgggcgaattgcangccggcaagggcggcaggtagaaaaacatga

SEQ ID NO: 5810 - protein, 315 aa, Unknown
  Obtained from environmental sample
  DOMAIN (13)...(96): Phage integrase, N-terminal SAM-like domain
  misc_feature (1)..(315): Xaa is any amino acid
MPSGVPDSENVLLNKFCTWLAAVRHRSPLTVYTYRLELVRFLEFTGRQNIAIQSVTPAHIAAYFLKRKEADRIGSRSLAKAISAVRSFFGFIVAEGTRLDNPTALLESPRRGRSLPETMDKETVEKLLDCMDTDSQLGLRDRALFEMIYSAGLRISETVNLNLRDLDFTEGVVRVRGKGGKERLAVFGPEAALWLKRYIEESRPSLADGGGRGAALFVGRNGKRLSRKGIWKNYSRYAALAGTGSRVHTLRHSFATGLLQGGADLRTVQALLGHSDLATTQIYTHVDARMLKEATVSICPIWANCXPARAAGRKT

SEQ ID NO: 5811 - DNA, 654 bp, Unknown
  Obtained from environmental sample
  misc_feature (1)..(654): n is a, c, g, or t
atggatgaacgcggattgctggattttatcattgcccgcctccccggactctctttcagggacaagacgcggctctgtaaaatattcaacacagaggctgatataatccaaaaatccaagacagaaatggaaacgcttgttggccgcccccttgcccgttgggatattgattcttcccggcggcaggcggcgcgcgacgcggaaacggcgcggaggcggggcattaactgggtatcgtggcaaaaccccggatacccgcccctgttacgcgaaatatacgatccgccggcgcttttgtttttcaggggcgcgctgccgaatcctgaaaagcccctggcggcggttgtggggacgcggaagccaagcccccacgcggcggcgcaggcgttcactgtggcaaaagacctgggacgcagcggcgtttccgtcgtttccggcctcgccgccggcattgactcgatggcgcaccgtggaaacattgaaggcggcgcggccaccatcgccgtaatgggctcgggggttgacgaagtgtacccctcgtccaacagaacgcttgcccgcaggatactggaaacgggcggtgcgctgctctccgaatacccccccggcacgggtccgcgaaagtggatttccccgcccctcggcngaatctga

SEQ ID NO: 5812 - protein, 217 aa, Unknown
  Obtained from environmental sample
  DOMAIN (69)...(211): SMF family
  misc_feature (1)..(217): Xaa is any amino acid
MDERGLLDFIIARLPGLSFRDKTRLCKIFNTEADIIQKSKTEMETLVGRPLARWDIDSSRRQAARDAETARRRGINWVSWQNPGYPPLLREIYDPPALLFFRGALPNPEKPLAAVVGTRKPSPHAAAQAFTVAKDLGRSGVSVVSGLAAGIDSMAHRGNIEGGAATIAVMGSGVDEVYPSSNRTLARRILETGGALLSEYPPGTGPRKWISPPLGXI

SEQ ID NO: 5813 - DNA, 381 bp, Unknown
  Obtained from environmental sample
  misc_feature (1)..(381): n is a, c, g, or t
atgttttcggcgtctacgatgggttccagtcaaaattccgccgctgaaaaagaaaaatattcctccctcgcggaatcggcgtatctgcgggcgattcaactggatcccgtntacgcaaaacccaagctcggccttgggattctgtatacatttgatcaggatcgtccggaggaagccgttccgcatctggagcgttatgtgcagcttatgcccaacgatctccggggaatgtttgttctggcgcgggcgtattacatgacggcaaattaccaaccggcgcttgaactctacgaccggattctttccaaaaccaaagacgagaaagtaaaggcggaggcgcggaacaacatagacattatctggagtcagatgaatggatga

SEQ ID NO: 5814 - protein, 126 aa, Unknown
  Obtained from environmental sample
  misc_feature (1)..(126): Xaa is any amino acid
MFSASTMGSSQNSAAEKEKYSSLAESAYLRAIQLDPVYAKPKLGLGILYTFDQDRPEEAVPHLERYVQLMPNDLRGMFVLARAYYMTANYQPALELYDRILSKTKDEKVKAEARNNIDIIWSQMNG

SEQ ID NO: 5815 - DNA, 603 bp, Unknown
  Obtained from environmental sample
  misc_feature (1)..(603): n is a, c, g, or t
atgtcagccctatccgcggacgttgagcaggcggcatccaccgcagaggctgaaactacagcttcgcagaagcgcagccgcagggttaaaagttatgtcctgcgcggcggacgcctaaccgttgcccagcagcgttcatacgactccctttcaggaaaattcattattccctacgaatgtaaggaattgaattttgccgggattttcgacaataacaaccctgtcatcgtggaaatcgggtttggcatgggcagggcgactgcagctattgccggtgaaaatccggataaaaactacatagggcttgaaatccacaaaccggggatagggcggcttctctgggaaattgaacagaggcctctttcaaatgtcagaataatcgagcatgacgcgaccgatgtttttcaaaacatgatcccggcaaattctcttgacggtgtgcatatttttttccccgatccctggcctaaaaaacgccaccataagcgaaggcttatacagcggccttttacagattgtatcgcatcaaaattaaggtcccagggctatatttacatggtcagcgactggttggactacgcaaactgggcattatttgtttaa

SEQ ID NO: 5816 - protein, 200 aa, Unknown
  Obtained from environmental sample
  DOMAIN (60)...(200): Putative methyltransferase
  misc_feature (1)..(200): Xaa is any amino acid
MSALSADVEQAASTAEAETTASQKRSRRVKSYVLRGGRLTVAQQRSYDSLSGKFIIPYECKELNFAGIFDNNNPVIVEIGFGMGRATAAIAGENPDKNYIGLEIHKPGIGRLLWEIEQRPLSNVRIIEHDATDVFQNMIPANSLDGVHIFFPDPWPKKRHHKRRLIQRPFTDCIASKLRSQGYIYMVSDWLDYANWALFV

SEQ ID NO: 5817 - DNA, 402 bp, Unknown
  Obtained from environmental sample
  misc_feature (1)..(402): n is a, c, g, or t
atgggtgatttctcagactggccctgcccacggggatactgcgccacaattgaagagcttaacgatctggttgatagttttaattccacatcggtgggtgtctgctgggattttggccatgcaaatttaatgtataaagatcagaatccttgcctgaagattgttggcaaacggctcaaggcccttcatgttcatgataatcacggtatcagggacgatcacttgccggttttttttggcaatatcaaatgggaacccctcatgcatacattgaaagaaactggttatgaaggggaattcagtttcgaggtaaagcgtattccctggactctgcccctggagatgcgtaatgcccaatggcaatatgtgcgcaaaagcggagagtatctgctctcgatataa

SEQ ID NO: 5818 - protein, 133 aa, Unknown
  Obtained from environmental sample
  misc_feature (1)..(133): Xaa is any amino acid
MGDFSDWPCPRGYCATIEELNDLVDSFNSTSVGVCWDFGHANLMYKDQNPCLKIVGKRLKALHVHDNHGIRDDHLPVFFGNIKWEPLMHTLKETGYEGEFSFEVKRIPWTLPLEMRNAQWQYVRKSGEYLLSI

SEQ ID NO: 5819 - DNA, 861 bp, Unknown
  Obtained from environmental sample
  misc_feature (1)..(861): n is a, c, g, or t
atgcttgacggaaaagttacaggttatccgtttctggttcagtcccattcttttatttacaacaaaaaggttttcagggatgccggtataactaccctgccgcggactatcagtgaatatgatgaagcggcccggaaaatacaggcaatcggcgtccagccttttgctaccggcttttttgaatggtgggttctgccccagaccgggtggcaggcccttgcgccggcagtggttcagaaatacggcggtttcagctcttttgtcagccgcatgaacgcgggaaatttgaaatttgcggatattccggaaatggcgaatatttttgaccttttggatctgataaaaaaatacggcggaccaaaacccggcgaatccgatttccaaaatcaggtatcctctgtagcaacaggcgaggtggcaatgatccatcaggggatttgggcggaagacagcattaaacaggtaaatcccaatgtcgagatcggttttttgatcgggccggcagggaacgacgtttccggcgcgggcatcatgtatgactcaaaccagacgctgagggtatacaaggacggcaagaatttgaaagccgttctggactggctgcgctggcttacgaactccgaatacggaagaaactggatacccggaaaagtcaagcagctttcccccgttgcgggagcgcccgcgcctgactctgatattgcccgtgaaaccgtcgcgatgttaagcaataaagtcccgtcttacccatggttctatcagatgttcccgtccggatccgaggagcagttgggtactattttgcaggggtacagcgcgggccttatggatcgcaagggggcgattaccngctttggatga

SEQ ID NO: 5820 - protein, 286 aa, Unknown
  Obtained from environmental sample
  misc_feature (1)..(286): Xaa is any amino acid
MLDGKVTGYPFLVQSHSFIYNKKVFRDAGITTLPRTISEYDEAARKIQAIGVQPFATGFFEWWVLPQTGWQALAPAVVQKYGGFSSFVSRMNAGNLKFADIPEMANIFDLLDLIKKYGGPKPGESDFQNQVSSVATGEVAMIHQGIWAEDSIKQVNPNVEIGFLIGPAGNDVSGAGIMYDSNQTLRVYKDGKNLKAVLDWLRWLTNSEYGRNWIPGKVKQLSPVAGAPAPDSDIARETVAMLSNKVPSYPWFYQMFPSGSEEQLGTILQGYSAGLMDRKGAITXFG

SEQ ID NO: 5821 - DNA, 339 bp, Unknown
  Obtained from environmental sample
  misc_feature (1)..(339): n is a, c, g, or t
gtgatgattgccgtcctgtgtttagtaatcgggcttggaatgggcagcgcaatggcgcagcctgtcgcggacagcatactggcaaagcgagttgccatcgcggaagcggcaaatacaggcggaggaggcagcagaattttatttgccgcaggccaaatgcaaacgaatgacaacgcggcggggtttgtgcctgaaagcgaaattcaagtgagtttaagtgcggatgttcttgcacagatcattatccttacgcttggcctggcggcactgtgcggcattgtcggggttgtcattatcacgcaatacgaacctctgaaaattctcagggaaataaattag

SEQ ID NO: 5822 - protein, 112 aa, Unknown
  Obtained from environmental sample
  SIGNAL (1)...(19)
  misc_feature (1)..(112): Xaa is any amino acid
MMIAVLCLVIGLGMGSAMAQPVADSILAKRVAIAEAANTGGGGSRILFAAGQMQTNDNAAGFVPESEIQVSLSADVLAQIIILTLGLAALCGIVGVVIITQYEPLKILREIN

SEQ ID NO: 5823 - DNA, 687 bp, Unknown
  Obtained from environmental sample
  misc_feature (1)..(687): n is a, c, g, or t
gtgcggcattgtcggggttgtcattatcacgcaatacgaacctctgaaaattctcagggaaataaattagggaggctaaaaacgactacgcttgtattacagaatgtttcctataaatatgagggaacagataaaaccatttttaaggacgttaatctgcaatttgacgctggaaaggtttacaccatcgtgggcaagtccggagcaggaaaatctaccctgctatccttgttgtcgggcctggatgtcgcaagctccgggcgtatcaactacggcggtgaaaatctcgccgaaatcaaccgtaaccgttacagggcgcagaaggccggaattgtctttcagggtttgaatctgctgaccaatgttacggccatagataacatcgttttatccatgaacatcagtggcgtgaagggagtggataaaaaagcgcgggcgcttgagcttttgaaaaaagtgggcatctcgccggaaaaagcgaaccgtaaaatcctcaagctctcangcggcgaacagcagcgcataggcatcgcgcgggctttggcgcatgaccctgttctgnatgtagcggacgagccgaccngnaatctggataaagagatagaggcaaaggttttgaaaatctttgaatccctggcgcacagcgaaagtaaatgcgtgattatcgtaactcactcaaaaaagtaa

SEQ ID NO: 5824 - protein, 228 aa, Unknown
  Obtained from environmental sample
  DOMAIN (58)...(228): ABC transporter
  misc_feature (1)..(228): Xaa is any amino acid
MRHCRGCHYHAIRTSENSQGNKLGRLKTTTLVLQNVSYKYEGTDKTIFKDVNLQFDAGKVYTIVGKSGAGKSTLLSLLSGLDVASSGRINYGGENLAEINRNRYRAQKAGIVFQGLNLLTNVTAIDNIVLSMNISGVKGVDKKARALELLKKVGISPEKANRKILKLSXGEQQRIGIARALAHDPVLXVADEPTXNLDKEIEAKVLKIFESLAHSESKCVIIVTHSKK

SEQ ID NO: 5825 - DNA, 903 bp, Unknown
  Obtained from environmental sample
  misc_feature (1)..(903): n is a, c, g, or t
gtggggggggtgctgcgcagcgccgatatcaccatcggcaacttggagggggtgctgctcgatgccggcgggtgggccaagaggtgcgccaaccccaacgtctgctacgttttcagatcgccggagcgctacgtgaagcacctcgtcaacgccgggttcgacctgatgtccgtggccaacaaccactccggcgactttggggacgcggggcgggccggcacggtgagggccctgacctccgcggggatagggtttgccgggtttgatgggacggcggagagctacgtcctcgagcgggagggagtacgctacggcttcgtggcgtttgcgccgaacataggcaccgtgagcttccacgacctgcccaaagccaaggaactcatcgccgaagttagaaagaagtgcgatatcatgattgtgagtatgcacataggcgcagaggggccgaggcactcgcgcataacccgcaattcggagctcttcgtgggcgagaaccgcggcaacccctacgccttcgcgcgtttggccatagacagcggcgccgatatggtcataggccacggcccccacgtgccgcgggcggtagacctctacaaggggaaattcatcgcctacagcctcggcaatttcgctacgaacaccagcgtaaacatctccggagagagcggctacgcacccatcgtgaaaatacggaccgaccggcagggcaacttcatagacggcgaaataatctccgcgatacagcatggcgaacgcggcgagcgcaggccatatctagaccccacgggcgcgtgcatcaaagagatgaagaggctgacggagatcgatctgccggaaacaggaattacaatcgacgggaagacgggncagataacaaaggaattaatangggacgttgtttaa

SEQ ID NO: 5826 - protein, 300 aa, Unknown
  Obtained from environmental sample
  misc_feature (1)..(300): Xaa is any amino acid
MGGVLRSADITIGNLEGVLLDAGGWAKRCANPNVCYVFRSPERYVKHLVNAGFDLMSVANNHSGDFGDAGRAGTVRALTSAGIGFAGFDGTAESYVLEREGVRYGFVAFAPNIGTVSFHDLPKAKELIAEVRKKCDIMIVSMHIGAEGPRHSRITRNSELFVGENRGNPYAFARLAIDSGADMVIGHGPHVPRAVDLYKGKFIAYSLGNFATNTSVNISGESGYAPIVKIRTDRQGNFIDGEIISAIQHGERGERRPYLDPTGACIKEMKRLTEIDLPETGITIDGKTGQITKELIXDVV

SEQ ID NO: 5827 - DNA, 942 bp, Unknown
  Obtained from environmental sample
  misc_feature (1)..(942): n is a, c, g, or t
ttggtgatgctattgatgaaagttgatgccctggaaggggatgcaatgattagtttctttcgtcaactgcgaggaggctttatggagcgcggtgtagggaaatttccagtttcaatcgcgcttgtaggcatgagggatttgaaggactatataaccgctgccaaggacggagttccgccaactccgttatctccatttaatattaaagaagattctgcaaagattggtaacttcagcctgaatgatatagagaagcttttttcccagaggaccgaagaaacaggacaaaacattaccaaagaagctttggattacacatgggaacagtcaagcggacagccatggattgtcaattcgctgtttaaacgagccacgatgagggtattacatgaagatgattacagtacagtgacactggcgtatatcagggaagcccgggagcagatggtacttgcccgcgagacacatctcgattctcttgctgtaagaatacaggaacccgctattcgtaaagtgatggaaagccttataacaggaacacctgaccctgaacttaccgcaagcgaaggttttcgtatttgtatggatttggggcttgtaaaaaaagaacggggtacacctatggtagctaatcctgtttataaagaagtgcttgcaaggcagttgacctattccacacaggatgctatccccgaaccggaatggcaatgggaaaggccggacggttcccttgacatggacgagttactaagggaattccagatattctggcgggaaaactccgaaatatgggaagaaaaggtgacttataccgaagcctttcctcacctgttgctgatggcctttctgcagcgtgtactcaatggcgggggccgcattgaacgtgaatacgccgcaggccggggaaggatggatttatttattgagtataagcgcgtataa

SEQ ID NO: 5828 - protein, 313 aa, Unknown
  Obtained from environmental sample
  misc_feature (1)..(313): Xaa is any amino acid
MVMLLMKVDALEGDAMISFFRQLRGGFMERGVGKFPVSIALVGMRDLKDYITAAKDGVPPTPLSPFNIKEDSAKIGNFSLNDIEKLFSQRTEETGQNITKEALDYTWEQSSGQPWIVNSLFKRATMRVLHEDDYSTVTLAYIREAREQMVLARETHLDSLAVRIQEPAIRKVMESLITGTPDPELTASEGFRICMDLGLVKKERGTPMVANPVYKEVLARQLTYSTQDAIPEPEWQWERPDGSLDMDELLREFQIFWRENSEIWEEKVTYTEAFPHLLLMAFLQRVLNGGGRIEREYAAGRGRMDLFIEYKRV

SEQ ID NO: 5829 - DNA, 354 bp, Unknown
  Obtained from environmental sample
  misc_feature (1)..(354): n is a, c, g, or t
gtgggtgaaatagaacaaatggcccaggagcttgaagaacggcaaaaagcgctggaagaattagcgaattctctcagggcgcagattgcagatgccgaaaataaggagaggaacatcgaagcggtcgctcgcaatcttaccaatatgcaaccggagcgagcggtaggtatcatatcagcaatggatgatcaggacgttattgatgttctccggaagactgaagagcttgcacaggccgctggaacaacgtctttagtgccctattggctgcagttaatggcgggaacgcctgaaggagccaccagggcagcggaactacagcgcaagatggtcgggaggccgcagagcctctaa

SEQ ID NO: 5830 - protein, 117 aa, Unknown
  Obtained from environmental sample
  misc_feature (1)..(117): Xaa is any amino acid
MGEIEQMAQELEERQKALEELANSLRAQIADAENKERNIEAVARNLTNMQPERAVGIISAMDDQDVIDVLRKTEELAQAAGTTSLVPYWLQLMAGTPEGATRAAELQRKMVGRPQSL

SEQ ID NO: 5831 - DNA, 759 bp, Unknown
  Obtained from environmental sample
  misc_feature (1)..(759): n is a, c, g, or t
ttgatgtacaacgcaacggacggcttttattacgatatcaacaaaaatgaaaaacaagttccaattaaaacgattgcggggtattggccactcctggcggaaatccccaacggggaaaaagccgagcgcattatcgaaaaactttccgatccaaagtatttcggcacggctcatccgtttccgtccattgcgctgtccgaaaaagattttgacgagacaggaaaaggattcagaggatcggtttatccttacttaacattcatggttataaaaggacttgaacgttaccaacgctgggatttggctcgtgagtgcgcgataaggcatgtgtactttatgctcgattcaatgagtcccgacgggaatcatcacaggggaaatttgtgggaagcgtatttgccaacaaaggaaggtcccgcaaaatggtcgggcaaaccagcttttccgcgtccgcagtatttaacttacgacgctctttctacaatatgtttaacaatcgaaaatattgtcgggctttcaatatcactgcctcgtaaaacagtggattgggttattccaagtttggaaattatgggtgtagaaaatctttcactaaaaaataatatgattacgattctttccaacaaaagcggcagaggctgggaaatacacatggaaagcgaaaaactttattactttactattaacattctgggtgtaaaagagaaaacattgccaattccctctggtaaatgttcaatccttattgataaactgtaa

SEQ ID NO: 5832 - protein, 252 aa, Unknown
  Obtained from environmental sample
  misc_feature (1)..(252): Xaa is any amino acid
MMYNATDGFYYDINKNEKQVPIKTIAGYWPLLAEIPNGEKAERIIEKLSDPKYFGTAHPFPSIALSEKDFDETGKGFRGSVYPYLTFMVIKGLERYQRWDLARECAIRHVYFMLDSMSPDGNHHRGNLWEAYLPTKEGPAKWSGKPAFPRPQYLTYDALSTICLTIENIVGLSISLPRKTVDWVIPSLEIMGVENLSLKNNMITILSNKSGRGWEIHMESEKLYYFTINILGVKEKTLPIPSGKCSILIDKL

SEQ ID NO: 5833 - DNA, 825 bp, Unknown
  Obtained from environmental sample
  misc_feature (1)..(825): n is a, c, g, or t
gtggggctccccgccggagccggaacctggacccgcgataacnttatgggccagtacatacactttggcatccgcgaattcgcaatggcggcaatttgcaacggaatatcgcttcacggcggcctgcggccctactgctcgacctttatggtttttgcggattatctgcgcccggcattgcgcctttccgcgttgatgaagcagccggtgatatacgtccttacccacgattcgatcctcgtaggcgaagacggccccacccatcagccggttgagcacctcgccggcatgagggcaatgcccggccttttggttctccgcccgggggatgccgaggaatgcgccgaggcctgggcaatggcaatggaatacacaaaaggcccggttgtccttgccctgtcaaggcagaacattacggtcttcccaaaagccgaccccgactggcggaacacgattcgcgtgggcgcttacattgccaaacaagttgaaggttctgatcctgagattgtaattatcgccacaggctcggaagtaaacactgccctggacgttgcgtcaaaggcggcggacaaaaagatccgcgtggtctcgatgatcggcaaggagcttttcgaatcccagcctgcgcctatccgcgatgccatgatcccctccggcgcgcgcgtcatagtctgcgaggcgggagtgagattcggctgggaacgctgggcaaaaccccaggacatccattcgatagaacgctttggcgagtccggccctgcggaaaaactagccgagcatctgggaatgacggcggaagggctgctgaagataattaacaattga

SEQ ID NO: 5834 - protein, 274 aa, Unknown
  Obtained from environmental sample
  DOMAIN (156)...(268): Transketolase, C-terminal domain
  misc_feature (1)..(274): Xaa is any amino acid
MGLPAGAGTWTRDNXMGQYIHFGIREFAMAAICNGISLHGGLRPYCSTFMVFADYLRPALRLSALMKQPVIYVLTHDSILVGEDGPTHQPVEHLAGMRAMPGLLVLRPGDAEECAEAWAMAMEYTKGPVVLALSRQNITVFPKADPDWRNTIRVGAYIAKQVEGSDPEIVIIATGSEVNTALDVASKAADKKIRVVSMIGKELFESQPAPIRDAMIPSGARVIVCEAGVRFGWERWAKPQDIHSIERFGESGPAEKLAEHLGMTAEGLLKIINN

SEQ ID NO: 5835 - DNA, 537 bp, Unknown
  Obtained from environmental sample
  misc_feature (1)..(537): n is a, c, g, or t
atgactgtcaaatttggcacggacggctggcgcgataaaatggacggcgattttacaccggccaatgtagagcgcgtggcgcaagcctatattgattattataaaagtctgggcacggcagagaagggtttttttgtcggctacgaccaccgcgccgattccgaagttttcgcggccagaacggcggagattatcgcggccaacggctgcccggtgcggctggcggcggcggcttgtcccacgcaggtggtgtcttttgtcgtgcgcgaagagggtctggccggcggcgtgatgattaccgcctcgcataatcccccgcagtataacggttttaaaatcaaggagccgcagggttgttcttcttttccggcgaccacggataatataatgaaattgctggacaaaaatccggttcggaaaaacggcaaatatgaactgtacaatccgcgcgaggaatatttccgttatgtggaacagcgcattgattttgccaaaataaaaaagagcggtctgaagatttttattaatccgctgtag

SEQ ID NO: 5836 - protein, 178 aa, Unknown
  Obtained from environmental sample
  DOMAIN (2)...(140): Phosphoglucomutase/phosphomannomutase, alpha/beta/alpha domain I
  misc_feature (1)..(178): Xaa is any amino acid
MTVKFGTDGWRDKMDGDFTPANVERVAQAYIDYYKSLGTAEKGFFVGYDHRADSEVFAARTAEIIAANGCPVRLAAAACPTQVVSFVVREEGLAGGVMITASHNPPQYNGFKIKEPQGCSSFPATTDNIMKLLDKNPVRKNGKYELYNPREEYFRYVEQRIDFAKIKKSGLKIFINPL

SEQ ID NO: 5837 - DNA, 594 bp, Unknown
  Obtained from environmental sample
  misc_feature (1)..(594): n is a, c, g, or t
atgactctacggaacaaaatgacaagcgacagtaataacgcgtcttatggcgatgattcccccattgccgcttttgcgaccacacccggtaacagcgcgttaacgttgattcgctgttcgggaaaaggttcaatagaattagcgtcatcagtatttgcggcggcaaaaataaaaaataattcgcttcaagaggatacgtcgcctcttatgaccgcttctggaaacacggttattcacggctggattatctcaaatacaaaagaaaacgcgaatgataaaatagacgacgtacttatctctgtttttcgcgctccaaaaagttacacgggacaggatagtcttgacatttgctgtcatggcggtatgaccgccggaaaagccgtaatgaccgcgttaaaaagcgtaggtttccgtgacgcgcttcccggtgagtttaccttccgcgcctttatgaacggtaaactcgatcttacaaaagccgaatccgttatggaacttgtttcagcgaanacggaaacaagtcgccgccacgctgtcaatcgattatcaggttctttatacaacgaaatagacggtattaaaaactacttgtag

SEQ ID NO: 5838 - protein, 197 aa, Unknown
  Obtained from environmental sample
  misc_feature (1)..(197): Xaa is any amino acid
MTLRNKMTSDSNNASYGDDSPIAAFATTPGNSALTLIRCSGKGSIELASSVFAAAKIKNNSLQEDTSPLMTASGNTVIHGWIISNTKENANDKIDDVLISVFRAPKSYTGQDSLDICCHGGMTAGKAVMTALKSVGFRDALPGEFTFRAFMNGKLDLTKAESVMELVSAXTETSRRHAVNRLSGSLYNEIDGIKNYL

SEQ ID NO: 5839 - DNA, 1005 bp, Unknown
  Obtained from environmental sample
  misc_feature (1)..(1005): n is a, c, g, or t
ttgttnnnnnnnnnntttatcgccgggttacttgttgggattgatattaaaggagacacaagcaaggctcgtccaagccagccaaacccgcctccgccgacggttacggcggaatggtacgtctcggtaaacggcgcgaaaaaaggtccgttaacaagggctgatctggacgtaatgtttacatcaggggtgatagaccaaaaatcttatgtctggaagaacggcatgaaagactgggcggaagcagaaaccgttcaagagttgaaaaacactatcgccggactgccgcctccattgccgcaaaaacgtgtaacagtccaacgcccgataccaatcggttttgtaaacatacccgccggaattttcgtaatgggaagtcatgtcagcgagccagaacgacaaagctatgaaacccagcatcaggttacaataagcggtttttacatgggacagttcccggtaacacaggcagaatatgaagatataatgggaataaaccccagcaaattctataacggtggatattttccggttgaatgtgtaagctggtatgacgctatagagttctgcaacaagatcagccaaaaggaaagattaactccggcgtatacgataaacaaaaaccaaaaagatccgaataataaaaatccggaggatcgtgtaaaatggacggtaacatggaataaaaacgcaaatggctatcgtctgcccacagaagcggaatgggaatacgcctgccgcgcgggaacaacaacgccattcagtaccggaaacaacattacttcaaataaagcaaattatcagggtgatttccattataataatattcacgaaccggggcttgtttacattagaaataaaacaaccagagtagatagtttttcacctaacgcatggggtttatacgatatgcacgggaacgtagctgagtggtgctgggactggtttggaggttattttagcgggtcacagattgatccggcaggttcggcattcgggagctaa

SEQ ID NO: 5840 - protein, 334 aa, Unknown
  Obtained from environmental sample
  DOMAIN (110)...(334): Domain of unknown function (DUF323)
  misc_feature (1)..(334): Xaa is any amino acid
MXXXXFIAGLLVGIDIKGDTSKARPSQPNPPPPTVTAEWYVSVNGAKKGPLTRADLDVMFTSGVIDQKSYVWKNGMKDWAEAETVQELKNTIAGLPPPLPQKRVTVQRPIPIGFVNIPAGIFVMGSHVSEPERQSYETQHQVTISGFYMGQFPVTQAEYEDIMGINPSKFYNGGYFPVECVSWYDAIEFCNKISQKERLTPAYTINKNQKDPNNKNPEDRVKWTVTWNKNANGYRLPTEAEWEYACRAGTTTPFSTGNNITSNKANYQGDFHYNNIHEPGLVYIRNKTTRVDSFSPNAWGLYDMHGNVAEWCWDWFGGYFSGSQIDPAGSAFGS

SEQ ID NO: 5841 - DNA, 543 bp, Unknown
  Obtained from environmental sample
  misc_feature (1)..(543): n is a, c, g, or t
ttgttcaatgggccagatttcggcaaaacatccaaaccgatgatctccgaagaagagatcgcgcgcagggtcggtgagctggggcggcagatagagaccgactattcgggcaaggagttggtcgtcattggcctgctaaaaggcgtgtatccgttntttgccgatttgaccagggccatgnatttggatttccgccttggcttcatgagcgtctccagctatggctctgggcaggccagcagcggcgaagtgaaaatcatgcaggacatcgatgcccaggtctcgggcaaaaatgtgctgattgtcgaggacatcatcgacaccggcctgacgctatccaaagtgaaggaatacctgcaaggccattcccctgccggcgtccacatttgcgcgttgctggacaagcccgcccgccgcgtggtggatgtcacggttgactacatcgggttctccattcccgacaaatatattgtcggctacggcatggacgcggatggtctttacagaaacctgccattcatcggtgtctatagttccccatga

SEQ ID NO: 5842 - protein, 180 aa, Unknown
  Obtained from environmental sample
  DOMAIN (9)...(153): Phosphoribosyl transferase domain
  misc_feature (1)..(180): Xaa is any amino acid
MFNGPDFGKTSKPMISEEEIARRVGELGRQIETDYSGKELVVIGLLKGVYPXFADLTRAMXLDFRLGFMSVSSYGSGQASSGEVKIMQDIDAQVSGKNVLIVEDIIDTGLTLSKVKEYLQGHSPAGVHICALLDKPARRVVDVTVDYIGFSIPDKYIVGYGMDADGLYRNLPFIGVYSSP

SEQ ID NO: 5843 - DNA, 366 bp, Unknown
  Obtained from environmental sample
  misc_feature (1)..(366): n is a, c, g, or t
gtgctggatattctccgcgaccgtctgcctccaaagggcggtgcgcttcattgttattccgaagatgccgcttatgccgaaaaagcccttgagcttaatctgtatttttcttttgcgggaaatcttacgtataaaaacgcgaaaaatcttcacgaaacactttatgttttacccttagaccgcatattgatagaatcggaaagcccgttcatggttccggctgaacatcgcggcaaaagaaatatgcccaagtatctgccgctgaccgcccgttttatggcaaacatgcttgaaatggacgaagaggctcttgccgctcaactttgggaaaacgcgaataaatttttcggcttgccgagtgagtaa

SEQ ID NO: 5844 - protein, 121 aa, Unknown
  Obtained from environmental sample
  DOMAIN (1)...(117): TatD related DNase
  misc_feature (1)..(121): Xaa is any amino acid
MLDILRDRLPPKGGALHCYSEDAAYAEKALELNLYFSFAGNLTYKNAKNLHETLYVLPLDRILIESESPFMVPAEHRGKRNMPKYLPLTARFMANMLEMDEEALAAQLWENANKFFGLPSE

SEQ ID NO: 5845 - DNA, 423 bp, Unknown
  Obtained from environmental sample
  misc_feature (1)..(423): n is a, c, g, or t
atgatcgtagacaatacatttagcaaaactgttgatttgcttcaccggggattaagcgtcgctacgcttcgggaatccgtgattgccaataacctggcaaacgccgatgtccctaacttcaagcgcacggatgtgaactttgaaagcgagcttaagagggcgctggataccgaaaagcaaaagccggttttggagcttaaactgacccacccgaatcatatttcaaactggaaccccagggattaccaggaagtaaagccccggcgggtattggattaccttacgcagtcggacaacaacggcaacaacgtggatgcggaggaagaattcaacctgcacttaaaaaaccagcttaggtatatgctgatggcccaatccattgcgtttgagttcggtcaggtgagccaggcattaaggagttaa

SEQ ID NO: 5846 - protein, 140 aa, Unknown
  Obtained from environmental sample
  DOMAIN (11)...(41): Flagella basal body rod protein
  misc_feature (1)..(140): Xaa is any amino acid
MIVDNTFSKTVDLLHRGLSVATLRESVIANNLANADVPNFKRTDVNFESELKRALDTEKQKPVLELKLTHPNHISNWNPRDYQEVKPRRVLDYLTQSDNNGNNVDAEEEFNLHLKNQLRYMLMAQSIAFEFGQVSQALRS

SEQ ID NO: 5847 - DNA, 933 bp, Unknown
  Obtained from environmental sample
  misc_feature (1)..(933): n is a, c, g, or t
ttgaattggtcatcctttgcaaataaaacgttccaggacggtgaaccctggaaaaagcgtcagggcgattcgacggaacagcaaaaagcaaaagacctgataagggacctttcgtatgttgtgcgggatatagcggtgatgattcagccctatatgccccaggcggcggaacagattgcttctttcttcgggctttctcttggcaaagacctggtgtacacaaaagggcaggggaaactttcctgggacgaccttggaaaggacacgggccttgaacgagtcgtgaaaagcgaagtcctcttttcaaagctcgaagatgaaaaaatcgctgaactgcgcgaaaagtattcgggaagccaaaaggaacgcgctacctctggttctatgacctccggtacgatggctgcatccggctcaacggaaagcctggatattcgtttcgcgaaaaccattgatttacgcgtcgcccaaatcgtcaagattgagcgccatcccaaggcggaaaagctctacattgaaaccttgaaaatcgcgcccgacagtcaggaagaacgaattattgtatcaggactggttcctttttataaagaagaggagttgctcaacaaaaagataattcttgtcaataaccttaagcccgcaaaactacggggagttgaaagcaagggtatgcttcttgccgccgaagatcacaaggggccgccagacgccgatggtaacggcaccatgagggtcgaggtattggatgggggagatgcccctgttggaacgagggttatggttgaaggccttgaaagcatggaaacggaaactgaagttgcttcggaaatgatatcgataccttcttttcaatcctatggaaatcagggaaagcgtcgtaacggtcggcggcaaggccttaaccctgaaaagcaacccantaggacaaaatag

SEQ ID NO: 5848 - protein, 310 aa, Unknown
  Obtained from environmental sample
  DOMAIN (153)...(258): Putative tRNA binding domain
  misc_feature (1)..(310): Xaa is any amino acid
MNWSSFANKTFQDGEPWKKRQGDSTEQQKAKDLIRDLSYVVRDIAVMIQPYMPQAAEQIASFFGLSLGKDLVYTKGQGKLSWDDLGKDTGLERVVKSEVLFSKLEDEKIAELREKYSGSQKERATSGSMTSGTMAASGSTESLDIRFAKTIDLRVAQIVKIERHPKAEKLYIETLKIAPDSQEERIIVSGLVPFYKEEELLNKKIILVNNLKPAKLRGVESKGMLLAAEDHKGPPDADGNGTMRVEVLDGGDAPVGTRVMVEGLESMETETEVASEMISIPSFQSYGNQGKRRNGRRQGLNPEKQPXRTK

SEQ ID NO: 5849 - DNA, 615 bp, Unknown
  Obtained from environmental sample
  misc_feature (1)..(615): n is a, c, g, or t
ttggacctcacacagtcgatggaatcaatcgtcgaacagatgaaacctaagtggcgctataattgcaggcttgccgaaaaaaaaggagtaaaagtaagacaagcggagaaaagcgaaataactgttttttatgaactcctaaaagaaacctccaaaagagacagaatagcgatacatggctttgattattacaaggcgctttttgaaaacgaaatgccagaaataagactttaccttgccgaacatgaaggagacgtacttgcgggcattgtaacgctttttcgtggtattgacgctgtgtatctctatggcgcttcatctaacaaaaagcgaaacttaatgcccgcttacgcgcttcaactaaaggcaattgaagacgctaaaaattacggctgtaaaaaatatgacttttttggaatcccgccaggcaatgacaaatcgcattcaatgtcgggattatatcaatttaaaaccggcttcggcggcaagataattcatcgcccaggaagcttggattaccaatacaatcacatgatctatcgatttttcagagtcacagaaaatctgcgaggcactttaaagattcttaaaaaattcaataaacatcacaaataa

SEQ ID NO: 5850 - protein, 204 aa, Unknown
  Obtained from environmental sample
  DOMAIN (1)...(188): FemAB family
  misc_feature (1)..(204): Xaa is any amino acid
MDLTQSMESIVEQMKPKWRYNCRLAEKKGVKVRQAEKSEITVFYELLKETSKRDRIAIHGFDYYKALFENEMPEIRLYLAEHEGDVLAGIVTLFRGIDAVYLYGASSNKKRNLMPAYALQLKAIEDAKNYGCKKYDFFGIPPGNDKSHSMSGLYQFKTGFGGKIIHRPGSLDYQYNHMIYRFFRVTENLRGTLKILKKFNKHHK

SEQ ID NO: 5851 - DNA, 816 bp, Unknown
  Obtained from environmental sample
  misc_feature (1)..(816): n is a, c, g, or t
atgagggaggacgccggcaagctcgttcacgaccaagacgccgactcgctcttcgacgtgaaccgctgcggcagcccgctcatagagatcgtctccgagccggatatgcgcagcccgcaggaggcctacgcctacctcatggggctgaagcaaatattggagtacctcggcgtctgcgactgcaacatggaggagggcagtctgcgttgcgacgccaacatctcgctgcgcccgaagggtgaaagcaaactcggcaccaaaacggagatcaagaacatgaacagcttccgcaacctcgaaaaggcgctcgagtacgaggcgaagcggcaagaggaggtactgaggtcgggcggacacgtcgtgcagcagaccttcctgtggaacccgaacgaaaaccgctccgtcccaatgcgcacaaaggaggacgccgacgactaccgctacttccccgaccccgacctcacgccgctcgtcgtggaggcggcttgggttgacaaaatgagagagacgctgccggaactgccgtcgccacgccgccgtaggttcgaggacggctacaagatcaccccatacgccgccgaggtgctgaccggctcgcgcccgctcgccgactacttcgagcggtgcgtaagcggctgcgacgacgccaagtccgccgccaactgggtgatgacggacattatgcgtatgatgaacgacgcgaaaatcgagagcccgttcgatctgaagaccaaaccggaacggttgggagagctgataaaactgataaacaacnggcggcgtctcggcaaaggccgcaaaaaaagtttagactga

SEQ ID NO: 5852 - protein, 271 aa, Unknown
  Obtained from environmental sample
  DOMAIN (1)...(117): PET112 family, N terminal region
  misc_feature (1)..(271): Xaa is any amino acid
MREDAGKLVHDQDADSLFDVNRCGSPLIEIVSEPDMRSPQEAYAYLMGLKQILEYLGVCDCNMEEGSLRCDANISLRPKGESKLGTKTEIKNMNSFRNLEKALEYEAKRQEEVLRSGGHVVQQTFLWNPNENRSVPMRTKEDADDYRYFPDPDLTPLVVEAAWVDKMRETLPELPSPRRRRFEDGYKITPYAAEVLTGSRPLADYFERCVSGCDDAKSAANWVMTDIMRMMNDAKIESPFDLKTKPERLGELIKLINNXRRLGKGRKKSLD

SEQ ID NO: 5853 - DNA, 852 bp, Unknown
  Obtained from environmental sample
  misc_feature (1)..(852): n is a, c, g, or t
gtgtggagctatttgccagagtatgcaactncaagcggtcgcaaaagcgaaacagaaatgaacagagcngaagatactcaggggcagtggaatcattaccatacgggaaacgggcttgttagcaacacagtttggaatgtgctcgctcttggcaacgatttatggctcagtacgtttgcaggcattgaacgctatcacgcagcgcaaaatcaagttgcatttttttacgaaaaacttttgcccgttttaaacattccagatctctatcatatatacacgggagtcacttttccgcttggcgattggggaacttggggtttatttgtgaatttcataagctttggtgaaacttttgtttctgatgaaataaatttggagcaagagggcagttcttttaacagttccgaaacggttgtaggtttgagctatggaacaaagctgaacaagaattggggactaggactgagttttaaatttttctattctgcactcagttctggggcggcattgaatgagccagatgcaaccactgcgagctatgcaatagatattggcgttttggggcgtgacttgtttggcttgaacggctttagatttggtgcggtgcttgcaaacataggtcctaatgtttactatgtggaaaaatccaacaactatcccattcctttaacttggcgttttggtctctcttacgatttaataaaacttcccgaccatcgcataaccttgaacacagattacagcagaatggctatctacgaaaattccaaaggcgaggcagagcctttttacatttcttcttggaaatcttggttttatccagaaacggcagaatccggcgataatacttaa

SEQ ID NO: 5854 - protein, 283 aa, Unknown
  Obtained from environmental sample
  misc_feature (1)..(283): Xaa is any amino acid
MWSYLPEYATXSGRKSETEMNRAEDTQGQWNHYHTGNGLVSNTVWNVLALGNDLWLSTFAGIERYHAAQNQVAFFYEKLLPVLNIPDLYHIYTGVTFPLGDWGTWGLFVNFISFGETFVSDEINLEQEGSSFNSSETVVGLSYGTKLNKNWGLGLSFKFFYSALSSGAALNEPDATTASYAIDIGVLGRDLFGLNGFRFGAVLANIGPNVYYVEKSNNYPIPLTWRFGLSYDLIKLPDHRITLNTDYSRMAIYENSKGEAEPFYISSWKSWFYPETAESGDNT

SEQ ID NO: 5855 - DNA, 864 bp, Unknown
  Obtained from environmental sample
  misc_feature (1)..(864): n is a, c, g, or t
ttgcttcaatcggcggcgcgtatattctcaaacgccattctcagggcggaaacggagcgcagcgccaaagaggccatcaaagcgctgaaacgccgcgaaaaaatgctggatacgctgaacagggcggccgccatgtttctctcgcgaaatgaaaaaacgtttgaagacaccatgacggcgggcgtaaaggaaatcgccgacgtgttcgatctggacagactttcaatttggcgtaacttaaacaggcccgacgccatgcacgtgtcacagatataccgctgggcaagggaagccggcggcactacggaaccgacaaaagggctggaagatatcacctacacctggctcgcgccgcgatgggaaaaactttttgcctcaggcgaatccattaacagtccggtaaggcttctgccggaggcggaaaggctgcaatcatttggctgtgtatcggcgtttatcacgccgatttatatcaacaacgccgtatggggctttgcccttcttgaagaccgccgcaacgaacgcttttttgaggaagacagccttgaaatgatgcgctcagccatactcctgtgcgcgaataccgtcatacgcgccgagatggaacgcgagataacagacgctaacgaatttaaccgcgtcatccttgacgcttcgcctttgggttttaccgttttcgatgaaaatgcccgcgttattgactgtaatgatattgtttggaaaatattgggaaccacaaagaaatactatcttgagcatttttacgaattctcgcccaaataccagagcgatggggccttatccctggataaggcggttgaggtaattaagcgggcaattaacggcgaaaaacntggtatttga

SEQ ID NO: 5856 - protein, 287 aa, Unknown
  Obtained from environmental sample
  DOMAIN (53)...(196): GAF domain
  misc_feature (1)..(287): Xaa is any amino acid
MLQSAARIFSNAILRAETERSAKEAIKALKRREKMLDTLNRAAAMFLSRNEKTFEDTMTAGVKEIADVFDLDRLSIWRNLNRPDAMHVSQIYRWAREAGGTTEPTKGLEDITYTWLAPRWEKLFASGESINSPVRLLPEAERLQSFGCVSAFITPIYINNAVWGFALLEDRRNERFFEEDSLEMMRSAILLCANTVIRAEMEREITDANEFNRVILDASPLGFTVFDENARVIDCNDIVWKILGTTKKYYLEHFYEFSPKYQSDGALSLDKAVEVIKRAINGEKXGI

SEQ ID NO: 5857 - DNA, 300 bp, Unknown
  Obtained from environmental sample
  misc_feature (1)..(300): n is a, c, g, or t
atgaacaattttgtctttagggtgaagccggcgggtaatatgtatgtttttaccgaatttgaactctccgaccgcccctattacccaaacataccccaggtgcccgccctatgggatgagacgcttcccttttcagggtacatggacagcataacgctcggccccggcgagtatttcgttgtttccgatgaccgcggcaattcaggcgattcacgcacatgggggccggttaacgcgaagaaattactgggaaagcccgtattccggttctggcccatccagcgaatcggccagccttag

SEQ ID NO: 5858 - protein, 99 aa, Unknown
  Obtained from environmental sample
  misc_feature (1)..(99): Xaa is any amino acid
MNNFVFRVKPAGNMYVFTEFELSDRPYYPNIPQVPALWDETLPFSGYMDSITLGPGEYFVVSDDRGNSGDSRTWGPVNAKKLLGKPVFRFWPIQRIGQP

SEQ ID NO: 5859 - DNA, 321 bp, Unknown
  Obtained from environmental sample
  misc_feature (1)..(321): n is a, c, g, or t
atgaggcgaagcgttctttgcgtaacggcgctgtttgtcttcttttctttttcagctttttcccagaatacgctttacaaacctttttcgtcttttcggtttgttcaaacggaacattttgacattatcttcccgaaagaatccgagccttccgcccgtcttttggcttcttttgcggacagcgtctatgatcaagtaagctccctgctgggcattgaagtaagcggccgcattcccgtaacattttctcctcacacggattcattcaacggttattacagtcagttctttaaccatattgtgctttacgaacgccgctga

SEQ ID NO: 5860 - protein, 106 aa, Unknown
  Obtained from environmental sample
  SIGNAL (1)...(21)
  misc_feature (1)..(106): Xaa is any amino acid
MRRSVLCVTALFVFFSFSAFSQNTLYKPFSSFRFVQTEHFDIIFPKESEPSARLLASFADSVYDQVSSLLGIEVSGRIPVTFSPHTDSFNGYYSQFFNHIVLYERR

SEQ ID NO: 5861 - DNA, 546 bp, Unknown
  Obtained from environmental sample
  misc_feature (1)..(546): n is a, c, g, or t
gtgggctgcgccgtgcttattcagaagtttaagccttcctgcgttatcaatacaggttccgccggcggcattgatccgtcgctgaaagtgggagacgcggttatttccaccggccttatttatcacgatgtcgacgttacggcgtttaactatcttcccggccagcttccccgccagccgcaaatttttcctgtggacgaaaaattaataaagctcgcggaaaaatccgtagacgaattaaagaaagaaaaagcgcttcccgaaacttttaattattgcgggggcataataggatcgggcgacgcttttatgcacaagcctgaacacatagcggaagtacgccgtgttttcccgaatatcgccgcggttgaaatggaaggcgccgctattgctcacagctgccatttattttccgtccccgttcttgttatccgcgcgctttcagacgtcgcgggcacggaatcgccggtaacccatgacgaatttctgcctattgcttccaaacattccgcagagatagtgataaggatagtccgcgggctgtaa

SEQ ID NO: 5862 - protein, 181 aa, Unknown
  Obtained from environmental sample
  DOMAIN (2)...(178): Phosphorylase family
  misc_feature (1)..(181): Xaa is any amino acid
MGCAVLIQKFKPSCVINTGSAGGIDPSLKVGDAVISTGLIYHDVDVTAFNYLPGQLPRQPQIFPVDEKLIKLAEKSVDELKKEKALPETFNYCGGIIGSGDAFMHKPEHIAEVRRVFPNIAAVEMEGAAIAHSCHLFSVPVLVIRALSDVAGTESPVTHDEFLPIASKHSAEIVIRIVRGL

SEQ ID NO: 5863 - DNA, 498 bp, Unknown
  Obtained from environmental sample
  misc_feature (1)..(498): n is a, c, g, or t
atgagcagcagcggaaaaggcggaaataaccgcaggtcccggcatcgatattccggccgtaaagacgagccggcaaagcacgataaaaaaagaaatcccgataactttcttgcaaacgataaatccgaaaaaaaccagtcaagcatgcatgagcgtcttcagtggacggcgcctatactgcccgccaattatcaaagcattacccccgaatgtccctggtgcggaaaacagataaaggacgttaactgcgccatcgcggataaagagacaggccgtcccgttcattttgactgcgtgctcgcgcgcattacggacatggtttctctggaaacaaacgacgccgtttgttacataggcggcgggcgcttcggcgtaatccattataacaatccgccggatataaaggactttttcataaagagaattattgagtgggaagtgaaagataacagcaccgattggcgtatgcctataagcgaatatttttcgattacctga

SEQ ID NO: 5864 - protein, 165 aa, Unknown
  Obtained from environmental sample
  misc_feature (1)..(165): Xaa is any amino acid
MSSSGKGGNNRRSRHRYSGRKDEPAKHDKKRNPDNFLANDKSEKNQSSMHERLQWTAPILPANYQSITPECPWCGKQIKDVNCAIADKETGRPVHFDCVLARITDMVSLETNDAVCYIGGGRFGVIHYNNPPDIKDFFIKRIIEWEVKDNSTDWRMPISEYFSIT

SEQ ID NO: 5865 - DNA, 900 bp, Unknown
  Obtained from environmental sample
  misc_feature (1)..(900): n is a, c, g, or t
atggcaaaagtaaaaacaaattggtttatagtaattatgttatggcttgcaggaattgcggcagctatgcaatttgcaaaattttcttttgcctttgattttctgaaaagtcaatataacgtcaaccccttttggatcggcctgtctttgtctattgtgggtttaatcggattgattttcggaataacaataagtatatacatctctagaatcaggcacaatagggtacttctaataagcttgttattaggcgtcttcatttctgttatacaatcgttaaatccaatttttccgatagtatttatctccagaatattggaaggcgtctcccatttgggaattgtggttacagccccgataattatgatattattatcttcagaaaaacatcattcactcgtaatgggcttgtggggtagtttttttggcatcgcgttttctgttacggcatgggcaggaaaaccgatcatggaattatattccgtttctgggctgtttttaattcacgcgatactgctatttgtaatatttttaatcttgtttttctcgataaggaaactggatattccgcaaaatgaaaataataaaatatcgtttttaaacgcgcatataaaagtttactcaaattggagagcggtctctcctggaatactttttttctttcatacttttatgtatatcgcgttattcacatttttaccaagattatctgaagatgaaaacactaaaaatttattgttggttattctgcccttaataagcattattggtacgatgatagccggaataatttcgcaatattttgtctcgccctcaaaattaagcgttgtcgcatatatatcattgttggtattgattttcgtagttaaattatcattcaataatctcggccgattctga

SEQ ID NO: 5866 - protein, 299 aa, Unknown
  Obtained from environmental sample
  SIGNAL (1)...(22)
  DOMAIN (14)...(294): Major Facilitator Superfamily
  misc_feature (1)..(299): Xaa is any amino acid
MAKVKTNWFIVIMLWLAGIAAAMQFAKFSFAFDFLKSQYNVNPFWIGLSLSIVGLIGLIFGITISIYISRIRHNRVLLISLLLGVFISVIQSLNPIFPIVFISRILEGVSHLGIVVTAPIIMILLSSEKHHSLVMGLWGSFFGIAFSVTAWAGKPIMELYSVSGLFLIHAILLFVIFLILFFSIRKLDIPQNENNKISFLNAHIKVYSNWRAVSPGILFFFHTFMYIALFTFLPRLSEDENTKNLLLVILPLISIIGTMIAGIISQYFVSPSKLSVVAYISLLVLIFVVKLSFNNLGRF

SEQ ID NO: 5867 - DNA, 828 bp, Unknown
  Obtained from environmental sample
  misc_feature (1)..(828): n is a, c, g, or t
ttgccaagatcaagtgtccgcaggaaaccctggcaaatatggtttcgcggaatatcccccggcatttcagctaacgctatgaaaaaacgcattgtaatcgcccttgggggcaacgccctcggggataacctgaaagaacagatggaagcggccagggtaacttccggcgccatagtggatctggttgaagaaggccacgagatcgttgtggttcacggcaacggcccccaggtggggatgatcgaaaccgcctttgagacagccgcaaaagccgacaggcattttccggttctgccaatgtcggtctgcgtagcccttagccagggttatatcggctacgatctgcagaacacaatccgtatggaacttgacaacagaaaaatgaaaaaacaggtcgccacaattattacgcaggtcgaggttgatccggctgacaaggcctttgaaaatccgaccaagcccataggcggctttatgagcaaagaagacgctgagattctcaagtccaaaggcgttccggtgatggaagacgcgggcagaggctggcggcaggtagtggcttccccaaaaccggttaatattatcgaagcggaaactatcaaggcgctgctggccgccggtcatatccccattgccgctggtggcggtggaattcctgtcgccatgaaggacggccagtaccggggcatgagcgccgtaatcgacaaggatttttccgcggccaaactcgcggagcttattaacgccgacatgctgatcatattaaccgcggttgagaaagtcgcggttaactttggcagccggatcaaaagtggctggacagcatga

SEQ ID NO: 5868 - protein, 275 aa, Unknown
  Obtained from environmental sample
  DOMAIN (29)...(275): Amino acid kinase family
  misc_feature (1)..(275): Xaa is any amino acid
MPRSSVRRKPWQIWFRGISPGISANAMKKRIVIALGGNALGDNLKEQMEAARVTSGAIVDLVEEGHEIVVVHGNGPQVGMIETAFETAAKADRHFPVLPMSVCVALSQGYIGYDLQNTIRMELDNRKMKKQVATIITQVEVDPADKAFENPTKPIGGFMSKEDAEILKSKGVPVMEDAGRGWRQVVASPKPVNIIEAETIKALLAAGHIPIAAGGGGIPVAMKDGQYRGMSAVIDKDFSAAKLAELINADMLIILTAVEKVAVNFGSRIKSGWTA

SEQ ID NO: 5869 - DNA, 426 bp, Unknown
  Obtained from environmental sample
  misc_feature (1)..(426): n is a, c, g, or t
atgacaaaagttgttaataaattttgtattttcaccggcgcgctcgtgctgattgtagccggtttttccccgaagattggcgctgttttttccgttatgccttccagcgttctgggcggcgcggtagttaccgtattcgccatgattatgctgaacggcatgaaactatgcgccaaggccggctttaccgacagaaacctgttgatcctcgccattaccttcggcgtgggatacgccataggggataacaaaacacttgtagcgcatttgcctgcggctttacagtatgttttcaaggataccacagtcgccgtgtgcgtcatttcagttattttgaatctcgtttttcctcttccgcctgaagaacggcagagattgcaaaaagagcaggatgaagccgccgcgaaagagttgaaacaaggctaa

SEQ ID NO: 5870 - protein, 141 aa, Unknown
  Obtained from environmental sample
  SIGNAL (1)...(27)
  misc_feature (1)..(141): Xaa is any amino acid
MTKVVNKFCIFTGALVLIVAGFSPKIGAVFSVMPSSVLGGAVVTVFAMIMLNGMKLCAKAGFTDRNLLILAITFGVGYAIGDNKTLVAHLPAALQYVFKDTTVAVCVISVILNLVFPLPPEERQRLQKEQDEAAAKELKQG

SEQ ID NO: 5871 - DNA, 408 bp, Unknown
  Obtained from environmental sample
  misc_feature (1)..(408): n is a, c, g, or t
gtgctggattcgctttccgagacagcgcagaagacgctttcaaatctaattaccttgctgtttggcattactgtcgccttanccatgcaggccgaaaagtttatcacggttcaaactctcatgatactgggattgggccttgcggcgtttatccttgataccgcgggaggggtgtttttcgcgaagtttttgaatcttttccttaaaacaaagatcaaccccatgattggcgcgacaggcatttccgcctttcccatgtcggcgcgggtgatacagaaaatagcgctaaaggaagaccctacaaatattttcctgatgcatgcgataagcgccaatgtttcaggccagatttgttcggtagcggctgcaggacttgttttaagccttgttatgccgtaccttcaatag

SEQ ID NO: 5872 - protein, 135 aa, Unknown
  Obtained from environmental sample
  DOMAIN (1)...(131): Na+-transporting methylmalonyl-CoA/oxaloacetate decarboxylase, beta subunit
  misc_feature (1)..(135): Xaa is any amino acid
MLDSLSETAQKTLSNLITLLFGITVALXMQAEKFITVQTLMILGLGLAAFILDTAGGVFFAKFLNLFLKTKINPMIGATGISAFPMSARVIQKIALKEDPTNIFLMHAISANVSGQICSVAAAGLVLSLVMPYLQ

SEQ ID NO: 5873 - DNA, 693 bp, Unknown
  Obtained from environmental sample
  misc_feature (1)..(693): n is a, c, g, or t
atgcagaatgtggggctggactacctaagtcttgaaagaaaagcctctactctctccggcggcgaagcccaaaggatacggctcgcgacgcagattggctcgagccttgtgggggttctctacatcctggacgaaccttccatcgggcttcaccagcgggacaaccagcgcctgatagacacactgctctacctgcgcgacctgggcaacacgctgattgtggtcgagcatgacgaacaaaccttacgcacggccgaccatatcgtggatttggggcccggcgcgggcgttcacggcggatatgtcgtcgcgcagggacgcccggaaaatataatgaaagtgaaggaaagctatacggggcagtatctgtcgggcgcgattagcatggcggttccgaaagacaggcgcaaaggcaacgggtctttcttaaaaatcaagggggcgggcgagcataaccttaaaaacatcaatgtggaaattccgcttggctcctttacctgtataacgggggtttcaggctccggcaagtctaccctgctctccgacgttttgtaccccgccctcgctaacaaaattaacggctctaaccataccgaaggcgcgtataaaaaaattgagggcgccgaatttatcgacaagataatcgacatagaccaaagccctataggaaggacgccgcgctcaacccgataa

SEQ ID NO: 5874 - protein, 230 aa, Unknown
  Obtained from environmental sample
  DOMAIN (1)...(94): ABC transporter
  misc_feature (1)..(230): Xaa is any amino acid
MQNVGLDYLSLERKASTLSGGEAQRIRLATQIGSSLVGVLYILDEPSIGLHQRDNQRLIDTLLYLRDLGNTLIVVEHDEQTLRTADHIVDLGPGAGVHGGYVVAQGRPENIMKVKESYTGQYLSGAISMAVPKDRRKGNGSFLKIKGAGEHNLKNINVEIPLGSFTCITGVSGSGKSTLLSDVLYPALANKINGSNHTEGAYKKIEGAEFIDKIIDIDQSPIGRTPRSTR

SEQ ID NO: 5875 - DNA, 906 bp, Unknown
  Obtained from environmental sample
  misc_feature (1)..(906): n is a, c, g, or t
ttgtgctgctttggcagtatgcggcagccgaagcataccttcgatcccttttttgggcgggcttttaacggcattgcatccggtatgctggtgctgggcattctgtcccctcttgagcatttgctgaatgcggcgacagcctttaggcttattgagctttcggatcttaacgctccgattctaaggcgactctttaccgtagcccccggtacctacagtcattccattatggtagccaatcttgccgaggcggcttgccaggacattggggccaattccattcttgccagggttggggcctattaccacgacatagggaagatggataaccccggatactttgtcgaaaaccagactgattataacccccatgacgaaatgccgccaaagctttcggcaaccgtgatacgcagccatgtaaaacttggggttgagaaagcaaggcagttggggctgccggacgatgtaatcgatattatcgccgagcatcacggcaattcggtgattacctggttttacagtaaagcgcttaagcaggataatcccaaaaatcctgtcgtaaatatggaagattaccgctatccggggaacccgcctcattcgcgggaaagcgctgtggtaatgctggcggatctaagcgaagctgcgacccggtctataagcaaacccaacgcggtaaaaattgaaaagtttataaaggagcttatcgcgaataaagtggattacgggcagctctcccagtcggaactgacatttcgcgatcttgagataattgaaaacgcttttgtcagggttttggcaggttactaccattcaagaatcgaatatcccaaaattaatcttcaacaaatagagaataataataacaatgccgcttctgaaaacgaaaaggccgcagcagaatga

SEQ ID NO: 5876 - protein, 301 aa, Unknown
  Obtained from environmental sample
  DOMAIN (71)...(216): HD domain
  misc_feature (1)..(301): Xaa is any amino acid
MCCFGSMRQPKHTFDPFFGRAFNGIASGMLVLGILSPLEHLLNAATAFRLIELSDLNAPILRRLFTVAPGTYSHSIMVANLAEAACQDIGANSILARVGAYYHDIGKMDNPGYFVENQTDYNPHDEMPPKLSATVIRSHVKLGVEKARQLGLPDDVIDIIAEHHGNSVITWFYSKALKQDNPKNPVVNMEDYRYPGNPPHSRESAVVMLADLSEAATRSISKPNAVKIEKFIKELIANKVDYGQLSQSELTFRDLEIIENAFVRVLAGYYHSRIEYPKINLQQIENNNNNAASENEKAAAE

SEQ ID NO: 5877 - DNA, 804 bp, Unknown
  Obtained from environmental sample
  misc_feature (1)..(804): n is a, c, g, or t
atggtgattattcccatcgccctattcatgaccttgcccatagtctatatcataaaccaggcatttaaacccctggatgaaattttccgctttccccctacgtttattgtgcgtcgtcccaccatgcaaaatttccgcatgattttgactcttacttccaatacgggcattcctatgtcccgcttccttattaacactgtcattattactgttttaaccgttgttttatccattttaattaccgctatgtcggcctacgccttttccaagaaaaaattcagaattaaagaatggctgttcaggctgaatcaggccgcgctgatgtttgtacccgcagcggtgagcatcccaaggtatttgattatcgttaaattggggcttaacaataattttctggtgcatattttgccgatccttgcaatgccggtaggcttgtttttggtaaagcaattcgtagaccaggtgccggattctttaattgaatccgcaagaatagatggcgccggggaattcctggttatgtttaagatcgtattccctcttataaaacccgcccttgccacggtgggtatcctctgcttccagatagtatggggcgcaacggaagcttccaatttatatttagtggatgatacgttaaaatcctttgctttttatttaagtaccctggccaccctgaatacgccagccatggccggggtgcaggcggcggcttcgctcattatgtttttgcccaatttgattatttttatcgccatgcaatcaagggttatgaataccatgagccattcgggtattaagtaa

SEQ ID NO: 5878 - protein, 267 aa, Unknown
  Obtained from environmental sample
  DOMAIN (59)...(262): Binding-protein-dependent transport system inner membrane component
  misc_feature (1)..(267): Xaa is any amino acid
MVIIPIALFMTLPIVYIINQAFKPLDEIFRFPPTFIVRRPTMQNFRMILTLTSNTGIPMSRFLINTVIITVLTVVLSILITAMSAYAFSKKKFRIKEWLFRLNQAALMFVPAAVSIPRYLIIVKLGLNNNFLVHILPILAMPVGLFLVKQFVDQVPDSLIESARIDGAGEFLVMFKIVFPLIKPALATVGILCFQIVWGATEASNLYLVDDTLKSFAFYLSTLATLNTPAMAGVQAAASLIMFLPNLIIFIAMQSRVMNTMSHSGIK

SEQ ID NO: 5879 - DNA, 906 bp, Unknown
  Obtained from environmental sample
  misc_feature (1)..(906): n is a, c, g, or t
ttggtctctatgnccgtttcctcgcaggcccatatatgggcattggacggcgaaaaggcgtttttgcaaagctacacccccaccgaatataccgaggccatataccgcgcccaacggctttttaacgagggccattatgtggaagccgggaaagaatggaataatgtcctgcgttttaaccaaatgtccgtactggcccataacggtttgggcaagtcctatttataccaggaggaatatgaaaatgccaggtacgaattttttgtagccggcaaccggggatattatagtcaggctttttgggaaacaagaaatatctggctgttaggcaatattccctatatactgattttattcgtgctttttttcgcgggttcattcgtattaaaactggcggacaagaaccaaattttaaaaacagcaattaaaaaaaatatacatacattaatgaacgcaaaatatatcgatacaaccctgttctctttttctatcgcaaggcatccgatggacagtttctattatttaaaaaagaaacaaaaaggctctttgcccggggcgtttgtcaattttgtttttttcttcctggcatatatggtttatcagacttccaaaggctttatcgtacagttcatagaaattgaggatatggatttcaatgtgatcatcggcggctttatcggaatctacattttatttgttttctgcaattaccttgtaacctccattaacgacggagaaggcaatatagacgatatttttaagctggtttcctactccatgttaccgatttccgttgctttattggctgtaacgctggtttcacatgcaacgaccgaaaacgaaaccttcctgcttgtttttatgttaataggcggcttcgcatggagcggaacctcggccatctga

SEQ ID NO: 5880 - protein, 301 aa, Unknown
  Obtained from environmental sample
  misc_feature (1)..(301): Xaa is any amino acid
MVSMXVSSQAHIWALDGEKAFLQSYTPTEYTEAIYRAQRLFNEGHYVEAGKEWNNVLRFNQMSVLAHNGLGKSYLYQEEYENARYEFFVAGNRGYYSQAFWETRNIWLLGNIPYILILFVLFFAGSFVLKLADKNQILKTAIKKNIHTLMNAKYIDTTLFSFSIARHPMDSFYYLKKKQKGSLPGAFVNFVFFFLAYMVYQTSKGFIVQFIEIEDMDFNVIIGGFIGIYILFVFCNYLVTSINDGEGNIDDIFKLVSYSMLPISVALLAVTLVSHATTENETFLLVFMLIGGFAWSGTSAI

SEQ ID NO: 5881 - DNA, 411 bp, Unknown
  Obtained from environmental sample
  misc_feature (1)..(411): n is a, c, g, or t
gtgatactggtgctggtgtatatgtacctgccctacgcgatactgccgttgttttccagcatagacaaattcgatttttccctgctagaggccgcgcgtgatctgggggcgggcaagcttaccgccctgatcagggtgatgctgcccaatatacggggcggtatttttacggcggtgctgtttacgtttattcccatttttggcgcttacgccgtgccgctcctggtgggcggcaaggattcctatatgcttgggaatatcatcgccgaccagttgtccaagtcgcgcaactggccccgcgccgcggcgatttccatggtgcttaccgtggtgaccacagtgggcgtgctgctgatgatgaatgtccagaagcgtgacgcttcacggctgacggaggcgaagaaatcatga

SEQ ID NO: 5882 - protein, 136 aa, Unknown
  Obtained from environmental sample
  misc_feature (1)..(136): Xaa is any amino acid
MILVLVYMYLPYAILPLFSSIDKFDFSLLEAARDLGAGKLTALIRVMLPNIRGGIFTAVLFTFIPIFGAYAVPLLVGGKDSYMLGNIIADQLSKSRNWPRAAAISMVLTVVTTVGVLLMMNVQKRDASRLTEAKKS

SEQ ID NO: 5883 - DNA, 666 bp, Unknown
  Obtained from environmental sample
  misc_feature (1)..(666): n is a, c, g, or t
gtggggcggctcttggatttgccnaacagactcgtccagggcggctaccttcccagcgcgttcgagttctgggatcctgccgtcctggacgttttgaggcaccaaggcccgccagaggcccgcagactgcccggcgaggcactggccatcattgagttcgatgacgccggctgccagagcgacgcctttttgggcggcgtggcggatgcactcggccgaatgtccgagcacgtccaagtggccgcggacgaggcccagcggagctacatctgggacatcaggaggcagaccagcacagtgctaaaggagctataccccaaaaagataagcgaggacgtggccgtgcccaggtctaggataggcgacttcttcgagggggcaaaaaggctgggtctgccgattgtcacctatggccacctaggcgacggcaacctgcacgtcaactttctgctggagggcggcggtggggccgaaaaggacatagaggccctgttccgcctcgcgctgggtctgaacggcacaatcaccggcgagcatggtctgggcctcgccaagcgggaagccttcctgaaactggccgacccttggcaggttggggctatccgcgccctaaaaaaggcacttgacccatgcggtatattcaacagggggaaggccgctggctag

SEQ ID NO: 5884 - protein, 221 aa, Unknown
  Obtained from environmental sample
  DOMAIN (7)...(219): FAD linked oxidases, C-terminal domain
  misc_feature (1)..(221): Xaa is any amino acid
MGRLLDLPNRLVQGGYLPSAFEFWDPAVLDVLRHQGPPEARRLPGEALAIIEFDDAGCQSDAFLGGVADALGRMSEHVQVAADEAQRSYIWDIRRQTSTVLKELYPKKISEDVAVPRSRIGDFFEGAKRLGLPIVTYGHLGDGNLHVNFLLEGGGGAEKDIEALFRLALGLNGTITGEHGLGLAKREAFLKLADPWQVGAIRALKKALDPCGIFNRGKAAG

SEQ ID NO: 5885 - DNA, 870 bp, Unknown
  Obtained from environmental sample
  misc_feature (1)..(870): n is a, c, g, or t
gtgctgctggtttttccgggccttgacggatatttgcataacggcccctttttgggcgtaaccgtagggcgttttgccaaccgcatcggggggagcagtttctccctggacggtaaaacctgccggctggacaataacgataacggcaataccctgcacggcggataccgggcttttgacaagatgctctggaaatccgaagcctacgaggaaagcggcggcgtttttgtgcgcttcaaattggacagccctgatggtgacggcgggtttcccggaaatcttaaagccgtcgtcacctacggcatcaccaaagcaaatgagattatcgcccggtatgaagcaaaggccgatgctcctaccccggtcaacctgactaaccatgcgtactttaacttggcgggggagggatcaggctccatacattcgcatgaactctgcctgtattcttcgtcgtatgttgaaattgatgataaattaatcccttcaggccgattgattcccgtgcgcgacagctctttcgatttcagaaaccgcaagccttttttgcgggaccgggaagaggggtacgatcactgttttaccattgacggagatccgggaaaactccgcccttgcgccgaagtttttgaagcgggcagcggcagaaccatgaaagtgtataccacccaacccggcgttcagttttatacgggcaatatgctgcccggtatttccggcaaggctggcgcggtatacgccaaacataccggtttttgcctggaaacccagcattttcccgactccccgaatcaacccgattttccttcatgcatattcggaccggatcgggactaccgcgaaaaaacagttttcgtctttgatgttagctga

SEQ ID NO: 5886 - protein, 289 aa, Unknown
  Obtained from environmental sample
  DOMAIN (1)...(285): Aldose 1-epimerase
  misc_feature (1)..(289): Xaa is any amino acid
MLLVFPGLDGYLHNGPFLGVTVGRFANRIGGSSFSLDGKTCRLDNNDNGNTLHGGYRAFDKMLWKSEAYEESGGVFVRFKLDSPDGDGGFPGNLKAVVTYGITKANEIIARYEAKADAPTPVNLTNHAYFNLAGEGSGSIHSHELCLYSSSYVEIDDKLIPSGRLIPVRDSSFDFRNRKPFLRDREEGYDHCFTIDGDPGKLRPCAEVFEAGSGRTMKVYTTQPGVQFYTGNMLPGISGKAGAVYAKHTGFCLETQHFPDSPNQPDFPSCIFGPDRDYREKTVFVFDVS

SEQ ID NO: 5887 - DNA, 858 bp, Unknown
  Obtained from environmental sample
  misc_feature (1)..(858): n is a, c, g, or t
atgaattccatcacccttaaaggtaccgcttatcattttaacaagcggcttttcgagttgaagccccatgcgggacaggctctggcggcggaaaaaatacgcgtcagtctgccggaggaaaatcagggtgcgcttgccgcccccgcccggattcaagatatgtattcgatccgctgcgctccccatgtgattggtttgttctacgatatgcgcgataccttgcgtaattttatcgagaccgaaatgaacagcgccaacgataatcccctcattgatcctgaaacccaatcggtataccacggcgggcatttctacggcggtcacatctgcttcgccatggattcactgaaaaacatcatcgccaatatcgcggatttactggacaggcagcttgcgctgatcgtggataccaagtacaaccgggggcttccgccaaacctcaccgggaccttgggcgctattgcctgcaatcacggattcaaggccgtgcagattgccgtttccgcctggactgccgaagcgctgaaaaacacaatgcccatgagcgtattctcccgttccaccgaatgtcacaatcaggacaaggtaagtatgggaactattgccgcccgcgactgtgtgcgaatcaacaaactgaccgcgcaggtaagcgccgccctgctgttagcgtcttttcaggccattgacctcaggttaaaaaagggcgaacttaaacccggcgacctgggacaaacggaaaaaacgtataacgaaattgccgctttcttcaaaccgctggaagacgaccgcccgctggaagacgatctgcgcaagacgctgaaattaatagaggaacggcatttttgcctgcgcccatga

SEQ ID NO: 5888 - protein, 285 aa, Unknown
  Obtained from environmental sample
  DOMAIN (3)...(261): Phenylalanine and histidine ammonia-lyase
  misc_feature (1)..(285): Xaa is any amino acid
MNSITLKGTAYHFNKRLFELKPHAGQALAAEKIRVSLPEENQGALAAPARIQDMYSIRCAPHVIGLFYDMRDTLRNFIETEMNSANDNPLIDPETQSVYHGGHFYGGHICFAMDSLKNIIANIADLLDRQLALIVDTKYNRGLPPNLTGTLGAIACNHGFKAVQIAVSAWTAEALKNTMPMSVFSRSTECHNQDKVSMGTIAARDCVRINKLTAQVSAALLLASFQAIDLRLKKGELKPGDLGQTEKTYNEIAAFFKPLEDDRPLEDDLRKTLKLIEERHFCLRP

SEQ ID NO: 5889 - DNA, 420 bp, Unknown
  Obtained from environmental sample
  misc_feature (1)..(420): n is a, c, g, or t
atgctgacaattccgcctaaacggtcggttcgtttttttaataccacaggtccgtgtaatccatgggatcactatatgctgcccccggcggatcgccttgttggcgcccagttggatcgttatattggggataaactgtactgggtgctgcacgccccgcggcagaccggcaaaacgacatttttatataattggatgagggagataaattccgcaaatgaggtagtagcctgttatgtcagtctggaaacatgccagggcattaccagacgggcggaagccatgataaccatgcacaaggcgatctgtgaatcagcccgcgtgtataaaatgcctgttcccgatcttcccctgaataatcctgaactgctgctctacgaaacaatgcggaaatgggcggaactatctcggccaatctga

SEQ ID NO: 5890 - protein, 139 aa, Unknown
  Obtained from environmental sample
  misc_feature (1)..(139): Xaa is any amino acid
MLTIPPKRSVRFFNTTGPCNPWDHYMLPPADRLVGAQLDRYIGDKLYWVLHAPRQTGKTTFLYNWMREINSANEVVACYVSLETCQGITRRAEAMITMHKAICESARVYKMPVPDLPLNNPELLLYETMRKWAELSRPI

SEQ ID NO: 5891 - DNA, 435 bp, Unknown
  Obtained from environmental sample
  misc_feature (1)..(435): n is a, c, g, or t
atgagcaaccttcatgcggctatcggattggcgcagacagaaaaggcggattattatagaaatttacgaattaaaaataatcagctttatagaaaatatctttctggatgcgatggtatcctgtttcaaaaagatgaagaaaatactttaaactgcaactggatgaacgcaatactgatacaaccggaagaatacgggaaaacacgggatgagttaatttcttttctaaaagagaacggcatagaaacccgcttgttatttaacggcatgcataaacaaaaagcgcttgctgactatggatgtgattgtaaggcagaatatccggtaactgattggttatctgagaacggcttttatcttccctccggcagcggattaaccgaattggatatagcgcggatatgtgaattgattatagcgtttaaaaaggattaa

SEQ ID NO: 5892 - protein, 144 aa, Unknown
  Obtained from environmental sample
  misc_feature (1)..(144): Xaa is any amino acid
MSNLHAAIGLAQTEKADYYRNLRIKNNQLYRKYLSGCDGILFQKDEENTLNCNWMNAILIQPEEYGKTRDELISFLKENGIETRLLFNGMHKQKALADYGCDCKAEYPVTDWLSENGFYLPSGSGLTELDIARICELIIAFKKD

SEQ ID NO: 5893 - DNA, 642 bp, Unknown
  Obtained from environmental sample
  misc_feature (1)..(642): n is a, c, g, or t
gtgcgctcggcgctgggcctgcagtcgcgcccctcaaccgctgttcccggccttgacccatcaacccttcccgcgcgtccgccgcagctctgcaaaggctgtccccacgcggacagttatgaatccattaaaaaagcggtggaggaactggatccgcggcccggccatcccgacgtggggatcaactcggacattggctgttattcgctgggcgccgcgccgccgtaccaggttcccgaaagcatagtctgcatgggcgcgtcggtcggcatggcaaaaggcgcggctgacgcggggctgccctacagcatcgcggtaatcggcgactccacattcatacattccggcataaccgcccttattgatacagttgcatctaacacccccatgacccttatcatacttgacaactctatcgtggcaatgacgggctgccaaccgaccatggttccctcggaaagccttcgcgccctgctcctcggctgcggggtaaagccggaacatctgctggaactggaagcgagaaagcagcttgtcgatgagaactcaagcaggcttaaagcggaaattgaataccgcggcctttcggtggtggtattcaaacgcgagtgtctggaagcggcgaggaaagcgcggaaataa

SEQ ID NO: 5894 - protein, 213 aa, Unknown
  Obtained from environmental sample
  DOMAIN (64)...(200): Thiamine pyrophosphate enzyme, C-terminal TPP binding domain
  misc_feature (1)..(213): Xaa is any amino acid
MRSALGLQSRPSTAVPGLDPSTLPARPPQLCKGCPHADSYESIKKAVEELDPRPGHPDVGINSDIGCYSLGAAPPYQVPESIVCMGASVGMAKGAADAGLPYSIAVIGDSTFIHSGITALIDTVASNTPMTLIILDNSIVAMTGCQPTMVPSESLRALLLGCGVKPEHLLELEARKQLVDENSSRLKAEIEYRGLSVVVFKRECLEAARKARK

SEQ ID NO: 5895 - DNA, 420 bp, Unknown
  Obtained from environmental sample
  misc_feature (1)..(420): n is a, c, g, or t
ttgctcgtcccggaccacttccggcggccggcgcttttcctggccgcaggctttttgcagttccagttgcagttccaaaagcggccctatggctttatgggccaggaagacggcgtccaggatatcggtctcgctggcttcccgggccccgccctccaccatgaccacggcttcccggctgccggccacgatcaaggccagatcggccgcttccaattgggcctgggtggggtttaccaccaggccgccgtccacccggaccacccgggctccggctatggggccggcaaagggaatatccgaaatggtcagggccgcggaagcgcccagcatggccggcaggtccgggtcgtatttgtcatccacgctgatggcctggacaatgacctgggtttcgtaagtccagttcttgttaaatag

SEQ ID NO: 5896 - protein, 139 aa, Unknown
  Obtained from environmental sample
  misc_feature (1)..(139): Xaa is any amino acid
MLVPDHFRRPALFLAAGFLQFQLQFQKRPYGFMGQEDGVQDIGLAGFPGPALHHDHGFPAAGHDQGQIGRFQLGLGGVYHQAAVHPDHPGSGYGAGKGNIRNGQGRGSAQHGRQVRVVFVIHADGLDNDLGFVSPVLVK

SEQ ID NO: 5897 - DNA, 957 bp, Unknown
  Obtained from environmental sample
  misc_feature (1)..(957): n is a, c, g, or t
ttgactcatctggagtttcagcgttattttgacattcacgagccgctcactgaaaaaagcgccccttcatctggaagaggggcaaatgaactcattcaaaaacctgaactttcggttaaaagcatatttgaaaagtttaaattacacgccgtagggacaacagacgatcctgttgactcgcttgaataccaccgcgctatcgcggaaggaactgctcctataggaaaaattgaaacaaaagtcattccctctttccgtcccgacagggcgcttaacattgaagccgacggttttgccgcttatattaacgaactttcaaagacaagcgatacaactattaaattttcagacgacatacttacagctctggaaaaacggctggatttctttatttctttaggctgcaagtccgccgatcacgctcttgaatacgcgccgtatacgattacctcaggaggccacattgaaaaaattttcagaagagcaatggcggggaaaaagataacaaatgaggaagcctccgcgtttaaaacaaaaatgcttattctgctttctaatctttacacgcagaaaggcatagttatgcagcttcatctttcttctatacgcaatataaatatgaaaattctctctcaggtgggagaaaacgccggcgcagacgccgttaacgacagcatattaagcaaaactcttgccgcccttttgggtcacatggaacttccgaaaaccattctctattcgcttaaccccaaagactactacccgcttgcgacaataatgggcggctttcaggaggcgggcattgagggaaaaatgcagcttggcagcgcctggtggttctgcgatcacagggacggcatggaagagcagcttcgcgtccttgccaacttgggaatgttacccctcttcataggcatgctgacagacagccgcagttttcctcgtgccgaattctga

SEQ ID NO: 5898 - protein, 318 aa, Unknown
  Obtained from environmental sample
  DOMAIN (1)...(317): Glucuronate isomerase
  misc_feature (1)..(318): Xaa is any amino acid
MTHLEFQRYFDIHEPLTEKSAPSSGRGANELIQKPELSVKSIFEKFKLHAVGTTDDPVDSLEYHRAIAEGTAPIGKIETKVIPSFRPDRALNIEADGFAAYINELSKTSDTTIKFSDDILTALEKRLDFFISLGCKSADHALEYAPYTITSGGHIEKIFRRAMAGKKITNEEASAFKTKMLILLSNLYTQKGIVMQLHLSSIRNINMKILSQVGENAGADAVNDSILSKTLAALLGHMELPKTILYSLNPKDYYPLATIMGGFQEAGIEGKMQLGSAWWFCDHRDGMEEQLRVLANLGMLPLFIGMLTDSRSFPRAEF

SEQ ID NO: 5899 - DNA, 549 bp, Unknown
  Obtained from environmental sample
  misc_feature (1)..(549): n is a, c, g, or t
ttgccgggaaaaaagaggctactcattttaggggcgggcgttctgcaggggcccgcgctcagaatagctggggagatgggccttgaaacagttgcagtagacgccgatccgactgctttttgcgtaccgcttgctgaccgctttgagaaaatagacctaaaagacagggaaggcatagaaaagctggcgcgttcgctcatggaaaacggtggacttgtcggcgtaatgaccgctggaacggatttttcagccagcgtcgcctggatcgctgaaaaactcggtcttcccggaataagttttgaagcagcactggacgcctctgataaggaaaggatgaggaagcgtttcaaagaagctggcgtcccttcccctgagtttattgtgatagataatgaatgcaacgaagcgctcgctctccccttttcctggcctgtagttgtaaagcccgttgacaatatgggcgcgagggggtgccgcagggtagatagccagggcgagcttaaaaccgctgttgccgaggctatggctttttccgttccggccgcgtga

SEQ ID NO: 5900 - protein, 182 aa, Unknown
  Obtained from environmental sample
  SIGNAL (1)...(21)
  misc_feature (1)..(182): Xaa is any amino acid
MPGKKRLLILGAGVLQGPALRIAGEMGLETVAVDADPTAFCVPLADRFEKIDLKDREGIEKLARSLMENGGLVGVMTAGTDFSASVAWIAEKLGLPGISFEAALDASDKERMRKRFKEAGVPSPEFIVIDNECNEALALPFSWPVVVKPVDNMGARGCRRVDSQGELKTAVAEAMAFSVPAA

SEQ ID NO: 5901 - DNA, 723 bp, Unknown
  Obtained from environmental sample
  misc_feature (1)..(723): n is a, c, g, or t
ttgatttacgaagcatataaaagagggctggtttttgaaagcgatagcaatcacttaaacccaagcgaatgggaaaaaattagaagcgatctcaactacgacgatgcttggctttttgaggaaataagtctagaaaaaagcctaccatgggacattatagatgcagtcataagcaagaaatttttgcaaagagaatgggaaaaggcgcacaatccaaacgccgaacccgtgccaaattgcaaatggggcaaatgcgttgcctgcggaatcccaggcaacggcaaagacaccattttgggcaaaatccccgctgtacgggcagcccaacgtggctgcccttctcccaccaccgcaggaattttcccctataaaatcattttccgcaaaacgaaaagcagccgttttttgccgcatcaaaacacattatcattttttgaaagagcttttgtgaaacttggaattccaataaaattcagcgaagggtttagccccaagccacgcatagcaaacacaggcgcgttgccgcttggattggaatctctttgcgaagttatttccattgagcttttggaaaaactggatttggaaaataaaaaggcagagcttgtgaaaagcataaatgaaatattcccgcaaggcttggagattgtttctatagaacccctgcaaacaaaactttctgcgcaacttccaaaatccgtagattactgcatggctgggtga

SEQ ID NO: 5902 - protein, 240 aa, Unknown
  Obtained from environmental sample
  misc_feature (1)..(240): Xaa is any amino acid
MIYEAYKRGLVFESDSNHLNPSEWEKIRSDLNYDDAWLFEEISLEKSLPWDIIDAVISKKFLQREWEKAHNPNAEPVPNCKWGKCVACGIPGNGKDTILGKIPAVRAAQRGCPSPTTAGIFPYKIIFRKTKSSRFLPHQNTLSFFERAFVKLGIPIKFSEGFSPKPRIANTGALPLGLESLCEVISIELLEKLDLENKKAELVKSINEIFPQGLEIVSIEPLQTKLSAQLPKSVDYCMAG

SEQ ID NO: 5903 - DNA, 531 bp, Unknown
  Obtained from environmental sample
  misc_feature (1)..(531): n is a, c, g, or t
atgtcctcaagattgggaatgattggcgcgtatattgtaatacttgtcattgttttctttctgggattcttcgcgatctttgcggaacccgggcttgcggttacagccgttacggtagaggagatgaccacaggcacatttaagcgttcaaaattgataaagatcgcggctatgggcgtaggcggaggcatggtaattggtttcgcgcgggtgctgttcagcaatatgctgccttcaggcggcatccatctttcgtggattctggctccgtgctatgttcttgccctgatcctaacaatattcgcgccggaagatttttcctcgatagcttgggacgtcgccggcatcgcgacgggccccatcaccgttccaatcattattacatcggggcttggactcggccgcgactcattgcgggcggacggagctttcggcattgtggcgacggccagcgtatttccgattatcgtaatattaatatccggtattgttgataaggcgaaatcgagacgcgtgataagcaagatgtag

SEQ ID NO: 5904 - protein, 176 aa, Unknown
  Obtained from environmental sample
  SIGNAL (1)...(28)
  DOMAIN (1)...(166): Protein of unknown function (DUF1538)
  misc_feature (1)..(176): Xaa is any amino acid
MSSRLGMIGAYIVILVIVFFLGFFAIFAEPGLAVTAVTVEEMTTGTFKRSKLIKIAAMGVGGGMVIGFARVLFSNMLPSGGIHLSWILAPCYVLALILTIFAPEDFSSIAWDVAGIATGPITVPIIITSGLGLGRDSLRADGAFGIVATASVFPIIVILISGIVDKAKSRRVISKM

SEQ ID NO: 5905 - DNA, 831 bp, Unknown
  Obtained from environmental sample
  misc_feature (1)..(831): n is a, c, g, or t
ttgtataagaaaaccgccttatggcattatatatacatatttattggagtcctgtcagtgacaaaaatatattactttagcggcacaggtaacagtttatggtcggcgaagaaaataatgcatataatcggcgaaccttgcgaattgcataatatcagcattgaggccgaaaaagacgaaattattattgaagcgcaggcggtgataattgtttatccttcgtatgcctatggactgccgctgatagtccgccgctttgtggaggcggctgtttttaaaacgcagtatctggccgcgtttgtaacttatggctccgatcccggcggctcacaggcggaattatacaggttattaaaaaagaaaaagataagctcgctttactttggagaaattcccgcgatggaaaattatatccctttctttggcccgcccaaagaggagcaaatcgcgaaacgcgccgccatgcaggaagaagcgaccgggaaagccgcgcattgtgtgattgaaaggcggacaaacaatgtttttcctttccatccgctgtctttgattatttcgttccttttttcgcttggagtaagaatattttacaggcattacaaagtaagcggcaaatgtaacggctgcggcgtctgcgaaaaagtttgccctgcagcggcaatcaaaatgaaggaaaaacgccccgtattcagcgccaaatgtgaaaattgcgtggcttgtatcgacatctgcccgtcacgcgccattcagttcggacgcgcaagattcaacacccgtggatattgccatcctgatatcagtattagtgaactcggcagaaggcataattag

SEQ ID NO: 5906 - protein, 276 aa, Unknown
  Obtained from environmental sample
  DOMAIN (227)...(250): 4Fe-4S binding domain
  misc_feature (1)..(276): Xaa is any amino acid
MYKKTALWHYIYIFIGVLSVTKIYYFSGTGNSLWSAKKIMHIIGEPCELHNISIEAEKDEIIIEAQAVIIVYPSYAYGLPLIVRRFVEAAVFKTQYLAAFVTYGSDPGGSQAELYRLLKKKKISSLYFGEIPAMENYIPFFGPPKEEQIAKRAAMQEEATGKAAHCVIERRTNNVFPFHPLSLIISFLFSLGVRIFYRHYKVSGKCNGCGVCEKVCPAAAIKMKEKRPVFSAKCENCVACIDICPSRAIQFGRARFNTRGYCHPDISISELGRRHN

SEQ ID NO: 5907 - DNA, 588 bp, Unknown
  Obtained from environmental sample
  misc_feature (1)..(588): n is a, c, g, or t
atgaactgtcccaataaaatctgcaaacaggaaattccggatgattcatgcttctgcgaccagtgcggcattcaactgctgcgctgcgacaaatgcggcgctgtcggaacaagcaagttctgcggcaaatgcggcggaaacatgtccgccatacagccttcggcgccgcagcctccggctgtacagtcgccacagccttctcccccgcaatccaacgagaccccggctgcctctccgccgaccgccccttcgccggcagcggcgccttcggcgactgtagttgtatcgctgcccgcagatacaatttttctgtgccaccctgaaggctggaacatggaactcagagacggcgacattctcggtaggacaaacggcccccacatggccgcgctcggcaagttccaggtgatctcgtcaaaccacgcgaaagttacgcgaaacaataacgaatggtttatcacggacctgaagtccacgaataagacctatgtcaacggcgtaaaactggagccgaatgttccgtctaaaattaaaaaggatgacgttgttatgttagccaatgttacctttaccgtgaggcttgcatga

SEQ ID NO: 5908 - protein, 195 aa, Unknown
  Obtained from environmental sample
  DOMAIN (118)...(186): FHA domain
  misc_feature (1)..(195): Xaa is any amino acid
MNCPNKICKQEIPDDSCFCDQCGIQLLRCDKCGAVGTSKFCGKCGGNMSAIQPSAPQPPAVQSPQPSPPQSNETPAASPPTAPSPAAAPSATVVVSLPADTIFLCHPEGWNMELRDGDILGRTNGPHMAALGKFQVISSNHAKVTRNNNEWFITDLKSTNKTYVNGVKLEPNVPSKIKKDDVVMLANVTFTVRLA

SEQ ID NO: 5909 - DNA, 543 bp, Unknown
  Obtained from environmental sample
  misc_feature (1)..(543): n is a, c, g, or t
gtgtcagacgaaagccacgccccactgccgcccgaaaggataggcacctaccaaagggtaggtgattccccgctaggaacgggcggcatgggggtggtctggctgtacagagagacgggcatatcatcccgcgaggtggccatcaagttcattaggctagacgaaaatttggagctgaacaaggccaacttgataaaagacataaaggccctggaggcgctgccgatacaccaaaacatcatcaccatgtacaccgtcctagaggaacaggggaacattgccctcgttatggagtacgtgcccggcggcatgaccctaaggggcgtggttcatgaacacccccaggggatgcccattccggtggccaaggagatactggctggcattttgtcgggcgtgtcccacgcgcacgagtacggcgtgatacaccgcgacattaagcccgacaacatcctcgtgcgccagccaaggccaatgcctttcttggccgcacagcgtaaaatagttgactttgcatttcaaggtgcaccgaagcgacactag

SEQ ID NO: 5910 - protein, 180 aa, Unknown
  Obtained from environmental sample
  DOMAIN (22)...(178): Protein tyrosine kinase
  misc_feature (1)..(180): Xaa is any amino acid
MSDESHAPLPPERIGTYQRVGDSPLGTGGMGVVWLYRETGISSREVAIKFIRLDENLELNKANLIKDIKALEALPIHQNIITMYTVLEEQGNIALVMEYVPGGMTLRGVVHEHPQGMPIPVAKEILAGILSGVSHAHEYGVIHRDIKPDNILVRQPRPMPFLAAQRKIVDFAFQGAPKRH

SEQ ID NO: 5911 - DNA, 807 bp, Unknown
  Obtained from environmental sample
  misc_feature (1)..(807): n is a, c, g, or t
atgaccatatcacgaaaccgatttttccggatgatttatacgcttcgcttaaaaaacatcttcaacaggagagagaatttaatgagcaatgaacggaaaaaaataatcgctgtagacgataacattgaaaatctgaccgcccttaaaaataccctgaaagatctgtatgaagtatatccctgtccctccgcgtcgaagatgttcagtctgctggagcatgtccagccggatttaattctgcttgatgtggaaatgccggaaatgaacggttatgaagcggcaaaaaaacttaaaagcgaaagccaaacaggcgaaataccaattatattcctgacatccatgagcgatgcgcaaagcgaaatagaaggcctggcaatcggagcaattgactatatccgcaaaccctttgtcgcccctctgctgcttcagcggataaaaacacatctgtccattatggaacaggaaatgcaaattaaacatctgcttgaattaaaaacagaagaagtcaaactgcgggaggcggcggaactggaagcggaaaacgcgtcccgcgccaagagtgaattcctgtcgcacatgagccatgaaataaggtcacctttaaacgccgtcataggcatgataaacatagcaaacgaggaagatgatcttgacaagataaaactttacctcggaaaggcggacaacgccgcaaagcacgtacttggcgttatcaacgatattcttgacatgtccaaaatcgaggcgaataaactcgagctttcctttggtgaatttgactttggtaaaaggaaaccaaccatgtga

SEQ ID NO: 5912 - protein, 268 aa, Unknown
  Obtained from environmental sample
  DOMAIN (185)...(250): His Kinase A (phosphoacceptor) domain
  misc_feature (1)..(268): Xaa is any amino acid
MTISRNRFFRMIYTLRLKNIFNRRENLMSNERKKIIAVDDNIENLTALKNTLKDLYEVYPCPSASKMFSLLEHVQPDLILLDVEMPEMNGYEAAKKLKSESQTGEIPIIFLTSMSDAQSEIEGLAIGAIDYIRKPFVAPLLLQRIKTHLSIMEQEMQIKHLLELKTEEVKLREAAELEAENASRAKSEFLSHMSHEIRSPLNAVIGMINIANEEDDLDKIKLYLGKADNAAKHVLGVINDILDMSKIEANKLELSFGEFDFGKRKPTM

SEQ ID NO: 5913 - DNA, 801 bp, Unknown
  Obtained from environmental sample
  misc_feature (1)..(801): n is a, c, g, or t
atggaatcctggaaactctcgctgaaggcggtcgcgatttatcgcgacggatcaaaattgagccagccgttgagcgcgcttcgggaaggttatctttntgaggggcttgaggaaggattacgcgccagtcaaaacacgcaggaacagatcgttcgtatgggggagcgtctcggcagggaggccggaaaacggcgtacccttcccgcccgccgcggaggctatactcaaaaggcgcgcatcggggggcactcaatctatttgcgcaccggcgaatatccggacggacaattgggagagatatttgtagatatgcaccgcgagggcggcgcgttccgcagttttgtaaactgtttcgcgattgccgtctcccttggtttgcagtttggagtaccgctggaggaattcgttgaatcctttgtctttacgcgctttgagccaaacggcatggtcatgggtaacgatcaccttaaaatgacaacctctattgtggattacatcttccgtgagctcgcgatatcctatctcggccgttatgatctcgcgcatatcacctccaacgaaaacatcgcggcgaccgatatctccaggccgcagacacgggtcaggctttcctctccggggaaggaagcggaaaattcagacgcgcgtggcgcgaataatgatacgcagaacgcgcaggacgaagcgctcttgcaggggtacacgggggatatttgcacctattgcggttctctgaatatggtgcgtagcggtacttgccttaagtgtatggtgtgcgggaatacgagcgggtgcagttaa

SEQ ID NO: 5914 - protein, 266 aa, Unknown
  Obtained from environmental sample
  misc_feature (1)..(266): Xaa is any amino acid
MESWKLSLKAVAIYRDGSKLSQPLSALREGYLXEGLEEGLRASQNTQEQIVRMGERLGREAGKRRTLPARRGGYTQKARIGGHSIYLRTGEYPDGQLGEIFVDMHREGGAFRSFVNCFAIAVSLGLQFGVPLEEFVESFVFTRFEPNGMVMGNDHLKMTTSIVDYIFRELAISYLGRYDLAHITSNENIAATDISRPQTRVRLSSPGKEAENSDARGANNDTQNAQDEALLQGYTGDICTYCGSLNMVRSGTCLKCMVCGNTSGCS

SEQ ID NO: 5915 - DNA, 804 bp, Unknown
  Obtained from environmental sample
  misc_feature (1)..(804): n is a, c, g, or t
atggcaaatccgatagttggaatgtttagaataaaagaactccgcgaacgcattttatttacaataggaatgcttttagtattccgtgtcggcgctgtgttccctatccccggaattaacgtaagggaattatcccgttacttcatggatcaggcgaattcgggaaacccgattgtagattatttggacttcttcgccggcggcgctttctccaacttctcggtattcatgcttggtattatgccttacatttcaatgtcgattatcatgcagttattgctcatcgtctttcccagcttaaagaaaatatcgcaggaagacggcggacgcaagaaaattcaaaaatggcagagatacggaaccgttttagtttgtcttattcagtcttatgccgttacgcaatacgctcaagctatttcacgcagtgtgaataatcttctgtttatcagtatgggggcgtttacgttaatcgccatgctgaccgttacaacggggactatgttccttatgtggatgggcgaacagattacaaagcggggcatcggcaacggaatatcgctgataatctttgccggtatcgtagccaggcttcctcatgctgtttacgaattaatcgatatgatgagaaaaggaaatcttaaccctgtttttgtaattatcgtgcttgtaatgtttgtcgccgtagtcgctcttgttgttcttgaacagcaggggcagaggaaaatccccgtaaattacgcaaagcgcgtgtcggcagaaaaatgtacggcgctcagaatactatattccgctcggccgatctga

SEQ ID NO: 5916 - protein, 267 aa, Unknown
  Obtained from environmental sample
  DOMAIN (74)...(267): eubacterial secY protein
  misc_feature (1)..(267): Xaa is any amino acid
MANPIVGMFRIKELRERILFTIGMLLVFRVGAVFPIPGINVRELSRYFMDQANSGNPIVDYLDFFAGGAFSNFSVFMLGIMPYISMSIIMQLLLIVFPSLKKISQEDGGRKKIQKWQRYGTVLVCLIQSYAVTQYAQAISRSVNNLLFISMGAFTLIAMLTVTTGTMFLMWMGEQITKRGIGNGISLIIFAGIVARLPHAVYELIDMMRKGNLNPVFVIIVLVMFVAVVALVVLEQQGQRKIPVNYAKRVSAEKCTALRILYSARPI

SEQ ID NO: 5917 - DNA, 939 bp, Unknown
  Obtained from environmental sample
  misc_feature (1)..(939): n is a, c, g, or t
ttgccgctctgcggaacgaagacctataccgccactcagttctgccatacggacaacagcgttcaaaacaattntggagaatggtctgtgaaaaccccagcaacctgcgaagcgaaaggcgttgaggaaaggacaaacggcactctaacagaaacacgctctatcatacctcagcttgaatggagcgattggtcagtgacaaccgccgctacctgcgatgctccaggagaggaaacagcgaactgcccagacggcacttccagaaaacgcccgttagcccagcttgtttggggcgaatgggtagagaccccagccacctgcaaatcggcaggttcaagaacaaggaattgcccaaataatgcatcgccagcccaaactcgcgagacagatcctaaactagaatacgacaaagcaattagatattgctctaatggcacattgaaagattatattattataaatgacgctcgtgatggcaaaacttacaaagccattgaaataggcacacaaacttggatggcggagaatttgaattacgaagccgaaggtagcaaatgttacaacaacaacacaaccaactgcaatacctacggcaggctatacaactggtcaacagcaatgggcggttcagctagctccaaagcaaacccaagcggggttcaaggcgtttgccctgctagctggcatttgcccagcgatgctgagtggggtgctttgatgcaatttgtcaatccaagctgtactgccacaggcacttgtgccaatgcaggaaccaaattgaaagcagattctcctttgtggaatagcaatggcaaaggcacagacgatttcggtttttcggctctgcctggcggctacggctattccgatggcagtttctactatgtccgcaactacggctactgtctcggccaatctgatacatgggnnnnnnaataa

SEQ ID NO: 5918 - protein, 312 aa, Unknown
  Obtained from environmental sample
  misc_feature (1)..(312): Xaa is any amino acid
MPLCGTKTYTATQFCHTDNSVQNNXGEWSVKTPATCEAKGVEERTNGTLTETRSIIPQLEWSDWSVTTAATCDAPGEETANCPDGTSRKRPLAQLVWGEWVETPATCKSAGSRTRNCPNNASPAQTRETDPKLEYDKAIRYCSNGTLKDYIIINDARDGKTYKAIEIGTQTWMAENLNYEAEGSKCYNNNTTNCNTYGRLYNWSTAMGGSASSKANPSGVQGVCPASWHLPSDAEWGALMQFVNPSCTATGTCANAGTKLKADSPLWNSNGKGTDDFGFSALPGGYGYSDGSFYYVRNYGYCLGQSDTWXXX

SEQ ID NO: 5919 - DNA, 855 bp, Unknown
  Obtained from environmental sample
  misc_feature (1)..(855): n is a, c, g, or t
atgttcgacaacggctatgacatcagcgattacaccgccattaatcccgagttcgggacgatggcggattttgatcgccttctgaaagaagcgcatgatcttggtttaaaaattgtaatggatttggtcattaaccacacttccaatcagcaccaatggtttctcgaaagccgcagcggcaaagaaaaccccaaacgtgattattatatttggcgagacggcaaaaacggaggtccgcccaataactggcaggcatggttcggcggttccgcatggacgttagacgaaacaacagggcaatattttcttcacactttttcaccatatcaacctgacttgaactgggaaaaccccgatacacgatccgccatttacgaaatgattcgctggtggctggacaaaggaattgacggctttcgcatggacgcaattagtcttatttccaagccaaaagattttgctgacggcgatataagaaaaattattcccaacgggccgcgtgttcatgaatttttgcaggaaatgaggcgtgaagtattatcaaaatatgacattatgaccgtgggcgaaacaggcggagtaaccattgatgaagcgataaaatacgccaacgccgacggctctgagcttgatatggtgattcaatttgaacaaatagaattggacggcggagaaacatttaaatggaatgatcgaaaaatcaatctgatagaattaaaggaacttttttcccgctggcagacaagattacataaccgcgcatggaacagtttgtactggagtaccacgaccagcccccgtgtgtctcacggcttggaaacgataaaaaataccgtgaaaaatcggcaaaaatga

SEQ ID NO: 5920 - protein, 284 aa, Unknown
  Obtained from environmental sample
  DOMAIN (1)...(282): Alpha amylase, catalytic domain
  misc_feature (1)..(284): Xaa is any amino acid
MFDNGYDISDYTAINPEFGTMADFDRLLKEAHDLGLKIVMDLVINHTSNQHQWFLESRSGKENPKRDYYIWRDGKNGGPPNNWQAWFGGSAWTLDETTGQYFLHTFSPYQPDLNWENPDTRSAIYEMIRWWLDKGIDGFRMDAISLISKPKDFADGDIRKIIPNGPRVHEFLQEMRREVLSKYDIMTVGETGGVTIDEAIKYANADGSELDMVIQFEQIELDGGETFKWNDRKINLIELKELFSRWQTRLHNRAWNSLYWSTTTSPRVSHGLETIKNTVKNRQK

SEQ ID NO: 5921 - DNA, 465 bp, Unknown
  Obtained from environmental sample
  misc_feature (1)..(465): n is a, c, g, or t
ttggttnnnnnnnnngttgatgggcgagctccgcagcaaaaagttggttttatttttcagtttcattatttactcaaggattttaccgctctggaaaatgtcatgctgcccgcctatattgccggaatgaagaaaaaagaagcgtttgcccgcgcgcgggcgctgctgttggatatgaagcttcttaaccgcgccaaacatttcccttcccagctttccggcggcgagcggcagcgggtagcggccgcccgttcaatggtcaacgatcccgacctgatactggccgatgagccgaccggcaaccttgatcccgacaacagcgccatggttgccgaactgctctacgccagcgcggaaaaatggggaaaaaccctcctcgtggtaacacatgatgaaaaattggcggcgcgggcttcaagccgctataccctggaaaacggcctgctctcaaaggtcgttacatga

SEQ ID NO: 5922 - protein, 154 aa, Unknown
  Obtained from environmental sample
  DOMAIN (1)...(147): ABC transporter
  misc_feature (1)..(154): Xaa is any amino acid
MVXXXVDGRAPQQKVGFIFQFHYLLKDFTALENVMLPAYIAGMKKKEAFARARALLLDMKLLNRAKHFPSQLSGGERQRVAAARSMVNDPDLILADEPTGNLDPDNSAMVAELLYASAEKWGKTLLVVTHDEKLAARASSRYTLENGLLSKVVT

SEQ ID NO: 5923 - DNA, 900 bp, Unknown
  Obtained from environmental sample
  misc_feature (1)..(900): n is a, c, g, or t
atggggatatccgacttctacgtcttcctccactacgcgatcgagaggcacagcataaacaccgactggtgcttttccggcgaactctacttagcggtgaccgacgacaaacgccgcccggagtcggtggagataagggggcagagcatgcaggtggcgtctatattgaaccgcggcctctacccgaaagaccgtcgctacaccttcgtagtctcggcgctcttctacatggacgagcaccttggcttcgtagtctgcgaaccggattttgtggacatccacctcatagaatccctgatggtggagataagctgttcgctcaagctgataaacctgatacaggcgaggcgcacaatagagaggcagctgcagagcgcgttggaggagctggagaagtacaacgaacaactctccaacatatccgagactgacgagatgacaaaactcttgaaccgccgaggcttcatggcccacgcccggcacatgctcggaatggcgcgccgcatgaaaaaggacggactgctgttctttgccgatcttgacggcctgaaagggataaacgatacttacggccacgaagagggcgacaacgcgatcacggtagtcgcggtcattttgaaaaaagcgttccgcgacatggacataatagcgagattgggaggcgacgaattcaccgtattcgccatgaacgccggctccggaatgatagaaacattcgagaggcgtatagcgggatatgtggaagattacaacaaagactccggtaagccgtacaaggtgtcgatcagtatcggcggcgtgccgtttgtgcatacagaccacgttagcatagagacgcttatgaataaagcggacgtgttgctgtatcagcagaaaaaagataaaaaggctaaaaaataa

SEQ ID NO: 5924 - protein, 299 aa, Unknown
  Obtained from environmental sample
  DOMAIN (137)...(298): GGDEF domain
  misc_feature (1)..(299): Xaa is any amino acid
MGISDFYVFLHYAIERHSINTDWCFSGELYLAVTDDKRRPESVEIRGQSMQVASILNRGLYPKDRRYTFVVSALFYMDEHLGFVVCEPDFVDIHLIESLMVEISCSLKLINLIQARRTIERQLQSALEELEKYNEQLSNISETDEMTKLLNRRGFMAHARHMLGMARRMKKDGLLFFADLDGLKGINDTYGHEEGDNAITVVAVILKKAFRDMDIIARLGGDEFTVFAMNAGSGMIETFERRIAGYVEDYNKDSGKPYKVSISIGGVPFVHTDHVSIETLMNKADVLLYQQKKDKKAKK

SEQ ID NO: 5925 - DNA, 336 bp, Unknown
  Obtained from environmental sample
  misc_feature (1)..(336): n is a, c, g, or t
atgttgattcaattcataaaattcggcattgtgggattctccaataccgtcctatcctacgtaatatacgccgctcttttatacgcgggggtacactacatcatcgccagcgtggctggatttatattaagcgtgcttaattcattcttctggaacaacaagtacgtttttaaacgcggcaatgatcaacaaaaacgcaatctttgggacgcgcttttaaaaacatacatctcgtacgcttttaccggtttgatactgagcaacatcctactatctttttttgtcgaaatattgcacatatcggaatacatcgcgccgcttttcggtttgggataa

SEQ ID NO: 5926 - protein, 111 aa, Unknown
  Obtained from environmental sample
  DOMAIN (7)...(109): GtrA-like protein
  misc_feature (1)..(111): Xaa is any amino acid
MLIQFIKFGIVGFSNTVLSYVIYAALLYAGVHYIIASVAGFILSVLNSFFWNNKYVFKRGNDQQKRNLWDALLKTYISYAFTGLILSNILLSFFVEILHISEYIAPLFGLG

SEQ ID NO: 5927 - DNA, 606 bp, Unknown
  Obtained from environmental sample
  misc_feature (1)..(606): n is a, c, g, or t
gtgcacaaaatcatccgctccatgcgcgactggggccgcgactgcgtctgcccctccggccaagacaacgtctgcggccgccgcttcgacagacagtgcggcgaactgcctacaggatacgaccacaagtacgtatacagccatttcggctacaatctgaaggccacggacatgcaagccgccgtcggttgcgcccaattggagaagttcccgtcgttcgtacaaaagcgcaaacacaattggcggcgcctgtacgacggattgaaggatttgtcggataaattaattctgccggaaccagcccccaactccgacccatcctggttcggattcctcataacctgccgcgaaggagtcagccgcaacgggttagtcaaacatatagagggcaacaatatccaaacaagaatgctgttcgcgggaaacttggtaaaacacccgtgctttaacgagttgaggaaatccggcaaaggttacagaatagccggcacgcttgacaataccgatcgcattatgaatgatactttttggataggcgtttatcctgggatgaatgatgagcagattgacaggatgatagatgttataaaggattttaaatgttga

SEQ ID NO: 5928 - protein, 201 aa, Unknown
  Obtained from environmental sample
  DOMAIN (3)...(197): DegT/DnrJ/EryC1/StrS aminotransferase family
  misc_feature (1)..(201): Xaa is any amino acid
MHKIIRSMRDWGRDCVCPSGQDNVCGRRFDRQCGELPTGYDHKYVYSHFGYNLKATDMQAAVGCAQLEKFPSFVQKRKHNWRRLYDGLKDLSDKLILPEPAPNSDPSWFGFLITCREGVSRNGLVKHIEGNNIQTRMLFAGNLVKHPCFNELRKSGKGYRIAGTLDNTDRIMNDTFWIGVYPGMNDEQIDRMIDVIKDFKC

SEQ ID NO: 5929 - DNA, 702 bp, Unknown
  Obtained from environmental sample
  misc_feature (1)..(702): n is a, c, g, or t
atgatttgcgcgtccgagcagtcggtaatcgccctgcaaggcgtctacgatcaggtaaaagccgaattcctccgccggggatgctacttcctcaatgccgaagaaaccgaaaaggtgcggaaaaccatcatcatccgcggggcgctgaacgcgaaaatcgtcgggcaaaaggcggcgaagatcgcggagctttccggcgtaaaagttcccgaagaaacgaaaatcctcatcggagaagttcaaagcgtggagctttcagaagaatttgcccacgaaaagctttccccggtgctgggcatgtacaaggcgaaggattttgacgaagcgctggaaaaggccgaccgtctggtaaaagacggcggctacggtcacaccaccagcgtattcctcaaccagcaaacctgcgcggataaactcgccgcttttagcgcccgcatgaagacctgccgcatcctgcttaacacgccctcggcgcacggcggcatcggcgacctttacaacttccgcctgaagccctcgctcacccttggctgcggcagttggggcggcaattcagtttcggagaacgtcggagtcaaacacctgttaaatatcaaaacactggcggcaaggagggaaaatatgctgtggttccgcgctcccgaaaaagtatatatcaaacggggctgcctccccgtggctctggacgagcttaaaccgtaa

SEQ ID NO: 5930 - protein, 233 aa, Unknown
  Obtained from environmental sample
  misc_feature (1)..(233): Xaa is any amino acid
MICASEQSVIALQGVYDQVKAEFLRRGCYFLNAEETEKVRKTIIIRGALNAKIVGQKAAKIAELSGVKVPEETKILIGEVQSVELSEEFAHEKLSPVLGMYKAKDFDEALEKADRLVKDGGYGHTTSVFLNQQTCADKLAAFSARMKTCRILLNTPSAHGGIGDLYNFRLKPSLTLGCGSWGGNSVSENVGVKHLLNIKTLAARRENMLWFRAPEKVYIKRGCLPVALDELKP

SEQ ID NO: 5931 - DNA, 786 bp, Unknown
  Obtained from environmental sample
  misc_feature (1)..(786): n is a, c, g, or t
atgctcaaaatctccgccatccttatcggaatcatcgccggttatatccttgcgatcattttgggacaggtaaatttcgcgcaggtggcaagcgcgagagttgtttcggtgcccattcccttctttatcaggccggaattcaatttgcaggccattatcgccatgtccgcgatttatgtcgtatccgggcttgaaacaatgggcaacataaacggcattaccatcgcgggattggacagggaagccaccatcagggaaacgtcgggcgccgtaatcgccgatgccgccggttcccttatcgccgcgtcgtttaacacccttcccaacaccgccttcggacaaaacgccggtattgtagctatgactaaagttgttaataaattttgcatttttaccggtgcgcttgtgctgattgtagccggtttctccccgaagataggcgcggttttttccgtaatgccttccagcgttctgggcggcgcggttgttacggtattcgccatgatcatgctgaacggcatgaaactctgcgccaaggccggctttaccgacagaaatctgctgatcctcgccattacattcggcgtgggatacgccataggggataacaaaacgctggtagcgcatctgcctacggctttgcagtacattttcaaggataccacggtcgccgtgtgtgtcatttccgttattttgaacctcattttcccccttccgcttgaagagcggcaaagactgcaaaaagagcaggatgaagccgccgcgaaagagttaaaacaaggttaa

SEQ ID NO: 5932 - protein, 261 aa, Unknown
  Obtained from environmental sample
  SIGNAL (1)...(27)
  DOMAIN (1)...(204): Permease family
  misc_feature (1)..(261): Xaa is any amino acid
MLKISAILIGIIAGYILAIILGQVNFAQVASARVVSVPIPFFIRPEFNLQAIIAMSAIYVVSGLETMGNINGITIAGLDREATIRETSGAVIADAAGSLIAASFNTLPNTAFGQNAGIVAMTKVVNKFCIFTGALVLIVAGFSPKIGAVFSVMPSSVLGGAVVTVFAMIMLNGMKLCAKAGFTDRNLLILAITFGVGYAIGDNKTLVAHLPTALQYIFKDTTVAVCVISVILNLIFPLPLEERQRLQKEQDEAAAKELKQG

SEQ ID NO: 5933 - DNA, 408 bp, Unknown
  Obtained from environmental sample
  misc_feature (1)..(408): n is a, c, g, or t
atgcccaaatcacagacgcccaccaccgttctacaatcttttatggacgagtaccagttaaaccccttttcacttgccaaagcgattaacctaagcaattccgctgtccgcttaattgtaatcgggaaggctaaaataactgttaccacagccctacgcctagccaagttttttggtcaaacccctgcctattggctagacttacagcgtgaagcagacataaccaaagcctcaaaagacaaggaattgcaggatattctgaaaggcattataaaagcaaagaaacccgctgccactaaagaaggagccgctaaaaagcaacccaaattgagcaaaaaaacaactataacaaccgcccctagaaccgccaaaaacaaaggcgttaaaaaggttgtcaataaaaagtaa

SEQ ID NO: 5934 - protein, 135 aa, Unknown
  Obtained from environmental sample
  DOMAIN (11)...(65): Helix-turn-helix
  misc_feature (1)..(135): Xaa is any amino acid
MPKSQTPTTVLQSFMDEYQLNPFSLAKAINLSNSAVRLIVIGKAKITVTTALRLAKFFGQTPAYWLDLQREADITKASKDKELQDILKGIIKAKKPAATKEGAAKKQPKLSKKTTITTAPRTAKNKGVKKVVNKK

SEQ ID NO: 5935 - DNA, 306 bp, Unknown
  Obtained from environmental sample
  misc_feature (1)..(306): n is a, c, g, or t
atgggagaacgtgctatttttaatcctaaagtattactttcaaatcctaatactggtaagactaactatgaccatgccatagcagactatacccaagtaattcgtctattacctaataatgcaaaggcttatgacgaccgtggtgctgtttatgctcaacgaggcaatatatatcgtgataagagtgattatgacagagccattgctgattttgaaactgcgttgaggcttgacccaaaaactgacaaattctctctcgaactaactaagaaatggagggatactgatacttttcgcacaccatga

SEQ ID NO: 5936 - protein, 101 aa, Unknown
  Obtained from environmental sample
  DOMAIN (48)...(81): Tetratricopeptide repeat
  misc_feature (1)..(101): Xaa is any amino acid
MGERAIFNPKVLLSNPNTGKTNYDHAIADYTQVIRLLPNNAKAYDDRGAVYAQRGNIYRDKSDYDRAIADFETALRLDPKTDKFSLELTKKWRDTDTFRTP

SEQ ID NO: 5937 - DNA, 963 bp, Unknown
  Obtained from environmental sample
  misc_feature (1)..(963): n is a, c, g, or t
ttgttccaccgcgttttggcgcttccgattttcgcggcggtaatgtttattgtttattttgtttcggtaactactgtaggttcgctagcaagcgattgggccaacgaaggtgtgttcggcgagggctggcatcttttgggaacaagcgtatgggttcccggcgttccgatactgctgagcaacgcgctcaccgccattaactgcgccgaatggctgcacaatttgattgttgacggcataacagcaggcgtcggcgcggtgctgggttttgtaccgcagatgtttattttgtttatcttcctcgcctttctggaagcctgcggctatatggcgcgtatcgcttttatcatggacaggattttccgccgcttcgggttgtcgggcaaatcattcattccgattctgattggaaccggctgcggcgttcccggcattatggctgcccgcacgattgaaaacgaccatgaccgcaaaatgaccattataacgacaacttttattccctgctccgcaaaactgccgattatcgctctgattgcgggcgctttattcggcggcacatggtgggttgcgcccagcgcgtactttatcggtattgcggcgattatctcttccggcgttattttgaaaaaaacaaaaatgttcgccggggatgtcgcgccttttgtcatggaacttcccgcctatcactggccgacggcgcttaatattttacgcagtatgtgggaacgcggctggtcattcatcaaaaaagccggaacaattattcttttggcgactattgtcgtttggttcgcttccgattttgggtttggtgaaaacggtttcggcatggttagtatggaaaaaagcgtactggctatttttggcagaatcatcgcgcctctatttgcgccgttgggctggggaaactggncagctgccgtcgccgccctcaccggcttgatcgcaaaagaaacatag

SEQ ID NO: 5938 - protein, 320 aa, Unknown
  Obtained from environmental sample
  SIGNAL (1)...(30)
  DOMAIN (87)...(184): Nucleoside recognition
  misc_feature (1)..(320): Xaa is any amino acid
MFHRVLALPIFAAVMFIVYFVSVTTVGSLASDWANEGVFGEGWHLLGTSVWVPGVPILLSNALTAINCAEWLHNLIVDGITAGVGAVLGFVPQMFILFIFLAFLEACGYMARIAFIMDRIFRRFGLSGKSFIPILIGTGCGVPGIMAARTIENDHDRKMTIITTTFIPCSAKLPIIALIAGALFGGTWWVAPSAYFIGIAAIISSGVILKKTKMFAGDVAPFVMELPAYHWPTALNILRSMWERGWSFIKKAGTIILLATIVVWFASDFGFGENGFGMVSMEKSVLAIFGRIIAPLFAPLGWGNWXAAVAALTGLIAKET

SEQ ID NO: 5939 - DNA, 843 bp, Unknown
  Obtained from environmental sample
  misc_feature (1)..(843): n is a, c, g, or t
atgatacgcagcggctgcgaagacgccgaagtcagcggatcgctcgacatagaaaacatccaccacaaactacgcgagtttttgcgggaagccggtatagacgccgaagacggcgggctcatcatccgccgcagcatctcaaaatccggcaaaaacaagatacacgtcaatcaaatcccgttgccgttatcaaccctcaagactctcggcgacctgctgatagacctgcacggacagcacgaccaccaatcattattaaacgaggagacgcacgccgatatagttgacaccctgccggaggcttccgccgccaaagtgggctacatatcctcctacaacgcctacaccgccgcggcgcaagagctgcgcgacgcgcaacgggcggcacgggagcttaccgacaagaaagacatgcttgaattccaatacaaagaactctccgccctcaacccgcaacggggcgaagaaacggcgcttgaacaagaactctcgcttctgtcaaccgccgccgaacgttccgaatgcgtaaacgatatactgacgctattaggctcaaacgacaccggcacggcaagcggcggcgagtcgatacagaaaaggttagcgcaaatcaaccgcaaattagaggcgctttgcaaacacgacccgtccgccgccccgtatataagcgaaatagaatccgccatgtctatctgcgccgacttggatatgttctgtagcaggtacttagaaacgacggacggcgcaaccggcaccgaaagcaggattgaggagatcaactcgcggttggccaaatacagcggctcanaaagagtactcatgcacgatggatggactgattga

SEQ ID NO: 5940 - protein, 280 aa, Unknown
  Obtained from environmental sample
  misc_feature (1)..(280): Xaa is any amino acid
MIRSGCEDAEVSGSLDIENIHHKLREFLREAGIDAEDGGLIIRRSISKSGKNKIHVNQIPLPLSTLKTLGDLLIDLHGQHDHQSLLNEETHADIVDTLPEASAAKVGYISSYNAYTAAAQELRDAQRAARELTDKKDMLEFQYKELSALNPQRGEETALEQELSLLSTAAERSECVNDILTLLGSNDTGTASGGESIQKRLAQINRKLEALCKHDPSAAPYISEIESAMSICADLDMFCSRYLETTDGATGTESRIEEINSRLAKYSGSXRVLMHDGWTD

SEQ ID NO: 5941 - DNA, 1014 bp, Unknown
  Obtained from environmental sample
  misc_feature (1)..(1014): n is a, c, g, or t
atggtcagattggccgagacccctgatcaacagcatacgccaaaatacaatatcaacctgaaagacggtaaaagttaccctgtaatacggataaccgccgaggaattccccagggttttccgcacccgccgtattatagaagataaaagcctgtattacgggccttttcccgatctacagaaagttaacgccatgatggaaatgattgacaaactgtttcccctgcgaaaatgccggacattcaaatcaagaacggggccctgcatgtactaccatatacaacgctgcaaggcgccgtgctgcggaaaaatagacgcggctgagtaccgccgccatgtcgaaccggtacagaggcttttgtccggcgagaccgagccgctgataatggattttacccagcagatgcacgaggccagcagaaggctccgttttgaatgggccgccatgctcaggaatgcgattcaggcgattgaggacattgccggggaaaacagttccgtagttgatttagaccctgaaggcagggactacattgcctgggcctcggaagggacgctggcgacttttacgatcttttcgatgcggggcggcaagatgacgggcagggaactataccgagcctgttccgcggcagatgataaagataacctcgaaatatttgtaacttcatattataacaacagccgccctcccccgccgaaaatataccttcaacagcattttgacgacagcctgttgggagactggtttaagtcaaatttcaactttgagcctganattttttccgcttcagaaaagcgccatgaggcggttatcgcgatggcgcggcagaacgccctgggagacctgcgcaagcggatgaaggaaagaggatccggccccgcgctggacgaactggcccgcgccctggatttacccgaaaggcgcagcggatcgagggctttgacatcgcccagcttgacngcaaaatccggtcgcctcgcttgtctctttccgcaacggcgcggcggataa

SEQ ID NO: 5942 - protein, 337 aa, Unknown
  Obtained from environmental sample
  DOMAIN (125)...(160): UvrB/uvrC motif
  misc_feature (1)..(337): Xaa is any amino acid
MVRLAETPDQQHTPKYNINLKDGKSYPVIRITAEEFPRVFRTRRIIEDKSLYYGPFPDLQKVNAMMEMIDKLFPLRKCRTFKSRTGPCMYYHIQRCKAPCCGKIDAAEYRRHVEPVQRLLSGETEPLIMDFTQQMHEASRRLRFEWAAMLRNAIQAIEDIAGENSSVVDLDPEGRDYIAWASEGTLATFTIFSMRGGKMTGRELYRACSAADDKDNLEIFVTSYYNNSRPPPPKIYLQQHFDDSLLGDWFKSNFNFEPXIFSASEKRHEAVIAMARQNALGDLRKRMKERGSGPALDELARALDLPERRSGSRALTSPSLTAKSGRLACLFPQRRGG

SEQ ID NO: 5943 - DNA, 450 bp, Unknown
  Obtained from environmental sample
  misc_feature (1)..(450): n is a, c, g, or t
atggtctttattcttaaaccgaacatacctaaagaaaaaatagacaaatttatctccgattgggaacaaaaggggttttctacaatttacagcgtggggacggaacatacagccgtctgcctgattggaaacaccgcggaaatagatttggatcatgtggttaatactaatgacattgtagattacggcaagcgtataaccgaacagtacaaggcggttaaccgcaccgtccatgaagataatacgattatcaatgtgggaggagcgtcaatcggggacggtttttttacagtcatggcaggaccctgttcagttgagagcagggaacagattttggaaatcgcccacagcgtgaaaaaaagcggggcgaagattctgcggggaggggcgttcaagccaagaacctcgccttacgcttttcagggcaaacaggctcgtgccgaattctga

SEQ ID NO: 5944 - protein, 149 aa, Unknown
  Obtained from environmental sample
  misc_feature (1)..(149): Xaa is any amino acid
MVFILKPNIPKEKIDKFISDWEQKGFSTIYSVGTEHTAVCLIGNTAEIDLDHVVNTNDIVDYGKRITEQYKAVNRTVHEDNTIINVGGASIGDGFFTVMAGPCSVESREQILEIAHSVKKSGAKILRGGAFKPRTSPYAFQGKQARAEF

SEQ ID NO: 5945 - DNA, 513 bp, Unknown
  Obtained from environmental sample
  misc_feature (1)..(513): n is a, c, g, or t
ttgattcaacgcgcgccggcacacgtcctttgcctctgtttcatttttcctattatagatgattctatagaagtggagattcggccggaagacctgcgggtagacacctaccgctcaggcggcgcgggaggacagcacatcaacaaaacagacagcgccgtccgttttacccacttgcccacgggcatagtggtcgcctgccagaacgagcgcagccagataaaaaaccgcgccgttgccatgagcatgctgaaagcaaggctctatgatcattacagacaggaaaaggaaaaggagaaagaacggtttcatcaggagaaaaaagacatttcatggggcaaccagattcgctcttatgtttttcagccctacaccatggtaaaggattaccggaccaagacggaggcgggcaatatccaggcggtaatggacggcgacattgatcagtttatcgaggagtacctgaggtggacgtggcacgccgagggtgcacggcgcagccgtgttttttga

SEQ ID NO: 5946 - protein, 170 aa, Unknown
  Obtained from environmental sample
  DOMAIN (18)...(131): Peptidyl-tRNA hydrolase domain
  misc_feature (1)..(170): Xaa is any amino acid
MIQRAPAHVLCLCFIFPIIDDSIEVEIRPEDLRVDTYRSGGAGGQHINKTDSAVRFTHLPTGIVVACQNERSQIKNRAVAMSMLKARLYDHYRQEKEKEKERFHQEKKDISWGNQIRSYVFQPYTMVKDYRTKTEAGNIQAVMDGDIDQFIEEYLRWTWHAEGARRSRVF

SEQ ID NO: 5947 - DNA, 495 bp, Unknown
  Obtained from environmental sample
  misc_feature (1)..(495): n is a, c, g, or t
atggagctatataagcaccggctccctgattctgctgggaacggccgctgcatacaatatattccagcttgtccgttacctgtatatctcaacggaagacgccacaccgattgccaggcgggagaaaaaatgaaatttacagataagataaaaaatttctttgccggacgatccgccatttcgcaggaattttttgacgaccttgccgatctgctggtggaaggggatattggcgcgcaggaggcttacggtactgtggaactcctgcagcagatatgcaaaaaagaaaaaatttcccagactgatgaagcgcgggaaaggcttgccggattgctggaaaaaatactggttgacggatccgccgatagccctcctgtgttaggtgtcactgagttgcacggaggaaaaaccggcaggcaaacggtgattctgctcctgggagtaaacnggcgtaggcaagacaaccacggcggcaaagattgcttctatatataa

SEQ ID NO: 5948 - protein, 164 aa, Unknown
  Obtained from environmental sample
  misc_feature (1)..(164): Xaa is any amino acid
MELYKHRLPDSAGNGRCIQYIPACPLPVYLNGRRHTDCQAGEKMKFTDKIKNFFAGRSAISQEFFDDLADLLVEGDIGAQEAYGTVELLQQICKKEKISQTDEARERLAGLLEKILVDGSADSPPVLGVTELHGGKTGRQTVILLLGVNXRRQDNHGGKDCFYI

SEQ ID NO: 5949 - DNA, 471 bp, Unknown
  Obtained from environmental sample
  misc_feature (1)..(471): n is a, c, g, or t
atgccgtatctgggaatttgccttggaatgcagatcgccgtaattgaatttgcgcgtaacgtctgcggactgaagcacgcccattcaagcgaatttgacgaagtttccccccatcgcgtcattgatctgatgcccgatcaggccggcatggtcggctcgggcggcaccatgcggctgggcgcgtatccgtgtaaagtcacgcagggcacgctccttcacaggctgtacggcctggatgaaatcagcgaaaggcaccgccaccgctttgaattcaacaatgattaccgcgagaccctaacgggcaaaggaatggttatctgcggcgtgtcacctaacggaaatcttgtcgaggcgattgagctgccggatcgccgttttttcaccggcgtccagtttcatcccgagttcaagagccgccccaacaagccgcaccccttgtttttgggtttggtaaaagcggcaatcaaataa

SEQ ID NO: 5950 - protein, 156 aa, Unknown
  Obtained from environmental sample
  DOMAIN (2)...(153): Glutamine amidotransferase class-I
  misc_feature (1)..(156): Xaa is any amino acid
MPYLGICLGMQIAVIEFARNVCGLKHAHSSEFDEVSPHRVIDLMPDQAGMVGSGGTMRLGAYPCKVTQGTLLHRLYGLDEISERHRHRFEFNNDYRETLTGKGMVICGVSPNGNLVEAIELPDRRFFTGVQFHPEFKSRPNKPHPLFLGLVKAAIK

SEQ ID NO: 5951 - DNA, 711 bp, Unknown
  Obtained from environmental sample
  misc_feature (1)..(711): n is a, c, g, or t
gtgaaaaaagtaggtcgctggcgcaatttagagaaaatggtttgtggtggacatccacaatatttgaagctaccggttctgctcaggctcggactttatcgccttcgggaggtttttcccagtaccttgaaagatagatctgcgggtctatcggttctttgcatacaaaaccctccagttaaaaaaatcagcaaaatattcacagatactcgcaataacaaacagtacaacgtgattaaagttggcaacataatgtggatgacagagaatttaagttacaatgcgaagggcagtttttgctatgaaaataaaccagaaaattgcaataaatacgggaggctttacgattgggatatagctcaaacagcgtgtccctctccttggcgtttgtctagccacaatgattgggtaaatctaatagagagttcgggaaacatttttgcggctaaaaaactcaaatcaaaacagtggaatggagaagatagttatggtttttctgcattgccgggcggttttaccaaatcgcagggttttgcagaaagcggagaaaaaggatattggtggacaagcgatgtgagcggtccttatggcaaatacaaatatatgagttcagacttagatggcatatatcattccgaattttccaaatcaacgggactctcagttcgttgcgttatggactgcggagattttaactgcgttatggaataa

SEQ ID NO: 5952 - protein, 236 aa, Unknown
  Obtained from environmental sample
  misc_feature (1)..(236): Xaa is any amino acid
MKKVGRWRNLEKMVCGGHPQYLKLPVLLRLGLYRLREVFPSTLKDRSAGLSVLCIQNPPVKKISKIFTDTRNNKQYNVIKVGNIMWMTENLSYNAKGSFCYENKPENCNKYGRLYDWDIAQTACPSPWRLSSHNDWVNLIESSGNIFAAKKLKSKQWNGEDSYGFSALPGGFTKSQGFAESGEKGYWWTSDVSGPYGKYKYMSSDLDGIYHSEFSKSTGLSVRCVMDCGDFNCVME

SEQ ID NO: 5953 - DNA, 810 bp, Unknown
  Obtained from environmental sample
  misc_feature (1)..(810): n is a, c, g, or t
atgaaatcgtcaaaagaagtaaatattgatattaagcttattgattttgtagattcattgaatctttccatgaacgtgatgaaatgccttaaacttctgcttgcgaacgaggaacttcaggcggctcaggattacgcaaataaagtttccattgtaaggctcgggtttaacgatcacggtcccgtgcatatgcgtacagtagcgcttaacgccgtaataatgctggatcttttaagaaaggccggaattaaaaccagccttgaatcggacgaatgcggcgattttgaagacagcgtaatagcggtaataatcgccggattgtttcatgatcttggaatgggcatgggcaggcaggagcatgaacttcacagcatgattctggctcagccttatatcgacaaattcttaaacgagatttacggaaacgatctgcataaaaaaacaatgcttcgcaccatctctcttgaggcgataagggggcacatgggaaccatagccgtaagctccattgaggcgggaattgtgcaggtagcagacggctgcgacatgacaaaaggccgcgccagaatcgccatgcacaccaacgcaaaaacagggcatatccaccagtactccgctaactcaattgagaaagtgaatatcatcgccggaaaagaaaaaccaattcgtattgacgttcatatgtcaagcgacgtaggcttttttcaggttgaggaagtacttatgacgaanatcgcccaaagcaccgccnagagctatattgaactttacgcaaatgtaatgggtgattccgaaaagcggtatctttaa

SEQ ID NO: 5954 - protein, 269 aa, Unknown
  Obtained from environmental sample
  DOMAIN (67)...(184): HD domain
  misc_feature (1)..(269): Xaa is any amino acid
MKSSKEVNIDIKLIDFVDSLNLSMNVMKCLKLLLANEELQAAQDYANKVSIVRLGFNDHGPVHMRTVALNAVIMLDLLRKAGIKTSLESDECGDFEDSVIAVIIAGLFHDLGMGMGRQEHELHSMILAQPYIDKFLNEIYGNDLHKKTMLRTISLEAIRGHMGTIAVSSIEAGIVQVADGCDMTKGRARIAMHTNAKTGHIHQYSANSIEKVNIIAGKEKPIRIDVHMSSDVGFFQVEEVLMTXIAQSTAXSYIELYANVMGDSEKRYL

SEQ ID NO: 5955 - DNA, 459 bp, Unknown
  Obtained from environmental sample
  misc_feature (1)..(459): n is a, c, g, or t
atggaatacaacttcggcggtgtcagcaagcggctcggcgatcttgcggagatcatagtcgtccccaaaatcaagatggacatcaacaaattgggcggccacaactttcaagaggccgtcgctgataaaactgtcgtcgccgtcgttgacggagtaaaagatcctgttgccgaagtcgatatgttcttattcggcgacggcgaggctatggccgtggaaatcaaagcccatctgaaaaagactaaggtggacacccacctcagacgcttgcggaaactacgcacccacgaaaatgaggccggtattgtaggcaagaaactttacggcgcggtagtcggcgttatcgtggacgacgaggcaagagcacacgcaaagaaaaacggcttatacgtcatagaaatacgcgaggaagagaacaaactgaacatagaaaaacccgacacttgccaaacgtggtaa

SEQ ID NO: 5956 - protein, 152 aa, Unknown
  Obtained from environmental sample
  misc_feature (1)..(152): Xaa is any amino acid
MEYNFGGVSKRLGDLAEIIVVPKIKMDINKLGGHNFQEAVADKTVVAVVDGVKDPVAEVDMFLFGDGEAMAVEIKAHLKKTKVDTHLRRLRKLRTHENEAGIVGKKLYGAVVGVIVDDEARAHAKKNGLYVIEIREEENKLNIEKPDTCQTW

SEQ ID NO: 5957 - DNA, 627 bp, Unknown
  Obtained from environmental sample
  misc_feature (1)..(627): n is a, c, g, or t
ttgaagacaggccgtttgatgttnttacgcccatccgataaaacccgtactgggattttatccggtacaataaacccaccaggcaaagcaattgaatggtgccgcgattttctggggatagaaagttatgaagattttttcgctcttgcgcggcagagcaagagcggctcaggcgggcttgtctttgttccctatcttgccggagaacgcgctcctgtctggaaccctgacgcgcgcgcgctatggcgcggcataagcctgtcgtcgggaaggagcgagttcgcgaattccgtacttgagggaattggtttcgctatcagggacgtaatcggcgcaatggaagaaaacggcgcgcgagcaggacagttgcgcgtaacaggccgtcttgccggcatagaaagccttaatcagataaaagccgatataacgggaaaacaaatactctcgcccgtattcaaggagactgaacttttaggcttggcgattacaggctcatgcttcatgggcaagttcgcctcattagcggaggcttcttccgctatggtaaaaattgagaggacttatgagccaaacttaaaaaatacagagatttataacgaactatttattgaatataaacggaaataa

SEQ ID NO: 5958 - protein, 208 aa, Unknown
  Obtained from environmental sample
  DOMAIN (1)...(199): FGGY family of carbohydrate kinases, C-terminal domain
  misc_feature (1)..(208): Xaa is any amino acid
MKTGRLMXLRPSDKTRTGILSGTINPPGKAIEWCRDFLGIESYEDFFALARQSKSGSGGLVFVPYLAGERAPVWNPDARALWRGISLSSGRSEFANSVLEGIGFAIRDVIGAMEENGARAGQLRVTGRLAGIESLNQIKADITGKQILSPVFKETELLGLAITGSCFMGKFASLAEASSAMVKIERTYEPNLKNTEIYNELFIEYKRK

SEQ ID NO: 5959 - DNA, 447 bp, Unknown
  Obtained from environmental sample
  misc_feature (1)..(447): n is a, c, g, or t
atgaaagagcttccgggaatcctttttatcatcgacacgcgtaaggaagccatcgccgtagccgaagcgcagaggcagggcattccgataatagcggttgttgacacaaactgtaacccggacggcatcgactatcccattcccggcaacgacgacgcaatcagggcaattacgctctttacgcaaattgtcgccaacgccgtcgtggaagcggataacgaagtgggacttaagatcatcgaaaccctcggcgatgaagacgaggatatggaaagcatgatgaacgacatatccaggaaggaagaagacagggaaatagtcgactatgaaaaatatactacggaagaggcgattagggacgcgaaagcggatgaagaagtccctgaagaagatgaagacaacactaagataaaagttgacatcgataaagtttacaatgacgaataa

SEQ ID NO: 5960 - protein, 148 aa, Unknown
  Obtained from environmental sample
  DOMAIN (1)...(72): Ribosomal protein S2
  misc_feature (1)..(148): Xaa is any amino acid
MKELPGILFIIDTRKEAIAVAEAQRQGIPIIAVVDTNCNPDGIDYPIPGNDDAIRAITLFTQIVANAVVEADNEVGLKIIETLGDEDEDMESMMNDISRKEEDREIVDYEKYTTEEAIRDAKADEEVPEEDEDNTKIKVDIDKVYNDE

SEQ ID NO: 5961 - DNA, 321 bp, Unknown
  Obtained from environmental sample
  misc_feature (1)..(321): n is a, c, g, or t
atggctgaaatatccgccgcagatgtaaaaaaactccgggaaaaaaccggagcgggaatgatggaatgtaaaaacgcgcttgtctcttcagaaggcgattttgcaaaagcggaaaaacttttaaaggaaaaaggccttgccgccctggaaaaaagagccggacgcgccaccaataacggaaaagtttttattaaaatgaaagatgacaattccgccgccgtgttggtcgaactcaacgcggaaacggactttgtcgcgagaaaccccgattttatcgcccttggagcgacaattgcggctaacgctcttgaaaagggttaa

SEQ ID NO: 5962 - protein, 106 aa, Unknown
  Obtained from environmental sample
  DOMAIN (4)...(44): UBA/TS-N domain
  misc_feature (1)..(106): Xaa is any amino acid
MAEISAADVKKLREKTGAGMMECKNALVSSEGDFAKAEKLLKEKGLAALEKRAGRATNNGKVFIKMKDDNSAAVLVELNAETDFVARNPDFIALGATIAANALEKG

SEQ ID NO: 5963 - DNA, 897 bp, Unknown
  Obtained from environmental sample
  misc_feature (1)..(897): n is a, c, g, or t
ttgcggacggattgtgtttccgccgcctgtacggctcttccgtccggcggtttggcgctgaccaccggacatggttccgccgccaaatacgccgaaaccctgattggggaagccaaaacacataacgaacccttttaccttgtcatctcagccggcggcgacggcaccagccgtgaaattctgaccgccatgtatcacgcgcctgatgatgtacgatcaaacatggcgatcctccgcctgccaatgggaaccggcaatgacggcgccgactcggccaatcttgctgacgcgctcatgcttttgataaaaccgtcgcgtattgagttcagcccttgtctcaggcttgtaaccgcgacgggcggccccgccgcgtccggtcccgcccatcttgcctttaacatactttccgtgggccttgacgcttttgtaacccacatgacaaacaagatgaagggaaagcttcccggcgattcctacaaactctgggttgacatcgcctcgctcctttacgaccgcctgtatacagtcgggttacttgacgtaaaagccgacggcggaaaaataacgctgcgcgaaaaactgctcctgcttgccgtcggcgcttccggccacaggacttacggctctcaaaaaaaaatactccccgacgaccggaacgtctgcgccgttaagcagatgcccctgctgcgcaagctggccttaaagggcctgttcacaaccggaaaccatatcgacaaaccggaagcgatcctgttcaacgcccgccgcgtggaattttccggcagcttcccaatcctcgcccagatggacggcgaaaccgtccttttgcaaccgggggatttccctgccgcgatagagcttacagagccggttatcccggcgctgaagagcaggtaa

SEQ ID NO: 5964 - protein, 298 aa, Unknown
  Obtained from environmental sample
  SIGNAL (1)...(19)
  DOMAIN (1)...(115): Diacylglycerol kinase catalytic domain (presumed)
  misc_feature (1)..(298): Xaa is any amino acid
MRTDCVSAACTALPSGGLALTTGHGSAAKYAETLIGEAKTHNEPFYLVISAGGDGTSREILTAMYHAPDDVRSNMAILRLPMGTGNDGADSANLADALMLLIKPSRIEFSPCLRLVTATGGPAASGPAHLAFNILSVGLDAFVTHMTNKMKGKLPGDSYKLWVDIASLLYDRLYTVGLLDVKADGGKITLREKLLLLAVGASGHRTYGSQKKILPDDRNVCAVKQMPLLRKLALKGLFTTGNHIDKPEAILFNARRVEFSGSFPILAQMDGETVLLQPGDFPAAIELTEPVIPALKSR

SEQ ID NO: 5965 - DNA, 492 bp, Unknown
  Obtained from environmental sample
  misc_feature (1)..(492): n is a, c, g, or t
atgagcgccgcggccgcgaggatagaggctttgagccaggacgaaatccgtggcctgctgaggggcgcgtccctttcgctggacattgcgcttgagggcggaaggacccgcgccgtggaaatcaccgctgacaaactggacatcaggcgcaatgagaaggccaacctccgcatactcaatgagggaaccttaaccgtgggcctggacacggagattacccccgaactgagcatggaaggcgacatccgcgaccttatccgcggcgtacagaacagccgcaaagaaatgggcctgcaggtaaccgaccgaatcaagctgacagtcttcggccccgataaactaaaaaaagcctgggacagcctcagcgcgagcgccgccgaagacacccttgcggtacagaccacatgggccaaagttgacggccagataccgctggaagcgggcgatgaaacatggatggtgaagattgaaaaggtaacaagtaacaggtaa

SEQ ID NO: 5966 - protein, 163 aa, Unknown
  Obtained from environmental sample
  misc_feature (1)..(163): Xaa is any amino acid
MSAAAARIEALSQDEIRGLLRGASLSLDIALEGGRTRAVEITADKLDIRRNEKANLRILNEGTLTVGLDTEITPELSMEGDIRDLIRGVQNSRKEMGLQVTDRIKLTVFGPDKLKKAWDSLSASAAEDTLAVQTTWAKVDGQIPLEAGDETWMVKIEKVTSNR

SEQ ID NO: 5967 - DNA, 816 bp, Unknown
  Obtained from environmental sample
  misc_feature (1)..(816): n is a, c, g, or t
atgccctggggaaccgtgtccggatattttcaatcggccttcagagccatgaaattcaggttttattcgatcgtccaccgcaagcttttccagaaatacagccttgccgccggcgacgcctatgacatccgcgaggccaacggacatccgcctcttgaccagtatatacaatattataacgcctttgaaacatatcccgaccgcgccattgtttatctgcgtaaagcccgtgaatttgaaattgtcgttattcctgagtccgcgggctcttattatcttgaagagagcgtcctccgcaaagatacaagcctggcggcgcgggccctggacgcgcttgacccggtttgggagcgtgatttgacagccacctgccaccgtgaatttgccctgcgcggatccgcttcctccgcggaagatctttttgcgcttaacaggggtgctttgctccaggccgggataagcctgccgcttgaaattcgttttaataacgccaatgaagttggcgcagcaggcggagccggcaagcggaaagaaaaaacatttttaagggcgctcgccagggcgggctttgtccagacagccaatacgtccagaatagttttttatacccctcccgcaccttcgcgcttcagcctcgacattacaattaacgccgcgccgtcctccgggggctttaccgttttctgcgaacttagggacagcgaaggcgttgtaaagcccctgcgccacgcgattcccctgcgttccatgtcccgcgcggatatatccacttttgccaggaccttgagcggcctggttttcagggtagaaggatga

SEQ ID NO: 5968 - protein, 271 aa, Unknown
  Obtained from environmental sample
  misc_feature (1)..(271): Xaa is any amino acid
MPWGTVSGYFQSAFRAMKFRFYSIVHRKLFQKYSLAAGDAYDIREANGHPPLDQYIQYYNAFETYPDRAIVYLRKAREFEIVVIPESAGSYYLEESVLRKDTSLAARALDALDPVWERDLTATCHREFALRGSASSAEDLFALNRGALLQAGISLPLEIRFNNANEVGAAGGAGKRKEKTFLRALARAGFVQTANTSRIVFYTPPAPSRFSLDITINAAPSSGGFTVFCELRDSEGVVKPLRHAIPLRSMSRADISTFARTLSGLVFRVEG

SEQ ID NO: 5969 - DNA, 867 bp, Unknown
  Obtained from environmental sample
  misc_feature (1)..(867): n is a, c, g, or t
atgagggaaaatcaggctaaantgacagaatccgcccctttcatgcgcctgaacagaataatgcagttaggtcccgtataccttgtctatcccggcgctacgcatacaagggcaagccactcaatcggagtctaccatttaggcaagaggcttttacaaaatctggcgcagcgcggagctgaagactggctgacaaacgaggggataaactccttccttgccgcctgcctgctccatgacttaggtcatttcccctatacccactctttaaaagaattgtccctgtcttcccatgagtcgcttacaggcgaaataatcatgaaagaacccatgaaaagccttgtgggcgcggcaggagcggaccctgagcttaccgcggcgataattgacaaagaaaaaaatgaaattcagagcgatgagcttcatttttaccgtaaactactgtccggggcgcttgatcccgataaactcgactatcttaaccgcgatgcccgctattgcggagtcccctacggcgcgcaggatgtcgattttattctttcaaggcttcagccggacaaaaaacgcggagttgacatcgattcccgcctgattccaaacgtagaatccatacttttttcaaaatatttgatgtaccgtaccgtttattggcatcgtcaggtacgcgccgtaaccgcaatgcttaaaaaagctcttataaacgggcttaaaacagaacaaataacgggcgaagacctgtatgaccttgacgattacagtcttttttcacttcttgagaaaaaaatcaaaaaaatcgagggttccccgattaacggagccgcccttgtggaatatgtgcgcgaagggaatatatacgccgcaatttga

SEQ ID NO: 5970 - protein, 288 aa, Unknown
  Obtained from environmental sample
  DOMAIN (37)...(163): HD domain
  misc_feature (1)..(288): Xaa is any amino acid
MRENQAKXTESAPFMRLNRIMQLGPVYLVYPGATHTRASHSIGVYHLGKRLLQNLAQRGAEDWLTNEGINSFLAACLLHDLGHFPYTHSLKELSLSSHESLTGEIIMKEPMKSLVGAAGADPELTAAIIDKEKNEIQSDELHFYRKLLSGALDPDKLDYLNRDARYCGVPYGAQDVDFILSRLQPDKKRGVDIDSRLIPNVESILFSKYLMYRTVYWHRQVRAVTAMLKKALINGLKTEQITGEDLYDLDDYSLFSLLEKKIKKIEGSPINGAALVEYVREGNIYAAI

SEQ ID NO: 5971 - DNA, 558 bp, Unknown
  Obtained from environmental sample
  misc_feature (1)..(558): n is a, c, g, or t
gtgctgcaggcgccctacagcataggcgataccgtttcggcgcagtcggcgctgtttgtggtgggcgacctttccgtcctgcgggtggagacctttgtgccagagcgctttgtctcgtctatcaggccggggcttggcgcttcggtcagtcttgaagctcttcccggcgaaacctttccggcggagatagacgaggtaaaccccgtgcttgatccggcaagcagaaccctcaggataaggctccgctttgttgacagggcaggcagaggcgcggcggatccccggattaaggcggggatgttcgccacaatcagccttgtcaccagaaccagggcaaatgtgcctatcatacccaggaattcggttatcaacacctacggctcatggatagcctttattatagatgaaaacaacatcgcccgacggcgtgtgctggaattgggcattgaaaacgaaagattttttgaagtgataagcggcatcagcctcggagaacgggttgtaagcgcagggcaaaactttctgacggacggcgaccctgtccgcatcgtggaataa

SEQ ID NO: 5972 - protein, 185 aa, Unknown
  Obtained from environmental sample
  misc_feature (1)..(185): Xaa is any amino acid
MLQAPYSIGDTVSAQSALFVVGDLSVLRVETFVPERFVSSIRPGLGASVSLEALPGETFPAEIDEVNPVLDPASRTLRIRLRFVDRAGRGAADPRIKAGMFATISLVTRTRANVPIIPRNSVINTYGSWIAFIIDENNIARRRVLELGIENERFFEVISGISLGERVVSAGQNFLTDGDPVRIVE

SEQ ID NO: 5973 - DNA, 519 bp, Unknown
  Obtained from environmental sample
  misc_feature (1)..(519): n is a, c, g, or t
ttggaaatgcgcgtggccatactaaacaaaaaggcggatacgtggaacctaagcctccccgaggaaatcctctactacatcggcgaaaacgtcccgtccaacatcagggcactggagggcgctataagaaccatctacggtctggccctggttaaaggcggcggcgaagacatcacgctggacttggcaaaggacgccctcaaggaaatcatcaaagcgccggaaatatcaagggtatccatagaccgcataatagaaaaaaccgccgccttctacagcgtcccggtaaataacgtcctggaaaagaataaaagaaaagaggtcgccatgtgcaggcaggtggcaatgtacatctccaaaaaactgacgaaccatagcctaaagtccatcggactgaatttcggcgggagagaccacagcaccgtcatacacgcggtggacgtcgtcgaggaacttatcaagagcgacgccggcatggcacgggacgtagaggccataatcgcgtcgctgcggcagtaa

SEQ ID NO: 5974 - protein, 172 aa, Unknown
  Obtained from environmental sample
  DOMAIN (80)...(149): Bacterial  dnaA  protein helix-turn-helix domain
  misc_feature (1)..(172): Xaa is any amino acid
MEMRVAILNKKADTWNLSLPEEILYYIGENVPSNIRALEGAIRTIYGLALVKGGGEDITLDLAKDALKEIIKAPEISRVSIDRIIEKTAAFYSVPVNNVLEKNKRKEVAMCRQVAMYISKKLTNHSLKSIGLNFGGRDHSTVIHAVDVVEELIKSDAGMARDVEAIIASLRQ

SEQ ID NO: 5975 - DNA, 810 bp, Unknown
  Obtained from environmental sample
  misc_feature (1)..(810): n is a, c, g, or t
atgcctgtatttttcgttattttgcttgtattatttaatgttttcccggtctacagtcttgatctgcccatctctaaaatatcagacgattcgcttgtaagactaaaaattaaagactcatggatgatggaagcgcctgtcagagtactgtcgcaatacgcaagaagagaaacattggaaaccggagagagggtggaaatccgcactacggaaggcagggaagagtttatagtgcacgtgtcaagggaattgatgcgcgggacgagcgcggaaaacaggataggcacagggcagtttcccggctggatacaaggatcatggatgctgacgcggcgcaaggataacggcgatggcactcagataaaaatattcctgcgttcagatcagcaaacatttattcaattccatcgttttagccaggataaatgtctaatggacgcggttgtatacggcggctttgtcgcccattccgtaccggtcgcggttccgtttgagcgtttatatacaatgcagttaaacgatattttacggcttgttgaaaataaatttccaataagatattttgagcctgatatttccaactataaggaaactataacgtttatcacgcaggtgcgctcgcgtattaagggcttgcgttttgtcgatgacggcgcgattgatgaaaacggaaaatttgtttttatcgaaacattacaaccgcagccatccaacttgcagggatttaactgctccggttttacaaaatggctgatagacggcattctgcgccctgtcacaggagcgagatatcaactcggccgattctga

SEQ ID NO: 5976 - protein, 269 aa, Unknown
  Obtained from environmental sample
  SIGNAL (1)...(19)
  misc_feature (1)..(269): Xaa is any amino acid
MPVFFVILLVLFNVFPVYSLDLPISKISDDSLVRLKIKDSWMMEAPVRVLSQYARRETLETGERVEIRTTEGREEFIVHVSRELMRGTSAENRIGTGQFPGWIQGSWMLTRRKDNGDGTQIKIFLRSDQQTFIQFHRFSQDKCLMDAVVYGGFVAHSVPVAVPFERLYTMQLNDILRLVENKFPIRYFEPDISNYKETITFITQVRSRIKGLRFVDDGAIDENGKFVFIETLQPQPSNLQGFNCSGFTKWLIDGILRPVTGARYQLGRF

SEQ ID NO: 5977 - DNA, 450 bp, Unknown
  Obtained from environmental sample
  misc_feature (1)..(450): n is a, c, g, or t
gtgctgatatacatcgtcctgaaaaaaaccgttttcggttatgagttaaaagcctgcggcttcaaccgcgagtccgcgcattacgcggggatcaacgagcggcgcagcattgtcgtgtccatggttatcgccggggcaatgtcagggctgggcggcgccatgctgtaccttgccggttcagggaagggcataaccgtggttgacgtgctggcaatggaaggctttaacggcatacccgtcgcgcttctggggcttaacaatccgctggggatcatcttttccggcctgctggtggcctatcttaatgtgggcggattcaacatgcagttatacaaatttgcgcctcaggtcatcgagatcattataggggtgattatctacttcagcgccttcgcccttttgctaaagggctttattacctccctgagaaaacgctgggggaaaccatga

SEQ ID NO: 5978 - protein, 149 aa, Unknown
  Obtained from environmental sample
  misc_feature (1)..(149): Xaa is any amino acid
MLIYIVLKKTVFGYELKACGFNRESAHYAGINERRSIVVSMVIAGAMSGLGGAMLYLAGSGKGITVVDVLAMEGFNGIPVALLGLNNPLGIIFSGLLVAYLNVGGFNMQLYKFAPQVIEIIIGVIIYFSAFALLLKGFITSLRKRWGKP

SEQ ID NO: 5979 - DNA, 927 bp, Unknown
  Obtained from environmental sample
  misc_feature (1)..(927): n is a, c, g, or t
gtggacagattcggccgagaccataattcagggctatttgcaggaagcatacagctactcagcaggcgactccgcgctgctcgcagaatacatcaccatttcaacgccgtgtatcgcgggaactggagctattttacaggacgcttcaagaagcctgttgtagataaccttaaccgcgattccgccggactggctgtccggtatcaggaatggcccggcagaaccctcatgctcatacctctaaatgccgggggcttaagttccattaacacttcggcgatttcggacagccgtgtggttgaaagaatgcggactgaagacgacaggggagttccccagcgtcagggtatggttgatctgaaagagcgcgaggccgcacaggcgaagaaggaagccgcggaaaaacaagaagccgccagggccgaagcgggcgcaatcgccaaagacaggcaatcgcttgatgaagaacaacggcaaatagaaagagacagacagcgccttgagcaggaaaaggcctctggcaaaattacagatgaagaagccgcccggagggatgcggagcttgcccgacgtgaatcggacgcggataaaaaatcagacgcgttggatcagcgggaaagcgatctggccgcgcagaggcaggatgcggcaagacaggaacagtttgcccagcaaaaacaggatgaagccagacaggacagagaaagcatcgccaaagaccagcaggcaatgctcgatctgggcttgccgccccagggctcattccagggagtaatcagccttgtaattgagaaggcggatgccacctccggcaggctggtcagcattgatcctgctacaggccaggaactgcggcgctcggcgttgagcacggtgtatgtacggacgcttaccatattaacaataggtactggcaattgcccgtga

SEQ ID NO: 5980 - protein, 308 aa, Unknown
  Obtained from environmental sample
  misc_feature (1)..(308): Xaa is any amino acid
MDRFGRDHNSGLFAGSIQLLSRRLRAARRIHHHFNAVYRGNWSYFTGRFKKPVVDNLNRDSAGLAVRYQEWPGRTLMLIPLNAGGLSSINTSAISDSRVVERMRTEDDRGVPQRQGMVDLKEREAAQAKKEAAEKQEAARAEAGAIAKDRQSLDEEQRQIERDRQRLEQEKASGKITDEEAARRDAELARRESDADKKSDALDQRESDLAAQRQDAARQEQFAQQKQDEARQDRESIAKDQQAMLDLGLPPQGSFQGVISLVIEKADATSGRLVSIDPATGQELRRSALSTVYVRTLTILTIGTGNCP

SEQ ID NO: 5981 - DNA, 378 bp, Unknown
  Obtained from environmental sample
  misc_feature (1)..(378): n is a, c, g, or t
gtggaggaaaaaacgatgatagaaacattcaaggatttgctggtttggcaagaagcgatgaatatagtcgaaatgatctatctacaaacaagtagtttcccaaaagaggaaatgtacggattgaccaatcaagtcaggcgggcggcagtctcaattccggctaatatagcggagggcaatggccggataacccggaaagagtatcttcgtttcctgtatatagcaaacggttcaatgaaggaattggaaactcatttactgatagcagaacgactcaattttctgacaaaagagtcattggaaaaaatccaagtgaaattgcaaacagtggggaaactattgactaccttaagaaaatctctggctctcaaacagtaa

SEQ ID NO: 5982 - protein, 125 aa, Unknown
  Obtained from environmental sample
  DOMAIN (8)...(117): S23 ribosomal protein
  misc_feature (1)..(125): Xaa is any amino acid
MEEKTMIETFKDLLVWQEAMNIVEMIYLQTSSFPKEEMYGLTNQVRRAAVSIPANIAEGNGRITRKEYLRFLYIANGSMKELETHLLIAERLNFLTKESLEKIQVKLQTVGKLLTTLRKSLALKQ

SEQ ID NO: 5983 - DNA, 381 bp, Unknown
  Obtained from environmental sample
  misc_feature (1)..(381): n is a, c, g, or t
atgcccggttgcgagtctcgcacgggagtttccggttgccctgttgaggaacccaacgcgggcatgcccagtagggtaacaggtgttgttgaagtccagcagtttcgatataagggcaggcggattcgtcgcaactcactaattcccgccggtaaaatcgaagctttttgtagtatggatcagcaggccagggacttgtttcacaaggcctttacctgcttgggacgttcagtccgagcctgcctcggcatttggtgggtagcacggacaatagcagacctggacggcaaggaaaccattggcccggtacatattctggaagcggtccaactccgtcgttatcgggaggatccttatgagattgttactatgcgggagtag

SEQ ID NO: 5984 - protein, 126 aa, Unknown
  Obtained from environmental sample
  misc_feature (1)..(126): Xaa is any amino acid
MPGCESRTGVSGCPVEEPNAGMPSRVTGVVEVQQFRYKGRRIRRNSLIPAGKIEAFCSMDQQARDLFHKAFTCLGRSVRACLGIWWVARTIADLDGKETIGPVHILEAVQLRRYREDPYEIVTMRE

SEQ ID NO: 5985 - DNA, 546 bp, Unknown
  Obtained from environmental sample
  misc_feature (1)..(546): n is a, c, g, or t
gtggtcggcatatccggtttcaagagctgcgcctataaccccgatggtctggatatacccaagctggaagcctgggtagcggaaacaaattatatccagggcttcccgcaagccaaaatattcccgcttgaagaggttctctacctcgactgcgatgtcctgattccggcggcaaccgaagcggttatcaccggcgagaacgcggacaagatcaaggcaaagtatatcgtcgagggcgcgaacggcccgacgacgcccgccgccgaagcgatactcaccaaaaaaggcgtgaccatcattcccgatatcctcgccaacgccggcggcgtgatcgtctcctattttgaatgggtgcaaaacgggatgttcttctactgggatgaggacgaaatcctgaacaggctcacccgcgcgatgatcaagtcattccaggatgttgatgccatccataccgaatatcagggcattacctaccggcaagcggcctacgttcttgccctccggcgcgagaacaccgcccgccggatgcgcgggtgctacccctaa

SEQ ID NO: 5986 - protein, 181 aa, Unknown
  Obtained from environmental sample
  DOMAIN (3)...(178): Glutamate/Leucine/Phenylalanine/Valine dehydrogenase
  misc_feature (1)..(181): Xaa is any amino acid
MVGISGFKSCAYNPDGLDIPKLEAWVAETNYIQGFPQAKIFPLEEVLYLDCDVLIPAATEAVITGENADKIKAKYIVEGANGPTTPAAEAILTKKGVTIIPDILANAGGVIVSYFEWVQNGMFFYWDEDEILNRLTRAMIKSFQDVDAIHTEYQGITYRQAAYVLALRRENTARRMRGCYP

SEQ ID NO: 5987 - DNA, 537 bp, Unknown
  Obtained from environmental sample
  misc_feature (1)..(537): n is a, c, g, or t
atgacaaagaaaaacgccgctttcctgctggcccttgtgccggcgctggcggcggctttttcatttattctgccgtacgccgcaagtttcgcgcccgctgtccttaaatttccttacgtttttaaaacatttttgaataacactgcattaattaacattacactctttacttttaagcaggcttttttcagcgtgcttgtttcgcttgctttaggacttcccggcgcgtggtttataggaaacagccgctcccgctttacgccttttcttaaaacgcttacagcgatcccttttgccatgccttcaattctggtggttctgggctttgtactatttttcggaaactcaggctggataaaccgcctttttactgtaaggatactctacaaaccgcaggctgtaattctagctcacggtttttttaattttccgcttgtgatacgccttgcaggggacggaatagcgagagcgaaacgcgcttacgctccggcggcggcaagtcttggagcctctccgcttaaaacccatctacagtga

SEQ ID NO: 5988 - protein, 178 aa, Unknown
  Obtained from environmental sample
  SIGNAL (1)...(17)
  misc_feature (1)..(178): Xaa is any amino acid
MTKKNAAFLLALVPALAAAFSFILPYAASFAPAVLKFPYVFKTFLNNTALINITLFTFKQAFFSVLVSLALGLPGAWFIGNSRSRFTPFLKTLTAIPFAMPSILVVLGFVLFFGNSGWINRLFTVRILYKPQAVILAHGFFNFPLVIRLAGDGIARAKRAYAPAAASLGASPLKTHLQ

SEQ ID NO: 5989 - DNA, 393 bp, Unknown
  Obtained from environmental sample
  misc_feature (1)..(393): n is a, c, g, or t
atgttcggcccggccggccatacttacgtttactttatttacggaatgtactattgccttaacatcgtcagcggaaaaaacggagaaggcgaggcggtgttgatccgcgccctggaacccatccagggaattgagatcatgatgaaaaggcgaaacacaaacaaaatagaaaacctctgcaacgggccggggaaattaacgcaggccttcggcattacaaaggagcataataacaaaagcctcttaacaggtgaattgcagatccacaacagcagggaaaaaccgggaatcgaaaccagcaagcgaattggcttgtcagcgggcggggagcttgagctgcggttttttattaatggaagcagatttgtgtcaaaggtgccgaaaaatccctaa

SEQ ID NO: 5990 - protein, 130 aa, Unknown
  Obtained from environmental sample
  DOMAIN (1)...(122): Methylpurine-DNA glycosylase (MPG)
  misc_feature (1)..(130): Xaa is any amino acid
MFGPAGHTYVYFIYGMYYCLNIVSGKNGEGEAVLIRALEPIQGIEIMMKRRNTNKIENLCNGPGKLTQAFGITKEHNNKSLLTGELQIHNSREKPGIETSKRIGLSAGGELELRFFINGSRFVSKVPKNP

SEQ ID NO: 5991 - DNA, 516 bp, Unknown
  Obtained from environmental sample
  misc_feature (1)..(516): n is a, c, g, or t
gtgtacaccaactgcgaagaggtagaactctggattaacggtaaaaaaataggtcgcagaaaacttgaaaaattccggaacaatataatagactggcctttcgattacacaccgggagaattaagactggttggctttcgcggcgggaaagaggctgttgtacaggaaataaaaaccgcgggtcctcccgcgattataagccttaaagcggataagactgcgcctgagctaaactccttggttcatatagaaataaatatcacagatgaagtcggtatacccaaccccgctgaaaatctgcttcttggtttttctctggaaggagacggtgaaataatagggacgtcttcgcccaatcttaataactttttgggctttgatcttccaagggtctatacatctctgggccgagcattggcaatagttaaagccggagactcagcaggagaactggttttttcagcttatggtgaaggcttaaaaacaagaaccttgagattcactgtcggtcagtag

SEQ ID NO: 5992 - protein, 171 aa, Unknown
  Obtained from environmental sample
  misc_feature (1)..(171): Xaa is any amino acid
MYTNCEEVELWINGKKIGRRKLEKFRNNIIDWPFDYTPGELRLVGFRGGKEAVVQEIKTAGPPAIISLKADKTAPELNSLVHIEINITDEVGIPNPAENLLLGFSLEGDGEIIGTSSPNLNNFLGFDLPRVYTSLGRALAIVKAGDSAGELVFSAYGEGLKTRTLRFTVGQ

SEQ ID NO: 5993 - DNA, 900 bp, Unknown
  Obtained from environmental sample
  misc_feature (1)..(900): n is a, c, g, or t
atgacagatcggccgangtcgcaaaacaagatgttctcgatagctacctacgttattgatgtgcgcgccgcgttaacaaacatttttatccgcaaggactggcttgataaactcggactccccttgccaaagaccaccaaggaattccacgacgctctggtggctttccgcgacagggatccaggtggtgtgggaaggaacaacataattccgtatttctgtggtactgatgcgcggtggggtttcagacccataatatacgcttactttgatcccaaaatcagcccaagggatgaatggatatacaatataaccgataggcctatcagtatgccgggcttcaaggaaggcgtgcggctgatcaaccagtggtacaacgagggtcttatattccgtgattttcccataacgactgattcaaacgatgcccttgtaaagagcggtgttgtaggcgctttttccgcgaactgggatgctccctttagaacagatgtcttgattaatgaaaccttggcaaagaatgtcccgggcgcggtatttgtgcccgtagactgcatacagtcccccgacggaattaaccataaaattatttccgacaaacctgaccggcgggtttttgtacccgctttttccaagaatcctgaagcagcccttaggtaccttaactggcttgctaagtatgaaaatttcaactttttacagcttggaaacgagggtgtaacacatgaactggtgaacaacattccgcggaccgttgctgctaccggggattggattatgaattcccccaataacattgatcttacaatgccgatgaacggcgttgaattgctcgataatgacaagaattccagagtcctcgctttgggtacggtaatacgcctcangaactcgttttga

SEQ ID NO: 5994 - protein, 299 aa, Unknown
  Obtained from environmental sample
  misc_feature (1)..(299): Xaa is any amino acid
MTDRPXSQNKMFSIATYVIDVRAALTNIFIRKDWLDKLGLPLPKTTKEFHDALVAFRDRDPGGVGRNNIIPYFCGTDARWGFRPIIYAYFDPKISPRDEWIYNITDRPISMPGFKEGVRLINQWYNEGLIFRDFPITTDSNDALVKSGVVGAFSANWDAPFRTDVLINETLAKNVPGAVFVPVDCIQSPDGINHKIISDKPDRRVFVPAFSKNPEAALRYLNWLAKYENFNFLQLGNEGVTHELVNNIPRTVAATGDWIMNSPNNIDLTMPMNGVELLDNDKNSRVLALGTVIRLXNSF

SEQ ID NO: 5995 - DNA, 966 bp, Unknown
  Obtained from environmental sample
  misc_feature (1)..(966): n is a, c, g, or t
ttgatcgcgagtgtggcgcgataccccatcgatggggatggaagcaaccttatgggctaccggccttggcgaccagcaagggagataattgactggtctattcccggaacttccatattcagccgtaaaaagcccctcgctgacgctactataaggcgcatagcggcggggatagaaaaatactggaaggagtacgcacagccgttcctagcggtactatacggcacgagtacggttaaatcgctggacgatcctctgaccgcagtatcaagcgttcctcatcatgccctggttgagccggttccattgctcatggggcatgaaacgggacaagcgccgaggccgatagacaagcctgcttattcggtattagcgcaagggaaacaatttttgattgagccttttatcacgcgataccagggcgaccatgccgggcagcaggacggcgagaaccgcaaccacggcgtggagaggccgctgccgaccgtggacacatcgaaccggtacggcttagtggaacccctgctggtagactttacgcataacaacgagccttatccggtgagcgatccggttcggactattactacaaagtgccatttcggtttattggagccgctgtgcatggagtattatggaaacggcaaatcaaagcctgtaagcgagcctctgggaaccgtaacgacaaaagaccgcttcgctctccttgagccattcattctcaataccgggcatagttccgcaaaggacaggtctcgttccgtggccgatcctttgaccacggtggttacgaaagcggagcattacttggttgagccgaccgtgtgcctggacatcaggttcaggatgctgaagaaccacgagttaaagagggcgcagggcttcccggatgactacataatcaccggaaataccacgggaacaaacgaagcaaatcggcaacgctgtgcctggttatacggctaa

SEQ ID NO: 5996 - protein, 321 aa, Unknown
  Obtained from environmental sample
  misc_feature (1)..(321): Xaa is any amino acid
MIASVARYPIDGDGSNLMGYRPWRPAREIIDWSIPGTSIFSRKKPLADATIRRIAAGIEKYWKEYAQPFLAVLYGTSTVKSLDDPLTAVSSVPHHALVEPVPLLMGHETGQAPRPIDKPAYSVLAQGKQFLIEPFITRYQGDHAGQQDGENRNHGVERPLPTVDTSNRYGLVEPLLVDFTHNNEPYPVSDPVRTITTKCHFGLLEPLCMEYYGNGKSKPVSEPLGTVTTKDRFALLEPFILNTGHSSAKDRSRSVADPLTTVVTKAEHYLVEPTVCLDIRFRMLKNHELKRAQGFPDDYIITGNTTGTNEANRQRCAWLYG

SEQ ID NO: 5997 - DNA, 405 bp, Unknown
  Obtained from environmental sample
  misc_feature (1)..(405): n is a, c, g, or t
atgacaggggtgcaaatggaaacaattataacggcaaatgacgtggtggcgtttgtcaaattatctttaacgtctgtcaggcgtttgataatgcaaaatgtggaatttgacccaaatgctgattgcctgctttggaagcagtttgtccgtgaaattatggggtataaagcggatttgataaagtttgttcaaactgcggcggggtggtctttgtcgggtgatatttcagagcaaactatgtttatcctgtacggaaccggcgctaatgggaaatcaatgtttcttaatacgataatgcaccttttaggcgattatgctcttgcaacgcctacggaaacttttatgaaaaaatcgggggataactatttcaatgacgttgcccgcctacgggtacccggtttgtga

SEQ ID NO: 5998 - protein, 134 aa, Unknown
  Obtained from environmental sample
  misc_feature (1)..(134): Xaa is any amino acid
MTGVQMETIITANDVVAFVKLSLTSVRRLIMQNVEFDPNADCLLWKQFVREIMGYKADLIKFVQTAAGWSLSGDISEQTMFILYGTGANGKSMFLNTIMHLLGDYALATPTETFMKKSGDNYFNDVARLRVPGL

SEQ ID NO: 5999 - DNA, 393 bp, Unknown
  Obtained from environmental sample
  misc_feature (1)..(393): n is a, c, g, or t
atgagagttgagtatatcaacccctttgtggaatcagcttatgccgtgttaaaggaagtgttaagcattgaagttaaacggggagaaatatatcttaagcctacttcaatgtctatcatgggcgttgcggctcttgtcgggcttgcgggtgatgtggaagggcgcgttctttttgatatgacaaaagagacggcattatttgtagccggcaaaatgaacggtgaaaatttcacagtctttgacgaactgggcaaagcgaccattcaggagttggctaatatgattacagctcaggctgtaaccaagcttcacgatcttggctttaagtttgaccttactccgccggctctctttaccggtgataatatggaagtttctacaaaccctgggtga

SEQ ID NO: 6000 - protein, 130 aa, Unknown
  Obtained from environmental sample
  DOMAIN (83)...(119): CheC-like family
  misc_feature (1)..(130): Xaa is any amino acid
MRVEYINPFVESAYAVLKEVLSIEVKRGEIYLKPTSMSIMGVAALVGLAGDVEGRVLFDMTKETALFVAGKMNGENFTVFDELGKATIQELANMITAQAVTKLHDLGFKFDLTPPALFTGDNMEVSTNPG

SEQ ID NO: 6001 - DNA, 360 bp, Unknown
  Obtained from environmental sample
  misc_feature (1)..(360): n is a, c, g, or t
atggctgtttcacaagcgccaaatatgacgtataatctggaagatgtgccggaatattgcaagccttatttggtacagggaaagaacggttattcctttaatcagaccataaaggactcgattgtttttgagtaccatgatataataaatgaaaataccattcctgaagtggatatgattcttgtaagggatgttatttcattcttggacgcggagacacagacaagaataattgcggatttttcggagaaactgaaaaaccatggaattgttattctgggcaggaacgaagagcttacaggggttatttgggaagcaattgccgatgatcctgtttccgctttttcgcataatgcataa

SEQ ID NO: 6002 - protein, 119 aa, Unknown
  Obtained from environmental sample
  DOMAIN (1)...(115): CheR methyltransferase, SAM binding domain
  misc_feature (1)..(119): Xaa is any amino acid
MAVSQAPNMTYNLEDVPEYCKPYLVQGKNGYSFNQTIKDSIVFEYHDIINENTIPEVDMILVRDVISFLDAETQTRIIADFSEKLKNHGIVILGRNEELTGVIWEAIADDPVSAFSHNA

SEQ ID NO: 6003 - DNA, 804 bp, Unknown
  Obtained from environmental sample
  misc_feature (1)..(804): n is a, c, g, or t
ttggattatgacgacgtgctgaaccagcagcgaaaatttatttacgaacagcgcgacgcgatcttgcttgataccgatttgaaaaacagggtgaatgacgccaccgccggccttgtaggggctttgattgacgaattcaaccgggaacagcggcaggatacggccgcggccctaaaaaatttgaacgaacagctccgaaccaaattcggctatcaattaacgcttgatcaaaatgatattaagaacaccgagtcgcttgaaaagaaaatcatcgccgatcttgagaaggacattagcgacaaggaagcccttatcggccctgactatcttaacatgattataagggacagctaccttcacgcgattgacaacaaatggcttgaccacctggaaaatatggaggctctgcgtgaagccgtttacctgcgccattacgcgcagaaaaacccccttacggaatacaaggttgaaggcttccagatttttgacagcatggttgatgacatacgccaggagatagcgtcgcgcctgcacctcgtgaggattcaggtcgcgcccgcgggcgactcccgcaggcccagccgcacaatcgccacatcgcaatcggcaagccacagcagcatgggttctttcggcggcgccggagggcgcggttccgcctctcccatgggcgcgggcgcgccgtatggcggcgcgagccgccccgacggcgcgaccgttatacgcagccaacccaaagtaggccgcaacgacccatgcccctgcggcagcggacggaaatacaagcactgccacgggaagtaa

SEQ ID NO: 6004 - protein, 267 aa, Unknown
  Obtained from environmental sample
  DOMAIN (249)...(267): SEC-C motif
  misc_feature (1)..(267): Xaa is any amino acid
MDYDDVLNQQRKFIYEQRDAILLDTDLKNRVNDATAGLVGALIDEFNREQRQDTAAALKNLNEQLRTKFGYQLTLDQNDIKNTESLEKKIIADLEKDISDKEALIGPDYLNMIIRDSYLHAIDNKWLDHLENMEALREAVYLRHYAQKNPLTEYKVEGFQIFDSMVDDIRQEIASRLHLVRIQVAPAGDSRRPSRTIATSQSASHSSMGSFGGAGGRGSASPMGAGAPYGGASRPDGATVIRSQPKVGRNDPCPCGSGRKYKHCHGK

SEQ ID NO: 6005 - DNA, 771 bp, Unknown
  Obtained from environmental sample
  misc_feature (1)..(771): n is a, c, g, or t
atgacgtcgatatgccgagaaatttggctaagagcgttaccgtggagtgagagacgcggtgcggacgaagaccttaataattttgattccgaaagcgcagatactatattcattgctatggaatctaagccaaaatccaaatcaaagcccaccgttaaagcgataatcgccgtcgttgcccttctgctgctctccggcggcggtgtttacggttactaccgctatcagcgcgccgccgacaaccggcccaaggagtacgagaccgtctccgtgtcccgcgggacggtggagcgcgtcatcgtcagcaccggaactctcgaccccgtcggctccgtggaggtcgggacgcaggtctccgggactgttgagaaggtgctcgttgacttcaacgacaccgtcaaggccgggcagatcatcgcggagattgaccgcagcgtgcttacgagcaaactgacggaggcgcaggcctcgtattcgcgggccgaggcgctgtttttgcagagcgagcaggagttcaagcgcggggaggtgctgttcgagaaggggttgatttcggagcaggatttcaccaaggcgcgtaccgactacctgtcgcagaaggcctcgttgcaggtcgccaaggcggcggttacgacggccgccgagaacgtgcgctacgccactatccgctcgcctgtgcgggggacggtcatcaaacgcgccgttgatgtagggcaaacggtcgcggcgagcctcagcgcgcctacgcttttcgtcatcgccgaggactga

SEQ ID NO: 6006 - protein, 256 aa, Unknown
  Obtained from environmental sample
  misc_feature (1)..(256): Xaa is any amino acid
MTSICREIWLRALPWSERRGADEDLNNFDSESADTIFIAMESKPKSKSKPTVKAIIAVVALLLLSGGGVYGYYRYQRAADNRPKEYETVSVSRGTVERVIVSTGTLDPVGSVEVGTQVSGTVEKVLVDFNDTVKAGQIIAEIDRSVLTSKLTEAQASYSRAEALFLQSEQEFKRGEVLFEKGLISEQDFTKARTDYLSQKASLQVAKAAVTTAAENVRYATIRSPVRGTVIKRAVDVGQTVAASLSAPTLFVIAED

SEQ ID NO: 6007 - DNA, 582 bp, Unknown
  Obtained from environmental sample
  misc_feature (1)..(582): n is a, c, g, or t
ttgaaacaccgtatacacgatatcgttgacaactatcaaaagctatgcgcatactgcgattctatttggaaccgcgtgagagaggcgtatcccgatgaaatagcgtgcagggaggggtgcgggatatgctgcgagctgcggactgttaatcagatagaggctcatgttatacggtcttatatcgacaacaataagaatctttcgggggatggatgtatcgacaatatgagtgtcgataatgacaacgcggacgcctgtccgtttttacgccgtcaatcctgtacgatctaccccgcccgcccgatcatctgccgtacgcacggccttatactgcgctcttcggaattcccgctctctaagcgggcggcgagctgtccgtacaacttcccctccgtccacccggacgacttcccgccggagcttacggcggacgcggacgtcataacgaagaacctcgtcagcctgaatctggcgttctgcatggcgagcgggatagatatcaaagacggggcggaaggtacggaaagccgggtgcttttgcgcgatatatttgactcatcgccatcaacacccgctttttga

SEQ ID NO: 6008 - protein, 193 aa, Unknown
  Obtained from environmental sample
  DOMAIN (34)...(130): Uncharacterised protein family (UPF0153)
  misc_feature (1)..(193): Xaa is any amino acid
MKHRIHDIVDNYQKLCAYCDSIWNRVREAYPDEIACREGCGICCELRTVNQIEAHVIRSYIDNNKNLSGDGCIDNMSVDNDNADACPFLRRQSCTIYPARPIICRTHGLILRSSEFPLSKRAASCPYNFPSVHPDDFPPELTADADVITKNLVSLNLAFCMASGIDIKDGAEGTESRVLLRDIFDSSPSTPAF

SEQ ID NO: 6009 - DNA, 738 bp, Unknown
  Obtained from environmental sample
  misc_feature (1)..(738): n is a, c, g, or t
gtgattgttatggctaccgtaatggaagtgctctgtctgcggctcatgaaaaacgcgcttttccccagggaagaagaggccgcggacagcctgcacgcgcgttccggcagaaaaggttctggtcgggttattctgcttccgccgcccaagagcgaacatgttgaagtttttcccgagccgactgccgagccatctgccgcgccggaaatcccgcccgatgaacaaggcgctgaagaacaaggtcttgaggaaacgggcattgatgaaccaggtgttatcgaagagaccgcacccaaatctgtcgaggacaatttcgcggatgccagcatcgcaacggacagcattgaacgcgccatcgaagaggcggaagcagcagccgcagcccaccacagcgagcaggcccggaaaaaacccgctacaggccgcaccggtagcaggaaatataaagtcccgttggatattcttaatgaatacccggacggcgaatactggatcattgatcaggccaccagggacgcggcaatggccctgaaggaaacgctggaagaattcaaaattcaggccgaggttaccggaatccgcaaagggccggtaatcaccatgtttgagattctccccgcgccgggcgtaaaactctcccgcattgtcggcttgcaggataacatcgccctgcgcttggccgcttcctcggtgcggattgttgcccccattccccggaaaacacgcgggggggcatag

SEQ ID NO: 6010 - protein, 245 aa, Unknown
  Obtained from environmental sample
  misc_feature (1)..(245): Xaa is any amino acid
MIVMATVMEVLCLRLMKNALFPREEEAADSLHARSGRKGSGRVILLPPPKSEHVEVFPEPTAEPSAAPEIPPDEQGAEEQGLEETGIDEPGVIEETAPKSVEDNFADASIATDSIERAIEEAEAAAAAHHSEQARKKPATGRTGSRKYKVPLDILNEYPDGEYWIIDQATRDAAMALKETLEEFKIQAEVTGIRKGPVITMFEILPAPGVKLSRIVGLQDNIALRLAASSVRIVAPIPRKTRGGA

SEQ ID NO: 6011 - DNA, 864 bp, Unknown
  Obtained from environmental sample
  misc_feature (1)..(864): n is a, c, g, or t
atgaaaacgggccagaccgaaaataacgccgcgggcaaaaaggtcccccaagagcttaggggcgaatccgtcgtcttgggatggggcgtcggcaaagcctacttggtcggccgcgccgtcaagcagcaaggttccgccgccgtcgcctccatagcgcgcgaagaggtcggcgccgaaatcgtccgtttcaacgatatacgcgacaaggcgcatagggattaccaaaaactcaggcaagacctagacagcgacagcgcggtagactcgtcaatcctcaacacctacgaatacatactcgacgacccggcctttgtaagccaggtggtggagacaatgtccgtcaaactctttgacttggaaacctctatccgtttggtatccaacgagttcataaaggggtttgaggccgccgacaccgcctatttcaaggagcgcgccggcgatgtggtagaggtttgcgaaaagctggtctcctatttgaacaacgagggcggacgcgccaagaccttcgccgaaccggtcgtgcttgtcgttttgcggacgttcacacccactgacattttagcctacgaccgttctaagatcagcgccgtcataacgacgagcggcggtaagacctcccacgcggccatattggcgcgctcgtacaacatcccggtcatctccggcgtacgcaacatcaccgaccgcataaagccgggcgacgaggtgctcgtcgactccgacaagggcttagtgcttgtccatccagagaagcagacggtggaagattacgccagaaagacgcacggcgagggcatatataggggagttgcggtcgaaatgggaccgccccgtctacacgaaaggacggtatacgcatag

SEQ ID NO: 6012 - protein, 287 aa, Unknown
  Obtained from environmental sample
  DOMAIN (19)...(146): PEP-utilising enzyme, N-terminal
  misc_feature (1)..(287): Xaa is any amino acid
MKTGQTENNAAGKKVPQELRGESVVLGWGVGKAYLVGRAVKQQGSAAVASIAREEVGAEIVRFNDIRDKAHRDYQKLRQDLDSDSAVDSSILNTYEYILDDPAFVSQVVETMSVKLFDLETSIRLVSNEFIKGFEAADTAYFKERAGDVVEVCEKLVSYLNNEGGRAKTFAEPVVLVVLRTFTPTDILAYDRSKISAVITTSGGKTSHAAILARSYNIPVISGVRNITDRIKPGDEVLVDSDKGLVLVHPEKQTVEDYARKTHGEGIYRGVAVEMGPPRLHERTVYA

SEQ ID NO: 6013 - DNA, 849 bp, Unknown
  Obtained from environmental sample
  misc_feature (1)..(849): n is a, c, g, or t
gtgataaaggccgacggccttgccgcgggaaaaggcgttgtgattgcgcataacttgcatgaagccgaggaaacgcttgcctccttcatgaagcagaaaagcatgggcgacgccggcacttcggttctgctggaggaattccttgaaggcaaagaggtttcaatactggccgcggtaagcgtttaccggggcaagggttatatcctgccctttatcacggcgcgggatcacaaacgccgttttgagggcgcccgggggccgaacaccggcggtatgggggcgatagccccggttcccgatttttcacagaaagcgcaggacgattttatcaaatcaattttggacccgaccctcagcggcatcagagccgaacgctttgactaccgcgggtttatctttttcgggttgatggtgcataacgacaaatgccgtctgcttgagtacaacgtgcgcctcggcgaccccgagacgcaggcggtattgccgcttacggattttgacctggtcgatctctgtgaagcgatgatcggcggccatgaatttaacctgacatggaaacgtggcggcgtctgcgcccccgtcgccgtcgccgaaggctaccccggcccctaccgcaagggcgacgttatttctatagatgtaacagccctggaaaaaaccggcgcgaaaatattcatcagcggcgcttttcagggcctcgccgacggcgccgctccgtccctgctaacatcgggcggcagggtgctgaccgtctccgccctggggccaaacgccgacgaagcctatgaccgcgcctacaaaggcctgaagcggtcagtttcgagggcatgggctcccgccgcgacatag

SEQ ID NO: 6014 - protein, 282 aa, Unknown
  Obtained from environmental sample
  DOMAIN (189)...(277): Phosphoribosylglycinamide synthetase, C domain
  misc_feature (1)..(282): Xaa is any amino acid
MIKADGLAAGKGVVIAHNLHEAEETLASFMKQKSMGDAGTSVLLEEFLEGKEVSILAAVSVYRGKGYILPFITARDHKRRFEGARGPNTGGMGAIAPVPDFSQKAQDDFIKSILDPTLSGIRAERFDYRGFIFFGLMVHNDKCRLLEYNVRLGDPETQAVLPLTDFDLVDLCEAMIGGHEFNLTWKRGGVCAPVAVAEGYPGPYRKGDVISIDVTALEKTGAKIFISGAFQGLADGAAPSLLTSGGRVLTVSALGPNADEAYDRAYKGLKRSVSRAWAPAAT

SEQ ID NO: 6015 - DNA, 882 bp, Unknown
  Obtained from environmental sample
  misc_feature (1)..(882): n is a, c, g, or t
atgataaggtcctatgcttataccaagattcagcctcaacttaagtctgttctttccgtatgcgtttttgtaatccttgcccagtattttatactgggagttcccctggagaattccatttcaattgccatttgcgttgcggcggcaattctggggctgtcattctttctggaagggctatttctggggatcatgcccctgggcgagcagtgtggaatgcacctgcccgcaaaagctggagcagccggcattgcaattttttccattattgtaggcataacggccacccttgcggaaccggctgtagcggtacttcagcagcaagggagcgttataccggcatggaacgcccctcttttgtacctgctcctgaaccgcggtacaaaatggcttgttgcggctattgccgccggagtggggctttcggtagtgctgggggtgtaccgatttatgtttggctggggctttaagcctccggtatttatcattattcccatccttgttttcgtaagcctgatatttgatgaaaaccccattttaaggccgatggtaaatcttgcctgggacgcagggggcgctgccacaggggcggttacagtgccaataatactggctttggggctgggggtggttaaaatcggggggaaaagctctggcagctcaggcctggggctggtgacccttgcttcagccctgccggtggcgggagttctctttcttgcggctgcgatcggcccaaaagtccccatgccatccgaccctgtttcgtttttttcagcggaacagcaacagcgcgccaaagcagtttacgtcgcaggttcaattgatgaacttataaaaatacaacaatgccgttgcctcaggggatctttctcaggatga

SEQ ID NO: 6016 - protein, 293 aa, Unknown
  Obtained from environmental sample
  DOMAIN (16)...(245): Protein of unknown function (DUF1538)
  misc_feature (1)..(293): Xaa is any amino acid
MIRSYAYTKIQPQLKSVLSVCVFVILAQYFILGVPLENSISIAICVAAAILGLSFFLEGLFLGIMPLGEQCGMHLPAKAGAAGIAIFSIIVGITATLAEPAVAVLQQQGSVIPAWNAPLLYLLLNRGTKWLVAAIAAGVGLSVVLGVYRFMFGWGFKPPVFIIIPILVFVSLIFDENPILRPMVNLAWDAGGAATGAVTVPIILALGLGVVKIGGKSSGSSGLGLVTLASALPVAGVLFLAAAIGPKVPMPSDPVSFFSAEQQQRAKAVYVAGSIDELIKIQQCRCLRGSFSG

SEQ ID NO: 6017 - DNA, 309 bp, Unknown
  Obtained from environmental sample
  misc_feature (1)..(309): n is a, c, g, or t
atgcacggaataatggaaaacgattttatgttttcaggcaagggggaagttccctggcacggcatcggcgcggtattggacggggtactgacatccgatgaagcaattagagaagcgcgtctgacgtggaaagtcgaacaaaccccggtctatgccgaatccaaccgggccgaacctatccccgggttcgtcgccaatgtgcgcagcgacacaaacgaagtgttaggcatcgtatccgaacggtacaaagtcgcccaaaacaaagacgtgttcgcgtttccggacgaacttatcgggaatagaaaatga

SEQ ID NO: 6018 - protein, 102 aa, Unknown
  Obtained from environmental sample
  misc_feature (1)..(102): Xaa is any amino acid
MHGIMENDFMFSGKGEVPWHGIGAVLDGVLTSDEAIREARLTWKVEQTPVYAESNRAEPIPGFVANVRSDTNEVLGIVSERYKVAQNKDVFAFPDELIGNRK

SEQ ID NO: 6019 - DNA, 846 bp, Unknown
  Obtained from environmental sample
  misc_feature (1)..(846): n is a, c, g, or t
ttgtacggacaggtggagacaatcacggaaaaggtattgtataccttcgatacgtttcaaaggaatctcggcgtattattttccggacctaaagggcttggcaaaagccttgccgtgcgtaatatctgcaaagaagcgcttaagaaaagtttcccggtcatactggtcaaagagaactttgacaatatcgctcaatttatcgaaacaatctgccagccgtcagtcatcgtccttgacgaatttgagaaaatgtaccaggacaactgccaaacagacaaagacgatctggaaggccagaacaattttctcaatctttttgactcttttctcgaaggcaaaaaattatttttgcttacgtgtaacgacatacgcaatgtgtcggaataccttctgaacaggccaggaaggctgcattaccatttcagaatgactcggctgtccataagcgaaataatcgaatactgcgcggataacctcagtaaagaaaaccatggccttatcaccgacttatgctccctgggagcccgcattcccgatttttcctacgacatgctacgttccatcatctttgaaatgaacacctacaaatgtggcttagcggaggcaaggagggttttgaacatcgaagcaagggcaaaatccccgttcaattacactatctatttcaaatcagggaaaacagaaaccgattttgactacattgatacggccgataaccgctatcaccttagctggcactggaaagagagcggtgaccaggatctagcgacggttgatatgtccgaagcgaaatggtccggaaacnggggacggatcgctgtctcggccgattctgaccaagcgtaa

SEQ ID NO: 6020 - protein, 281 aa, Unknown
  Obtained from environmental sample
  DOMAIN (24)...(193): ATPase family associated with various cellular activities (AAA)
  misc_feature (1)..(281): Xaa is any amino acid
MYGQVETITEKVLYTFDTFQRNLGVLFSGPKGLGKSLAVRNICKEALKKSFPVILVKENFDNIAQFIETICQPSVIVLDEFEKMYQDNCQTDKDDLEGQNNFLNLFDSFLEGKKLFLLTCNDIRNVSEYLLNRPGRLHYHFRMTRLSISEIIEYCADNLSKENHGLITDLCSLGARIPDFSYDMLRSIIFEMNTYKCGLAEARRVLNIEARAKSPFNYTIYFKSGKTETDFDYIDTADNRYHLSWHWKESGDQDLATVDMSEAKWSGNXGRIAVSADSDQA

SEQ ID NO: 6021 - DNA, 831 bp, Unknown
  Obtained from environmental sample
  misc_feature (1)..(831): n is a, c, g, or t
atgcgccattattgggacagcggtgtttttgccgctcctcaccggggttttgtgtatctgaaacgggatactccttttaaccgcggacgcagggggcttgttgccgccgtagaccttgagcggtattcgtgggcggccgacgcccgtcccctgattcgtcccaccgaaggcacggtttccgaacgactgcctccccgcatggatattcgccgcgacgcccccctcgaaacgccgcacatcctcctgttgatcgatgatgacaccgattccctgctgcggggcctgggtgaacgggcaaaaaaaaacgcgccggcatatcagggcgaactgatgttaaattccggcgcgataagcggctggtttcttgatacggaagacgactgggcatttctcgcggcagggcttgaagaactggcgcacaaggctttaacccgttattccgccgccactgcccccggtgaacctttcctgtttgccgttggcgacggtaaccattcgctggcgaccgccaaggggatatgggaagaacaccacgggaacccgtccccttaccgttacgccctggttgaaatcgaaaacatttacgatacggcgattcagtttgagccgatacaccgcgttatgtttggcatggattttgacggaatcctcaatgtgcttgcggcgctgcccggcttttcccgccggatagtttccggccgcgaagaactgacccgcctgaccgccgaacccgtaaacggcaaccgttttggcattgtctgcggcagccgctatgccgtggtgaaacaagcgcgggcggcatcgccacggcaagccttcaacccctgctga

SEQ ID NO: 6022 - protein, 276 aa, Unknown
  Obtained from environmental sample
  DOMAIN (2)...(276): Protein of unknown function (DUF1015)
  misc_feature (1)..(276): Xaa is any amino acid
MRHYWDSGVFAAPHRGFVYLKRDTPFNRGRRGLVAAVDLERYSWAADARPLIRPTEGTVSERLPPRMDIRRDAPLETPHILLLIDDDTDSLLRGLGERAKKNAPAYQGELMLNSGAISGWFLDTEDDWAFLAAGLEELAHKALTRYSAATAPGEPFLFAVGDGNHSLATAKGIWEEHHGNPSPYRYALVEIENIYDTAIQFEPIHRVMFGMDFDGILNVLAALPGFSRRIVSGREELTRLTAEPVNGNRFGIVCGSRYAVVKQARAASPRQAFNPC

SEQ ID NO: 6023 - DNA, 711 bp, Unknown
  Obtained from environmental sample
  misc_feature (1)..(711): n is a, c, g, or t
atggagtttgttgttgaagacctgtcgccggtcagaaaaaaaatcactgtttccgccagtgtcgcggaagtggagcgtgcgcttgacaaggcgttgcggcatgtgggcaaagatgtttccctgcccggctttcgcaagggcaagattcctccgggcatgcttgagcgccgcttcggcgacgaaatgaaattccgggtggaggaagattttctgggcgaaaaattggacgcgtttttgcatgaaaaggatattgtcatcttgtcgtctccggaatacaacaaaggaaccattgagcgcggcaaggacttttcctgtgcgctgacgtttgacgccatgcccgccttcgacatgcccgcttattccggcctgaaggtggagcaggccgaagtcgtggtgtccgaccagcacattgacgatgcgatccggcgtctgcgcggcgtcatggctcgggaaacgcctgtggaagaagcgaggcttccggttgacggcgatgccgtggttctggactacgccggatttgaaaacaacgaacccattgccggcgtcaatggcgagcagtttcatgtggttttgggcgaaggcgacatcctgccggattttgaggccatcgtccgcacacttttgcccggagaggaaaaagaaggcccagtgacgtttcccgatgactacggccactccggactggccggcaaaaccgctcggccgatctga

SEQ ID NO: 6024 - protein, 236 aa, Unknown
  Obtained from environmental sample
  DOMAIN (154)...(231): FKBP-type peptidyl-prolyl cis-trans isomerase
  misc_feature (1)..(236): Xaa is any amino acid
MEFVVEDLSPVRKKITVSASVAEVERALDKALRHVGKDVSLPGFRKGKIPPGMLERRFGDEMKFRVEEDFLGEKLDAFLHEKDIVILSSPEYNKGTIERGKDFSCALTFDAMPAFDMPAYSGLKVEQAEVVVSDQHIDDAIRRLRGVMARETPVEEARLPVDGDAVVLDYAGFENNEPIAGVNGEQFHVVLGEGDILPDFEAIVRTLLPGEEKEGPVTFPDDYGHSGLAGKTARPI

SEQ ID NO: 6025 - DNA, 342 bp, Unknown
  Obtained from environmental sample
  misc_feature (1)..(342): n is a, c, g, or t
gtgcggcgttcttcggtctcgacccggtccacgctggccatagtccttccggccctgctgcacgtccagcgcggttccaaaaggcagaagctggttcagtacgcaaggcgggtctggaacctccagggcagcgatgacgagctggtggcagactccatagccaagacgagggcgttctttgagggtcttggtctccccacgcacctttccgaactgggcattacggaagacatctccggcaccgtggtggagcgcttcaagtcgaggaacgcctttccgatgtgcgagagcagagacctagacgagaagcggttgagggagatattcgagttaatcaggtaa

SEQ ID NO: 6026 - protein, 113 aa, Unknown
  Obtained from environmental sample
  SIGNAL (1)...(22)
  misc_feature (1)..(113): Xaa is any amino acid
MRRSSVSTRSTLAIVLPALLHVQRGSKRQKLVQYARRVWNLQGSDDELVADSIAKTRAFFEGLGLPTHLSELGITEDISGTVVERFKSRNAFPMCESRDLDEKRLREIFELIR

SEQ ID NO: 6027 - DNA, 606 bp, Unknown
  Obtained from environmental sample
  misc_feature (1)..(606): n is a, c, g, or t
gtgcgagagcagagacctagacgagaagcggttgagggagatattcgagttaatcaggtaaaaaccagaatggacagacccaagagcaagccaagagccagcggcagtcagcgccgcactgagatttgggaaggcgaggtggagcgcctgtcctgggggggctttggcatctcgcgtctaggcgacggtcgcatcctgctgctggaggcccccaaggccatcttcccaggcgaggttgtgcgggcttcaattaggcagaaggccaagcacgcggagggcgaaatcgtctcgtggctgcggccgtcggaacgtcgtgtggccccaacatgccgagtggcaggggagtgcggtggctgcgacctacaggaagctggcgaaagccatgccgagctaaagcggctcatggtcgaggacttgttccgccgccaactgcctaacctgccctttgaatggctgcccgcgcccaaaggggcactgcggcaccgcatacaactgcactgggacggcaaaagcatggggttccaccgccgcaggtcccacagcgtggtgcctgttcaggcgtgccctgccgcgttgccgatgctgtcggcggcgatcctaggctga

SEQ ID NO: 6028 - protein, 201 aa, Unknown
  Obtained from environmental sample
  misc_feature (1)..(201): Xaa is any amino acid
MREQRPRREAVEGDIRVNQVKTRMDRPKSKPRASGSQRRTEIWEGEVERLSWGGFGISRLGDGRILLLEAPKAIFPGEVVRASIRQKAKHAEGEIVSWLRPSERRVAPTCRVAGECGGCDLQEAGESHAELKRLMVEDLFRRQLPNLPFEWLPAPKGALRHRIQLHWDGKSMGFHRRRSHSVVPVQACPAALPMLSAAILG

SEQ ID NO: 6029 - DNA, 579 bp, Unknown
  Obtained from environmental sample
  misc_feature (1)..(579): n is a, c, g, or t
atggaaaaaaaacttttttcctggatcgatgacgctgtttctctggcggtggaacttcagggcgaattgacaagacggcccgctgtttctccggattcggggggcgaaggcgagcttgataaatgcgcgtttctggaaggctggctcaaagcgcacggcatcacccaactggaacgtttcgatgccccggacagtcgcgccaaaggcggagtgcgccccaatctgattgccaccatacagggcaaaggcaatgaggcggacggccgcctgtggatcatcagccatattgatgtcgtgcccccgggcgaagcgtcgtactgggaaagcgacccctggacaatggcggaagccaaagacggcccgcttggccacagggtcatcggcagaggcgtggaggacaaccagcangggctgacttcttccgtgcttgcggcgctggcctttgtcaagcagggcttgcagccttgccgtacaataaaacttcttttcgcggctgacaaggaaatgggcaagcgattgggcattgcgtggcttcctaaaaaccacagtgatatgttcaataaaatgatactgcgctga

SEQ ID NO: 6030 - protein, 192 aa, Unknown
  Obtained from environmental sample
  misc_feature (1)..(192): Xaa is any amino acid
MEKKLFSWIDDAVSLAVELQGELTRRPAVSPDSGGEGELDKCAFLEGWLKAHGITQLERFDAPDSRAKGGVRPNLIATIQGKGNEADGRLWIISHIDVVPPGEASYWESDPWTMAEAKDGPLGHRVIGRGVEDNQXGLTSSVLAALAFVKQGLQPCRTIKLLFAADKEMGKRLGIAWLPKNHSDMFNKMILR

SEQ ID NO: 6031 - DNA, 657 bp, Unknown
  Obtained from environmental sample
  misc_feature (1)..(657): n is a, c, g, or t
atgaacgaatttaatgaaattttatccaacattgggcgaaccataaaagaacgggaggaggcctttgaagctctgccagaagaagaaaaaaaacgtattcttgacgagcagaaaaaacaggaaatcacggaagaagcagggcagcgcgaaaaacaattagaaaactggaaacgccgcggcgtaacaaaacggtattttgaagccgaatgggataattggatcgccgacaagccggaaaaagaaaaagcgttaaaaaatgcaaaaaaggcatggacaacaaatttattcttcacaggcagcaacggaacgggaaaaacacacctggccatgtgcttggctaaagacggggcaatataccgcaggttgcccgacattttccgcgaagtaaggctggattttgaaagtgaagaaaaaatcatcgaatactacggcgaatgcgatctgttaatcattgatgaaatagggaggcagaaatttagtgattttgaatcaaacttattttttgaaatcatagaccgccgatggaataatgtcctgcctacgacaatcataactaatttatcggcgaaggaattttcagaattatacaacgcggcaattctggacagattgaggccgctggaaattctttttaattgggaaagtatgagggggtag

SEQ ID NO: 6032 - protein, 218 aa, Unknown
  Obtained from environmental sample
  DOMAIN (50)...(209): IstB-like ATP binding protein
  misc_feature (1)..(218): Xaa is any amino acid
MNEFNEILSNIGRTIKEREEAFEALPEEEKKRILDEQKKQEITEEAGQREKQLENWKRRGVTKRYFEAEWDNWIADKPEKEKALKNAKKAWTTNLFFTGSNGTGKTHLAMCLAKDGAIYRRLPDIFREVRLDFESEEKIIEYYGECDLLIIDEIGRQKFSDFESNLFFEIIDRRWNNVLPTTIITNLSAKEFSELYNAAILDRLRPLEILFNWESMRG

SEQ ID NO: 6033 - DNA, 753 bp, Unknown
  Obtained from environmental sample
  misc_feature (1)..(753): n is a, c, g, or t
ttgttgccccaagaaagccaaaagtttttttttttggggacaaaaaagggccgggtcggccaggggaaaaaagggggggtcatttttaaagataccgccgggtggaaggttttggcctattttgccggaggggcaggcccggtggacattatttttgaatccggttgggggttcctttcgggtatgaaggtagccaagatactggagacgcacatggtttggcgggcgcagaagttaggtttcaacgtggccacgcctgtttttgacggcgccagttacgacgacgttctagcgttgctaaaggaggccaagctgccccaaagcggcaagatacgtctccgcgacggcaggaccggggaacctttcgatcatgaggttaccgtcggccctatatacatgatgaaactgtgccatttggtcgacgataaaatacacgcccgttccataggcccgtactcattggtaacgcagcagccgcttggaggtaaatcccaattcggcggccagcgcttcggcgaaatggaagtctgggccctggaagcctacggcgcggcctacacgttgcaacaaatattgacggtaaagagcgacgacttggccggacgttccaagatatacgaatcaatagtaaaaggagaaaacgccccccctgccggagtaccggaatcgttcaaggtgctcgtcagggaggtgaaagccttagcgtttgatttccatactattgacgatgagggaactgaaattaagatgtag

SEQ ID NO: 6034 - protein, 250 aa, Unknown
  Obtained from environmental sample
  DOMAIN (1)...(165): RNA polymerase Rpb2, domain 6
  misc_feature (1)..(250): Xaa is any amino acid
MLPQESQKFFFLGTKKGRVGQGKKGGVIFKDTAGWKVLAYFAGGAGPVDIIFESGWGFLSGMKVAKILETHMVWRAQKLGFNVATPVFDGASYDDVLALLKEAKLPQSGKIRLRDGRTGEPFDHEVTVGPIYMMKLCHLVDDKIHARSIGPYSLVTQQPLGGKSQFGGQRFGEMEVWALEAYGAAYTLQQILTVKSDDLAGRSKIYESIVKGENAPPAGVPESFKVLVREVKALAFDFHTIDDEGTEIKM

SEQ ID NO: 6035 - DNA, 546 bp, Unknown
  Obtained from environmental sample
  misc_feature (1)..(546): n is a, c, g, or t
atgaaatataaatgttggtttgtttttttcgcaagtttgctgatttatgcctgcaatgacggcagtaatattggtggttcggaaagttcctcgtcttttgttgagtcttcgtcttctgatgaatattcttcttcagatatttcttcttctgccatcctcagctcctcttctataattagttcctcttctgaatttagttcgtcttctgaaatccctagctcttcttctatagttgtagttagctcctcttccagaattagctcatcttctgcccttagctcatcctctagaactagctcctcttctagcatagttttatcttcaagtagcgcagtgtccagctcttctgaagctccattagaagttaaaaactggcctaaattggaaaaaggtaaagacggtgttcaaagtggttggggttcacgctattgggatggttgcaagccgcattgcgctctgcgcaataatatagataccactgcggttccatttaaaatttgcagaaattgcaataaaaacaacaaagaaattccaactttaccctaa

SEQ ID NO: 6036 - protein, 181 aa, Unknown
  Obtained from environmental sample
  SIGNAL (1)...(17)
  misc_feature (1)..(181): Xaa is any amino acid
MKYKCWFVFFASLLIYACNDGSNIGGSESSSSFVESSSSDEYSSSDISSSAILSSSSIISSSSEFSSSSEIPSSSSIVVVSSSSRISSSSALSSSSRTSSSSSIVLSSSSAVSSSSEAPLEVKNWPKLEKGKDGVQSGWGSRYWDGCKPHCALRNNIDTTAVPFKICRNCNKNNKEIPTLP

SEQ ID NO: 6037 - DNA, 858 bp, Unknown
  Obtained from environmental sample
  misc_feature (1)..(858): n is a, c, g, or t
ttgttcagcgcgacgctcaactcatgggtgaagaacctcgcctgggaatacacaaaaaagccgtttgaaattgaaatcaaaccggagatagtaaccgttgaggaagtcgaccagatactttaccatgttccctccgaagagaagatgaagttgcttctgggaatcctcaaacgggaacagcccgaaagcgcggtcattttctgtaatacaaaacgttatacagagattgtcgcaaagcggctgcgaatgaacggctacacttgcgagttcatcgtgggagacctgcctcagtcgcggcggctcaaagtgatcgacgacgttaaggccggtaaaataaaattcctggtcgcgacagacgtggcggcgcgcggcctggacatagaaggccttgcgatggttgtaaattacgatctgccgaacgaggcggaaaattacgtgcaccgcataggacggaccgcgcgggccggtaaaacaggcagagcgatcaccctggtcagcgagcaggacgtgtacgagctgcccgcgatagaaaggtatataggcaaaaagctcccttcggagattgcctcggaagatctgcacgccgaagacgcgagcgccgggcagcagatacggacggagctttacgaagaccgccgcgaggaacgccacgtacacggcaagggagcgagaccccatgtccagggcaagggcggccgccgccatgagggaaaagttcacagcgattccaggggaaaaattcacgatgaccatgactccaggaaacatccggctgatcatgactctggaggaaaaaaacgcggggaagcccccggcaaaggaaaagcagttgggcagaaagccgccattacagcatga

SEQ ID NO: 6038 - protein, 285 aa, Unknown
  Obtained from environmental sample
  DOMAIN (80)...(156): Helicase conserved C-terminal domain
  misc_feature (1)..(285): Xaa is any amino acid
MFSATLNSWVKNLAWEYTKKPFEIEIKPEIVTVEEVDQILYHVPSEEKMKLLLGILKREQPESAVIFCNTKRYTEIVAKRLRMNGYTCEFIVGDLPQSRRLKVIDDVKAGKIKFLVATDVAARGLDIEGLAMVVNYDLPNEAENYVHRIGRTARAGKTGRAITLVSEQDVYELPAIERYIGKKLPSEIASEDLHAEDASAGQQIRTELYEDRREERHVHGKGARPHVQGKGGRRHEGKVHSDSRGKIHDDHDSRKHPADHDSGGKKRGEAPGKGKAVGQKAAITA

SEQ ID NO: 6039 - DNA, 864 bp, Unknown
  Obtained from environmental sample
  misc_feature (1)..(864): n is a, c, g, or t
atggacggatttttaccccacggcgattttaccgaagccattttaaattcgtctttcgactggacgggcattcgtcagccgtttgtgctggcaaccgagaacgatgcgctcaacggcacggccatgctgttcagctatctgcttaccaacacggcgcagatttttgccgacgttcgcacctattggagccccgaagcggtgcaacgagtgaccggcaaaaaattgaccggcaaagcggcaaacggcattattcatttaatcaattcgggtgcggcttcgctggacggctccggccgccagagcgacaaggcaggcaacccgactatcaaaccattttgggaaatcagcgacgccgaagcgaaagcgtgcctggacgctaccacttgggtgcccgccaatcgtgaatatttcagaggcggcggcttctcgtccaaattccttacccgcgagggcatgccttgtaccatggtgcgtttaaatctggtaaaaggcctcggcccggtgttgcaaattgccgaaggctggacggtggaattagatccggccgctcacaaaatccttgacgaccgcaccgacaaaggctggccgacaacatggtttgctccgcgtttgaccgacagcgacaatttcaaagatgtgtattccgtgatgaacaactggggcgccaaccacggtgcaatcagctgcggacacatcggcgcggatttaatcacgctggcttcgatgttgcgcattcctgtttgcatgcacaatgtggacgagaaagatattttccgtcctgcggcgtggagtgcattcggcatggataaggaaggcgcggattatcgcgcgtgtccagcctacggcgcactttataaaaaatga

SEQ ID NO: 6040 - protein, 287 aa, Unknown
  Obtained from environmental sample
  DOMAIN (1)...(51): L-fucose isomerase, second N-terminal domain
  misc_feature (1)..(287): Xaa is any amino acid
MDGFLPHGDFTEAILNSSFDWTGIRQPFVLATENDALNGTAMLFSYLLTNTAQIFADVRTYWSPEAVQRVTGKKLTGKAANGIIHLINSGAASLDGSGRQSDKAGNPTIKPFWEISDAEAKACLDATTWVPANREYFRGGGFSSKFLTREGMPCTMVRLNLVKGLGPVLQIAEGWTVELDPAAHKILDDRTDKGWPTTWFAPRLTDSDNFKDVYSVMNNWGANHGAISCGHIGADLITLASMLRIPVCMHNVDEKDIFRPAAWSAFGMDKEGADYRACPAYGALYKK

SEQ ID NO: 6041 - DNA, 678 bp, Unknown
  Obtained from environmental sample
  misc_feature (1)..(678): n is a, c, g, or t
ttgagacgctggttttcaaagggcgtttcgccgcgttaccctctgtattttgacacacagancggtgagctgcatttctgtaacgccggcgacaatatcatccatatatatgacgcttcggagaaaggcgttaaatcaattaccctgccccagacgccggccgccggagcgctgcctaatggcattgtggaatcaaaaggcggttacaaggtgcagacgctttcgcttgatcacggggacatcctgcttttgtataccgacggaatcgaggaggcgcagtggagcgaggcaatgggctctgcgagggtgcaggaaatcatcaacgctgtaatgaaccgcgccatataccggatgatcaaatggcgcgacccggaaggagaaaaggaactgtgttttgactattcaagctgtaatggcgaagtcgaagaagtgatcatggctcttatcaccgccgaaaaaatgttcagatgctaccggagtcccttgacttcggccgatgatgcggtgcttattgagaaaaaagcggacgccttccttcaggcgcattttctgcaatactccgattattgctcccagacccgcgaatgtcatgaaaacaattcgtacatatactatgcgtatcttaaagaagacgagcaatccgatgatctggcgattcttggcattaagagaaaataa

SEQ ID NO: 6042 - protein, 225 aa, Unknown
  Obtained from environmental sample
  misc_feature (1)..(225): Xaa is any amino acid
MRRWFSKGVSPRYPLYFDTQXGELHFCNAGDNIIHIYDASEKGVKSITLPQTPAAGALPNGIVESKGGYKVQTLSLDHGDILLLYTDGIEEAQWSEAMGSARVQEIINAVMNRAIYRMIKWRDPEGEKELCFDYSSCNGEVEEVIMALITAEKMFRCYRSPLTSADDAVLIEKKADAFLQAHFLQYSDYCSQTRECHENNSYIYYAYLKEDEQSDDLAILGIKRK

SEQ ID NO: 6043 - DNA, 651 bp, Unknown
  Obtained from environmental sample
  misc_feature (1)..(651): n is a, c, g, or t
ttgcaggaagatgcggtagaaattgaaaaatcaaacgttttattaatcggtcctacgggaacaggcaaaacacttctcgcgaaaatccttgcgaaaaaactgaaagttccgtttgcgattgtagacgctaccacccttacggaagccggatatgtaggagaagatgtagaaaatattttattgaagctgatacagaacgcgggcggcaacattgccgcggcggaacggggtattgtttacattgacgaaatcgacaaaattgcgcgaaagggtgaaaatgtttctataacgcgcgatgtttcaggcgaaggcgtacagcaggcgcttttaaaaataatagaaggaacaatcgcttctgtcccaccgcaggggggcaggaaacatcccaatcaggaaatgatcaggatagataccacaaatattctttttatctgcggcggcgcgtttgtgggacttgaaaaattaatagcgcggcgtgttgtgcaaaatcaactcggcttcggctcgtctgccggcggcaaagaaaagacgcttaaagaactttacaacgccattcatcctgatgatcttattcagttcggaatgatccccgaatttatcggaagacttccaatcattgtcggtcttgaagaacttaaaagagaagattaa

SEQ ID NO: 6044 - protein, 216 aa, Unknown
  Obtained from environmental sample
  DOMAIN (12)...(213): ATPase family associated with various cellular activities (AAA)
  misc_feature (1)..(216): Xaa is any amino acid
MQEDAVEIEKSNVLLIGPTGTGKTLLAKILAKKLKVPFAIVDATTLTEAGYVGEDVENILLKLIQNAGGNIAAAERGIVYIDEIDKIARKGENVSITRDVSGEGVQQALLKIIEGTIASVPPQGGRKHPNQEMIRIDTTNILFICGGAFVGLEKLIARRVVQNQLGFGSSAGGKEKTLKELYNAIHPDDLIQFGMIPEFIGRLPIIVGLEELKRED

SEQ ID NO: 6045 - DNA, 561 bp, Unknown
  Obtained from environmental sample
  misc_feature (1)..(561): n is a, c, g, or t
atgatttcaggctgttcaccggggtggaacaaattcgccgaaaacggtttccntgatattaaagatcacttggccaccagcagaagttccggccggatattcggagccttggccaaagagaatggcgcatcgattaaatcggctgcatcgattaaatcggtttcgttcatgccctgtattgccaaaaaacttgagacccggattcctgagggtgacttttccccgagcgttgacttttccctgactgtccgcgaacttgcgcaaatgatccgccatgccggtatcaccttcgacaatttgccggaaagtccctttgacactctcgtgtctgcaccggagggcacgcaatttgacccatccctcatactcaaaaatgaagaagaagccccaaaaggaattacagaaacggtgttgaacatccagggaaccggtgtgaaagtcatgctcgtcagggggctttccaatgcccgcaatgtgttggaatccatccgcaacggcgaatgtgacgcggatttagtaaaaattatgaactgtcccggcggctgtatgatccggcgatga

SEQ ID NO: 6046 - protein, 186 aa, Unknown
  Obtained from environmental sample
  DOMAIN (3)...(183): Iron only hydrogenase large subunit, C-terminal domain
  misc_feature (1)..(186): Xaa is any amino acid
MISGCSPGWNKFAENGFXDIKDHLATSRSSGRIFGALAKENGASIKSAASIKSVSFMPCIAKKLETRIPEGDFSPSVDFSLTVRELAQMIRHAGITFDNLPESPFDTLVSAPEGTQFDPSLILKNEEEAPKGITETVLNIQGTGVKVMLVRGLSNARNVLESIRNGECDADLVKIMNCPGGCMIRR

SEQ ID NO: 6047 - DNA, 528 bp, Unknown
  Obtained from environmental sample
  misc_feature (1)..(528): n is a, c, g, or t
atgcgtaactttttcattttttcgtttatattgtgtgccctagcatcacaagcctttgctgagggcaaggtttttggcaaaagctatgagggcattaagaaaatagaagccaccatagagacccacgagggttctataaccgtgaatctggcttataaagatgcaccaaacacagtggcaaatttcatagaccttgcaaacaagggtttttacaatgggcttccctttcacagagtaattcagcgttttgttgtgcaaggaggagaccctaacggcaatggctccggcggtcctggttatacaatagatgacgaaactaacaatctaaagcacgttgcgggaacgctttcaatggcaaattcgggacctaacaccggtggctcgcaattctttctcgttcaatggacgcaacctcatttagacaacaagcacacagtttttggaatggtggaaagcggcttggatgttatttaccgcatagaaccttatgaccctattataagcgtgcgaataacggaaacaaaataa

SEQ ID NO: 6048 - protein, 175 aa, Unknown
  Obtained from environmental sample
  SIGNAL (1)...(20)
  DOMAIN (34)...(175): Cyclophilin type peptidyl-prolyl cis-trans isomerase/CLD
  misc_feature (1)..(175): Xaa is any amino acid
MRNFFIFSFILCALASQAFAEGKVFGKSYEGIKKIEATIETHEGSITVNLAYKDAPNTVANFIDLANKGFYNGLPFHRVIQRFVVQGGDPNGNGSGGPGYTIDDETNNLKHVAGTLSMANSGPNTGGSQFFLVQWTQPHLDNKHTVFGMVESGLDVIYRIEPYDPIISVRITETK

SEQ ID NO: 6049 - DNA, 603 bp, Unknown
  Obtained from environmental sample
  misc_feature (1)..(603): n is a, c, g, or t
atgataagtagtgcaccacctggtagtattgtcatgtatgccaccagtgctaattcagtggcagcagacggcactgggcgtaatggtcttttttctagttatttgctaaacaatctaaagacgccaggtctaagtgtgtttgaagtttttgataaaactatgggtgatgtcagtaatgtcacaaacggaaagcaacaacctgaactctctctaaggttttccggtgcggcttctacctatcttgggtcgtatcctgtatttaacacccctaataacatagaactgaaaaggggtgtaaatgtaactaaaaacgcaaaagaagttatgtgtactatttttaaagtttttttggaaggtgaagatatttgggatggatatagagcctataatttatttgaatatgaaacaaagatattatttgatgaatcaacaaaggaaatatttttcagagaaataggccctcaagatgctccttgggaagtttacgggaaaccaaaaaaagtatcaaaaaactttgacttcatgattgataattcaggttattttatttttcgatcagatgaatataagggttacaaatttattattttaataaagaggtaa

SEQ ID NO: 6050 - protein, 200 aa, Unknown
  Obtained from environmental sample
  SIGNAL (1)...(21)
  misc_feature (1)..(200): Xaa is any amino acid
MISSAPPGSIVMYATSANSVAADGTGRNGLFSSYLLNNLKTPGLSVFEVFDKTMGDVSNVTNGKQQPELSLRFSGAASTYLGSYPVFNTPNNIELKRGVNVTKNAKEVMCTIFKVFLEGEDIWDGYRAYNLFEYETKILFDESTKEIFFREIGPQDAPWEVYGKPKKVSKNFDFMIDNSGYFIFRSDEYKGYKFIILIKR

SEQ ID NO: 6051 - DNA, 591 bp, Unknown
  Obtained from environmental sample
  misc_feature (1)..(591): n is a, c, g, or t
ttgtttacggatgatgtatccaaaatcgacactgccgatagtattgaacaaatcgcgcaggaaatcagggtttgcaggaattgtcagctttgggaaaaaaggacaaacgcggcacccggagaaggggttttacagccgttagtgttggtaatcggcgaaggaccgggtgaagatgaagatcgccaggggcggccttttgtcggcagagccggacagcttttggataaaatgcttgactctatcggtctttcgcgcaataccaattgtttcatcgccaatgttgtaaaatgccgtccgccttttaaccgcgacccctaccctgaggaaacagccgcgtgcgcgcattatcttcagcggcagattgccttattaaaaccaaaattcattcttgtcgtgggaagggtcgcggcgcagacgcttttaaaaaaaactgaacctataggaaaattacgcggaaagtttacggaatttgaagttggagaaatgaagattccgctcatcgccacataccaccccgccgcgcttttgcgtgatgaagaaaaaaaacgtccgacgtgggaagacttaaaactccttcattctaaattttaa

SEQ ID NO: 6052 - protein, 196 aa, Unknown
  Obtained from environmental sample
  DOMAIN (39)...(194): Uracil DNA glycosylase superfamily
  misc_feature (1)..(196): Xaa is any amino acid
MFTDDVSKIDTADSIEQIAQEIRVCRNCQLWEKRTNAAPGEGVLQPLVLVIGEGPGEDEDRQGRPFVGRAGQLLDKMLDSIGLSRNTNCFIANVVKCRPPFNRDPYPEETAACAHYLQRQIALLKPKFILVVGRVAAQTLLKKTEPIGKLRGKFTEFEVGEMKIPLIATYHPAALLRDEEKKRPTWEDLKLLHSKF

SEQ ID NO: 6053 - DNA, 441 bp, Unknown
  Obtained from environmental sample
  misc_feature (1)..(441): n is a, c, g, or t
gtggaaattggggaaagagcttttgctgccccgacatcagatacaggatatcgcgaccttacccctggagataaaatcgtctctgtttacattcccgacagcgtaactaaaattgggggttttgttttcttttacaacagggctctgacggaagtgcaccttcctgacaatattactagtatccccatttctacgttttttaaatgtccaaagctcaaaaaggtaaacctgcccaaaaaccttgagggaatcggggacagtgcttttagtggctgcggggatctaaccgaccttattataccctcaaatatcaagacaatacggttcctaaatggtgctggagatgataatcccaataacaatgctttttatagctgcggcaaactgcccatcaaaacccgccagatcattcagggctggggctatacaagcggattttaa

SEQ ID NO: 6054 - protein, 146 aa, Unknown
  Obtained from environmental sample
  misc_feature (1)..(146): Xaa is any amino acid
MEIGERAFAAPTSDTGYRDLTPGDKIVSVYIPDSVTKIGGFVFFYNRALTEVHLPDNITSIPISTFFKCPKLKKVNLPKNLEGIGDSAFSGCGDLTDLIIPSNIKTIRFLNGAGDDNPNNNAFYSCGKLPIKTRQIIQGWGYTSGF

SEQ ID NO: 6055 - DNA, 849 bp, Unknown
  Obtained from environmental sample
  misc_feature (1)..(849): n is a, c, g, or t
ttggccgagcttctgcaaattgggcggagggataaaatgcaggcaaaacgaatcattccatgccttgatgttgacgatggcagggtagtaaagggcattaaatttaagggtattcaagacgctggagatccaagagaattggcgcgccgttacaacgacgacggcgcagacgaattgacttttcttgacatcggcgcttcttacaaaagccgcgctacattgctggatgtggtgcgtaaagtagccgccgaagtttttatccccctatgcgtaggcggcggcatccgcgtaattgacgacatgcgcgacgcgatgaacgccggcgctgacaaggtttcagtctgcacttccgccctaagccgcccggaattgttacgtgaaatggcaaacgcctacggcagccagtgtgtcgtgctttcaatagacgcaaaacgcgttgagggcggcggctctctgcgatggaacgcctattcccatggcggcagaaccgacacgggtattgacgctattgaatgggcaatccgcgccgtagaacttggcgcgggagaaattttactcaactcaattgacgcggacggcacgggcggcggttacgatttggaactgacgcgccgaatattgaacgcggtacctgtgcctgtaatcgcctcaggcggcgcggggacgcttgagcagatagcggaggttttacttggtactgcgtcttctgaaatgccaaagaacattacaccggacgaagcgccgggagcggacgcggcattggtggcatcgcttttgcattttgggaagactagtattcaagagattaaaaagtgcgcgcaggcgaagggtgtttgtgttaggtggtga

SEQ ID NO: 6056 - protein, 282 aa, Unknown
  Obtained from environmental sample
  DOMAIN (17)...(265): Histidine biosynthesis protein
  misc_feature (1)..(282): Xaa is any amino acid
MAELLQIGRRDKMQAKRIIPCLDVDDGRVVKGIKFKGIQDAGDPRELARRYNDDGADELTFLDIGASYKSRATLLDVVRKVAAEVFIPLCVGGGIRVIDDMRDAMNAGADKVSVCTSALSRPELLREMANAYGSQCVVLSIDAKRVEGGGSLRWNAYSHGGRTDTGIDAIEWAIRAVELGAGEILLNSIDADGTGGGYDLELTRRILNAVPVPVIASGGAGTLEQIAEVLLGTASSEMPKNITPDEAPGADAALVASLLHFGKTSIQEIKKCAQAKGVCVRW

SEQ ID NO: 6057 - DNA, 381 bp, Unknown
  Obtained from environmental sample
  misc_feature (1)..(381): n is a, c, g, or t
atggaaagcataaaaagaagcgacataaacgagcaatgggcgcattccggtattgttgaagccggagaattcgcctttataagttattgtgtcggtaatataggtcagcctattgaatatcaaattaatggggcaattgatcatttaaaaaacaggcttgaatcaataggtttaacattggaatcagtagtaaaactggattgcttgtttagggacgtatggaatatacctgtaatggaaaaggtatttaaggaaaggtttaatggaaagtatcccgcaaggaagtcaatacaaacggaatttgcccatgtaggcggacaagaagggcttttattccaacttgacgcaatagcatataaaaaaggaataaatgtctggtaa

SEQ ID NO: 6058 - protein, 126 aa, Unknown
  Obtained from environmental sample
  DOMAIN (11)...(120): Endoribonuclease L-PSP
  misc_feature (1)..(126): Xaa is any amino acid
MESIKRSDINEQWAHSGIVEAGEFAFISYCVGNIGQPIEYQINGAIDHLKNRLESIGLTLESVVKLDCLFRDVWNIPVMEKVFKERFNGKYPARKSIQTEFAHVGGQEGLLFQLDAIAYKKGINVW

SEQ ID NO: 6059 - DNA, 531 bp, Unknown
  Obtained from environmental sample
  misc_feature (1)..(531): n is a, c, g, or t
gtgacaatagatataggagtgatcgtcgctctggtggtggtgctggttgttgcctttgttttaaaatggacaagattcggacgcaatttgtacgctgtcggtggtaacagccaaagcgcgctgacgcttggtattaacgtcaaacgcacaaagtttttatcctaccttatgtgcggattcctggccggcattggcggtttcgtcttccttctgaaagcaggctcaggttactcgcagcacgccatgttttttgaaatgaaagccatcgcctcgtccattatcggcggtacgctgcttacgggaggagtcggcaatattatcggttctccggttggcgtattggcgcttatgacgattgacacgattgtccgggcttcgggaataactaccggaggccgggaatatttgcaggatatcacgaccggcgcaatgctcttcatagcgcttatactgcaaagcgtggttctctcgcgccgtggcaagggcagtatcaaacagatgattcccaaatggctgaatttcagacgttga

SEQ ID NO: 6060 - protein, 176 aa, Unknown
  Obtained from environmental sample
  DOMAIN (1)...(149): Branched-chain amino acid transport system / permease component
  misc_feature (1)..(176): Xaa is any amino acid
MTIDIGVIVALVVVLVVAFVLKWTRFGRNLYAVGGNSQSALTLGINVKRTKFLSYLMCGFLAGIGGFVFLLKAGSGYSQHAMFFEMKAIASSIIGGTLLTGGVGNIIGSPVGVLALMTIDTIVRASGITTGGREYLQDITTGAMLFIALILQSVVLSRRGKGSIKQMIPKWLNFRR

SEQ ID NO: 6061 - DNA, 351 bp, Unknown
  Obtained from environmental sample
  misc_feature (1)..(351): n is a, c, g, or t
atgaaaaagattatctttacggcgatttttattacacttgttacgggagcgttttgtcagaatggcgttattcgggatttaaccggcgaggttgaattaaaacgttcaggttcatcagcttttgttccggcttctgcgggagatgccgtatcttccaacacaattgtttcgacaggttttagaagcaccgccatcatcgcgattggaagttctcttattgcggtgcgtccgctaacgcgccttaccctcgctgaaatacagtccttggaaaataccgaaaaaatcaatgttaatttacaggcgggaagagtaagggtcgaagtaaagccccccggccggtaccaaaactaa

SEQ ID NO: 6062 - protein, 116 aa, Unknown
  Obtained from environmental sample
  SIGNAL (1)...(21)
  misc_feature (1)..(116): Xaa is any amino acid
MKKIIFTAIFITLVTGAFCQNGVIRDLTGEVELKRSGSSAFVPASAGDAVSSNTIVSTGFRSTAIIAIGSSLIAVRPLTRLTLAEIQSLENTEKINVNLQAGRVRVEVKPPGRYQN

SEQ ID NO: 6063 - DNA, 603 bp, Unknown
  Obtained from environmental sample
  misc_feature (1)..(603): n is a, c, g, or t
ttgacatctgtttttgccgcgcctacagttatcctgattattgcgtatattattttttatataagaagcagaaaatatgtatactctaaggcatataccgattccttaacatccattaaaagccgcagatttattgatgaatatttcccgtcgattgtaaaagagcactataaaaaaggattacaattagcagtaattatgatcgaccttgattttttcaaattgtataatgacaactacgggcatttgctgggcgatgaggtattaaagaatgtaaccaaagcgatcctgtcagtcttacgggaaggaacagattatatatgccgatttggaggagaagagattttagtaattttgaccaacacaaacttgtctgcagcagagatgattgcgaacaggataaaagcatcggtcaatgctcttgctatcaaacatgaacacagcgtttgctcaaatatcgttacagtttcccaagggatatattccgctgttcctaaaagcatgaattctgccaaaaattttatcatgcacgcggatcagggattgtatgaagccaaaaacagcgggcgcaataaatatgttacggttgaagaatttacataa

SEQ ID NO: 6064 - protein, 200 aa, Unknown
  Obtained from environmental sample
  DOMAIN (27)...(192): GGDEF domain
  misc_feature (1)..(200): Xaa is any amino acid
MTSVFAAPTVILIIAYIIFYIRSRKYVYSKAYTDSLTSIKSRRFIDEYFPSIVKEHYKKGLQLAVIMIDLDFFKLYNDNYGHLLGDEVLKNVTKAILSVLREGTDYICRFGGEEILVILTNTNLSAAEMIANRIKASVNALAIKHEHSVCSNIVTVSQGIYSAVPKSMNSAKNFIMHADQGLYEAKNSGRNKYVTVEEFT

SEQ ID NO: 6065 - DNA, 468 bp, Unknown
  Obtained from environmental sample
  misc_feature (1)..(468): n is a, c, g, or t
atgaatataatcgattcctcattatggctcgaatattttgcagacactgaagcaggaaatgtaatctctgaaataatagaaaatactgatgaattaataattcctacaataacaatatatgaagtgtttaagaaactgttatttgaaagaaatgaagatgacgcattatttgctattgcacatatgaggcagggaaaaattattgagttgactgatgaattatcattatttgccgcaaagttagggaaagaccataaactgcctctggctgacagtattatttatgcgacaaatataaatttcaattgtattttgtggactcaagataaacactttatggggctggagtcagtaaattactttgaaaacaaggataaccaactctttgctttctattccctaatttcgctgtttttggcttgttttacatccgcaatattttttaaggtaatctgcgtatttacatga

SEQ ID NO: 6066 - protein, 155 aa, Unknown
  Obtained from environmental sample
  DOMAIN (2)...(120): PIN domain
  misc_feature (1)..(155): Xaa is any amino acid
MNIIDSSLWLEYFADTEAGNVISEIIENTDELIIPTITIYEVFKKLLFERNEDDALFAIAHMRQGKIIELTDELSLFAAKLGKDHKLPLADSIIYATNINFNCILWTQDKHFMGLESVNYFENKDNQLFAFYSLISLFLACFTSAIFFKVICVFT

SEQ ID NO: 6067 - DNA, 636 bp, Unknown
  Obtained from environmental sample
  misc_feature (1)..(636): n is a, c, g, or t
ttggcaagtttttatgttttcgcgcaaaatggaactatacgcgaactaagcggcacggtggaaatcaaaaggccgggaacttcgacttatacggccgcgaaagccggagaccagataagccaggatactattatttctacggctttaagaagcatggccctggttgagattggcagcgcggttttaatggtgcaacccctaacccgtctgtccctgaaagaaatcagcgcttcttccagcagtgaaaccattaatgtacacctccagtcgggaagggtacgggtagatgtaaatcctcccgcgggaaaaaaggcgtccatgacggtgatcagccccagcgcgaccgcttccgtccgcggtaccagctttgattttagcacccggaatctcaatgtgcagcatggcaccgtgggttttacggggaataaaggaaaattactgctaataaaacccggctacgacagccaggtaaaaacagacggcagcgtaagcgatcccctggaaaacagaagcggcagattgctgccgccattaccggtaggaatggatacccgcgccggagcgtctgttgaaacggtccgttcaaacggaacaattatcattgatattgaatatcaacgtgaatttgataaatag

SEQ ID NO: 6068 - protein, 211 aa, Unknown
  Obtained from environmental sample
  misc_feature (1)..(211): Xaa is any amino acid
MASFYVFAQNGTIRELSGTVEIKRPGTSTYTAAKAGDQISQDTIISTALRSMALVEIGSAVLMVQPLTRLSLKEISASSSSETINVHLQSGRVRVDVNPPAGKKASMTVISPSATASVRGTSFDFSTRNLNVQHGTVGFTGNKGKLLLIKPGYDSQVKTDGSVSDPLENRSGRLLPPLPVGMDTRAGASVETVRSNGTIIIDIEYQREFDK

SEQ ID NO: 6069 - DNA, 474 bp, Unknown
  Obtained from environmental sample
  misc_feature (1)..(474): n is a, c, g, or t
ttgagattatattataagggagggcaggtgatgataatctatcttgatacgtgttgctataaccggccgtttgacgatcaaaggatatttaggaacgcagtagaaacgagcgcgattatgtccattatagatatttgcggaatcatcggtcacattataatcggtagtagggctgtaacgttcgagcacagcaatatatccgcctccggattgcgggtagcggtcggcgagttatacgacaagactattacctatagcgtacgcataacggcaactatcgccgctcgcgcaatggcattgcagggctatggtatgggaaggatggatagttttcatttggcggctgccgaggctggtaatgcgaatgtcttgttgacagttgacgatgattttgaacacatcgtcgctaataaaaaactgagctcggtaagggtaataaatccagtgaattttttgacggaggttatgatatga

SEQ ID NO: 6070 - protein, 157 aa, Unknown
  Obtained from environmental sample
  misc_feature (1)..(157): Xaa is any amino acid
MRLYYKGGQVMIIYLDTCCYNRPFDDQRIFRNAVETSAIMSIIDICGIIGHIIIGSRAVTFEHSNISASGLRVAVGELYDKTITYSVRITATIAARAMALQGYGMGRMDSFHLAAAEAGNANVLLTVDDDFEHIVANKKLSSVRVINPVNFLTEVMI

SEQ ID NO: 6071 - DNA, 387 bp, Unknown
  Obtained from environmental sample
  misc_feature (1)..(387): n is a, c, g, or t
atgttgatccgacagttcataaaattcggcatagtagggctctcgaataccgccctatcctacataatatacgccgctcttgtttacgtcggtctatactatataacagcgagcgtaatagcgtttgtattaagcgtgctgaattcattcttctggaataacaagtacgtctttaaacccggtgacgatcagcaaagacgcggtatttggggtgcgcttattaaaacatatatttcgtattcatttacaggtttggtgttgagcaatatccttctatactttttcgtcgacatattgcacatatcggaatatatagcgcctcttatcgggttggtgataactataccggtgaattttgttttgaataagaagtgggcattcaaataa

SEQ ID NO: 6072 - protein, 128 aa, Unknown
  Obtained from environmental sample
  DOMAIN (8)...(127): GtrA-like protein
  misc_feature (1)..(128): Xaa is any amino acid
MLIRQFIKFGIVGLSNTALSYIIYAALVYVGLYYITASVIAFVLSVLNSFFWNNKYVFKPGDDQQRRGIWGALIKTYISYSFTGLVLSNILLYFFVDILHISEYIAPLIGLVITIPVNFVLNKKWAFK

SEQ ID NO: 6073 - DNA, 435 bp, Unknown
  Obtained from environmental sample
  misc_feature (1)..(435): n is a, c, g, or t
atgcaagcggccataggttgcgcacagctggagaaattcccgtcgttcgcggagaggcgcaagcataattggcggcgcttgtatgacggattgaagggtttgtcggataaattaatcctgccggagcccgcgccgaactccgacccgtcttggttcggatttttgatcacttgcagggagggggtcagccgaaacgagctggtcaggcatatagagagcgataatatccaaacgaggatgctgttcgcggggaacttggtcaagcacccgtgttttgacgaattgagaaagtcaggcgaggggtacagggtggcggggacgcttgacaatactgatcgtattatgaatgacactttttggataggggtttatccggggatgagcgacgagatgattgacaggatgatagaggttataaaggattttaaatgttga

SEQ ID NO: 6074 - protein, 144 aa, Unknown
  Obtained from environmental sample
  misc_feature (1)..(144): Xaa is any amino acid
MQAAIGCAQLEKFPSFAERRKHNWRRLYDGLKGLSDKLILPEPAPNSDPSWFGFLITCREGVSRNELVRHIESDNIQTRMLFAGNLVKHPCFDELRKSGEGYRVAGTLDNTDRIMNDTFWIGVYPGMSDEMIDRMIEVIKDFKC

SEQ ID NO: 6075 - DNA, 351 bp, Unknown
  Obtained from environmental sample
  misc_feature (1)..(351): n is a, c, g, or t
ttgatcggacagatcgaaatgaaaatgaaacttgacgaatccaaaaactgggaagcgcgggaagtcatcaggcgcatggaagtccttgaactggaaccgcttggaagcggcgaagagatagcgaaatatcttgacatcaaattcgcgaggctcggcaagaaccgtcttgacattatcaacgattcgggctgcgccgcgctcgccgccaaactaagacggcagacccggacccagcagatatattcggtcgcctatccgctgttgattaacaactggtgcatgaaggcgatgaattcagcctgcgaacttggcgcgaaatgcgttgacgccgaagtggtgaacgctttgtaa

SEQ ID NO: 6076 - protein, 116 aa, Unknown
  Obtained from environmental sample
  misc_feature (1)..(116): Xaa is any amino acid
MIGQIEMKMKLDESKNWEAREVIRRMEVLELEPLGSGEEIAKYLDIKFARLGKNRLDIINDSGCAALAAKLRRQTRTQQIYSVAYPLLINNWCMKAMNSACELGAKCVDAEVVNAL

SEQ ID NO: 6077 - DNA, 936 bp, Unknown
  Obtained from environmental sample
  misc_feature (1)..(936): n is a, c, g, or t
ttgtgcggggcagccggactggcggattcttctcttctttttatacggctcatcctgctcactgttataactgtgttgggtttttctcttgccgtatttgaagggcctccgtggcacgctgcagttatttttctgaccctggttttgcttttttcgctacgcaaagccaaagaatgggaacgggccgtggtgctaaggctgggcaagttccataaggtcaaaggcccgggatttttctttaccattccgattgtcgatcaggtttacagaacgattgacattagaatccgggttactgatttttacgcccaggaaaccctcaccggcgattcggttactgtaaatgtggacgccttttgtttctggctggtatgggaccctcaaaaggctgctcttgagattgagaattatgaagaagcggtggcattggcttccaaagcggctttacgcaatgcgatgtccaagaacgacctttccaccttcctgtcccggggggatctgatcgaaaagcagattcaggaggaagtggaaaggcaaaccaccgaatggggcatcacggttcagtatgtggaaattaccgacatacagattcccgaagccctgcaagattccctatcccgaatggcgcaggccgagcgggaaaagaaagcccgcgtctttcttgcggaagctgaaatcgagattgccaaaaaactggaagaggcgatttctatctatgcaaaaaacgaaggcgctctgaaacttaaaatattttcaattttgaacgaaggtcttaaagccgganactccatgatgctgataccgaattcaatagcggaggaattaaagaccanggacgtattcggccttgcggctctgaacgagctaaagaaaaaagagggggaaaacaatgacagtagtaaaagctggaaacgtagtgaaagactacggtcttaa

SEQ ID NO: 6078 - protein, 311 aa, Unknown
  Obtained from environmental sample
  DOMAIN (52)...(226): SPFH domain / Band 7 family
  misc_feature (1)..(311): Xaa is any amino acid
MCGAAGLADSSLLFIRLILLTVITVLGFSLAVFEGPPWHAAVIFLTLVLLFSLRKAKEWERAVVLRLGKFHKVKGPGFFFTIPIVDQVYRTIDIRIRVTDFYAQETLTGDSVTVNVDAFCFWLVWDPQKAALEIENYEEAVALASKAALRNAMSKNDLSTFLSRGDLIEKQIQEEVERQTTEWGITVQYVEITDIQIPEALQDSLSRMAQAEREKKARVFLAEAEIEIAKKLEEAISIYAKNEGALKLKIFSILNEGLKAGXSMMLIPNSIAEELKTXDVFGLAALNELKKKEGENNDSSKSWKRSERLRS

SEQ ID NO: 6079 - DNA, 744 bp, Unknown
  Obtained from environmental sample
  misc_feature (1)..(744): n is a, c, g, or t
ttgttcctgctagatacattgaaaaaaacgctttccgttgattccataagagagggaaaaaccgttatcgccgtattaacaaaaggattcctgccctccgaaaacggtccccggctgattcttgaaacaatggaagattatttgcccggttttttccaccattcccttgtctacatttcaggcccaagccacgccgaagaagtagcgcgcggaaaattgacggggcttatcgccgcaagcgagaacgcaaagaactctatccgttttagggatttactgcggaaccaggaattactggtttacgcctcgcttgatgtcagaggggtacaagtttcggcggcgacaaagaacgttatagcgattgcgttcggaatgttagatgcgttaaagacaaactctaagttcgatatattcggcgacggaacagactcgctcttacttgcggctggattaaacgagatacaactgctgggcaaggcattaggcgcaacccaccccgaaacatttacatcaatttccggtatcggcgatttagacgttacttgccgttcaatttacggaaggaacaggcgtttcggaagggaaataatcgagaaaaatattcttaaaccgtataaaaatatagacgaccttttatcccgaatcggggaaataggctacttgccggaaggcgtcgccgcggcgaaatatgtgcgtattctggctgaaaaatacaaacttaaaatgcctgtctctgtcggataa

SEQ ID NO: 6080 - protein, 247 aa, Unknown
  Obtained from environmental sample
  DOMAIN (1)...(87): NAD-dependent glycerol-3-phosphate dehydrogenase N-terminus
  misc_feature (1)..(247): Xaa is any amino acid
MFLLDTLKKTLSVDSIREGKTVIAVLTKGFLPSENGPRLILETMEDYLPGFFHHSLVYISGPSHAEEVARGKLTGLIAASENAKNSIRFRDLLRNQELLVYASLDVRGVQVSAATKNVIAIAFGMLDALKTNSKFDIFGDGTDSLLLAAGLNEIQLLGKALGATHPETFTSISGIGDLDVTCRSIYGRNRRFGREIIEKNILKPYKNIDDLLSRIGEIGYLPEGVAAAKYVRILAEKYKLKMPVSVG

SEQ ID NO: 6081 - DNA, 819 bp, Unknown
  Obtained from environmental sample
  misc_feature (1)..(819): n is a, c, g, or t
ttggttttatggtatactatttcaatgcgtaacaaattgacagacgaactcgctatctgcgggatgaacgcggttcttgccgcggcggagtatcatccgcaggagataaaccggctcttcctgcgcgaggacaggcttaaatcttttaccggtatctgcaagcagctcgcggaacgcaagcgcccttacaaaatttgcgaagacgaggaacttgagcgtgtctgcaaaacagtccatcaccagggcgttgtcgcgatgattaatgagcccgttattgagtctttgagcgaagaggaccttgaactgtgggcaagcgaaaaaaaaaccggcgtcattcttgattcaatcgggaacgatcaaaatataggcgctatcgccagggcggcggctttttttgatataagttttataatactgaacgaaaaggacaatgcttttaacagcgaagaaacgcggccgcatgcgaagcttgcgcttaccacaagcgcttaccgcgttgccgaaggcgggtttgaacatttatccgtaaaaaagataaaaaatacagccgccttcctgaaagacgcgtcaaaattgcttttaacaatcgggacggatacaagggcaaggcggcgtatcagcgatttgaagagtatcgtaaaaacagggaagagcagaaaagggaccgtacttgttcttggtaacgaggaaagcggcttgccgcaaaacgtgaaagatcaatgttcctgcctgctccgtattccgggaacaggcaatatcaacagcttaaatgtatctcaggcggccgcgcttttctttcacgctatttttgaggcttag

SEQ ID NO: 6082 - protein, 272 aa, Unknown
  Obtained from environmental sample
  DOMAIN (18)...(93): RNA 2'-O ribose methyltransferase substrate binding
  misc_feature (1)..(272): Xaa is any amino acid
MVLWYTISMRNKLTDELAICGMNAVLAAAEYHPQEINRLFLREDRLKSFTGICKQLAERKRPYKICEDEELERVCKTVHHQGVVAMINEPVIESLSEEDLELWASEKKTGVILDSIGNDQNIGAIARAAAFFDISFIILNEKDNAFNSEETRPHAKLALTTSAYRVAEGGFEHLSVKKIKNTAAFLKDASKLLLTIGTDTRARRRISDLKSIVKTGKSRKGTVLVLGNEESGLPQNVKDQCSCLLRIPGTGNINSLNVSQAAALFFHAIFEA

SEQ ID NO: 6083 - DNA, 531 bp, Unknown
  Obtained from environmental sample
  misc_feature (1)..(531): n is a, c, g, or t
gtgaaggccgcggtattcacaaactgtgaagaaattgaattgcgggttaacgataagaaaatgggacggcgcaagagagatgattttgaaaacggaataattgaatggccgcttgaatatcaaagcggagaagcggaaataaagggatttataaaagggaaggaagtttgttcttacattttaaaaacggcggacaagccgcaaaagataaaactgttaccggataaaactgaacttaaagccggtgagattgcccatatcgaaataaacattattgataaaaacggattgttatgcccaaatgacgaatattttgttgaattttcattggaaggagacgtgcaattcatgggagcgtgttccggcgatttaagccaaaatctgggttttacgcagcctaaagtttttacttttgaaggcagggcgcttgcaatgattaaagcgggagattcgtccggtgatttgacgttacgcgcatattctgaaacgcttgaaaacgccgaattgcagtttattgttgaaggtgaataa

SEQ ID NO: 6084 - protein, 176 aa, Unknown
  Obtained from environmental sample
  misc_feature (1)..(176): Xaa is any amino acid
MKAAVFTNCEEIELRVNDKKMGRRKRDDFENGIIEWPLEYQSGEAEIKGFIKGKEVCSYILKTADKPQKIKLLPDKTELKAGEIAHIEINIIDKNGLLCPNDEYFVEFSLEGDVQFMGACSGDLSQNLGFTQPKVFTFEGRALAMIKAGDSSGDLTLRAYSETLENAELQFIVEGE

SEQ ID NO: 6085 - DNA, 813 bp, Unknown
  Obtained from environmental sample
  misc_feature (1)..(813): n is a, c, g, or t
gtgtacatcaacggcgctgaagtgggaaacaccggttaccgttatccgccacgaaagtaccggataccagcgggcctgcttcacgaaggtaaaaaccgcatcgttatcagggtaacttgtgttaacgggcaaggtggagttaccagggacaagccgttccgcgttttttctgagaaaggctgtgtggaacttgcgggaacctggaaataccggatcggcgtaaagaccccgccctgtcccgaagctttcttttttcaaaggcagcccatggggctcttcaacgcaactattgccccgatactgaggttcccgctccggggcgttatctggtatcagggcgagtctaatgacgggaaccccgacgattacgaagttctttttaaagccgtgatccaagactggcgaaataaatcaggtcaggagacccttcccttcctgtttgtacagctccccatttttggcagtcccaccgaaaataacgaggccgcatcctgggcgataataagagaagcccaaagcgccgccttgtcccttcctgctaccggcatggccgcgggcattgatctgggcgagtggaacgatctgcatccttcaaacaaaagggaagtaggccgccgcctgtttctggcggcggaacgggtggtattcaaaaacagaaacgctccttccagccctatgtgccgtgaggttcagttgcgcgggagcagactgtttttgagttttgacaactgtgacggcggccttatcgcgcacgatacgccttatgtgagtatagttgcagacgggaagttattacggatgcctgtgaaatag

SEQ ID NO: 6086 - protein, 270 aa, Unknown
  Obtained from environmental sample
  DOMAIN (65)...(139): Domain of unknown function (DUF303)
  misc_feature (1)..(270): Xaa is any amino acid
MYINGAEVGNTGYRYPPRKYRIPAGLLHEGKNRIVIRVTCVNGQGGVTRDKPFRVFSEKGCVELAGTWKYRIGVKTPPCPEAFFFQRQPMGLFNATIAPILRFPLRGVIWYQGESNDGNPDDYEVLFKAVIQDWRNKSGQETLPFLFVQLPIFGSPTENNEAASWAIIREAQSAALSLPATGMAAGIDLGEWNDLHPSNKREVGRRLFLAAERVVFKNRNAPSSPMCREVQLRGSRLFLSFDNCDGGLIAHDTPYVSIVADGKLLRMPVK

SEQ ID NO: 6087 - DNA, 678 bp, Unknown
  Obtained from environmental sample
  misc_feature (1)..(678): n is a, c, g, or t
ttgaagggtacaagcggttttagtcttcctgcaaacgcgaaaccttcggcctttgtggttttgcctgaaacgccaactttgccaacagtgatacccggctcaagaacattagatgtcagttggccgcctgtggagggtgcattatcatacgaagtatggacaagccagacaaataatccggcgaacgcccagaagcacggcggggataatttcgttacttctacaacgcttactgggctggtcaacaatattacgtactacatttggataaaagcaaaaaataatattggcgtaagcgaattaagtccgatggcaagcggaacgccatcggcatttgcctcgattccgcctgtaccgcaatccgagcctatagtaattgcgggaagcggacagcttacggtaaattggcaaacagcggaaggagcaaatagctacgaggtatgggcgggaacttccactaacccaatcatagcaacaaagcggggtgatgatgttactggtttgtccacggtaattacaggtttgagtaatggaaccacatattatatttggataaaagcaaagaatacgataggtgttagcagtttcagccccatggcaacggggacgccatcggtttttacattgccccacaagttccggcaattccatcagtcagtatcggtaacggacaaataa

SEQ ID NO: 6088 - protein, 225 aa, Unknown
  Obtained from environmental sample
  DOMAIN (22)...(102): Fibronectin type III domain
  misc_feature (1)..(225): Xaa is any amino acid
MKGTSGFSLPANAKPSAFVVLPETPTLPTVIPGSRTLDVSWPPVEGALSYEVWTSQTNNPANAQKHGGDNFVTSTTLTGLVNNITYYIWIKAKNNIGVSELSPMASGTPSAFASIPPVPQSEPIVIAGSGQLTVNWQTAEGANSYEVWAGTSTNPIIATKRGDDVTGLSTVITGLSNGTTYYIWIKAKNTIGVSSFSPMATGTPSVFTLPHKFRQFHQSVSVTDK

SEQ ID NO: 6089 - DNA, 684 bp, Unknown
  Obtained from environmental sample
  misc_feature (1)..(684): n is a, c, g, or t
ttgaaagattccccagcaggcaaagctggcataaaacaaaacgataccattttgagcgttgacggctacaccataggttattaccaagatatgatagatataatttctgcatctgatggtggtgctattgaggtggtgttttcaagagagcaaaaagacggcaaagtagatactttgagcgcatcgatgaacccactttggaacgaggaagcggagcgttatttgattggaattcaaatggggcttgctcaatttgatgagttgcaagtgattcacaagcctctgggcgaagctcttgcaatggcggcgaagaaaagcattagtatgggaaccagtgtgtttcgctacattcaccgcattgcaataggagaggttaagttgagggctatgagcgggccggttggcattgttcaggttataggtttggtttggcttgagaatttgcaaagagccgtgcttttacttgccctcataagcataaatttaggcgttatgaatttgctgcctcttgccataacagatggcggtcttcttttgttcttgctcattgaaaaaataagaggcaagccgctttctcaaaagaaccaagctcgcattcagcaagtggcaacctcatttttcatagctctgttcttttatataacattcgtggatttgagcagaggctcaatgctaatgaagtaa

SEQ ID NO: 6090 - protein, 227 aa, Unknown
  Obtained from environmental sample
  DOMAIN (104)...(218): Peptidase family M50
  misc_feature (1)..(227): Xaa is any amino acid
MKDSPAGKAGIKQNDTILSVDGYTIGYYQDMIDIISASDGGAIEVVFSREQKDGKVDTLSASMNPLWNEEAERYLIGIQMGLAQFDELQVIHKPLGEALAMAAKKSISMGTSVFRYIHRIAIGEVKLRAMSGPVGIVQVIGLVWLENLQRAVLLLALISINLGVMNLLPLAITDGGLLLFLLIEKIRGKPLSQKNQARIQQVATSFFIALFFYITFVDLSRGSMLMK

SEQ ID NO: 6091 - DNA, 426 bp, Unknown
  Obtained from environmental sample
  misc_feature (1)..(426): n is a, c, g, or t
atgaaacagcgctgtgcatgcggcggaagaagaacattcaaacgaggaacaatgattacgggaataggtattgatattatcgaggttaaacgcatggaacgctggctggataattccgccctgcttgaaagatattttcatcctcaggagataacgcttgctttttccagaaaaaaaagcgcagcccaaacccttgccgcaaggtttgccgcaaaggaagcgttcggcaaagctcttggaacgggacttgcgcggattgaattaaaagatattattgtaattaacaacgatagagggaaacccgatataaaattgacaggaacggcggaaaatgaatttgaaaagtccggcgcaaacaaagtgcatctttctcttgcccatgaaagagagaatgcggtagccatgatcgttttggagggagcgtaa

SEQ ID NO: 6092 - protein, 141 aa, Unknown
  Obtained from environmental sample
  DOMAIN (22)...(88): 4'-phosphopantetheinyl transferase superfamily
  misc_feature (1)..(141): Xaa is any amino acid
MKQRCACGGRRTFKRGTMITGIGIDIIEVKRMERWLDNSALLERYFHPQEITLAFSRKKSAAQTLAARFAAKEAFGKALGTGLARIELKDIIVINNDRGKPDIKLTGTAENEFEKSGANKVHLSLAHERENAVAMIVLEGA

SEQ ID NO: 6093 - DNA, 510 bp, Unknown
  Obtained from environmental sample
  misc_feature (1)..(510): n is a, c, g, or t
atgaaatttaataattttgataagacaggctcgtataaaaaacttgccgaacacgctaagactggctttatgttaagggacaaacttgacgcaaaaagggtgggggagtgtgtcgttcctatggcggcaggccttacatattcatgggcggcaaaagcagcggacgcccaaaccgtaaaattattgcaggaactcgccgacgagcaggaacttatcgtaaaatacaaagcccttcttgacggggaaatgatgaacacgggagaaaaacgaaaagtgcttcaccatctgtcgcgcggacagcagggacagcccgttgttgaaaacggaaaggatataggcgaattttaccgcaaggaactcggcaggttctgcgatttcgcgtccgccgtgcatggcggcaaatacaaaggttccacaggcaaggattttaccacggtagtgcaaattggcataggcggctcggacttagggccccgcgccatgtaccttgcgcttgacaactgggcgtaa

SEQ ID NO: 6094 - protein, 169 aa, Unknown
  Obtained from environmental sample
  misc_feature (1)..(169): Xaa is any amino acid
MKFNNFDKTGSYKKLAEHAKTGFMLRDKLDAKRVGECVVPMAAGLTYSWAAKAADAQTVKLLQELADEQELIVKYKALLDGEMMNTGEKRKVLHHLSRGQQGQPVVENGKDIGEFYRKELGRFCDFASAVHGGKYKGSTGKDFTTVVQIGIGGSDLGPRAMYLALDNWA

SEQ ID NO: 6095 - DNA, 597 bp, Unknown
  Obtained from environmental sample
  misc_feature (1)..(597): n is a, c, g, or t
ttggctgacatggtggaaacacgcgataaggggacaggcggtcatattgaacgcacgtccatgtatatcgatatattaatcaaagaaatgaaagaacgcggagtgtattccgaagaaatcaacggctgggatcttgaaagaattgtttcatctgcgcgtatgcacgatcttggaaaaatttccattacggatactatcgttaacaaaccgggtaaacttactgacgatgaatatgaagcgatgaagggtcacgccaaggaaggcgagcgtataatagatgaaattatttcgcgcacgggcgagggcgacttccttcttaacgcaaaattatttgcgggaactcaccatgaaagatgggacggtaaaggttatccgcgcgggttaaaaggaacggaaatcccgctgcagggacgaataatggctattgtagacgtatatgacgcgcttgtttcagagcgtccgtataaaagagcgttttcggacgatgaggcgataaatattattatgcaaaattcaggaactcattttgatccgaaaatagctgatttgttttatgaggtgagggagcatataaaagcggtgaaggcggctatttaa

SEQ ID NO: 6096 - protein, 198 aa, Unknown
  Obtained from environmental sample
  DOMAIN (12)...(149): HD domain
  misc_feature (1)..(198): Xaa is any amino acid
MADMVETRDKGTGGHIERTSMYIDILIKEMKERGVYSEEINGWDLERIVSSARMHDLGKISITDTIVNKPGKLTDDEYEAMKGHAKEGERIIDEIISRTGEGDFLLNAKLFAGTHHERWDGKGYPRGLKGTEIPLQGRIMAIVDVYDALVSERPYKRAFSDDEAINIIMQNSGTHFDPKIADLFYEVREHIKAVKAAI

SEQ ID NO: 6097 - DNA, 474 bp, Unknown
  Obtained from environmental sample
  misc_feature (1)..(474): n is a, c, g, or t
atgacggccttaagcacccttaccggaattgagtatttttccgcaacccgaaatacaatgaggactttttacgaatattcctcggttattgactcgccgtcttccaaaaaaccgctttccgaccctgtttttaacaagccgcccgcccaatatacgcttttcgcaagacaaaaagaccttactttcggagataatatctaccgttacgagtacagagcggcggaaggcgctttgttctttattcaggaaaatatgacatccatgagttacggaattattcccgcggtgggcaaaaacaagctcaggtcggttctggcggtaattgactgcggcgactcactgttaatctacgccgtttcaatggcaaaagccggctctgtccccggaatgacggacaaaataggcaattcattcaaaaatagggcggatgcggtctataaatggtttatccggggcgcggataagctgttttaa

SEQ ID NO: 6098 - protein, 157 aa, Unknown
  Obtained from environmental sample
  misc_feature (1)..(157): Xaa is any amino acid
MTALSTLTGIEYFSATRNTMRTFYEYSSVIDSPSSKKPLSDPVFNKPPAQYTLFARQKDLTFGDNIYRYEYRAAEGALFFIQENMTSMSYGIIPAVGKNKLRSVLAVIDCGDSLLIYAVSMAKAGSVPGMTDKIGNSFKNRADAVYKWFIRGADKLF

SEQ ID NO: 6099 - DNA, 621 bp, Unknown
  Obtained from environmental sample
  misc_feature (1)..(621): n is a, c, g, or t
ttgtctaacgaccctatttacagcgcccagcttgaggctttgaaagaaaagaaaaaaaatatgaggctaggcggtggagccgaggctatagaaaaacagcgcaagaagggtaaactatcggtttgggagagaatagaatacttttttgacgctggaacttttgtggaagttggcgcatatatagaactcagaaatgaattttttgggctaggcaaaaaaaagacccctggcgatggagtggtcactggttttgggcttgtgaatggccgcttggtttatgcggcagctcaggactttaccgttttaggcggttcgcttggagaaatgcacggcaaaaaaatcgcaagccttatggatatggctctgcaaaacggcgcaccctttgtgtctctgaacgattccggcggtgcaagggttcaagaaggcataggtgctctttgcggctatggcgatatttttatgagaaacactagagccagcggtgttatcccgcagatttccttgataatgggaccttgcgcaggaggtgcggtctatagccctggcataacggactttgtggttatggtaaaagatacttcctatatgttcatacaggtccggaagtcatcagacccgtga

SEQ ID NO: 6100 - protein, 206 aa, Unknown
  Obtained from environmental sample
  DOMAIN (28)...(206): Carboxyl transferase domain
  misc_feature (1)..(206): Xaa is any amino acid
MSNDPIYSAQLEALKEKKKNMRLGGGAEAIEKQRKKGKLSVWERIEYFFDAGTFVEVGAYIELRNEFFGLGKKKTPGDGVVTGFGLVNGRLVYAAAQDFTVLGGSLGEMHGKKIASLMDMALQNGAPFVSLNDSGGARVQEGIGALCGYGDIFMRNTRASGVIPQISLIMGPCAGGAVYSPGITDFVVMVKDTSYMFIQVRKSSDP

SEQ ID NO: 6101 - DNA, 435 bp, Unknown
  Obtained from environmental sample
  misc_feature (1)..(435): n is a, c, g, or t
atggatcaaaccgtcaaggaatttgtccttaaagttctgtttcttatgaagaaggataaatgggatctttccgtcntgatctgcggcgacgagaccataaaagccctcaatgaaacatacaggggaaaagatgaagccacggatattctctcgtttccattgggtgaaagcgcggattttccatccggggggaagcgccgttccaaccgccatataccgggagacatagtcatttcgcttgacactctgcgggaaaatgcccgccgctttcaggttgaagaggatgaggagttacgccgtttgttgattcatggtatccttcatcttgacggcatgaatcacaagactaacgatgaggccgaacctatgttacagcttcaggagcatatattggcaaaactgtcaaaaaagcaaatcctcgggaggagtgcatga

SEQ ID NO: 6102 - protein, 144 aa, Unknown
  Obtained from environmental sample
  DOMAIN (28)...(127): Uncharacterized protein family UPF0054
  misc_feature (1)..(144): Xaa is any amino acid
MDQTVKEFVLKVLFLMKKDKWDLSVXICGDETIKALNETYRGKDEATDILSFPLGESADFPSGGKRRSNRHIPGDIVISLDTLRENARRFQVEEDEELRRLLIHGILHLDGMNHKTNDEAEPMLQLQEHILAKLSKKQILGRSA

SEQ ID NO: 6103 - DNA, 618 bp, Unknown
  Obtained from environmental sample
  misc_feature (1)..(618): n is a, c, g, or t
ttgtccgacggcgctcttccttcgtaccggcaaatgaagacctttgtgcgtgggcgccggagcgtgcgccagtttcgcgacgaagacgttccgcccgcgcttattgacgaactgctggcggatcttgcccatgcaccgaccggctgcaatgatcgggatctgactttttcggttgtgccaggccgcaaagccatgcgcgcattgctggaaaggcttgtgcgggcaatcgaggccaggcggggatcaggcgaaaccccacctgaatttatcgccgaggctgtgacggcgtaccggaacagcggcagggatatgctcttcctggactcgccgcatctgcttgttgtctctcccggcgaaaaggcaacgtgcgcccatgaggacgcggtactcgcccttgcctatttcgaattgctggcgcaaagcgccggtctgggaacaacctggtgcggcatgatcaaattcgtcgccgacgcgctcccggaagtccgcgcatggctcggtttggcgccggacgcctatttctacgccatgatgttcggccggcccgccgtccgctatgcgcggacggtgcaacgggatacagcggcgcggattcgccggcttgacatcctgccttaa

SEQ ID NO: 6104 - protein, 205 aa, Unknown
  Obtained from environmental sample
  DOMAIN (16)...(181): Nitroreductase family
  misc_feature (1)..(205): Xaa is any amino acid
MSDGALPSYRQMKTFVRGRRSVRQFRDEDVPPALIDELLADLAHAPTGCNDRDLTFSVVPGRKAMRALLERLVRAIEARRGSGETPPEFIAEAVTAYRNSGRDMLFLDSPHLLVVSPGEKATCAHEDAVLALAYFELLAQSAGLGTTWCGMIKFVADALPEVRAWLGLAPDAYFYAMMFGRPAVRYARTVQRDTAARIRRLDILP

SEQ ID NO: 6105 - DNA, 852 bp, Unknown
  Obtained from environmental sample
  misc_feature (1)..(852): n is a, c, g, or t
atggacagcgaccatcagcagattattgtcgaagcccttaccgatacggaaatcggcgagattatgaacaagcttttcgttgacgacgctgtagactttatcgaggaaatgcccgccaatgtggtcaaccgcgtacttaaaaacgtacagcctgaaaaacgaaaactgataaaccattttttacagtaccccgatgattccgcaggcagtataatgacaacggaatatgtcgatctccgcgaggatgccaccgtgcgcgaggcttttgacaccatccgcagtacgggcattaataaagagacaatttacaactgttatgtgatacgaagggatcgtcttcttgtaggcgcgatttccgcgaaaacgcttatgctcgccaaaccgcaggagcgcatcggcgatataatggacaccaaccttttttttgcgcatacgactgacgaccaagaggccattgcggaacaatttaaaaaatactctctcttggcgatgcccgtggttgacaaggagcaaaggcttgtgggcattataacggtagacgacattgtagacgttatcgttgaggaaagcacggaagacatcgaaaagatgaacgccctcgccccgtctgacgatccgtatcttaaaacgggcgttttccgtcttgcgagaaaccgcatcatctggcttttggtcttgatgctttccgcgaccataaccggcattatcatttccgattttgaaaacggacttgcggccctgcccatccttgtcgcgtttatcccaatgctcatggacacggggggcaacgccggttcccaatcttcaacccttatcatccgtggtatgccgataggtgaaatcagcccttaa

SEQ ID NO: 6106 - protein, 283 aa, Unknown
  Obtained from environmental sample
  DOMAIN (1)...(68): MgtE intracellular domain
  misc_feature (1)..(283): Xaa is any amino acid
MDSDHQQIIVEALTDTEIGEIMNKLFVDDAVDFIEEMPANVVNRVLKNVQPEKRKLINHFLQYPDDSAGSIMTTEYVDLREDATVREAFDTIRSTGINKETIYNCYVIRRDRLLVGAISAKTLMLAKPQERIGDIMDTNLFFAHTTDDQEAIAEQFKKYSLLAMPVVDKEQRLVGIITVDDIVDVIVEESTEDIEKMNALAPSDDPYLKTGVFRLARNRIIWLLVLMLSATITGIIISDFENGLAALPILVAFIPMLMDTGGNAGSQSSTLIIRGMPIGEISP

SEQ ID NO: 6107 - DNA, 390 bp, Unknown
  Obtained from environmental sample
  misc_feature (1)..(390): n is a, c, g, or t
atgaaaaacacggtgattgatattaatatttttatggattttttgtttaataggcggggacatgaaaatgttgcggagctatttaagttctgctcaaacggacgtgtcaaaggatttgtttgcgctcatgaaataacgacattgtgctattttttaaataaagccggaaaagatacgtcaaaaacaaaggaaatcatttcaaaactaataaaacagtttacggttattgagataaatgaagcgctgttaaataacgcattaaattcagaaatagatgattttgaagacgctgtaatagaggtgtcggcgattgatagaaatgcggattatattgtaacaagaaacacgaaagattttgagaaaagncgttattcaagtcaaaacacctga

SEQ ID NO: 6108 - protein, 129 aa, Unknown
  Obtained from environmental sample
  DOMAIN (4)...(124): PIN domain
  misc_feature (1)..(129): Xaa is any amino acid
MKNTVIDINIFMDFLFNRRGHENVAELFKFCSNGRVKGFVCAHEITTLCYFLNKAGKDTSKTKEIISKLIKQFTVIEINEALLNNALNSEIDDFEDAVIEVSAIDRNADYIVTRNTKDFEKXRYSSQNT

SEQ ID NO: 6109 - DNA, 825 bp, Unknown
  Obtained from environmental sample
  misc_feature (1)..(825): n is a, c, g, or t
atgtacctctttaccataacctttgttcttggccctcttgtttatatgctggctttaagctttatgcggcggcatggaagctggggggtggaaacggtattcaccctgcggaactaccgccttatttttgagccggtctaccttgaaacattcaaacagtcggtaaaactggcgcttgtaagcactttagtcgtcacgctgacaggctaccccttcggctattttatggcccgcctgaaacctgtctggcggggcagggtgatgctccttctgataatccctttctggaccagcgccctgatgaggctttacggatggataatcgtgttcaggtcaaacggcgttcttgacagcatacttacgcgccttggattgacgcgcgagcctttacgcctcttgtacagttatcccgcggtcgttaccggaatgatctacgccctgctgccgtttatgatctactcggtgtacgccagcgccgagaaaatggaccgttccctggtggaagcggcgcgtattctcggagcgggccgtttccgcgccttcctcagcgtcaccctgcccctgaccatgccgggcctgttctcaggcgttatattaaccttcattccttcaatgggtctgtacttcatcgcggacatactcggcggcaacaaggttgtcctggtgggaaacctgatccgcgagcaggtgatgaacgtgcacgacctgcccttcgctgcggcgctcagcgttacgctgatggcgctgaccggcctgctcctgtacctgtaccgccttgccgcccgcagcggcgagatcgctcgtgccgctcgtgccgaattctga

SEQ ID NO: 6110 - protein, 274 aa, Unknown
  Obtained from environmental sample
  DOMAIN (51)...(265): Binding-protein-dependent transport system inner membrane component
  misc_feature (1)..(274): Xaa is any amino acid
MYLFTITFVLGPLVYMLALSFMRRHGSWGVETVFTLRNYRLIFEPVYLETFKQSVKLALVSTLVVTLTGYPFGYFMARLKPVWRGRVMLLLIIPFWTSALMRLYGWIIVFRSNGVLDSILTRLGLTREPLRLLYSYPAVVTGMIYALLPFMIYSVYASAEKMDRSLVEAARILGAGRFRAFLSVTLPLTMPGLFSGVILTFIPSMGLYFIADILGGNKVVLVGNLIREQVMNVHDLPFAAALSVTLMALTGLLLYLYRLAARSGEIARAARAEF

SEQ ID NO: 6111 - DNA, 651 bp, Unknown
  Obtained from environmental sample
  misc_feature (1)..(651): n is a, c, g, or t
ttggaaaataagccaaatacaggggtaatatttgacgaccttttttttatggaaatgtggaaaattaacgatgtagaaaacgcgataaagaaattttacaaaatgtgggacggtaaattatacagacaatatatagacaaattcggcttgcctgttgataaaaaaataaaagatctatcacggggaatgaaaattaaattaatgcttgccgcggcgatgtcccataatgccaaacttctgcttcttgacgagccgaccagcggtcttgatcccgtcgcccgaaatgaacttttagaaatattcaaagattatatttccaatggtgaaaggagtattttattctctactcacatcacatccgacctggaaaaaattgcagattatattaccttgattgatcatggaaaattgctttattcaggcaaaacaggcgaacttattaaaaattattttattgtcaggggaagtcccgatattttatcacctgaaataaaaagaaatattatcgggctaacgataaatcaatcagtatttgtcggcatggttaaatcttctgtggcgcaaaatattcccaaagaaataattagcggcataccgagtattgatgaaatacttatttattttagcaaaggaataaataaagatgaatag

SEQ ID NO: 6112 - protein, 216 aa, Unknown
  Obtained from environmental sample
  DOMAIN (4)...(135): ABC transporter
  misc_feature (1)..(216): Xaa is any amino acid
MENKPNTGVIFDDLFFMEMWKINDVENAIKKFYKMWDGKLYRQYIDKFGLPVDKKIKDLSRGMKIKLMLAAAMSHNAKLLLLDEPTSGLDPVARNELLEIFKDYISNGERSILFSTHITSDLEKIADYITLIDHGKLLYSGKTGELIKNYFIVRGSPDILSPEIKRNIIGLTINQSVFVGMVKSSVAQNIPKEIISGIPSIDEILIYFSKGINKDE

SEQ ID NO: 6113 - DNA, 384 bp, Unknown
  Obtained from environmental sample
  misc_feature (1)..(384): n is a, c, g, or t
atgacccctctgatgaaacaatacaatgagataaaagcagcccattcaggctgtattttgttttttaggatgggagatttttacgaactatttgaaagcgatgcaattgtggcatcaaaaattttggggataacgctcacaagccgcaacaacggcggagcaaaggaacaggcgctttgcggtttcccttaccacgccgcggagagatacataccaaaaatgcttgcggcaggctaccgcgttgcaatatgcgagcaaatggaagaccctaaactcgccaaaggcatagtgaaaagagatgttgtagaggttatttccgctgggactagtttttcggaagccatttggatgcaaagcagtcatcttatatatgcgcgtttttaa

SEQ ID NO: 6114 - protein, 127 aa, Unknown
  Obtained from environmental sample
  DOMAIN (2)...(114): MutS domain I
  misc_feature (1)..(127): Xaa is any amino acid
MTPLMKQYNEIKAAHSGCILFFRMGDFYELFESDAIVASKILGITLTSRNNGGAKEQALCGFPYHAAERYIPKMLAAGYRVAICEQMEDPKLAKGIVKRDVVEVISAGTSFSEAIWMQSSHLIYARF

SEQ ID NO: 6115 - DNA, 480 bp, Unknown
  Obtained from environmental sample
  misc_feature (1)..(480): n is a, c, g, or t
ttgggcaacctaagcggcaaaacagtcaccattgtgggcgatattaagcacagcagggtagcccgttcaaacgcttggggcttgaatgccttgggtgccaatgtccgcttttgcggtcctccaacccttatgcctcgcaacccaaagatgcttccggttgaaattttttgcgatgttgccaaagcagttgatggagccgatgccgttattgcccttcgtctgcaaaaagagcgaatggacgattctcttttgccaagcataagagaataccgcaatttttacggcataacaaggcaaaccttggaacacgccaaaaagaacgttttaattatgcatccgggtccaatcaataggggagtggagttggattcggatattgcagatggcgagaattccgttattctggaacaggttacgaatggcgttgctgttaggatgtcggttttgtatttgctatccgctggcagggctggggactag

SEQ ID NO: 6116 - protein, 159 aa, Unknown
  Obtained from environmental sample
  DOMAIN (4)...(152): Aspartate/ornithine carbamoyltransferase, Asp/Orn binding domain
  misc_feature (1)..(159): Xaa is any amino acid
MGNLSGKTVTIVGDIKHSRVARSNAWGLNALGANVRFCGPPTLMPRNPKMLPVEIFCDVAKAVDGADAVIALRLQKERMDDSLLPSIREYRNFYGITRQTLEHAKKNVLIMHPGPINRGVELDSDIADGENSVILEQVTNGVAVRMSVLYLLSAGRAGD

SEQ ID NO: 6117 - DNA, 381 bp, Unknown
  Obtained from environmental sample
  misc_feature (1)..(381): n is a, c, g, or t
ttggaacacgccaaaaattttcaaatctcggttaaagagaacaacggaaaactcctatttttgcgaaaggttttggaaggtgcttgcgattccagttatggtattcacgtagcggaaatggctggtgttccaagcgaggtagttcaaagagcaaagcgaattctgttaaggctggaaaaagaaaaaattgacccaagcgacagtgcccataaacccaaagccgcccagctctctttctttgagccaccgccaataagtgagaacaccgaacttttgctgagagaattaaaggcggtaaatcccgatgatatgacacctattcaggcattgcagtttgttgggaagattaaggaactagtccccagccctgccagcggatag

SEQ ID NO: 6118 - protein, 126 aa, Unknown
  Obtained from environmental sample
  DOMAIN (1)...(61): MutS domain V
  misc_feature (1)..(126): Xaa is any amino acid
MEHAKNFQISVKENNGKLLFLRKVLEGACDSSYGIHVAEMAGVPSEVVQRAKRILLRLEKEKIDPSDSAHKPKAAQLSFFEPPPISENTELLLRELKAVNPDDMTPIQALQFVGKIKELVPSPASG

SEQ ID NO: 6119 - DNA, 663 bp, Unknown
  Obtained from environmental sample
  misc_feature (1)..(663): n is a, c, g, or t
atgtcaacgaatgtaacgtatgaaagttttgacaaaatggaggcttttatgaaagacgtttttataaaagccggtgtgccgccggatgacgcggctatttgcgccgacgtgctgatcgaatcggacaaacggggcattgattcccacggcgttggcagattcaagcccatttacattgaccggatcaaggacggaattcaaaacccggttaccaaattcgaggtggtaaaggaccatctggctacagcggtggttgacggccatgacggcatgggccaggtaatcgccaaaagatcaatgcagatggctatcgacaaggccaaacagcacggcctaggcatggtagttgtgcgcaactccacgcactacggcatcgccgggtattacgcctccatggcggcgaaggccggaatgattggcattaccggaaccaacgcacgaccttccattgcccccactttcggcatcgataacatgctggggaccaaccctttgacagtgggtatcccaaccgacgaggattttccctttatgctggactgcgccacttctgtttcacagcggggcaaaatcgagcattacgaaagaattggcaaaaccatgcccgaaggttgggtcattaaccgggacggctccggagaaacgaccccttcaaagccctga

SEQ ID NO: 6120 - protein, 220 aa, Unknown
  Obtained from environmental sample
  DOMAIN (9)...(220): Malate/L-lactate dehydrogenase
  misc_feature (1)..(220): Xaa is any amino acid
MSTNVTYESFDKMEAFMKDVFIKAGVPPDDAAICADVLIESDKRGIDSHGVGRFKPIYIDRIKDGIQNPVTKFEVVKDHLATAVVDGHDGMGQVIAKRSMQMAIDKAKQHGLGMVVVRNSTHYGIAGYYASMAAKAGMIGITGTNARPSIAPTFGIDNMLGTNPLTVGIPTDEDFPFMLDCATSVSQRGKIEHYERIGKTMPEGWVINRDGSGETTPSKP

SEQ ID NO: 6121 - DNA, 906 bp, Unknown
  Obtained from environmental sample
  misc_feature (1)..(906): n is a, c, g, or t
gtgaaagtcttaaccggcgataatgacgctgttacaggcacagtatgccgttcagtaggaatagacgcgcaccgcatactgctcggctctcaaattgaggaaatgaacgaaagcgaattaaaaaaagctgttgaaaagaccgacgttttcgcaaaactttctccgggacagaaagcccgcattgtaacagccctgcgtgaagacggtcatactgtcgggttcatgggagacggaataaatgacgccgccgcgatgagagcggctgacgtaggtatttcggttgatacagcagtggacatcgcaaaagaatccgccaatatcattctgcttgaaaaagacctcatggtactggaagaaggcgtcatcgaaggcagaaagatctacgcaaacataatcaaatacataaaaatgacggcaagttccaacttcggaaatatgttttcagtgcttgcggcatctgcgttcctgcccttcctgcccatgatgccgattcaaattctggtattaaatttaatatacgatatttcctgcacagcgatcccctgggacaatgtagacctcgaattcctgcgtaaaccgaagaaatgggacgcttccagcatcagccgttttatgttaggtattggaccggtaagctccatattcgatattgccacttattgtctgctcttctttattatctgcccgcgctttacaggaggcccgtacattacccttgatgaaaatgcgaggactgcttttataatgcttttccattccggctggtttgttgaatcactgtggtcccagacatttatcattcacatgatccgcactcccaaacttcctttcattcaaagcagagcttccgcccatnctactctttttactattttaggcatcgctgtaggaactctcattccgtaa

SEQ ID NO: 6122 - protein, 301 aa, Unknown
  Obtained from environmental sample
  misc_feature (1)..(301): Xaa is any amino acid
MKVLTGDNDAVTGTVCRSVGIDAHRILLGSQIEEMNESELKKAVEKTDVFAKLSPGQKARIVTALREDGHTVGFMGDGINDAAAMRAADVGISVDTAVDIAKESANIILLEKDLMVLEEGVIEGRKIYANIIKYIKMTASSNFGNMFSVLAASAFLPFLPMMPIQILVLNLIYDISCTAIPWDNVDLEFLRKPKKWDASSISRFMLGIGPVSSIFDIATYCLLFFIICPRFTGGPYITLDENARTAFIMLFHSGWFVESLWSQTFIIHMIRTPKLPFIQSRASAHXTLFTILGIAVGTLIP

SEQ ID NO: 6123 - DNA, 561 bp, Unknown
  Obtained from environmental sample
  misc_feature (1)..(561): n is a, c, g, or t
ttgtctatacatacagatgatacggatattggggctttttacaggcaatattacaccctcgtttacaggcgctgccttgccgtgctcggcaacagcgaagacgcgcaggatgccgcccacgatgtgtttgaaaaaatacacgaacagaagtcaaagggccagcttaacatcccatatccaaaaacgtatttatctacggcggcaaaaaatatggggctgaataaaaaaaaaagagcaagaagggagctgaatgagctatacgacatggcaaccaacggcagtattaactggttcatcgaaaggggtaacgaagaagggaaaataaaatgggaagcgggtattgttgacaacggctatgaacaggtagaagcgcaaatcatcgtacaagccattctggatgaacaggacgaaataacccgcaagatttacttctataagtaccacgatgatatgacccttgagcaaataggcgaagccgtagggcttaaaaaatcggcggttcagaaaaggcttaaaaacctggaggagcaagtcaaagtgaaaatggggcggaacaaatga

SEQ ID NO: 6124 - protein, 186 aa, Unknown
  Obtained from environmental sample
  DOMAIN (13)...(82): Sigma-70 region 2
  misc_feature (1)..(186): Xaa is any amino acid
MSIHTDDTDIGAFYRQYYTLVYRRCLAVLGNSEDAQDAAHDVFEKIHEQKSKGQLNIPYPKTYLSTAAKNMGLNKKKRARRELNELYDMATNGSINWFIERGNEEGKIKWEAGIVDNGYEQVEAQIIVQAILDEQDEITRKIYFYKYHDDMTLEQIGEAVGLKKSAVQKRLKNLEEQVKVKMGRNK

SEQ ID NO: 6125 - DNA, 438 bp, Unknown
  Obtained from environmental sample
  misc_feature (1)..(438): n is a, c, g, or t
atgcgttatttactagatacgaatgtatttatattttatgcacagggcggtgaaagtttagatagagatacaaccgcaatatttggcgactacgagaatttgatttatgttagtgccgaagttgtaaaggaaacaatgcacttaataaggcaaaagaaaatagatgtaaagcattggaaaaccccaaacgacatttggaaatccataaccgaatggggttttgttgttgattatgtcaaggaagaacacataagaacattaggcaatttatccacagcaaaagaccacaaagacccaacagaccacataatcatagcacaagcaataacaaacaaaatgcctgtaatcagtagcgacagccaattcaggcattacaaaggacaaggtttaagtttagtttttaacaacgcccacgagagaaataagatagcaaggtag

SEQ ID NO: 6126 - protein, 145 aa, Unknown
  Obtained from environmental sample
  DOMAIN (3)...(130): PIN domain
  misc_feature (1)..(145): Xaa is any amino acid
MRYLLDTNVFIFYAQGGESLDRDTTAIFGDYENLIYVSAEVVKETMHLIRQKKIDVKHWKTPNDIWKSITEWGFVVDYVKEEHIRTLGNLSTAKDHKDPTDHIIIAQAITNKMPVISSDSQFRHYKGQGLSLVFNNAHERNKIAR

SEQ ID NO: 6127 - DNA, 675 bp, Unknown
  Obtained from environmental sample
  misc_feature (1)..(675): n is a, c, g, or t
atggaagaattggtaacgggaacaatgttaaaaacccaaaaaggaaaaactgttaaaattcgcgaaaaattgggcgaaggcggacagggtattgtatataaaattttatatgacggaaaacctaaggcctttaagtggtatcacagtaacattataaagaattctttcaaattttatcaaaatcttgaaaacaatatcgaaaaaggcgctcctacagcctcttttttgtggccgcaggacattacggaaaagtctgaaaaaggatatggctatatcatggatttatgccctcctgaatttaaggacttttccctttttctgctcgcgaaagaaaaattttccagcgttacggccatggtaaactccggtctttatattatcgaggcgttcagggaattgcacaattcgggctacagctatcaggatttgaacgacggtaatttctttgttaatccaaagagcggcgaagtgttaatctgtgataacgataatgttgtggaatacggaaaaaatctttgtgtcgcgggaaaatgccgctatatggctcctgaaattgtaaccggagaggctcttccgggcatacataccgataaattttcccttgccgtaatattgtttcttttattaatggggaatcatccgtggagggaaaacgctcatacccgccgtgcatga

SEQ ID NO: 6128 - protein, 224 aa, Unknown
  Obtained from environmental sample
  misc_feature (1)..(224): Xaa is any amino acid
MEELVTGTMLKTQKGKTVKIREKLGEGGQGIVYKILYDGKPKAFKWYHSNIIKNSFKFYQNLENNIEKGAPTASFLWPQDITEKSEKGYGYIMDLCPPEFKDFSLFLLAKEKFSSVTAMVNSGLYIIEAFRELHNSGYSYQDLNDGNFFVNPKSGEVLICDNDNVVEYGKNLCVAGKCRYMAPEIVTGEALPGIHTDKFSLAVILFLLLMGNHPWRENAHTRRA

SEQ ID NO: 6129 - DNA, 726 bp, Unknown
  Obtained from environmental sample
  misc_feature (1)..(726): n is a, c, g, or t
gtgcgtaaaactgtcgccgcaggaaagactgtactgtttataggcactaaaaaacaggctcagcaggctgttcagaaagaagcggaaagatgcggaatgttctatgtaaataaccgctggcttggcggaatgctgaccaactttgcaacaattaaaaaatcgcttctgcgcctcaaaaaacttgaaaagatggaaattgacgggactttcgaaaatcttaccaaaaaagaaatttcaagtcttgcaaaagaacgaattaaacttcagaaaaacctcggcggcatcaaagagatgaaggaacttcccggaatcttatttatcgttgatacccgcaaagaagctattgcagtcgccgaagccagacgcataggtattccgattgttgctgtcgtagacaccaactgtaatccagacggtatcgactacccaattcccggcaacgatgacgcaatcagggctattaccctattcactcagattattgcaaacgctgtcgtggaagcagataacgaggtcggtcttaaaattatcgagacactcggcgatgaagacgaagacatggaaaaccttttaaacagcgatatttcaattaaagaagaagacaaagaaattgatatcgaaaaatatacgactgaggaagcttacaaagacgcaaaagaaaaagactatgatgacgatgacgatgatacccagattcaggttgatgttgataaagtatacgagtaa

SEQ ID NO: 6130 - protein, 241 aa, Unknown
  Obtained from environmental sample
  DOMAIN (2)...(169): Ribosomal protein S2
  misc_feature (1)..(241): Xaa is any amino acid
MRKTVAAGKTVLFIGTKKQAQQAVQKEAERCGMFYVNNRWLGGMLTNFATIKKSLLRLKKLEKMEIDGTFENLTKKEISSLAKERIKLQKNLGGIKEMKELPGILFIVDTRKEAIAVAEARRIGIPIVAVVDTNCNPDGIDYPIPGNDDAIRAITLFTQIIANAVVEADNEVGLKIIETLGDEDEDMENLLNSDISIKEEDKEIDIEKYTTEEAYKDAKEKDYDDDDDDTQIQVDVDKVYE

SEQ ID NO: 6131 - DNA, 528 bp, Unknown
  Obtained from environmental sample
  misc_feature (1)..(528): n is a, c, g, or t
atgcaagtaccgcttcatattggcattattatggacggaaacggacgctgggcaaccaaccgaggacttgtgcggacgcaggggcatcttgaagggctaaaagcggcaaaaagaattacaaaagccgcaagcgacttaagcgtaaagtatttgactctttacgctttttctacggagaactggaaacgcacctcagaagaagtgggttttattatgggtcttattaaacagtttttaaagtcggaatttgatttcagtaaaaggaatcgtatccgcgtccgctttacaggggacatggaaggattacccgctgatattcaaaaagaaattcaggatacgatggaacaaacttccggttttgacggaatgcaggttgttcttgcaattaattacggcggaagagacgagattgtacgcgcgttcaaaaagttatctgcaaaccgttcaccggaaacttccttagcggatttaacggaaaaagatttttcagcatttttggataatcctgacatacccgatcctgattaa

SEQ ID NO: 6132 - protein, 175 aa, Unknown
  Obtained from environmental sample
  DOMAIN (10)...(175): Putative undecaprenyl diphosphate synthase
  misc_feature (1)..(175): Xaa is any amino acid
MQVPLHIGIIMDGNGRWATNRGLVRTQGHLEGLKAAKRITKAASDLSVKYLTLYAFSTENWKRTSEEVGFIMGLIKQFLKSEFDFSKRNRIRVRFTGDMEGLPADIQKEIQDTMEQTSGFDGMQVVLAINYGGRDEIVRAFKKLSANRSPETSLADLTEKDFSAFLDNPDIPDPD

SEQ ID NO: 6133 - DNA, 327 bp, Unknown
  Obtained from environmental sample
  misc_feature (1)..(327): n is a, c, g, or t
atgaaaaaagcaatccgttcttcggaattatcgcttaacccgtctaatgacggtaaggtgattcgtatttctatcccgccgcttacggaagaaaggcgcaaagaacttgtcaaacttgcaaaaaatcaggctgaacaatcaagagtgtcaatccgtaacattcgcagagacggcaatgatgagctaaaaaaacttttaaaggactcaaaaattaccgaagatgacgaaagcaaggaatctgcggaactgcaaaaacttacagacaattatattaatcaggttaatcaggttctggaagaaaaagaaaaagagataatggaagtttaa

SEQ ID NO: 6134 - protein, 108 aa, Unknown
  Obtained from environmental sample
  DOMAIN (2)...(106): Ribosome recycling factor
  misc_feature (1)..(108): Xaa is any amino acid
MKKAIRSSELSLNPSNDGKVIRISIPPLTEERRKELVKLAKNQAEQSRVSIRNIRRDGNDELKKLLKDSKITEDDESKESAELQKLTDNYINQVNQVLEEKEKEIMEV

SEQ ID NO: 6135 - DNA, 843 bp, Unknown
  Obtained from environmental sample
  misc_feature (1)..(843): n is a, c, g, or t
gtgttccttttttacgtaaaacgcctgaataaccgccaggatgcggaagatttggcgagtgaaataatagttcatgtattaaacggcgtcaaaaaataccatattgattctcttgaaaagtgggtacggcgtattgctcataaccgttacgcaagatttatcaatatacgtaataagcatgatgaagtacagtctgaatacgattttacaggtatcagggacgattatgattttgttgatgccctaattatccgtgacgaataccagcgggtcttcaaacaacttcatacgctctcctgcgagtaccgtaatattttggttgattattacattgaagagctgtctgtaaaacaaattgccgaaaattacttgctgacagagacgacggtgaaatggcggcttaacataggccgtaaaaaaattaaagcaagaattggagaaaataagatggataaggtatataaacctattaactggaatacagatacctgtaacggcggttttttcagctcggataaatatctgcaaagccaggtcgcgcgggctatatgcgcggcggcgtatgaaaagccgctcactgtagaagaaataagcctgaaaacggggcttcccgcaatgtacattgaggacgaactgccgagattgatatacggcgaagctataaaagaagacggaaataaatacgcggctaattttatagtgcttcgtctgtgtgataaacgggcaatggaagtaaacttcgccccttttattgcaggtattgccgatcactttacagaactttttaagagcatgaagatgatatttcaaaaatggatttctacggctcaagactgggtatga

SEQ ID NO: 6136 - protein, 280 aa, Unknown
  Obtained from environmental sample
  DOMAIN (88)...(141): Sigma-70, region 4
  misc_feature (1)..(280): Xaa is any amino acid
MFLFYVKRLNNRQDAEDLASEIIVHVLNGVKKYHIDSLEKWVRRIAHNRYARFINIRNKHDEVQSEYDFTGIRDDYDFVDALIIRDEYQRVFKQLHTLSCEYRNILVDYYIEELSVKQIAENYLLTETTVKWRLNIGRKKIKARIGENKMDKVYKPINWNTDTCNGGFFSSDKYLQSQVARAICAAAYEKPLTVEEISLKTGLPAMYIEDELPRLIYGEAIKEDGNKYAANFIVLRLCDKRAMEVNFAPFIAGIADHFTELFKSMKMIFQKWISTAQDWV

SEQ ID NO: 6137 - DNA, 843 bp, Unknown
  Obtained from environmental sample
  misc_feature (1)..(843): n is a, c, g, or t
atgtttattaatatagaaaatcattttctaactttcaaatcaatgcccgatgttctagccgaattcctaacccaagccgaaagcaagggattgcagctttaccctgctcaggaagaagcgattttggagcttttggagggtaaaaacgttattcttgccaccccaacaggttctgggaagtctttggtagccagttttttgcaccgccttatgctctccaaaaatctgcgctcggtttatacctgcccaataaaagccctagtaaatgaaaaatggatggcactctgcaaggagttcggggcgcaaaacgttgggctttccacaggggatgcaaccgttaatcacaatgcccctatcctatgttgcacagcggagattttggagcaaattgcgctaagagagggagaaaattcaaatataggtgcggtggcaatggacgaattccattattacagcgacaaagaaaggggagtggcttggcaaattcccttgctcacaatgaagcacacacaattccttttaatatctgcaacccttggtgatacctctttttttgaaaccgaaatgacaaagttaaacggcttgcaaagcgtgtgcataagaaatgcagagcgacctgttcccctggaatttacatattcagaaagcccgctggcaaatgaaattcaaaaattgctgaacgagggcaaaggccctgtttatgtggtgcatttcacgcagagcgaggcggcagaaaacgcgcaggctttcacgagcttgaatatagcgggcttgcttaaaaaaaataaatcgcagaaagcatggcaaatttcagggttttcagccccctttgtgcagatataa

SEQ ID NO: 6138 - protein, 280 aa, Unknown
  Obtained from environmental sample
  DOMAIN (30)...(181): Type III restriction enzyme, res subunit
  misc_feature (1)..(280): Xaa is any amino acid
MFINIENHFLTFKSMPDVLAEFLTQAESKGLQLYPAQEEAILELLEGKNVILATPTGSGKSLVASFLHRLMLSKNLRSVYTCPIKALVNEKWMALCKEFGAQNVGLSTGDATVNHNAPILCCTAEILEQIALREGENSNIGAVAMDEFHYYSDKERGVAWQIPLLTMKHTQFLLISATLGDTSFFETEMTKLNGLQSVCIRNAERPVPLEFTYSESPLANEIQKLLNEGKGPVYVVHFTQSEAAENAQAFTSLNIAGLLKKNKSQKAWQISGFSAPFVQI

SEQ ID NO: 6139 - DNA, 522 bp, Unknown
  Obtained from environmental sample
  misc_feature (1)..(522): n is a, c, g, or t
atgggcattaacagttcctttggcgctgaaaaagtcatgccccatatacgccgcctttcagacaggttgcccggatttgtcagttaccacccaaacgccgggcttccaaacaaattcgacgcttacgaagaaagccccgaatcaatggccctttatgtcgaaaaatacttatccgagggcttgttaaacgtaattagcggttggtgcggcaccactcccgcgcatatcgccgccatagccgcaaaagccgccctgtacaagccccgcgctcggccgcaaaaccctttactgcggcctcttcttctgtcagggctggaattgctcattgctaattccccaaaacccgataccacctccccccactccccactccccactccccactccctaatcttgattggcgaacgcaccaacgtctcgggaagcaaaaaattcctgcgcctaatcagcgaaggaaaatacaacgagacgcttgcttttgcccgcgaaacaatcgaagacggcgcgaagattatcaactag

SEQ ID NO: 6140 - protein, 173 aa, Unknown
  Obtained from environmental sample
  misc_feature (1)..(173): Xaa is any amino acid
MGINSSFGAEKVMPHIRRLSDRLPGFVSYHPNAGLPNKFDAYEESPESMALYVEKYLSEGLLNVISGWCGTTPAHIAAIAAKAALYKPRARPQNPLLRPLLLSGLELLIANSPKPDTTSPHSPLPTPHSLILIGERTNVSGSKKFLRLISEGKYNETLAFARETIEDGAKIIN

SEQ ID NO: 6141 - DNA, 828 bp, Unknown
  Obtained from environmental sample
  misc_feature (1)..(828): n is a, c, g, or t
ttgaacaccccgctaccaaaaatgaacaataaaggcgctgccaacggcgaatatagggttcgtaacgaaaatggggacggattaaaagatattttgagtaaggcggtttttgacggcggaaccgacttttcaaaaatcaacctgaactccattgccggaaaagaaattttattcttttcagacggaatctcaactttgagcgatgttgattttataaagaatacaccggctaagcgtcctgttcattgcctcgtctcttcatcaaaggccgattacagcgcgatgagattgatcgccggtaaaacgaaaggtaaatttataaatatcaacgccctctcttccgcacaattaagaaacgaattgttgaacgaaacgccgctatttctgagagcggcatacggaaaagagctgcgagaggtatatccgagcatcgcggtccctatccacggcaatttctcgctctccggcatcgccgaaaaagacaacgccgaagtaactttgcttttcggtttcggcaatagggttgaaaaacggatcaagataaaattggacgctaaaaaagccgataaacatggaaaagcgcataaactttgggcgcagaagaagatcgccgagcttgatttaaactacgataagaaccgtgacgaacttacggatatcggtcaacaattcggcattgttacgcgaaacacatcgctcattgtgcttgaaaccatagacgactatattcactacaagatcacaccgcccgccgatctgcgagaagaatatttggcggaatatatgagtgaggaaaaggatttgaagaggaaccggaagatgaattaa

SEQ ID NO: 6142 - protein, 275 aa, Unknown
  Obtained from environmental sample
  misc_feature (1)..(275): Xaa is any amino acid
MNTPLPKMNNKGAANGEYRVRNENGDGLKDILSKAVFDGGTDFSKINLNSIAGKEILFFSDGISTLSDVDFIKNTPAKRPVHCLVSSSKADYSAMRLIAGKTKGKFININALSSAQLRNELLNETPLFLRAAYGKELREVYPSIAVPIHGNFSLSGIAEKDNAEVTLLFGFGNRVEKRIKIKLDAKKADKHGKAHKLWAQKKIAELDLNYDKNRDELTDIGQQFGIVTRNTSLIVLETIDDYIHYKITPPADLREEYLAEYMSEEKDLKRNRKMN

SEQ ID NO: 6143 - DNA, 639 bp, Unknown
  Obtained from environmental sample
  misc_feature (1)..(639): n is a, c, g, or t
atggcgggccttcttaaaccttatgaaggatacgaacttgtaaaggcgataaagaaagttacggatttaccgattgaaatccacacacacgccacaacgggaatgtccgtggcggctcttaccaagtgcgccgaagcgggagcggaaattcttgacactacaatctcatcaatgtcgatgggcacaagccacagcccaacggaaacaatggtagaaatatttaaaggaaccgagtacgacacggggcttgacacaaacctgttactcgaagtcgccgcctatttccgcgaagtgcgcaaaaactacaaaaaattcgagtccagtttccttggtgcggacacccgtattctcgcgagccaggttcccggcggcatgctaagcaaccttgaaagccagcttaaagaacagggcgcttcggataaaatagacgcggtgttaaaagaaatcgccgttgtccagaaggactcgggctatccacctcttgtaacacccacaagccagattgtcggaacacaagccgtgttcaacgtgcttttcggccgttacaacaaactttcaggcgaattccaggatttggttgccgggaaatacggcgcatgcccagctccgaaaaatccgatgttgttaaaaagcgcttga

SEQ ID NO: 6144 - protein, 212 aa, Unknown
  Obtained from environmental sample
  DOMAIN (116)...(212): Conserved carboxylase domain
  misc_feature (1)..(212): Xaa is any amino acid
MAGLLKPYEGYELVKAIKKVTDLPIEIHTHATTGMSVAALTKCAEAGAEILDTTISSMSMGTSHSPTETMVEIFKGTEYDTGLDTNLLLEVAAYFREVRKNYKKFESSFLGADTRILASQVPGGMLSNLESQLKEQGASDKIDAVLKEIAVVQKDSGYPPLVTPTSQIVGTQAVFNVLFGRYNKLSGEFQDLVAGKYGACPAPKNPMLLKSA

SEQ ID NO: 6145 - DNA, 543 bp, Unknown
  Obtained from environmental sample
  misc_feature (1)..(543): n is a, c, g, or t
ttgaggcattggaggaaatgtagaaaattatatattattaaaatggcggaaaaccataccataaaactatatcacggaagcaatcaggcggttgagcagccacagttgctgaaacctacgcatccaatggattttggggctggattttatacaactacaaattatcagcaagcaattgattttgcaaaaaaagttgcaattaggcaaaaaacaggaaagccaacaataacagcttacgaagcacaagaaaatctcctgcgttctaaatacaaaatattggaatttcactcggcagacaaagcttggttggattttgtaaccgcaaataggcaaattcttaatccggaaattgatgcggaaatagttattggagcggttgcaaatgatgatataattgaagttgttaggttttatgaaaatggagtgtacactgttgaagaaactttgaaacggcttaaaataaaaacgctttataatcaatatgtgtttagaacgcaagaggtaattaacgaattgataacaagagaggtaatatatgtctaa

SEQ ID NO: 6146 - protein, 180 aa, Unknown
  Obtained from environmental sample
  misc_feature (1)..(180): Xaa is any amino acid
MRHWRKCRKLYIIKMAENHTIKLYHGSNQAVEQPQLLKPTHPMDFGAGFYTTTNYQQAIDFAKKVAIRQKTGKPTITAYEAQENLLRSKYKILEFHSADKAWLDFVTANRQILNPEIDAEIVIGAVANDDIIEVVRFYENGVYTVEETLKRLKIKTLYNQYVFRTQEVINELITREVIYV

SEQ ID NO: 6147 - DNA, 555 bp, Unknown
  Obtained from environmental sample
  misc_feature (1)..(555): n is a, c, g, or t
atgcaaacctttgagtatgcctgggagctcaagcgcgacagctcgcgtatcctcgcgcggcttgccgactgctacgccgccatgggggatgaaagggattggcaaagaaagtcattattattttttcgggaggcttttttgcataatcctcgggagattgagctcaaacgtcttgcctcgcccctgattcgccagcttatacaggcggccgaaaaggccggatttacaggcgaagaaaccgcgtgctggataccgatctttgccgcctttgaaaactatttcagtatcaaaagagaacttgaggaatatgaagtcataacgctccaggatcaggcctatacgcttgagggagagttgcgaaagaacggaagcaaccggcgtattcttcttccgctgcttctgaatcgctatatatgcctgctcgattatttcctgtctcaggcgaatgacgccgttaaggccgagcttgtgcgcaaacgctttatggaagcggataaggagatctacgaaaaaatttattcctcccataactctccgcaaaaagtgtcaaaataa

SEQ ID NO: 6148 - protein, 184 aa, Unknown
  Obtained from environmental sample
  misc_feature (1)..(184): Xaa is any amino acid
MQTFEYAWELKRDSSRILARLADCYAAMGDERDWQRKSLLFFREAFLHNPREIELKRLASPLIRQLIQAAEKAGFTGEETACWIPIFAAFENYFSIKRELEEYEVITLQDQAYTLEGELRKNGSNRRILLPLLLNRYICLLDYFLSQANDAVKAELVRKRFMEADKEIYEKIYSSHNSPQKVSK

SEQ ID NO: 6149 - DNA, 522 bp, Unknown
  Obtained from environmental sample
  misc_feature (1)..(522): n is a, c, g, or t
atgacgccgttaaggccgagcttgtgcgcaaacgctttatggaagcggataaggagatctacgaaaaaatttattcctcccataactctccgcaaaaagtgtcaaaataaagagaagatattcctgagtgttctgctgaaaggaaggttacatatgcaacaagatgttatcgcanaagtacaggagttacttaacgaagaaaaatggacgcgagctaccattgaaaactatacacgtaaaaatttcatcaccctcgacggtctcatcgagaccgccatcaaggaggatcatgccaaagaacttcgcgatctttgtctggatcacaccaaacactcgcaaaacagcatcatcgcgctctacgtgattggcatcatcaactacgagaataaagcgtttggacaacaattatctcctccaaggcgatcacactttttccgcgacaataaaaaatggtcttatatgggaatttcctcgcctgaccgccatccttggttattaagaaaaaaccccaagggcccctga

SEQ ID NO: 6150 - protein, 173 aa, Unknown
  Obtained from environmental sample
  misc_feature (1)..(173): Xaa is any amino acid
MTPLRPSLCANALWKRIRRSTKKFIPPITLRKKCQNKEKIFLSVLLKGRLHMQQDVIAXVQELLNEEKWTRATIENYTRKNFITLDGLIETAIKEDHAKELRDLCLDHTKHSQNSIIALYVIGIINYENKAFGQQLSPPRRSHFFRDNKKWSYMGISSPDRHPWLLRKNPKGP

SEQ ID NO: 6151 - DNA, 543 bp, Unknown
  Obtained from environmental sample
  misc_feature (1)..(543): n is a, c, g, or t
atgctacaatatccacagaggtgtgaaatgaaaaaacaggttatctttatattgacggcgctgatagctttctgcgcttgttccgcggttgcccagcagcccccaaatcccaccggcgttattaccagccactatgccacgaacgcttttattgccggggccattccaaaagcggatttagatcagattatacgcgccggcgtccgcgccccaagcgcgagaaacagccagccctggcattttaccgtggtacagaacattacccttgcgaaaaaaattgtaccgcaaacaatagatggcaacgcgcttattgtcgtatccgcccctggcgacggaagaaccaacggaccggaaatacttgactgcgcccttgccgtgcagagcgtatatctggcggcccaggcgcttggctacggctcaaggatatataccggacccatgaacgcgcttaacacaaccctcaaggcggagctcgggcttcccgggggccacagcgccgtggccctcgtccgcgtcggcaggttgaaaagctggatgccgtaa

SEQ ID NO: 6152 - protein, 180 aa, Unknown
  Obtained from environmental sample
  SIGNAL (1)...(29)
  DOMAIN (41)...(174): Nitroreductase family
  misc_feature (1)..(180): Xaa is any amino acid
MLQYPQRCEMKKQVIFILTALIAFCACSAVAQQPPNPTGVITSHYATNAFIAGAIPKADLDQIIRAGVRAPSARNSQPWHFTVVQNITLAKKIVPQTIDGNALIVVSAPGDGRTNGPEILDCALAVQSVYLAAQALGYGSRIYTGPMNALNTTLKAELGLPGGHSAVALVRVGRLKSWMP

SEQ ID NO: 6153 - DNA, 948 bp, Unknown
  Obtained from environmental sample
  misc_feature (1)..(948): n is a, c, g, or t
atgtcagattggccgagctccggaagaattatcttagaggtaaaaaaagcaaaactgctgggacgcggaggagcggcatatcccgccggaatcaagtgggagcatttgcttcacatatcggaaactcccaaatacatcgtctgcaatgccgatgaaggcgaaccgggaacttttaaagacaaattcatcatggacaaactgcctctcaggttactggaaggcataattatcgcaggtgctgtttttaacgcaaaggccggttatatttacgtccgcggcgaataccgtaaactgcaaaaacatcttattaaagcaatagagaatcttcacaccgcaggttatcttgacagaaattttgacattcacgtagtgtcgggcgcgggagcttatgtctgcggcgaaaactccgctcttttaaactccaccgaaggcaaggtaggaagaccgcgtatcaaaccgcctcatcttgcggaagtcggacttttcctgcagccgacattggtcaacaatgtggagtcttttgccaacattccgctcatcgtcagcatgggcggagacgcttttttgcaggcgggacatcacgattcaggcgggagcaaacttgtctgtctttccgggcattgccgcaacagaggagtttttgaagttcctctgggcaaagtaactttacgcgacattatttacgatacggaaatgggcggcggaattgcggacggcggtaaattaaagttctttcatttgggcgggcaaagcggcacaatcggcggcatagaacagcttgatacaatttacagttatacagatttaagaaaaacaggtttacatgtcggttccggtgcggttgtagtgatggatgaaagcgtctccattctggaatatttaaaatgcgttacggagttctttattcacgaatcatgcggcaaatgcgttccctgccgcgaggggtaa

SEQ ID NO: 6154 - protein, 315 aa, Unknown
  Obtained from environmental sample
  DOMAIN (2)...(250): Respiratory-chain NADH dehydrogenase 51 Kd subunit
  misc_feature (1)..(315): Xaa is any amino acid
MSDWPSSGRIILEVKKAKLLGRGGAAYPAGIKWEHLLHISETPKYIVCNADEGEPGTFKDKFIMDKLPLRLLEGIIIAGAVFNAKAGYIYVRGEYRKLQKHLIKAIENLHTAGYLDRNFDIHVVSGAGAYVCGENSALLNSTEGKVGRPRIKPPHLAEVGLFLQPTLVNNVESFANIPLIVSMGGDAFLQAGHHDSGGSKLVCLSGHCRNRGVFEVPLGKVTLRDIIYDTEMGGGIADGGKLKFFHLGGQSGTIGGIEQLDTIYSYTDLRKTGLHVGSGAVVVMDESVSILEYLKCVTEFFIHESCGKCVPCREG

SEQ ID NO: 6155 - DNA, 345 bp, Unknown
  Obtained from environmental sample
  misc_feature (1)..(345): n is a, c, g, or t
gtggctgcgctcgtagatggcgccgatgagggtgaagagcgcgccggtgatgatgccgtggttgagcatctgcatgatggccccttccaggccccgcacgctgaagagaaaaatgcccaaggtcacgaagcccatgtgggccaccgaggaataggccaccagcttctttatgtccgattggcccaaggcgatggcgccgccgtaaagtatggccgccagggacagggcgatcatgaagggggcgaaataaaggctggccgccggggtcaggggcaggcagaaccggaggaagccgtaggcccccattttcaggagaacggccgccaggatgacgctgccggctga

SEQ ID NO: 6156 - protein, 114 aa, Unknown
  Obtained from environmental sample
  misc_feature (1)..(114): Xaa is any amino acid
MAALVDGADEGEERAGDDAVVEHLHDGPFQAPHAEEKNAQGHEAHVGHRGIGHQLLYVRLAQGDGAAVKYGRQGQGDHEGGEIKAGRRGQGQAEPEEAVGPHFQENGRQDDAAG

SEQ ID NO: 6157 - DNA, 693 bp, Unknown
  Obtained from environmental sample
  misc_feature (1)..(693): n is a, c, g, or t
atgggggcctacggcttcctccggttctgcctgcccctgaccccggcggccagcctttatttcgcccccttcatgatcgccctgtccctggcggccatactttacggcggcgccatcgccttgggccaatcggacataaagaagctggtggcctattcctcggtggcccacatgggcttcgtgaccttgggcatttttctcttcagcgtgcggggcctggaaggggccatcatgcagatgctcaaccacggcatcatcaccggcgcgctcttcaccctcatcggcgccatctacgagcgcagccacagccgggagataaaccggaacctgggcctgggccgctggctgccggccttcatgttcttctggggcctgatgagcctggcttccttcggttttccgggcaccaacggatttgtgggtgaattcctggtcatagcggccgccttcggcgtgaccacggaaatttgcggcctcaacgtgcccctcttgggccttctgaccgcgcccggggccatgctggccgcggcctacgctttaaaggtcacccttaagttggcctggggccagcccagctcggccaaagacaagggctggccggaccttcgcctgcgggaatgggcctacctcttgctcccggccgtcttcgtcatctacctggggctggctcccggcggggtcttgtccccataa

SEQ ID NO: 6158 - protein, 230 aa, Unknown
  Obtained from environmental sample
  DOMAIN (1)...(168): NADH-Ubiquinone/plastoquinone (complex I), various chains
  misc_feature (1)..(230): Xaa is any amino acid
MGAYGFLRFCLPLTPAASLYFAPFMIALSLAAILYGGAIALGQSDIKKLVAYSSVAHMGFVTLGIFLFSVRGLEGAIMQMLNHGIITGALFTLIGAIYERSHSREINRNLGLGRWLPAFMFFWGLMSLASFGFPGTNGFVGEFLVIAAAFGVTTEICGLNVPLLGLLTAPGAMLAAAYALKVTLKLAWGQPSSAKDKGWPDLRLREWAYLLLPAVFVIYLGLAPGGVLSP

SEQ ID NO: 6159 - DNA, 813 bp, Unknown
  Obtained from environmental sample
  misc_feature (1)..(813): n is a, c, g, or t
atgataaaggggcacccactcccgcaaatttttatgccacacgaagataaagtacatggtatgtcattaaggcaggcaagcgatggcaaagcaattttcaactttcccaaagatgcagacgtaggtcgcggagttgccgccaatattgaccctgcgtatgggttcacgtgctgggctgcgggcatagaacttcatgatgtaacgggcaaacgcataggaggcacgccttattcaacgaatcacgtaatatggtggagcggaaattttaaccgcgaacttttggatggcaatcatgttgataaatggacggtgagcggaggcaggcaaaatgtgctttccgctggcgactacggtcaaataaacggaacaaaatccaaccctattttgcaagcagacttattcggcgattttcgcgaagaggtaatattctccaacggctcaaacgccctgcgaatttacacctcaacaatggcaaccacgaaacgccttgtcactctgatgcacgaccctgtatatagagttgcggttgcatggcagaattcatcctacaaccagccgcctcacccaggctactacatagcaagcgatatggatatcccgccgcccgcactcaaagtggctgttgtaggcggggaagttgttgtaagttcctcttctcttgctccgagttcctcttccattgctccgagttcttcctccgttgcgccaagttcttcttctcgcgcaccgagttcctcctccattgcaccgagttcatcttctcttgcaccgagcagcagtagcagtagttcagccggaacaacccctgtttga

SEQ ID NO: 6160 - protein, 270 aa, Unknown
  Obtained from environmental sample
  misc_feature (1)..(270): Xaa is any amino acid
MIKGHPLPQIFMPHEDKVHGMSLRQASDGKAIFNFPKDADVGRGVAANIDPAYGFTCWAAGIELHDVTGKRIGGTPYSTNHVIWWSGNFNRELLDGNHVDKWTVSGGRQNVLSAGDYGQINGTKSNPILQADLFGDFREEVIFSNGSNALRIYTSTMATTKRLVTLMHDPVYRVAVAWQNSSYNQPPHPGYYIASDMDIPPPALKVAVVGGEVVVSSSSLAPSSSSIAPSSSSVAPSSSSRAPSSSSIAPSSSSLAPSSSSSSSAGTTPV

SEQ ID NO: 6161 - DNA, 633 bp, Unknown
  Obtained from environmental sample
  misc_feature (1)..(633): n is a, c, g, or t
ttgaaaaaggaaattgatgataaaataaatatacttacagatataagggattcgtttgtaaaaaaagatattctggattccgggataaagaatgaaattgaattctacaagttgtttcgtattcttgccgcgcaaacaggaaacttgctgaatgtcaatgaattgtcaaaaacacttcaaataaaacatgaaaccgtggaaaattatttatatgtgctgcaaaaatgttttcatatcgcacttgtaaggccatatagcaaaaacatcagaaacgagttgactaaaatgtcaaaagtgtacctgttggatacagggatgataaatgttttaacgaataattttcagccattggacgaaaaaattaataaaggtaattattgggaaaatatttattacaggcggattgctgaactttatggcatgagtaatattaatttttggagaaccacgtcgggcaatgaagttgattttatcatacacgaaacgggaaagccttcgcacgcggtggagattaagtacagcaatgaaaaaattaacgaatccaagtataaaaaattccgtgaggattatcctgagatagacttgtctttcgcctattatgaacctttttccgaggattttttcagaaagtga

SEQ ID NO: 6162 - protein, 210 aa, Unknown
  Obtained from environmental sample
  misc_feature (1)..(210): Xaa is any amino acid
MKKEIDDKINILTDIRDSFVKKDILDSGIKNEIEFYKLFRILAAQTGNLLNVNELSKTLQIKHETVENYLYVLQKCFHIALVRPYSKNIRNELTKMSKVYLLDTGMINVLTNNFQPLDEKINKGNYWENIYYRRIAELYGMSNINFWRTTSGNEVDFIIHETGKPSHAVEIKYSNEKINESKYKKFREDYPEIDLSFAYYEPFSEDFFRK

SEQ ID NO: 6163 - DNA, 522 bp, Unknown
  Obtained from environmental sample
  misc_feature (1)..(522): n is a, c, g, or t
gtggaagaaaccatttctggggtcaagcacattcacgagagagaactcggaaaattgctcaaaacaatgaaaaaagacgatgttctggtctgttcagaactatcccgtctcggcagaaacctgcttatggttatgggcgttctcaatgaatgtatggaaagaaacattcaagtttggactatcaaagacaattatcgtctaggcaatgacataaattgcaaagtccttgcttttgcgtttggtttatccgcagaaatagaacgaactctcgtttcccaacgaacaaaagaagccctcgcccgcaaacgagcagaaggcgttgtattgggtcgcccaaaaggcagcaaatccaaaataaaaaagctcacaggcagagaagccgaaatgcaagtattgctagataggaaagtttccaaatctgcaatcgcacgtattttaggcgtacataggctgactgtggcgggttttgtgagggggattccttgtacgcaggcgagtggggcaacttttgctacgttatag

SEQ ID NO: 6164 - protein, 173 aa, Unknown
  Obtained from environmental sample
  DOMAIN (1)...(108): Resolvase, N terminal domain
  misc_feature (1)..(173): Xaa is any amino acid
MEETISGVKHIHERELGKLLKTMKKDDVLVCSELSRLGRNLLMVMGVLNECMERNIQVWTIKDNYRLGNDINCKVLAFAFGLSAEIERTLVSQRTKEALARKRAEGVVLGRPKGSKSKIKKLTGREAEMQVLLDRKVSKSAIARILGVHRLTVAGFVRGIPCTQASGATFATL

SEQ ID NO: 6165 - DNA, 726 bp, Unknown
  Obtained from environmental sample
  misc_feature (1)..(726): n is a, c, g, or t
ttgagcggggtttttgagggcaaaacaacgggaacgcctatatccatgatagtggaaaacgcagaccaacacagtgcagattatgaacaaataaaagactggtggcgcccagggcacgcagacgaagtttatgattccaaatatggattcagagattaccgaggcggcgggcgtagttcggctagggaaactatagcgcgggttgctggcggttcaatagctcgcaaatttttgaaggaaaaatgcggaaccgaattcaccgctactataaacatagacaacaattcaatagaaaatgcaaaaaaaaatggagatagcatcggtggcattgttagcttaaccatcaaaaatcctccaaaaaatttgggcgagccggtttttgaccgcacagaggcattgcttgcaatggcgatgttaagcattcccgcaacgcgagggtttgaaattggcaaagggtttgaagcggcaaatatgctcggtagtgagcataataaatttgcagatggcacttatggcggcataaccagtggagaagatattttgtgcagaatagcgttcaagccaaccccatccatttctaaaatgcaaatggcaaaaaataaaaacgggtcatttggcgaaatcagcataaaaggcaggcacgacccctgcgttgcggtacgtgctccagtaattgtggaaagtatggcggcacttgttttaatggatttgtggttgcaattatga

SEQ ID NO: 6166 - protein, 241 aa, Unknown
  Obtained from environmental sample
  DOMAIN (1)...(241): Chorismate synthase
  misc_feature (1)..(241): Xaa is any amino acid
MSGVFEGKTTGTPISMIVENADQHSADYEQIKDWWRPGHADEVYDSKYGFRDYRGGGRSSARETIARVAGGSIARKFLKEKCGTEFTATINIDNNSIENAKKNGDSIGGIVSLTIKNPPKNLGEPVFDRTEALLAMAMLSIPATRGFEIGKGFEAANMLGSEHNKFADGTYGGITSGEDILCRIAFKPTPSISKMQMAKNKNGSFGEISIKGRHDPCVAVRAPVIVESMAALVLMDLWLQL

SEQ ID NO: 6167 - DNA, 354 bp, Unknown
  Obtained from environmental sample
  misc_feature (1)..(354): n is a, c, g, or t
gtgccatctgcaaatttattatgctcactaccgagcatatttgccgcttcaaaccctttgccaatttcaaaccctcgcgttgcgggaatgcttaacatcgccattgcaagcaatgcctctgtgcggtcaaaaaccggctcgcccaaattttttggaggatttttgatggttaagctaacaatgccaccgatgctatctccatttttttttgcattttctattgaattgttgtctatgtttatagtagcggtgaattcggttccgcatttttccttcaaaaatttgcgagctattgaaccgccagcaacccgcgctatagtttccctagccgaactacgcccgccgcctcggtaa

SEQ ID NO: 6168 - protein, 117 aa, Unknown
  Obtained from environmental sample
  SIGNAL (1)...(28)
  misc_feature (1)..(117): Xaa is any amino acid
MPSANLLCSLPSIFAASNPLPISNPRVAGMLNIAIASNASVRSKTGSPKFFGGFLMVKLTMPPMLSPFFFAFSIELLSMFIVAVNSVPHFSFKNLRAIEPPATRAIVSLAELRPPPR

SEQ ID NO: 6169 - DNA, 321 bp, Unknown
  Obtained from environmental sample
  misc_feature (1)..(321): n is a, c, g, or t
ttgggatggctaaaaggcaaggtaacaaaattcgacgcctcaaaggtcagggttccgcagatgggctggaacagggtcagctttacggaaagcccgatcaataacaaaaacgcaaatgaaggctacttttattttgtaaactcttatcacgcaaatcctgaaaataaagaagatttgtggggaacagctgattacaacggccagttcgcggcggctgttcacagggacaatattttcgcaacccagttccacgttgaaaaaagcggcaaggcggggctcgctattcttggcggctttcttggccttggtaaagggggctga

SEQ ID NO: 6170 - protein, 106 aa, Unknown
  Obtained from environmental sample
  misc_feature (1)..(106): Xaa is any amino acid
MGWLKGKVTKFDASKVRVPQMGWNRVSFTESPINNKNANEGYFYFVNSYHANPENKEDLWGTADYNGQFAAAVHRDNIFATQFHVEKSGKAGLAILGGFLGLGKGG

SEQ ID NO: 6171 - DNA, 708 bp, Unknown
  Obtained from environmental sample
  misc_feature (1)..(708): n is a, c, g, or t
gtgctgaccgagcgcgaggtgttcgggcggcgcgcgctgccgcccgcgaggccgcagaaaagccgcgtcagcgcctttctctccgacctgcgcgacctgaagcctggggacagggtggtccaccttgaccacggcatcggggaattcttgggcttcggctcgctcaccgtcgccggggaagagcaggacgtgatacagctgggctacgcagacggcggcaggctcaatgtttcgctggagcgcgccgacctggtccagcgctacgtcaacccagacggggccatgccgcccttggacaaactcggcggcgcgtcctgggccaaggtcaagcgcagggccagaaaggccatacgcgacatggccgaggagctggtcaagctctacgccaagcgcagactggtaaagggcttcgcgttcggcgtggacggccctgagatggccgagttcgaggcgagcttccccttcgagcctacgcgggaccagcttgacgcctatgaggccatcaaggccgacctggagtcgtcgaggccgatggaccgcctggtctgcggcgacgtcgggttcggcaagacggaggtggccatgcgcgcggccgcgaaggtggcgcttgggggcaagcaggtggccgtgctgtgccccaccaccgtgctgtgcttccagcactaccgcaccttcctggaccgcttcgccggattcccctccggatag

SEQ ID NO: 6172 - protein, 235 aa, Unknown
  Obtained from environmental sample
  DOMAIN (32)...(129): CarD-like/TRCF domain
  misc_feature (1)..(235): Xaa is any amino acid
MLTEREVFGRRALPPARPQKSRVSAFLSDLRDLKPGDRVVHLDHGIGEFLGFGSLTVAGEEQDVIQLGYADGGRLNVSLERADLVQRYVNPDGAMPPLDKLGGASWAKVKRRARKAIRDMAEELVKLYAKRRLVKGFAFGVDGPEMAEFEASFPFEPTRDQLDAYEAIKADLESSRPMDRLVCGDVGFGKTEVAMRAAAKVALGGKQVAVLCPTTVLCFQHYRTFLDRFAGFPSG

SEQ ID NO: 6173 - DNA, 759 bp, Unknown
  Obtained from environmental sample
  misc_feature (1)..(759): n is a, c, g, or t
gtgctggaagcacagcacggtggtggggcacagcacggccacctgcttgcccccaagcgccaccttcgcggccgcgcgcatggccacctccgtcttgccgaacccgacgtcgccgcagaccaggcggtccatcggcctcgacgactccaggtcggccttgatggcctcataggcgtcaagctggtcccgcgtaggctcgaaggggaagctcgcctcgaactcggccatctcagggccgtccacgccgaacgcgaagccctttaccagtctgcgcttggcgtagagcttgaccagctcctcggccatgtcgcgtatggcctttctggccctgcgcttgaccttggcccaggacgcgccgccgagtttgtccaagggcggcatggccccgtctgggttgacgtagcgctggaccaggtcggcgcgctccagcgaaacattgagcctgccgccgtctgcgtagcccagctgtatcacgtcctgctcttccccggcgacggtgagcgagccgaagcccaagaattccccgatgccgtggtcaaggtggaccaccctgtccccaggcttcaggtcgcgcaggtcggagagaaaggcgctgacgcggcttttctgcggcctcgcgggcggcagcgcgcgccgcccgaacacctcgcgctcggtcagcacaagcagcttgtggcccttcaggtggactccgccggacaggttcagggtcagtgcgcggcagccagaatccgtcccgccgcaaggggcagcccgtag

SEQ ID NO: 6174 - protein, 252 aa, Unknown
  Obtained from environmental sample
  misc_feature (1)..(252): Xaa is any amino acid
MLEAQHGGGAQHGHLLAPKRHLRGRAHGHLRLAEPDVAADQAVHRPRRLQVGLDGLIGVKLVPRRLEGEARLELGHLRAVHAEREALYQSALGVELDQLLGHVAYGLSGPALDLGPGRAAEFVQGRHGPVWVDVALDQVGALQRNIEPAAVCVAQLYHVLLFPGDGERAEAQEFPDAVVKVDHPVPRLQVAQVGEKGADAAFLRPRGRQRAPPEHLALGQHKQLVALQVDSAGQVQGQCAAARIRPAARGSP

SEQ ID NO: 6175 - DNA, 624 bp, Unknown
  Obtained from environmental sample
  misc_feature (1)..(624): n is a, c, g, or t
atgaacggcttatacaacgccaattccggcaaacacgcattcaaaccgccctcagaagctcattccatcgtcaacgcaaacgcagaacatatcgctcaaatcgcggcaataagcgataaagagcttggtgggggtttcttaaactataatgatattctggataaaatacgcgataaaaactcgcatatctgtaaagtagccttgataaacaaactcgttgcgggattctgtttatctaaaatagtcaatcaatctgaaatttgcgattatctacacattgaccaaacaaatctccccgaatatgtgaaccgcgccgataaaataggcgtgctgaaaacgatagccgtgcataacgattttcaccgccgcggcgtcggacacgcgctcacgcttgccgcctgcaacgacttaatcacgcgcgatatccaagcccttggctccatcgcgtggaaaaacggcgaccggattaacgccgacaaactattatcgaccctaggactccgcccccatatcgagatcaaatcctattgggaagcggacggcataaaagacaattacaactgctcggcctgcggcccgcctccgtgcaaatgctcggcggtgttgtattttaaggcggtttaa

SEQ ID NO: 6176 - protein, 207 aa, Unknown
  Obtained from environmental sample
  misc_feature (1)..(207): Xaa is any amino acid
MNGLYNANSGKHAFKPPSEAHSIVNANAEHIAQIAAISDKELGGGFLNYNDILDKIRDKNSHICKVALINKLVAGFCLSKIVNQSEICDYLHIDQTNLPEYVNRADKIGVLKTIAVHNDFHRRGVGHALTLAACNDLITRDIQALGSIAWKNGDRINADKLLSTLGLRPHIEIKSYWEADGIKDNYNCSACGPPPCKCSAVLYFKAV

SEQ ID NO: 6177 - DNA, 753 bp, Unknown
  Obtained from environmental sample
  misc_feature (1)..(753): n is a, c, g, or t
atgcttcaggaaagaatttcatatagagacattgacaagccgttatttgagggcgacgttctgatatgcgaagacaattttatgaagcaggaagttatccgcgaacatcttacgaacgtcggtttaaaaactgaagttgcggaaaacgggttaatcggcatagagatggttaagaatcgaataaataaaggcgaaaagttatacgatttaatttttatggatatgcacatgcccgtaatggacggtcttgaggcggcggttgaaatcgtaaaaatgggcattaggatacctattgtcgctcttaccgctaacataatggttgatgatttggaaatgtataaaacgcacggtatagtagattgcgtaagtaaaccgttcacatctcaggaattgtggcgttgtttgttaaatcacatgactccggtaaacaaatccgattcacctcatgagtctgaaacggaaattcaggaatcgcttgaaaaatattttgttaaaacgaatataaacaaatacgatgaaatttgcaaatgtatggaagaaggcgatataaagcaagcgcacagattggtatatacgttaaaaggaaacgctggacaagtcgggaaaaatcgtttgcagtccgccgccgccgctgtggaacatcagcttgccgacggtacaaattcggttactcccgatcagatggctgcgcttaaaaacgaattagattccgcgcttgcggaatttcaatcgttaatcgacgagacagcttaa

SEQ ID NO: 6178 - protein, 250 aa, Unknown
  Obtained from environmental sample
  DOMAIN (18)...(136): Response regulator receiver domain
  misc_feature (1)..(250): Xaa is any amino acid
MLQERISYRDIDKPLFEGDVLICEDNFMKQEVIREHLTNVGLKTEVAENGLIGIEMVKNRINKGEKLYDLIFMDMHMPVMDGLEAAVEIVKMGIRIPIVALTANIMVDDLEMYKTHGIVDCVSKPFTSQELWRCLLNHMTPVNKSDSPHESETEIQESLEKYFVKTNINKYDEICKCMEEGDIKQAHRLVYTLKGNAGQVGKNRLQSAAAAVEHQLADGTNSVTPDQMAALKNELDSALAEFQSLIDETA

SEQ ID NO: 6179 - DNA, 528 bp, Unknown
  Obtained from environmental sample
  misc_feature (1)..(528): n is a, c, g, or t
ttgatttacgccggcgctcagaaaaacctgggtcccgccggaactactgttgttattatccgcgaggatttaatcaaaaaaacaccggattgggttcccgttatgctcaggtacgacacccacgctggcgagggctcaatgtacaacactccgccatgctacggcatttacattatcgggctggtgttggaatggttaaaaaacctgggcggcgttgagatagtcggaaaattaaaccgtgaaaaagccaagctcttttatgactatcttgattcgtcggagctgttttattcgccggtacagaaagaataccgcagtttgatgaacattccgtttgtaacaaaagagcaggatgaagccaaaaaaacagaacttgaaacccgttttgtaaaagaagcggcggcggcgggacttataaatcttgccggacacaggcttgtaggcggtatgagggcaagtatttacaacgcaatgccaattgaaggcgtaaaagcgttgataagtttcatggacaaattcaagaaataa

SEQ ID NO: 6180 - protein, 175 aa, Unknown
  Obtained from environmental sample
  misc_feature (1)..(175): Xaa is any amino acid
MIYAGAQKNLGPAGTTVVIIREDLIKKTPDWVPVMLRYDTHAGEGSMYNTPPCYGIYIIGLVLEWLKNLGGVEIVGKLNREKAKLFYDYLDSSELFYSPVQKEYRSLMNIPFVTKEQDEAKKTELETRFVKEAAAAGLINLAGHRLVGGMRASIYNAMPIEGVKALISFMDKFKK

SEQ ID NO: 6181 - DNA, 630 bp, Unknown
  Obtained from environmental sample
  misc_feature (1)..(630): n is a, c, g, or t
atgcttgaagacgaaaatgaatacaccgaggaagaagattttaccactctttttcttccttcagaaaatattcccgactctgttttggaatactaccgtaatttgatttacaaggaatgggtaatagatttttttacagctatatgtaaaaacagggagattgcctggtctattttggacagctccgatgaatttaatattcctcctgcgttggcttntgcgttgtgttgggaagaaagcagatttaatccaaacgctgtaaacagaaaaaacctcgacggaagcgtagatcgcggattatttcagttaaataacaaatctttccctcatttggaaatttcatctttttatacgattacttccaacgtgcgctacggagtcggtcatcttaggtattgcctgaatgtgggcggcagcgagatttccgctcttgccatgtacaacgccggcgcaggaagggtaagatcgataggcgctccggaagttactcttaattatgtaagcaggattatggaaaaccgcagaaaaatagaaagccgttttcataacaaattaattaaagaagaagaaggtagacttaccgaaaaagccgaaaactcatcaagcggattattcaaccgcgtatattaa

SEQ ID NO: 6182 - protein, 209 aa, Unknown
  Obtained from environmental sample
  DOMAIN (56)...(170): Transglycosylase SLT domain
  misc_feature (1)..(209): Xaa is any amino acid
MLEDENEYTEEEDFTTLFLPSENIPDSVLEYYRNLIYKEWVIDFFTAICKNREIAWSILDSSDEFNIPPALAXALCWEESRFNPNAVNRKNLDGSVDRGLFQLNNKSFPHLEISSFYTITSNVRYGVGHLRYCLNVGGSEISALAMYNAGAGRVRSIGAPEVTLNYVSRIMENRRKIESRFHNKLIKEEEGRLTEKAENSSSGLFNRVY

SEQ ID NO: 6183 - DNA, 741 bp, Unknown
  Obtained from environmental sample
  misc_feature (1)..(741): n is a, c, g, or t
atgagcgccaaacagcatgacaacggcctgcgttgttccttctgcggcaagaaagaacatgaagtccagcagcttatcgtgcaggacaacgccagcatctgtgaccagtgcgtcgcggtatgcggcgagatcatctcccgccagaaaatggacaacatccggcacgacggacgtctgctcacacccatagagatcaaggcgcaccttgatgaatacgtcatcggccagcacgaggccaagaaaaacctcgccgtggcggtgcataaccactacaagcgggtcttccatgccgatgccctgggcaatgacgtggagctggaaaaaagcaacattctgctgatcggaccctcgggcagcggcaaaaccctgcttgccaaaaccctcgccaggatgctcaacgtgcccttcgccattgcggacgccaccacgctgaccgaagccggctatgtgggcgaggacgtggaaaacatccttgtgcagctcctccagaacgcggactatgatttggaggccgcctgcaagggcatcatctacattgacgaaatcgacaagatttcccgcaagagcgacggcccttccattacccgcgacgtgtcgggcgaaggcgtacagcaggcgctcctgaagattatcgaaggcacggaagccaacatcccccccaagggcgggcgcaagcatccgcagcaggaattcatccgcatgaacacgagcaacatttgtnatcgggggagctcgcgataa

SEQ ID NO: 6184 - protein, 246 aa, Unknown
  Obtained from environmental sample
  DOMAIN (9)...(48): ClpX C4-type zinc finger
  misc_feature (1)..(246): Xaa is any amino acid
MSAKQHDNGLRCSFCGKKEHEVQQLIVQDNASICDQCVAVCGEIISRQKMDNIRHDGRLLTPIEIKAHLDEYVIGQHEAKKNLAVAVHNHYKRVFHADALGNDVELEKSNILLIGPSGSGKTLLAKTLARMLNVPFAIADATTLTEAGYVGEDVENILVQLLQNADYDLEAACKGIIYIDEIDKISRKSDGPSITRDVSGEGVQQALLKIIEGTEANIPPKGGRKHPQQEFIRMNTSNICXRGSSR

SEQ ID NO: 6185 - DNA, 942 bp, Unknown
  Obtained from environmental sample
  misc_feature (1)..(942): n is a, c, g, or t
gtgggatcagatcggccgaggctgttaacccgaagttacgctaaccggaaccataggcttaaaatcctcgcgtttcncacgcttgtaataccagttcgcgaccccgctgcttattttagagccgcgcttttgaaaagccttgagaactccggcattgtctatgtggaagataacgatgtgtatagaggaaaaactttggatagcgttgtttttgcaggcccacctttgaagagcatactggatgagataaaccaaagaagccaaaatttgcacgcagaggtgttgttgcgcagtttggggaaaaaagaaaggcaaaatggaagtgcggaaggcggaattttaagcgaaaagctatttatgcaaaaagcgggcgttcctccagaagattttaaaattgtggatggtagcgggctttcgccgcagaaccaactaaagccaaattccctcacaaggtttttaacctatatgagaaaacagaaagaaggtgatatatatgtttcttcgcttgcaataccgggcgtttctggctctggaaaacgattggatgtggagtttagagaaaaaataagattcaaaacgggttttatagaaggtgtttacgggcttgctggctatattgccgcagaaaatgataccatagcttttgccttttatttaaacgatgcaaaaagggtgaacgataacgtagcacgcgaccttttagactatatagcggggcgtgtggcaaagcattacaacagcgaagcggctcaattggacgagggaaaaattttatggcaaggcgcanaagccataagcaatatccacgagcgcataaattatttttcggataaatttaaaggcaggccatattatttggggcctatgggcgaagggcgttcaatttaccccagccataaacctagggtgaatttcagcgagatggattgtttacatacttag

SEQ ID NO: 6186 - protein, 313 aa, Unknown
  Obtained from environmental sample
  DOMAIN (1)...(220): D-Ala-D-Ala carboxypeptidase 3 (S13) family
  misc_feature (1)..(313): Xaa is any amino acid
MGSDRPRLLTRSYANRNHRLKILAFXTLVIPVRDPAAYFRAALLKSLENSGIVYVEDNDVYRGKTLDSVVFAGPPLKSILDEINQRSQNLHAEVLLRSLGKKERQNGSAEGGILSEKLFMQKAGVPPEDFKIVDGSGLSPQNQLKPNSLTRFLTYMRKQKEGDIYVSSLAIPGVSGSGKRLDVEFREKIRFKTGFIEGVYGLAGYIAAENDTIAFAFYLNDAKRVNDNVARDLLDYIAGRVAKHYNSEAAQLDEGKILWQGAXAISNIHERINYFSDKFKGRPYYLGPMGEGRSIYPSHKPRVNFSEMDCLHT

SEQ ID NO: 6187 - DNA, 849 bp, Unknown
  Obtained from environmental sample
  misc_feature (1)..(849): n is a, c, g, or t
atggacgggggggtctcagcggcgaggtacatcggcttgacgctgggcgaactcttcgcgctctgcccggacgatctgatcggatccgccgccgacgtcggcaaaaacggcttcccgctcctcttcaagttcatagacgcccacgaaaacctctccatacaagtacacccgaacagcgagcaggcgcgcgcgcgcggttggggcgagcacggcaagaccgaggcctggtacgtggtggacgccgtccccaacgcaacgatagccataggtttcaaccgcaaagcggtaacgcgagaggaggccgccgaagccgccgccgtcggatgcttcgaatcgctcctaaacttcgtccccgccaaacgcggcgacaccttcttcatcccatccggaacagtgcacgccattatgggcggcgtcctaatatacgaagtccaagaggagtccaacacaacgctgcgcctatacgattggaaccgcagatgccccgccggaaacctgagagaactgcacatagcggaagcgctcgacatcatcaacttcaacgaagagaggccgttaaagccggagccgataataatcgacaaaaacgagtctttcgcacatgagacgctatgcgacaatacaaagttttcgttaagcagatatacgttcctcaaatccggcgaagcttatttggaaacgataaacggcttcagggttatatcaataacggccggcctaatggaagtacacgcaaacggccaccgtgtccaactgggcatggggcaaacggtattaataccgtcgggtttagaaaatgtaatgatagagggcgtcgcggaatcagaggccttaattactacaaaatga

SEQ ID NO: 6188 - protein, 282 aa, Unknown
  Obtained from environmental sample
  DOMAIN (1)...(272): Phosphomannose isomerase type I
  misc_feature (1)..(282): Xaa is any amino acid
MDGGVSAARYIGLTLGELFALCPDDLIGSAADVGKNGFPLLFKFIDAHENLSIQVHPNSEQARARGWGEHGKTEAWYVVDAVPNATIAIGFNRKAVTREEAAEAAAVGCFESLLNFVPAKRGDTFFIPSGTVHAIMGGVLIYEVQEESNTTLRLYDWNRRCPAGNLRELHIAEALDIINFNEERPLKPEPIIIDKNESFAHETLCDNTKFSLSRYTFLKSGEAYLETINGFRVISITAGLMEVHANGHRVQLGMGQTVLIPSGLENVMIEGVAESEALITTK

SEQ ID NO: 6189 - DNA, 762 bp, Unknown
  Obtained from environmental sample
  misc_feature (1)..(762): n is a, c, g, or t
atgcagtccgtttccggaccggagatggcgatcgccttggcgcggctgggcggactcgccttcatatactgctcgcagaccatagaggcgcaggccgcgatggtcggcaaggtcaaggcccataaggcgggcttcgtcccctccgactccaacctccgccccgacgccacgcttgccgacgccgtcgccctcagcaagcgtaccgggcactccaccatccccataaccgacaacgggagcggaaacgggctgtttctgggtatactcacggataaggattactgggagttcgacgacgacctatccctgccggtgcgcgattttatgacgaaggccgaaaacgttaagttagcgtacgtgggtatatcgcttcacgaggcgaacaaacggttgcgcgagtacaagaaagagtgtctgccgatattggacagcaaagaacacgggcacctgcactcgcttgtcttcaagatggactacgtcgatcatatcaacaacccgaacgagcttctcgacaagcagaagcgcttcgctgtgggcgcggctataaacacgcacgattacaaggagcgcgtgccggcgctggttgaggccggggcggacgtgttatgcatagacgcctccgacggctactcggagttccagtgcgaggccgccaagtggataagggataaatacggcgattccgtggttataggcggcggcaacatagtccacggcgacgctnttcggtatttggcggataggcgcaacttgacttcgtaa

SEQ ID NO: 6190 - protein, 253 aa, Unknown
  Obtained from environmental sample
  DOMAIN (1)...(252): IMP dehydrogenase / GMP reductase domain
  misc_feature (1)..(253): Xaa is any amino acid
MQSVSGPEMAIALARLGGLAFIYCSQTIEAQAAMVGKVKAHKAGFVPSDSNLRPDATLADAVALSKRTGHSTIPITDNGSGNGLFLGILTDKDYWEFDDDLSLPVRDFMTKAENVKLAYVGISLHEANKRLREYKKECLPILDSKEHGHLHSLVFKMDYVDHINNPNELLDKQKRFAVGAAINTHDYKERVPALVEAGADVLCIDASDGYSEFQCEAAKWIRDKYGDSVVIGGGNIVHGDAXRYLADRRNLTS

SEQ ID NO: 6191 - DNA, 924 bp, Unknown
  Obtained from environmental sample
  misc_feature (1)..(924): n is a, c, g, or t
atggacgaggagtcatattatatggcgcttgtttccactaagggatatttccgccttgacgttgtaaaggataatgccccaaaaacccttatcgcatggactgaaatatcggattttgacggtataaattttaccatgaatataattacctgcggcgcatgtttgatttttcttgtaaacggaaaatggctcgcagaagtcgctgatagtaccgtcgattatggcaagcttggttttgtcttggcatcttatgaatctgttgaagaatcaaatgagtatgtttgcaaggcgatgcttgattatctctccgttgatacgcggataaagtccatagaagaatgttataaaaaatggactgacgattccaatatcaatgccgagtggcgtttaaggcttgccgagacttatgccgtaatggacgaacctgctaaggctctggatcaaattaacagggcgtggaaacgcagggatgaagttattaaaactgtttccaacacgtctgaagtaaggacaaaaagggaactgcttcttgcggcaagaatgtcattccgtattagggaatacaaaacggcggaagaatttattaacatgattcttgatcaatggccggattcagccgaaggaaaattagcgtgcactgaaaaaataaaaatattatatgaactaaataaatttgccgagttaaaagaatttataataaagaatcaggttaatattaataaagatattgattattacacattgtttgcaaaatgtctttgggaacttaaagattacgttgactcagccgaaacgtgngacaaggcttttgaaatgaacgcggaaaacggcatatatgcggctaacgcggctaacgcgcatgaaatggcgggaaataaaaagaagcgctgtcgcgttatgtcagcgcggggaaaattttcctaa

SEQ ID NO: 6192 - protein, 307 aa, Unknown
  Obtained from environmental sample
  misc_feature (1)..(307): Xaa is any amino acid
MDEESYYMALVSTKGYFRLDVVKDNAPKTLIAWTEISDFDGINFTMNIITCGACLIFLVNGKWLAEVADSTVDYGKLGFVLASYESVEESNEYVCKAMLDYLSVDTRIKSIEECYKKWTDDSNINAEWRLRLAETYAVMDEPAKALDQINRAWKRRDEVIKTVSNTSEVRTKRELLLAARMSFRIREYKTAEEFINMILDQWPDSAEGKLACTEKIKILYELNKFAELKEFIIKNQVNINKDIDYYTLFAKCLWELKDYVDSAETXDKAFEMNAENGIYAANAANAHEMAGNKKKRCRVMSARGKFS

SEQ ID NO: 6193 - DNA, 567 bp, Unknown
  Obtained from environmental sample
  misc_feature (1)..(567): n is a, c, g, or t
atggccgagatcactatcggaaacatagcgtttgcatataacaaattaacaaatattactattacagaaggcgttaagtacattggggaaaacgctttttcctataaccaattgtccgaagttactattccaaatagcgttaccactattggaaacagcgcatttgcaaacaataaactaaacaaaattaccattccagatgaagttgtgactattggggcaaatactttttttaataaccaattaactcaggttactatttctgaaaatgttactactattggaaacagcgcgtttgagtacaacaaactaagcgaaattaccatccctgacagcgttaaaactatcggcgctcatacgttctttaacaaccagataaccagtattaccattggaaaagatgtaacgcttagctacttgtcctttggcggcgattttgagaacttctataataaaaatgacaaaaaagcaggaatttatacacgacctgatattgacagtgatgaatggacatggatagaaataggtgatggtgatgatgaaggtaatgaaaaagaagaagaataa

SEQ ID NO: 6194 - protein, 188 aa, Unknown
  Obtained from environmental sample
  misc_feature (1)..(188): Xaa is any amino acid
MAEITIGNIAFAYNKLTNITITEGVKYIGENAFSYNQLSEVTIPNSVTTIGNSAFANNKLNKITIPDEVVTIGANTFFNNQLTQVTISENVTTIGNSAFEYNKLSEITIPDSVKTIGAHTFFNNQITSITIGKDVTLSYLSFGGDFENFYNKNDKKAGIYTRPDIDSDEWTWIEIGDGDDEGNEKEEE

SEQ ID NO: 6195 - DNA, 768 bp, Unknown
  Obtained from environmental sample
  misc_feature (1)..(768): n is a, c, g, or t
ttgataaatgtaataggaaaacttgattccagcatattatataaagttctccaatcactggatcgtgatactatattaacgctggataaacattggagggaatttgatcgattttggcttggtagcccttatcctgaagaatggtacgaaagatttttattgatttttccttgtaatgaatttgatatttccaattctgctttggtacttaatagtaagattggaatgatgataaaaaatataaagaaaacaaataatggttatattgttacagttaaattcgcaattaaggattgggaaatatttaaacatgatgacttaaactgggataatgtaaaagggaaagaattctttgacatgattttatgcatagacggtgaatatatggacgtgtatcttgacgacatggaacataaactaactacgtttgcgctggttgatcaaatatttttgagagaattagaattgttggttgaaaataaaaaagctgatttatccaaagtacgtttcccccgtcgtgctgatggcagcatagacgattttccgctgcctgaattatcaacagattctaatattgagacggatgaaacggaagataaaaatccgcaatccgtcattcttgaggggagagaaacagaaattaatgttaaaaacaacgcaggagcaaattccatgccgccgtgggtgcggattgctgtcgtcggagggtttattgccgcgactggcggcgtggtgttttttattctaatgcgcaaaaaaccaacataa

SEQ ID NO: 6196 - protein, 255 aa, Unknown
  Obtained from environmental sample
  misc_feature (1)..(255): Xaa is any amino acid
MINVIGKLDSSILYKVLQSLDRDTILTLDKHWREFDRFWLGSPYPEEWYERFLLIFPCNEFDISNSALVLNSKIGMMIKNIKKTNNGYIVTVKFAIKDWEIFKHDDLNWDNVKGKEFFDMILCIDGEYMDVYLDDMEHKLTTFALVDQIFLRELELLVENKKADLSKVRFPRRADGSIDDFPLPELSTDSNIETDETEDKNPQSVILEGRETEINVKNNAGANSMPPWVRIAVVGGFIAATGGVVFFILMRKKPT

SEQ ID NO: 6197 - DNA, 360 bp, Unknown
  Obtained from environmental sample
  misc_feature (1)..(360): n is a, c, g, or t
atgttaaggtttaaatttattttgattgtctctatcagtgtactcgtttttggctgttcaacagactataaaaatctaacggcaaaaatgccggatttggcgttaaaaacggacggagtatatcgcgggaattatgatttatcgggcacgccagtagatgtaattcttgacgtaactgttcaaaataatagaattacagaaattaaaatagtaaaacatacctgttctccaattgggaaaaaagccgaaaaaataattgaccaaattatagagattcaaaacttgaatgttgacgctgtcagcggcgctaccggaagcagtaaagcaataataaaagcggtcgaaaacgctttgcaatag

SEQ ID NO: 6198 - protein, 119 aa, Unknown
  Obtained from environmental sample
  SIGNAL (1)...(18)
  DOMAIN (46)...(119): FMN-binding domain
  misc_feature (1)..(119): Xaa is any amino acid
MLRFKFILIVSISVLVFGCSTDYKNLTAKMPDLALKTDGVYRGNYDLSGTPVDVILDVTVQNNRITEIKIVKHTCSPIGKKAEKIIDQIIEIQNLNVDAVSGATGSSKAIIKAVENALQ

SEQ ID NO: 6199 - DNA, 381 bp, Unknown
  Obtained from environmental sample
  misc_feature (1)..(381): n is a, c, g, or t
gtgcttgaaaccgccgggttaattaaggtagatcccaaagcgggttatgtacctgaggtcgcggatatcaccgaaaaccggctgaacattcagttcattcaggtagaagccgcgcagaccgcaggtctgcttccggatgtagccgcagctatcattaatggcagtcacgcaaccgatcacggacttgtcccggcaagggatgctatttaccttgagacccagggtacaggctccgataacccctatgtgaatataatcgcggcgcgtaccgcagaaaaagacaacccggtttacaaaagaatagtagatgcctaccacagcatagaagtaagaaagatcattgaaacggtcttcaacggcgcttatatgccggcttggtaa

SEQ ID NO: 6200 - protein, 126 aa, Unknown
  Obtained from environmental sample
  DOMAIN (1)...(126): NLPA lipoprotein
  misc_feature (1)..(126): Xaa is any amino acid
MLETAGLIKVDPKAGYVPEVADITENRLNIQFIQVEAAQTAGLLPDVAAAIINGSHATDHGLVPARDAIYLETQGTGSDNPYVNIIAARTAEKDNPVYKRIVDAYHSIEVRKIIETVFNGAYMPAW

SEQ ID NO: 6201 - DNA, 906 bp, Unknown
  Obtained from environmental sample
  misc_feature (1)..(906): n is a, c, g, or t
ttgctggaagattcaggatacatggcccgtgtggcgtatgttatggacaagccgttacgcaaaatcggtctttccgggcgcagttttgttccgatgcttatgggttttggctgttctgttcctgcgattatggcgactcggacgcttgcaagcgagcgcgacaaagaaatgaccattctgcttacgccttttatgagttgcagcgcaaaggttcctatatacgccttgtttgccgccgcgttctttccaaaacattcaacgctggtaatgagcagtttgtacttgctgggaattttattcggcgtactttcaggtttcataatggaaaaaaccatttttaagggagaaccaattccctttgtaatggaactgcccaattaccgtttcccttccgccaaaaccgtgttacgactttgttgggataaagcaaaggactttattcaaagggcgtttaccgttatctttttggcgacagttataatatggtttttacaatcttttgatttacgattgaactatgttgaaggcggcgaaggttctctgcttgcgttaatcgggcggttaatcagcgggatatttattcctctgggtttttccgactggcggatttccacagcgctcattaccggttttaccgcgaaagaagccgttataagcacattggcagtattgaccaacgccaacgccacagggcttgtaaacactttgcattcattgttttcttcattaagcgcgttcagcttccttgtgtttacacttttatacactccatgcgtggcggcaattgcgacagtaaaacgcgaatacggcaatataaaaggcttgatttttatcattgtgtatcagactgccattgcgtggtttgccgcattctgcgtgtacaaaataggttctttaattatgtga

SEQ ID NO: 6202 - protein, 301 aa, Unknown
  Obtained from environmental sample
  DOMAIN (89)...(142): Ferrous iron transport protein B C terminus
  misc_feature (1)..(301): Xaa is any amino acid
MLEDSGYMARVAYVMDKPLRKIGLSGRSFVPMLMGFGCSVPAIMATRTLASERDKEMTILLTPFMSCSAKVPIYALFAAAFFPKHSTLVMSSLYLLGILFGVLSGFIMEKTIFKGEPIPFVMELPNYRFPSAKTVLRLCWDKAKDFIQRAFTVIFLATVIIWFLQSFDLRLNYVEGGEGSLLALIGRLISGIFIPLGFSDWRISTALITGFTAKEAVISTLAVLTNANATGLVNTLHSLFSSLSAFSFLVFTLLYTPCVAAIATVKREYGNIKGLIFIIVYQTAIAWFAAFCVYKIGSLIM

SEQ ID NO: 6203 - DNA, 441 bp, Unknown
  Obtained from environmental sample
  misc_feature (1)..(441): n is a, c, g, or t
gtggtgttcaaccgcggtagcacggctagggtcatcaatcttgatgttacggtgcaggagttcgcgctttgccgcatccgcgctgacgggcttatcatcgcctcgcctcaaggctgttccggctatggcgcatccgccggcgggccgcttgtgcatccggacatccaggcgttcagcctggtgccgatttgtccgtattgctgcaacttccctcctctggtgttgccctatccccaggaagtgcgcgtgacgctgccgaatatcaccacggagacatacctgacggtggacgggcagacgggatatcgtctgcagacggacgacagcgtactggtccgcggactccccggcggcatacagtttgccaggcgggacagggccggctacctgcgcaggctgaaagcgcgtggttttttggcggaacgagcggaacatgtgtga

SEQ ID NO: 6204 - protein, 146 aa, Unknown
  Obtained from environmental sample
  misc_feature (1)..(146): Xaa is any amino acid
MVFNRGSTARVINLDVTVQEFALCRIRADGLIIASPQGCSGYGASAGGPLVHPDIQAFSLVPICPYCCNFPPLVLPYPQEVRVTLPNITTETYLTVDGQTGYRLQTDDSVLVRGLPGGIQFARRDRAGYLRRLKARGFLAERAEHV

SEQ ID NO: 6205 - DNA, 684 bp, Unknown
  Obtained from environmental sample
  misc_feature (1)..(684): n is a, c, g, or t
atgctccaacttttcactttgttgctacttgccgttgcccttgtcggttgcgggcaaaagaaagtggttgtgaacaacgaacccacaggcaaaaaacttagttcctcttcccatattgttgcggagaaaagcagcagttcggagaaagcggtggagagcaagcctgaggaagtggaacaatttatagacagccgtgatggcaagaaatataaaatactaaaaataggtactcaagtctggatggccaaaaatttgaattacaatgtcggcggcagcaaatgttacaataaccaacctgctaactgcgacaaatatgggagattgtatgattggggggctgcaaagaaagtttgccccaagggttggcacttgccaaacaatgatgagtgggatgaactgtatcgctttgcagacggcacaagcggtacagacagcccatacataagcaaaacggcaggcaaatatcttaaagcggctagcggtttttctgccttgcttggtggcatgggtcgttatgatgacagattcgacaatgcangccttggcggcttttggtggagtgccgatgagtacgaccatgattcctacgcctacnataggcatctaacaagcacccgaaatgtcgctttctggagctaccacgatnaaggttctttgntcagtgttcgttgttttgaaaactaa

SEQ ID NO: 6206 - protein, 227 aa, Unknown
  Obtained from environmental sample
  SIGNAL (1)...(20)
  misc_feature (1)..(227): Xaa is any amino acid
MLQLFTLLLLAVALVGCGQKKVVVNNEPTGKKLSSSSHIVAEKSSSSEKAVESKPEEVEQFIDSRDGKKYKILKIGTQVWMAKNLNYNVGGSKCYNNQPANCDKYGRLYDWGAAKKVCPKGWHLPNNDEWDELYRFADGTSGTDSPYISKTAGKYLKAASGFSALLGGMGRYDDRFDNAXLGGFWWSADEYDHDSYAYXRHLTSTRNVAFWSYHDXGSLXSVRCFEN

SEQ ID NO: 6207 - DNA, 417 bp, Unknown
  Obtained from environmental sample
  misc_feature (1)..(417): n is a, c, g, or t
atggcaaacgaattagctctaaaataccctattatccttgtacatgggattatcgcccatgatagacatggctttaataaatattggggcagaattcccgaaactttacgggaaacagggacaaaagtgttttttggaaatactgacgcatggggcgattttgaatcaaacgcaaaaatattaaaaacgacgattgataaagtattggaaaaaacaaaaagcgaaaaggtaaatatactcgcccattccaagggcggactggattcccgttattttatcaggaagtatgattacggcgcaaaagtagccagtttaactacaatatcaactcctcataatggcgctgaattatctgatattctttacaagaaaaaaatttttcatacgcggatagccaagaaaattttaataatttag

SEQ ID NO: 6208 - protein, 138 aa, Unknown
  Obtained from environmental sample
  misc_feature (1)..(138): Xaa is any amino acid
MANELALKYPIILVHGIIAHDRHGFNKYWGRIPETLRETGTKVFFGNTDAWGDFESNAKILKTTIDKVLEKTKSEKVNILAHSKGGLDSRYFIRKYDYGAKVASLTTISTPHNGAELSDILYKKKIFHTRIAKKILII

SEQ ID NO: 6209 - DNA, 468 bp, Unknown
  Obtained from environmental sample
  misc_feature (1)..(468): n is a, c, g, or t
gtgaatcgtgaagctaaaattaaggaattaatttcccaaatgacgctggaggaaaaagtttcccagttgttttacaaaagccccgcgattgacagacttgggatacccgaatataactggtggaacgaatgtttgcacggcgtagcaagagccggtattgcgactgtttttccgcaggctatcgctttggccgcaacttttgacaacgatcttgtctatcggatagcggacgctatttctgatgaagcgcgcgccaagtataacgaagccgtcaaacagggaaaccgaggccagtattgnggacttactttctggacacctaatatcaatatttttcgcgatccgcgctgggggcggggacaggaaacttacggcgaagatcccntatctacnnagcaatcggtcttgcgctggtacggggtttgcaggggaatgatcctgaaaactttgaacttgccgctgcgctaa

SEQ ID NO: 6210 - protein, 155 aa, Unknown
  Obtained from environmental sample
  DOMAIN (27)...(153): Glycosyl hydrolase family 3 N terminal domain
  misc_feature (1)..(155): Xaa is any amino acid
MNREAKIKELISQMTLEEKVSQLFYKSPAIDRLGIPEYNWWNECLHGVARAGIATVFPQAIALAATFDNDLVYRIADAISDEARAKYNEAVKQGNRGQYXGLTFWTPNINIFRDPRWGRGQETYGEDPXSTXQSVLRWYGVCRGMILKTLNLPLR

SEQ ID NO: 6211 - DNA, 936 bp, Unknown
  Obtained from environmental sample
  misc_feature (1)..(936): n is a, c, g, or t
atggcccgcggcacgaggaatgccgcggaactcctccttgcgctcgcggaaaaaatcagcgctgcctctgttcctaattccccttctattcctcattctccatcggactggcgcaacctagttattgaaacgcgcatcattcacgccatgctgcgcggcattgacgattatatcgaggcggacgcgctcgaattgttaaaagccggaaaaacggccattgagatcatcgaaggccccctgatggacggcatgaaagaagtggggaaacgctttgacgaaggaaccatttaccttccccatgtcatacgcagcgcgagggtgatgaagaaagccgccgcagcgcttgagccctacatgggcaaggcaacagccgccgcgactccatgtaaaataattctcgcgaccgtaaagggtgatgtccatgacattggcaaaaatatcgtcggcattgtccttgcctgcaacgggtatcaggttatagaccttggggtgatggttcccgccgatcagatactcgacgccgcggaaaaagaacaggcggacatgatcggcctttcggggctgatcgccccctcgctggacgagatggcgcacatcgcgagagagatggaaaagcggcgcatgaagattcccctgcttgtcgggggggccgcagcaagccttgtccacaccagcctgcgcctcgcgccggaatattcaggcccggtggtttatgtgcctaacgcgggaaaatccgccgaaacggtacgcgccctgctttccgatttacagcgtccgcgtttcctgagggaactggaaaaaagttaccagaacgcagcctggcggcatgaggaactcaagacccgcgtagagatcatttcccttgaaaacgcccgcgccaacagagtcccccccgcggcatacaaactcgccgctccnaaaaagccggcattatag

SEQ ID NO: 6212 - protein, 311 aa, Unknown
  Obtained from environmental sample
  DOMAIN (129)...(253): B12 binding domain
  misc_feature (1)..(311): Xaa is any amino acid
MARGTRNAAELLLALAEKISAASVPNSPSIPHSPSDWRNLVIETRIIHAMLRGIDDYIEADALELLKAGKTAIEIIEGPLMDGMKEVGKRFDEGTIYLPHVIRSARVMKKAAAALEPYMGKATAAATPCKIILATVKGDVHDIGKNIVGIVLACNGYQVIDLGVMVPADQILDAAEKEQADMIGLSGLIAPSLDEMAHIAREMEKRRMKIPLLVGGAAASLVHTSLRLAPEYSGPVVYVPNAGKSAETVRALLSDLQRPRFLRELEKSYQNAAWRHEELKTRVEIISLENARANRVPPAAYKLAAPKKPAL

SEQ ID NO: 6213 - DNA, 753 bp, Unknown
  Obtained from environmental sample
  misc_feature (1)..(753): n is a, c, g, or t
atggcaaaacaaaaaaactggccttttattacccaccttagcgaaggttttgacgacgaagccatgcacagcattgaaaggctggaaaaattaaatgtacttgacgatcattgcctgtttgtccactgtatcgcttttagcgatgaagatataaaaaagaccgcaaaagccggggcaagcgtttcctggtgcggtttttccaatatgttcatgtttaatgtgactgcaaaaatacgaaaaatgatcaaagcgggagttaacattacaatcggaacagattcatcggcttcaggttccgcaaacattcttgaggaaattaaatacgacaggaaattgtatcaacaactttacggtgaagatcttcccgcaaaaaaactcttcgagatggttacaattaacgcggcaaaagcatttagaatgcaggacagggttggcgctcttgaagaaggtttgttaggtgacattattgtcataaaggcgaaaaatagcgatccgtatgaaaactttgtaaacgccggcatgaaagacatagaatttcttgcacttgcgggaaaaccgatatacggcgaaatgcgttttatggatatttttaacgggaaactgccttcagattatacgcaaataaaagttggaaacagggagatgtttgtaaaaggcgaccctgccgggctttacaacgaagtaagaaataaaattggttttaaaaaaattctggattatctgccgtttgagccggcacaggaaggagcgtaa

SEQ ID NO: 6214 - protein, 250 aa, Unknown
  Obtained from environmental sample
  misc_feature (1)..(250): Xaa is any amino acid
MAKQKNWPFITHLSEGFDDEAMHSIERLEKLNVLDDHCLFVHCIAFSDEDIKKTAKAGASVSWCGFSNMFMFNVTAKIRKMIKAGVNITIGTDSSASGSANILEEIKYDRKLYQQLYGEDLPAKKLFEMVTINAAKAFRMQDRVGALEEGLLGDIIVIKAKNSDPYENFVNAGMKDIEFLALAGKPIYGEMRFMDIFNGKLPSDYTQIKVGNREMFVKGDPAGLYNEVRNKIGFKKILDYLPFEPAQEGA

SEQ ID NO: 6215 - DNA, 570 bp, Unknown
  Obtained from environmental sample
  misc_feature (1)..(570): n is a, c, g, or t
atggccgatactttttatttattccatcggggcagggtacaacttgttaaacttgtcggggatattgaacggacattggatattttacagccttccgagatgtttggtgaaatggcaattttggaaaactccccacgttcggcgacggccattgcgattgatgaagtaaaagttctggaatttaatgcgcaaaattttgaaatactactccttggaaatcctcagattgccttgaaacttttaaaaatgttctgcaaacgcatatacgattccaaacgccgctttatgatccttacactgtcggagccgcaggtaaaaatagcggatgtatttcttatgcttgatgaaactcagcctgatattgataaaaccagcgaacgtcgtgagtttaaaaccacagttgaaggagtagcccactgggcgggaatgagcgtcaacgaagcgagagatatacttggacattttgtaaaccagcggcgcgtagaaattttcccagatcgtataacagtaaaaaacatcaacgacttttcccgctttgtcagttccagacgcaactcacgcggcgcctaa

SEQ ID NO: 6216 - protein, 189 aa, Unknown
  Obtained from environmental sample
  DOMAIN (1)...(75): Cyclic nucleotide-binding domain
  misc_feature (1)..(189): Xaa is any amino acid
MADTFYLFHRGRVQLVKLVGDIERTLDILQPSEMFGEMAILENSPRSATAIAIDEVKVLEFNAQNFEILLLGNPQIALKLLKMFCKRIYDSKRRFMILTLSEPQVKIADVFLMLDETQPDIDKTSERREFKTTVEGVAHWAGMSVNEARDILGHFVNQRRVEIFPDRITVKNINDFSRFVSSRRNSRGA

SEQ ID NO: 6217 - DNA, 873 bp, Unknown
  Obtained from environmental sample
  misc_feature (1)..(873): n is a, c, g, or t
ttgtttaccaatgtaacgggtaattacgaccgttccggcgacggagttcttgattccagctatatctaccggatgaacggacagaacacactggaagcccaggcgcagccgggcctgcaggggatgattaccctgtccgggccgaatggcaatgtgcaggttccgtattacgctaccgacaccgttgctgatattattgcccgaattaaccattccggcgcggaagtggtcgcccgcctgaaccgcgacggcagactctccctgaaaggaaccccgtcggaagcggtaaacggcgtgtatgagaaccccgattttgttattcgtcatattgaagataacggacatttcctcaccggctatgccggtcttttgggtcaggacggcgtttacgattggggaaccgccgacgcggttgccgccctgcgggacgggacagattacgccgtcgcccccatcgcccatccctcaggctgggtcagagtgaatcccgccgtgatacgggatcccttgtccgtcgcttccggtttcggcgaaaacggcagagcggcgaacccgggtaacggcgacgcggcgcaggcaatcgcttcaatcaggaacagcccggttatggtgggcagcctttccacttttgacgactactttgccgattcggtgggacgtatcggtctgttgggagagcaggccaacagggctttggaaactgaaaatgtaatcatgaaacagcttaccgatatgaggcggtcaatttccggcgtgagcattgatgaagaactggcaaatatgctgcgttaccagcacggctacaatgccgcagcgcgtttcatcaccacggtcaattccatgctggatactttaatgcggatgggcgtctaa

SEQ ID NO: 6218 - protein, 290 aa, Unknown
  Obtained from environmental sample
  DOMAIN (42)...(92): Flagellin hook IN motif
  misc_feature (1)..(290): Xaa is any amino acid
MFTNVTGNYDRSGDGVLDSSYIYRMNGQNTLEAQAQPGLQGMITLSGPNGNVQVPYYATDTVADIIARINHSGAEVVARLNRDGRLSLKGTPSEAVNGVYENPDFVIRHIEDNGHFLTGYAGLLGQDGVYDWGTADAVAALRDGTDYAVAPIAHPSGWVRVNPAVIRDPLSVASGFGENGRAANPGNGDAAQAIASIRNSPVMVGSLSTFDDYFADSVGRIGLLGEQANRALETENVIMKQLTDMRRSISGVSIDEELANMLRYQHGYNAAARFITTVNSMLDTLMRMGV

SEQ ID NO: 6219 - DNA, 438 bp, Unknown
  Obtained from environmental sample
  misc_feature (1)..(438): n is a, c, g, or t
atggagaccccaatgcccatctacgccaaagccattcccctgatactcgccggcgtgctgctgaacgcgtttgcgcagatagcaatgaagaaggccgtgggggccgccggcatggaatggcagtttttcgccctgctccgcctctttctccacccctggatgctggtctgccttggctgctacgccgtcagcgtcgtggtctggaccggcgccatcaaacttgtgccgactaacttcgccttccccttcatggcccttgccttcgtcttcgtcgcgctgatggccaagatgatccttggcgagaccatccccccgatgcgctggctggcccttgctgtgattgtagtgggcgtgtgcctccaagcattttcaggcggggcgaaccacagccttgaagcaaaagaagtccaagggacaacaaagagcgacccgctctag

SEQ ID NO: 6220 - protein, 145 aa, Unknown
  Obtained from environmental sample
  SIGNAL (1)...(25)
  misc_feature (1)..(145): Xaa is any amino acid
METPMPIYAKAIPLILAGVLLNAFAQIAMKKAVGAAGMEWQFFALLRLFLHPWMLVCLGCYAVSVVVWTGAIKLVPTNFAFPFMALAFVFVALMAKMILGETIPPMRWLALAVIVVGVCLQAFSGGANHSLEAKEVQGTTKSDPL

SEQ ID NO: 6221 - DNA, 438 bp, Unknown
  Obtained from environmental sample
  misc_feature (1)..(438): n is a, c, g, or t
atgaaattcaaattttctttagcatctgttttaaaccaccgtgaggttttggagaggaacgcagaaatagcccttggcaaggaaattcaaaaattggtgaaattgcagcaggagagggatgatttaattgaagagtataaaaatctggtagctgcaagaggcggcataaatacaaacaacgccgaaaattttatgggttttataaactacgctcaaagactaaaagacttaacggctcaaaaaaacgcagagataaaaaaacaagaagctgaggtggaaaaagcacgttctgagctaatcaaaaaaactcaagagaaaaaagccttggaagttctgcaagactcgcaaaaaaacgcattcaaactggcagaaaaacgaatggaggcaaaacaaacagacgaagccgccacgcaaaaatttttaagggagagggcctag

SEQ ID NO: 6222 - protein, 145 aa, Unknown
  Obtained from environmental sample
  misc_feature (1)..(145): Xaa is any amino acid
MKFKFSLASVLNHREVLERNAEIALGKEIQKLVKLQQERDDLIEEYKNLVAARGGINTNNAENFMGFINYAQRLKDLTAQKNAEIKKQEAEVEKARSELIKKTQEKKALEVLQDSQKNAFKLAEKRMEAKQTDEAATQKFLRERA

SEQ ID NO: 6223 - DNA, 330 bp, Unknown
  Obtained from environmental sample
  misc_feature (1)..(330): n is a, c, g, or t
gtggtgaattacagcacatctggcgatgagaaaaatgggattatactttatatgactgttaccgtgtgctacgatgttccttggcgcaaagccgcggagcttatagtagaggctgcccgtaaatcggaatatgttttggacaatcctgcgccttttgttctggtgaaaaatttggggaactatgcctgcgagatggaactcaacatttacacaaacgaaccggaaaaacagcccagcattttctctgagttgaacaaaaacataagagatatatttgaacaaaacggcatcaatatgacagtgcctttgctgctaggccctctcccttaa

SEQ ID NO: 6224 - protein, 109 aa, Unknown
  Obtained from environmental sample
  misc_feature (1)..(109): Xaa is any amino acid
MVNYSTSGDEKNGIILYMTVTVCYDVPWRKAAELIVEAARKSEYVLDNPAPFVLVKNLGNYACEMELNIYTNEPEKQPSIFSELNKNIRDIFEQNGINMTVPLLLGPLP

SEQ ID NO: 6225 - DNA, 450 bp, Unknown
  Obtained from environmental sample
  misc_feature (1)..(450): n is a, c, g, or t
ttgacggaggtctttatgcggttgcgcaattggatagggatgggacggacgctgacggttgcggcggttgcggggttgctggcggttgggtgcggggacggggggaatccgggcagagacggagggaatccgggcggagacggtggaggcgtgactgtgcctatagggaagtggatgaagacgaatctgaacgtaccgacagatgagggttcttggtgttatggtgacgatcccgctaactgtgagaggtacgggaggctgtatacgtgggaggctgcgaagagcgcgtgtcagtctgtggggaagaggttgcctacccgcgcggagtgggacgcgttggtgacggcggctggcgaaccttctacggcgggtaagaaactgaaatcgacgggcggttggagtgacaatggtaatgggacggatgatttcggattttaccaaatatgctaa

SEQ ID NO: 6226 - protein, 149 aa, Unknown
  Obtained from environmental sample
  misc_feature (1)..(149): Xaa is any amino acid
MTEVFMRLRNWIGMGRTLTVAAVAGLLAVGCGDGGNPGRDGGNPGGDGGGVTVPIGKWMKTNLNVPTDEGSWCYGDDPANCERYGRLYTWEAAKSACQSVGKRLPTRAEWDALVTAAGEPSTAGKKLKSTGGWSDNGNGTDDFGFYQIC

SEQ ID NO: 6227 - DNA, 648 bp, Unknown
  Obtained from environmental sample
  misc_feature (1)..(648): n is a, c, g, or t
atgaaaaacatagaaattttgtatgaagatgacaatattatggttattaataaacctgcggggcttgccgttcagggtggagaaggggtaaaaacctcgctggacgcgattctagccgagcttcgcacgcccgcgcccctgttggttcacagactggacaaagatacttcgggggtactacttaccgcaaaagggcgcgaaaatgcggctcgtttttcacgcctgcttaacagcgcaaaaatcaaaaaacagtacatcgcaatttgcgccggtctcccaaaaaatgaaaaaggcacaataaccgacaagctgttaatccacggcaatttaaaaagctcggaaaccagatataaagttttaaaaacttccgtttttacggaggaaaatcttgagtactccgctctggaactggaacttggcacgggaagaatgcatcaaatccgccgccaccttgccatgatagggaacccgattctaggcgacgacaaatacggcgatttcaccctcaacaaaaaattacgcaagagcgccggcttaaaacgcctgctccttcacgcctctaggttgattattaaagatgaactgaatgttgatattcgcgctccgttaccggaatatttcttttgtttttataaaaacccactttag

SEQ ID NO: 6228 - protein, 215 aa, Unknown
  Obtained from environmental sample
  DOMAIN (12)...(153): RNA pseudouridylate synthase
  misc_feature (1)..(215): Xaa is any amino acid
MKNIEILYEDDNIMVINKPAGLAVQGGEGVKTSLDAILAELRTPAPLLVHRLDKDTSGVLLTAKGRENAARFSRLLNSAKIKKQYIAICAGLPKNEKGTITDKLLIHGNLKSSETRYKVLKTSVFTEENLEYSALELELGTGRMHQIRRHLAMIGNPILGDDKYGDFTLNKKLRKSAGLKRLLLHASRLIIKDELNVDIRAPLPEYFFCFYKNPL

SEQ ID NO: 6229 - DNA, 936 bp, Unknown
  Obtained from environmental sample
  misc_feature (1)..(936): n is a, c, g, or t
ttgaacttgagagacagcggtttagatgtatcgtttgcactcaggcagtccgccatagatgagaaaagagctagttatgcaaatacaactgaaaacggattcaaggttggagtatataaagatttaattcccacagcggacttggtttgcaaccttacgccggacaagcaacattccaaagttgtggcagaaattatgcctttgatgaaaaaaggttctgccctcctttacagccacggtttcaacattgtggaagaggggatgcaaataagagaagacatcaccgttataatggttgcgccaaagggacccggttctgaggttcgcgcggagtatgtgcgcggttttggaatgcccgctctgattgctgttaaaagggaaaacgacccagaaggcaaaggtttagattatgcaaaggcttacgccgttgggcttggtagcgaccgtgctggtgttttggaaagctcattcgttgccgaggtgaaaagcgatttgatgggcgagcaaaccattctgtgcggaatgctccaaacaggcactctgctctgctttgaccgcatggttcaattaggtgtggaaccagcttatgcatccaaacttttgcagtatggttgggaaacggtgtctgaggctcttaaacaaggtggcataaccaatatgatggacaggctttcaaatccggctaagataagggcttttgagctttccgaagaattgaaaactgtaatgaaacctctttaccaaaaacaccaagatgatattatctccggcgaattctcttctaatatgatgaaagattgggcagacggcgacaaaaaattgctggcatggcgcgatgcgactggcaaaaccgcttttgagaaaactaccgctaccatcactcaaatcacggaacaggaatatttcgataggggtgttttgatagttgcaatgtaa

SEQ ID NO: 6230 - protein, 311 aa, Unknown
  Obtained from environmental sample
  DOMAIN (157)...(311): Acetohydroxy acid isomeroreductase, catalytic domain
  misc_feature (1)..(311): Xaa is any amino acid
MNLRDSGLDVSFALRQSAIDEKRASYANTTENGFKVGVYKDLIPTADLVCNLTPDKQHSKVVAEIMPLMKKGSALLYSHGFNIVEEGMQIREDITVIMVAPKGPGSEVRAEYVRGFGMPALIAVKRENDPEGKGLDYAKAYAVGLGSDRAGVLESSFVAEVKSDLMGEQTILCGMLQTGTLLCFDRMVQLGVEPAYASKLLQYGWETVSEALKQGGITNMMDRLSNPAKIRAFELSEELKTVMKPLYQKHQDDIISGEFSSNMMKDWADGDKKLLAWRDATGKTAFEKTTATITQITEQEYFDRGVLIVAM

SEQ ID NO: 6231 - DNA, 669 bp, Unknown
  Obtained from environmental sample
  misc_feature (1)..(669): n is a, c, g, or t
gtgactagcgaaaaaattctggaagtgctgaagatgttgcccgtagcgacggcggaaacggcgtacatgacttttgtgtcaacatttttcgcctgcctcctaggttttccgttaggcgcatatttgtacatcgcgtctccttccggccttgccccccgccccgttttatacaacgtgctttcccgcgtcgtgaaccttttccgctcgcttccctttatcatactgatgatcctgcttatcccgctgacgcgaataatcattaaaaccagcataggcccaacggcggtaatcatccctctttcaatagccgccgcgccctttgtggcgcgtgtcgccgaatccgccctttccgaggttgaccaaggcgtgcttaccgcggctagggcgatgggttcgaccaacttccagatcgtccgcaaggtattgatccccgaagccctgcccgcgcttgtttccggcctcgcgctgaccatcatcaatcttattggctattccgctatggccggggcaatcggcggcaggggccttggcgaccttgccatacgctacggctattaccgcttcagaatggacgtaacaatcggcgcggtaattgtcataatgataatggtggaagcggtgcagatgacaggcacggcggtcagcagaagccttttggcgaaacggtaa

SEQ ID NO: 6232 - protein, 222 aa, Unknown
  Obtained from environmental sample
  DOMAIN (17)...(220): Binding-protein-dependent transport system inner membrane component
  misc_feature (1)..(222): Xaa is any amino acid
MTSEKILEVLKMLPVATAETAYMTFVSTFFACLLGFPLGAYLYIASPSGLAPRPVLYNVLSRVVNLFRSLPFIILMILLIPLTRIIIKTSIGPTAVIIPLSIAAAPFVARVAESALSEVDQGVLTAARAMGSTNFQIVRKVLIPEALPALVSGLALTIINLIGYSAMAGAIGGRGLGDLAIRYGYYRFRMDVTIGAVIVIMIMVEAVQMTGTAVSRSLLAKR

SEQ ID NO: 6233 - DNA, 405 bp, Unknown
  Obtained from environmental sample
  misc_feature (1)..(405): n is a, c, g, or t
atgcttagtttatcaaaagacatggaaaccggcgttgataaaattgattcagaacacagggagcttatcggcagaattaacaaacttatagaaataggagaaagttccgcttcacatgaagaaatcgaaaaaaccattaattatcttggtgaatatgttgttaaacatttcagcgatgaagaagaactccagaccaaaagcaaatatccgggatacgaggaacacaaaaagatacataccctttttgtagatgattttggtaaattaaaaaatgagtttgaagaaaaaggaaattccatggaatttacaatgaagcttaataacgtgttggttacatggattgtaaaacacatcanaggcgaagacgtgacgttcggcaaatattataaatcgcaaggtttgtaa

SEQ ID NO: 6234 - protein, 134 aa, Unknown
  Obtained from environmental sample
  DOMAIN (71)...(128): Hemerythrin HHE cation binding domain
  misc_feature (1)..(134): Xaa is any amino acid
MLSLSKDMETGVDKIDSEHRELIGRINKLIEIGESSASHEEIEKTINYLGEYVVKHFSDEEELQTKSKYPGYEEHKKIHTLFVDDFGKLKNEFEEKGNSMEFTMKLNNVLVTWIVKHIXGEDVTFGKYYKSQGL

SEQ ID NO: 6235 - DNA, 765 bp, Unknown
  Obtained from environmental sample
  misc_feature (1)..(765): n is a, c, g, or t
ttgatggccgagtttctcgacgnttattttcgcgccgctggtaacatattaaccaaaaatatcgcggtaaattatacgtttctgattttagccggaggtttcgctgcggcagtattgctgttgtttagttttatcaaaacgccggagcaggttccaaacaccgcagcgcctgttttaaaaggcaagcagtacacaaccctggaaatgctcaagacctcgcgcttttatttaatctcactgtcattgatgtttggtacttcggtatttttcatcatcaaccccgaccttaaggatttagcgaacgccagagggctggaatcttttgcaacgatgatagtaatgttcacaggcatcgcaaacgcgctgggcaggcttggcgcgccgcttatgtccgataaaatagggcgcgaaatggcggatgtgatcattcttggcgcaaccgcgctgggcgcgttcggactttgtttcgccgacggaattctgctgattgtgatcattgcggtagtcgcgttctgttacggcggctattcgggactgtatccagttcttacttcgggaaatttcggcattaaaaatatcggttctaattacggcgcggtcatggtgggttttatgctctcggcgctgttattcccaattgtgatcaaaaaaatcgaagggcagcagttaaaattcatcacactcggcgtgctggcgattgtcggcgtgatattggttgttattttaagattgatgaatttaaaacaggcaaaagaagaaagttga

SEQ ID NO: 6236 - protein, 254 aa, Unknown
  Obtained from environmental sample
  misc_feature (1)..(254): Xaa is any amino acid
MMAEFLDXYFRAAGNILTKNIAVNYTFLILAGGFAAAVLLLFSFIKTPEQVPNTAAPVLKGKQYTTLEMLKTSRFYLISLSLMFGTSVFFIINPDLKDLANARGLESFATMIVMFTGIANALGRLGAPLMSDKIGREMADVIILGATALGAFGLCFADGILLIVIIAVVAFCYGGYSGLYPVLTSGNFGIKNIGSNYGAVMVGFMLSALLFPIVIKKIEGQQLKFITLGVLAIVGVILVVILRLMNLKQAKEES

SEQ ID NO: 6237 - DNA, 375 bp, Unknown
  Obtained from environmental sample
  misc_feature (1)..(375): n is a, c, g, or t
atgaatgttatagattcaactttatggattgaatactttgcagacacagaagctggaaacaaagtcgcagaaataatagaaaataccaatgagctaatagttccaacaattacaatatatgaagtatttaagaaactgttacttgaaacgaatgaagatgacgctctttttgccattgcacatatgagacaaggaaaagtaattgagttaagcgaagaattatcattatcagccgcaagaataagcaaggataataaaatgccaatggctgatagcattatttatgccacaaacattaaatataattgcattttatggacgcaggataaacattttacaaacctaagatctgttaattattttgagaaacattag

SEQ ID NO: 6238 - protein, 124 aa, Unknown
  Obtained from environmental sample
  DOMAIN (2)...(120): PIN domain
  misc_feature (1)..(124): Xaa is any amino acid
MNVIDSTLWIEYFADTEAGNKVAEIIENTNELIVPTITIYEVFKKLLLETNEDDALFAIAHMRQGKVIELSEELSLSAARISKDNKMPMADSIIYATNIKYNCILWTQDKHFTNLRSVNYFEKH

SEQ ID NO: 6239 - DNA, 912 bp, Unknown
  Obtained from environmental sample
  misc_feature (1)..(912): n is a, c, g, or t
atggcaaaaagcggagtcacattaagcctgttatgggcggaatactgcgagcaatgccgggaaagcggggaaataccttacaagacaacccagttttacaactactacagcgagtatgtccagaaaacaaaagccaccatgcatatcagccataaaccaggtgaaatcatggaggttgactgggcggggcagactgcgtgcatacgcaataccgacaccggggaacccataaaaacgtatatctttgtagcggtactgccgtattcaggatatacttacgttgaagcgttcctttcccaagaccagcagtcatggatacaggcccacgttaacgcctacggatatttcggaggcgtaacacggatccttgtccctgacaatctgaagacagggattaccaagcatacccgccatgaaaccgtggtaaacaaggcgtatcaggaaatggcggagcattaccggactgccgtactgccggcccgtgtccgctccattgtcaacaacttaaggattccggcttttccctcattttcaacaattcgatttatgattatgatgaaacttggctttacgattgcagtctttgcggactacttcacggtttggacgtatcggtactacccgccgttccatgcagcgcaccaattcgctcatcagataacgccgcactatccagtcttcttcgataattacacgtattatccgatccttgaatactcctatcgcatgatttatatttacctgatactcatagaggtttccgttcccctcccgtttcttctgtgcgttccggtttgcctcccgcacgcaactggccgccatattcgccaccgtcatcatcgcgtaaaaatcctgcttttacgtgtctaccagcctgccggaaaagttttctgtttccagtttttgctttag

SEQ ID NO: 6240 - protein, 303 aa, Unknown
  Obtained from environmental sample
  DOMAIN (49)...(214): Integrase core domain
  misc_feature (1)..(303): Xaa is any amino acid
MAKSGVTLSLLWAEYCEQCRESGEIPYKTTQFYNYYSEYVQKTKATMHISHKPGEIMEVDWAGQTACIRNTDTGEPIKTYIFVAVLPYSGYTYVEAFLSQDQQSWIQAHVNAYGYFGGVTRILVPDNLKTGITKHTRHETVVNKAYQEMAEHYRTAVLPARVRSIVNNLRIPAFPSFSTIRFMIMMKLGFTIAVFADYFTVWTYRYYPPFHAAHQFAHQITPHYPVFFDNYTYYPILEYSYRMIYIYLILIEVSVPLPFLLCVPVCLPHATGRHIRHRHHRVKILLLRVYQPAGKVFCFQFLL

SEQ ID NO: 6241 - DNA, 477 bp, Unknown
  Obtained from environmental sample
  misc_feature (1)..(477): n is a, c, g, or t
atgggcgctaaaatatttataaaaaacattaacaatgacgcgatacgccgaggattaagctctgtgaagatacccgcgcgttttgaaaaaatcgccgacaagccgcccctcatcattgacggcgctcatacgccgggaagcgcctcgctctgcgctgacaccttctgctcgctgtacggcgagggcggcatactgctgttcggctgcgccgccgacaaggacgccgccacaatggcaaagctgctgctgccccgtttctcgcaaataattatcaccatgccggggacattcagactcagcgacccggaaaaagtttacagcgcgttctcttcagataagacaacgcttgtaaaagacaccgcggaagcgttacggcgaactctggaactcagccgggaaaaagatttgcctgttctttgtacgggatcgttttatctggcgtcaatgattaagcagataatatataacagaaaataa

SEQ ID NO: 6242 - protein, 158 aa, Unknown
  Obtained from environmental sample
  DOMAIN (24)...(105): Mur ligase family, glutamate ligase domain
  misc_feature (1)..(158): Xaa is any amino acid
MGAKIFIKNINNDAIRRGLSSVKIPARFEKIADKPPLIIDGAHTPGSASLCADTFCSLYGEGGILLFGCAADKDAATMAKLLLPRFSQIIITMPGTFRLSDPEKVYSAFSSDKTTLVKDTAEALRRTLELSREKDLPVLCTGSFYLASMIKQIIYNRK

SEQ ID NO: 6243 - DNA, 309 bp, Unknown
  Obtained from environmental sample
  misc_feature (1)..(309): n is a, c, g, or t
atgtcatcagctaagaagcgtcggatatacaccaaagaattcaagcaagacgcattgaatttatcagagcagcccggctatacagcagttcttgcggccaaaaacctcggcattcccgagggattactatataaatggcgaagtgcggctgcgaaatccggtcctctagccttccctggaaacggcaaagaagcactcacagatgcagaaagagagaatagggagctgcggaagcgccttagggatgttgagatggagagggacatcttaaaaaaagcagtgggcattttctcaaaagtaccgcaatga

SEQ ID NO: 6244 - protein, 102 aa, Unknown
  Obtained from environmental sample
  DOMAIN (7)...(90): Transposase
  misc_feature (1)..(102): Xaa is any amino acid
MSSAKKRRIYTKEFKQDALNLSEQPGYTAVLAAKNLGIPEGLLYKWRSAAAKSGPLAFPGNGKEALTDAERENRELRKRLRDVEMERDILKKAVGIFSKVPQ

SEQ ID NO: 6245 - DNA, 642 bp, Unknown
  Obtained from environmental sample
  misc_feature (1)..(642): n is a, c, g, or t
atgtcaaccacacgtgacaagatagacgccgtcctcacccgcttcggcgagaacggctaccacgctccgccggagatggtcgaacgcgtcgaacattacctgaaactctacatgggttcaatgcacggcaccgtcgcgctctggatggaacgcggccaacgctactttccgatgattcgcgcaactttctccgagaaaaacgtccctatcgaactcgcctacgtctctatgctggagagcggattcaacacgctggcggtctctcacgccggcgcggcgggaatgtggcagttcatgccgcaaaccgcccgccgttacgggttacgcgttgacggcggagtagacgagcgcaacgaccctgaaaaagccaccaaagcggcagccgcctacttcaaagacctgatcgcgatattcggctcgcgcagctccgtactgctgtgcatggccgcctacaacgccggcgaacagcgggtgataaacgccttaaaacgcatagacgaccctgtacacgacagagatttctggcacctataccgcatgggttggctggccaaagagacaaacgaatacataccgcaagtcatagcgttgattataatctcagataatatggacgagtacgggtttaaggagtctgtatga

SEQ ID NO: 6246 - protein, 213 aa, Unknown
  Obtained from environmental sample
  DOMAIN (57)...(174): Transglycosylase SLT domain
  misc_feature (1)..(213): Xaa is any amino acid
MSTTRDKIDAVLTRFGENGYHAPPEMVERVEHYLKLYMGSMHGTVALWMERGQRYFPMIRATFSEKNVPIELAYVSMLESGFNTLAVSHAGAAGMWQFMPQTARRYGLRVDGGVDERNDPEKATKAAAAYFKDLIAIFGSRSSVLLCMAAYNAGEQRVINALKRIDDPVHDRDFWHLYRMGWLAKETNEYIPQVIALIIISDNMDEYGFKESV

SEQ ID NO: 6247 - DNA, 903 bp, Unknown
  Obtained from environmental sample
  misc_feature (1)..(903): n is a, c, g, or t
ttggctttttggcttggaatgatgaaaataggggaaaaagcaggtgcggttcagatgcttgcaagattggtttctcctttgatgaaacggctttttccaagcattcctgaaaatcaccctgcaatgggtagcatacttatgaacataagcgcaaatatgcttgggctagacaatgccgccacacctcttggattgaaagccatgaaagagcttcaggaattaaatcccaaaaaagacacagcaagtgatgcacaggttttgtttttggttttgaatgcaagcggattaaccttgattcctgttagcataatgacttatagagcaaagctcggtgcggcaaatcccgcagacatttttttgccgattttatttgcaacattttttagcacagtgattggtattttggttacagccttttttcaaaaaattgaaataaaaaatgtggtatttttatcttggtttattggtctctctgcggcggtgtttggaactctttggtatttttccacgctttcggcagaggaaatgggaattgccagcgcatttttgggtggcattattttgtttgccataataatgttctttttaactttggcggcaataaaaaaagttatgccttttgatgcttttgttgaaggagcaaaagagggtttttccaccgccgttatggttataccatatttaatagcgattttagcggcagttgcagcgttcagggcaagcggtgcaatggattttattatgagcgggatagtagcgggttttaatttttgcggcattcccgcagatattgtgccaagccttccaactgcgattatgaagcctctttcgggtagcggcgcacgtggaatgatggtggatgctatgcagcaatatggtgcagatagtttcgcaggtcgttga

SEQ ID NO: 6248 - protein, 300 aa, Unknown
  Obtained from environmental sample
  DOMAIN (1)...(114): Nucleoside recognition
  misc_feature (1)..(300): Xaa is any amino acid
MAFWLGMMKIGEKAGAVQMLARLVSPLMKRLFPSIPENHPAMGSILMNISANMLGLDNAATPLGLKAMKELQELNPKKDTASDAQVLFLVLNASGLTLIPVSIMTYRAKLGAANPADIFLPILFATFFSTVIGILVTAFFQKIEIKNVVFLSWFIGLSAAVFGTLWYFSTLSAEEMGIASAFLGGIILFAIIMFFLTLAAIKKVMPFDAFVEGAKEGFSTAVMVIPYLIAILAAVAAFRASGAMDFIMSGIVAGFNFCGIPADIVPSLPTAIMKPLSGSGARGMMVDAMQQYGADSFAGR

SEQ ID NO: 6249 - DNA, 978 bp, Unknown
  Obtained from environmental sample
  misc_feature (1)..(978): n is a, c, g, or t
atggaatacattgagaaaacattaagccaagtgctccgcgataaaactcaggcgaatccgaatcatgattttctggtttacgcggatcgcaatcttcgttttacatacagcgaatttaacaaacgcgttgacgagctggcaaagggcttcctcgccatggggttgaaaaaaggcgaccatgtagggatgtgggcgaccaatgtaccggactggaatacggttctgttcgcctgcgcccgtattgggctggtctttgtcacggtaaacacaggttataaactccacgagcttgactatgtgctggagcagtcggacatggtatgcctctgcgttattgacggctggcgggattcggattacgtctcaatggtcaacgagctgatcccggaactcaagacatcgcagcgcgggcatttacagtccgctaaattccccttccttaaacacgttgtatatgttgggcaggaaaagcaccggggcatgtacagtttcaacgaggttcttttattgggacaacatactgatgacactgaaatgaagaaaatcgaagcgtcgcttgatcgcaacgatgttgtaaatatgcaatataccagcggtactacgggctttcccaagggtgtcatgcttacccacaggaacatactcaacaatgggctggggatcggcgacaaccagcgccttacggaaaaagacattgtatgcctgcccgtgccgcttttccattgcttcggccttgtgctgggaatgatggctattctgacccacggctctaccgcggcaatcgtcgagtggttcgaccccttgctggtgctggctacaattcaaaaaagaaaatgcaccgccgtgtaccgagttccaaccatgttcatcgcagaactcaaccaccccatgttcaagatgtttgatcttttcagccctccgtaccggcatcatggcgggcctctccctgccccatcgaaaccatgcgccaggttatag

SEQ ID NO: 6250 - protein, 325 aa, Unknown
  Obtained from environmental sample
  DOMAIN (35)...(323): AMP-binding enzyme
  misc_feature (1)..(325): Xaa is any amino acid
MEYIEKTLSQVLRDKTQANPNHDFLVYADRNLRFTYSEFNKRVDELAKGFLAMGLKKGDHVGMWATNVPDWNTVLFACARIGLVFVTVNTGYKLHELDYVLEQSDMVCLCVIDGWRDSDYVSMVNELIPELKTSQRGHLQSAKFPFLKHVVYVGQEKHRGMYSFNEVLLLGQHTDDTEMKKIEASLDRNDVVNMQYTSGTTGFPKGVMLTHRNILNNGLGIGDNQRLTEKDIVCLPVPLFHCFGLVLGMMAILTHGSTAAIVEWFDPLLVLATIQKRKCTAVYRVPTMFIAELNHPMFKMFDLFSPPYRHHGGPLPAPSKPCARL

SEQ ID NO: 6251 - DNA, 876 bp, Unknown
  Obtained from environmental sample
  misc_feature (1)..(876): n is a, c, g, or t
gtgtctcagcccacagcaacccagacaaagattacctcgaaagcatgggacggtactagtgtataccatggaacaattgatatcggaagcggcggaatacttgaaatctctggcggcacggtagaaaacaccttaatcgaaaacacccgtgtaccgggcgctggcttttgcgcggtgtatgtgtacggcggcacagtaaacatatccggtggcacggtttcaataccaacaacgggaacgggaataggagtcgccacgacggtgagagccgacaatggcagtacagtaaacattaccggcggtacggtttcgtcggcatcgggtattgcggtcttcgactttgctacctccggcacaggcaacacaataaacatatccggcggcacggtttcgtcggtatcgggtactgcggtgtctagccgcagcacaataaacatatccggcggcacggtttcgtcggtatcgggtattgcggtgtcaggcggcagcacagtaactatcaccggcggcacggtttcgtcgacaacgaatagagcgttaaacatcaacaatctcaattccatcaccactatatctcagccaacagcaatccagacaaggattacatcggcaaacacagatgccacattaggtacgattttttttataagcggagcaagcggaaccgttctgatagaaggcggcataatagaaaacacatcggagactactggcaacgctatacgcaacaattccgccgccaatgtaattatttccggcggcacgatttcaaaagccggaaccggcaattatgccgtttataacggttctaccggaacagtaactatttctagctccgccaatattgtggggtataattacagagtaacgccataa

SEQ ID NO: 6252 - protein, 291 aa, Unknown
  Obtained from environmental sample
  misc_feature (1)..(291): Xaa is any amino acid
MSQPTATQTKITSKAWDGTSVYHGTIDIGSGGILEISGGTVENTLIENTRVPGAGFCAVYVYGGTVNISGGTVSIPTTGTGIGVATTVRADNGSTVNITGGTVSSASGIAVFDFATSGTGNTINISGGTVSSVSGTAVSSRSTINISGGTVSSVSGIAVSGGSTVTITGGTVSSTTNRALNINNLNSITTISQPTAIQTRITSANTDATLGTIFFISGASGTVLIEGGIIENTSETTGNAIRNNSAANVIISGGTISKAGTGNYAVYNGSTGTVTISSSANIVGYNYRVTP

SEQ ID NO: 6253 - DNA, 564 bp, Unknown
  Obtained from environmental sample
  misc_feature (1)..(564): n is a, c, g, or t
gtggtgatggaattgagattgttgatgtttaacgctctattcgttgtcgacgaaaccgtgccgccggtgatagttactgtgctgccgcctgacaccgcaatacccgataccgacgaaaccgtgccgccggatatgtttattgtgctgcggctagacaccgcagtacccgataccgacgaaaccgtgccgccggatatgtttattgtgttgcctgtgccggaggtagcaaagtcgaagaccgcaatacccgatgccgacgaaaccgtaccgccggtaatgtttactgtactgccattgtcggctctcaccgtcgtggcgactcctattcccgttcccgttgttggtattgaaaccgtgccaccggatatgtttactgtgccgccgtacacatacaccgcgcaaaagccagcgcccggtacacgggtgttttcgattaaggtgttttctaccgtgccgccagagatttcaagtattccgccgcttccgatatcaattgttccatggtatacactagtaccgtcccatgctttcgaggtaatctttgtctgggttgctgtgggctga

SEQ ID NO: 6254 - protein, 187 aa, Unknown
  Obtained from environmental sample
  misc_feature (1)..(187): Xaa is any amino acid
MVMELRLLMFNALFVVDETVPPVIVTVLPPDTAIPDTDETVPPDMFIVLRLDTAVPDTDETVPPDMFIVLPVPEVAKSKTAIPDADETVPPVMFTVLPLSALTVVATPIPVPVVGIETVPPDMFTVPPYTYTAQKPAPGTRVFSIKVFSTVPPEISSIPPLPISIVPWYTLVPSHAFEVIFVWVAVG

SEQ ID NO: 6255 - DNA, 807 bp, Unknown
  Obtained from environmental sample
  misc_feature (1)..(807): n is a, c, g, or t
ttgataaagatgggatttatttattttgaaataaaagccacggagtcacatcctgaaaatattttacaagtacttaggtatgcacaattatatggaaatatggatattgaagatatagatagattctataaaaggtttaaccatactaataatagtattaaagacacttttcaagagaaatttggtaaagaattagatgataaaaattgcaataaacatcaggcatttgttgttattacaaacggtatagaagttaagacacgagaggcgattaaatattggcgatcatgtaatttagacataagaccttggatttatagagtatttggcgaggataaacaattaatgcatttagaaattgtgccatttagagtaagtcttgataatccttatgaagatatatcagaaggttattatatattgaatacaaattttaagaatgatgaaattgaccataatgatatgttaaaatgcaagaaatgcgcagcttattttgatccatggaaatataatattaaaaaaataaataaaagcgatgttatatttttatatcaatcaagtgttggaatagttgcatttggtgaagcggatgataaattgctcatgcgtgattatcataatgacccaaaatttgaaaatgaagaatattataagaatttaaataatttttatatacttaaaaaaccattagcagcatgggaaataaaaaatattacaggtataaatcatagatttatgtcaactatgtttgctattgataatgaaaatgggaaaaaaataaaaaacgaattaatgaacagattgtaa

SEQ ID NO: 6256 - protein, 268 aa, Unknown
  Obtained from environmental sample
  misc_feature (1)..(268): Xaa is any amino acid
MIKMGFIYFEIKATESHPENILQVLRYAQLYGNMDIEDIDRFYKRFNHTNNSIKDTFQEKFGKELDDKNCNKHQAFVVITNGIEVKTREAIKYWRSCNLDIRPWIYRVFGEDKQLMHLEIVPFRVSLDNPYEDISEGYYILNTNFKNDEIDHNDMLKCKKCAAYFDPWKYNIKKINKSDVIFLYQSSVGIVAFGEADDKLLMRDYHNDPKFENEEYYKNLNNFYILKKPLAAWEIKNITGINHRFMSTMFAIDNENGKKIKNELMNRL

SEQ ID NO: 6257 - DNA, 339 bp, Unknown
  Obtained from environmental sample
  misc_feature (1)..(339): n is a, c, g, or t
gtgcacgctatgagaattgacagatataaactcggcgaaccagatgaaaagggtaggccgcgtcccgtgaagatagagggagattcttttgaattgcccgtcgacacagttttggtagccataggcaatggctctaatccattgattagccaagggacaccggaattgaaagtgaataaaaggggcaatgttgaacttttaaatgcagagacaaacgccacatatatggagcgtgtttttgcaggcggagacattgtgcttggggcggcaacggtaatccttgctatgggcgaggggcgcagagcggcaacgggaattaacgagttgctcagaaaatga

SEQ ID NO: 6258 - protein, 112 aa, Unknown
  Obtained from environmental sample
  misc_feature (1)..(112): Xaa is any amino acid
MHAMRIDRYKLGEPDEKGRPRPVKIEGDSFELPVDTVLVAIGNGSNPLISQGTPELKVNKRGNVELLNAETNATYMERVFAGGDIVLGAATVILAMGEGRRAATGINELLRK

SEQ ID NO: 6259 - DNA, 657 bp, Unknown
  Obtained from environmental sample
  misc_feature (1)..(657): n is a, c, g, or t
atgaaatcttattttccagctcttgattcactcaggttttttgcctctgtaaatatagttttgttgcatttttcatcgtcgagtttgctctcttatgctaaaggaacattttttgaaccaataataactgggcctcttttcaacactagcgtgttttttttgctgagcggatttatacactcaattttattcagcgagcaagaaaaagtgccacgattaaaaccttttttgaaaaagcgtttttggcggctttacccactgcacatagtctgcactttgctcattttcttcataacactttacagaacacatcacttggacaacgccgaatacgcgataaaaacccttgccttgcacgtgtctctgctctgggcttttgtccccgaactcggtcactttttgaatctgccttcttgggcattgtctgtgtttttcctatgctatgctctcactccaactgttgcaaaatttctgaataggcaagataggaaaactctttgggtattgtttataggtttatgggtaatttcagcttggngtgtcataaattctaatgaactgcctagagccttcagtggcgtgaattttttttctgggaatgtgctaggaaaagtattgttttacaatgcaattccactgccaaaaaaagcatattaa

SEQ ID NO: 6260 - protein, 218 aa, Unknown
  Obtained from environmental sample
  misc_feature (1)..(218): Xaa is any amino acid
MKSYFPALDSLRFFASVNIVLLHFSSSSLLSYAKGTFFEPIITGPLFNTSVFFLLSGFIHSILFSEQEKVPRLKPFLKKRFWRLYPLHIVCTLLIFFITLYRTHHLDNAEYAIKTLALHVSLLWAFVPELGHFLNLPSWALSVFFLCYALTPTVAKFLNRQDRKTLWVLFIGLWVISAWXVINSNELPRAFSGVNFFSGNVLGKVLFYNAIPLPKKAY

SEQ ID NO: 6261 - DNA, 528 bp, Unknown
  Obtained from environmental sample
  misc_feature (1)..(528): n is a, c, g, or t
atgattgtgaccataaaagacctttggaaaatttaccccatgggaaatcttgaagttcaagccttaaaaggcataaaccttgaaattcaggaaggggattttgtctctgtcgcaggaccttccggttccggaaaaactacattaatgaacattatcgggttaatcgacagtttcagccggggaagcctttcgataaacaatctggagataaaaaatcaaaacagaagagaacttgcccgtcttcggcgcgagcttttaggttttatcttccagtcgtttaatcttttgcctgtgttaaatgtttttgaaaacgtggagcttccgttaattatatccggtaagggcgggacaaaagcgcagcggcgggaaagagtggattatttattaaatgaagtggggcttgcagaaagaaagcgtcatatccccgctgaactgtcanngcggcagcagcaaagagtcgcaatcgcgcgcgcgcttgttacaaccccccgcatagtcatcgctgatgagcctaccgctaatnnctga

SEQ ID NO: 6262 - protein, 175 aa, Unknown
  Obtained from environmental sample
  DOMAIN (32)...(175): ABC transporter
  misc_feature (1)..(175): Xaa is any amino acid
MIVTIKDLWKIYPMGNLEVQALKGINLEIQEGDFVSVAGPSGSGKTTLMNIIGLIDSFSRGSLSINNLEIKNQNRRELARLRRELLGFIFQSFNLLPVLNVFENVELPLIISGKGGTKAQRRERVDYLLNEVGLAERKRHIPAELSXRQQQRVAIARALVTTPRIVIADEPTANX

SEQ ID NO: 6263 - DNA, 993 bp, Unknown
  Obtained from environmental sample
  misc_feature (1)..(993): n is a, c, g, or t
atgatacaaatggaccacgctaaaagaattgatnccaaaaagcgggcagtacncgcgtcccggaacgaatttattattactttccggcggggaggtggttttagatttcgggaagtcccgcttgtagggattttttcctataaaaatccgggacaatttatgaacgagattataattacagacccgcagaccgtccgtgttattaattcaatacaggtagcgacttctcaggatgtaaagttgggcgaagacgccttttctctttttgatacaaatattgatgatatatttaatgatgttttttcgtttgatgatatcgcaatacaagatgaattttccgccgataaattaaagtcttttctgacagaaagcaaaacggaagaaaccgcggacttgacaggcggagactggaattttatcattattaaacttgaaaacagtaaaaactcgcgcgcctttatttcctcaataaataaaaaaatagaaccttatggcgttacagcggtagattggcgcgttgcggccggaatttccgctattttactgctgataattcaggctttatttaatatgggtatatttcttgtttgcgtcgttggtattataacaataataaatattttattaatcggagttttccgccggacccgtgagatcggcacattgcgggcaataggcgcaagtgatttatacatcgcttcacttgtacttctggaaaatcttacgcttactgtttttgccggttctgtgggtattctgggcggagctttgttcgtaaaatggataaactcgctttatgtggcaattccaaatgaactaatatcttctttgcttggcgggaatattttaaaccttggattcattccgtttattgcggttttgtcttttattttggctgttgttttgggggttgcggtttctgtttacccggttcatgttactgtcagggtagaacctatggaagcggtaggcaggctattctcggccatctga

SEQ ID NO: 6264 - protein, 330 aa, Unknown
  Obtained from environmental sample
  DOMAIN (137)...(319): Predicted permease
  misc_feature (1)..(330): Xaa is any amino acid
MIQMDHAKRIDXKKRAVXASRNEFIITFRRGGGFRFREVPLVGIFSYKNPGQFMNEIIITDPQTVRVINSIQVATSQDVKLGEDAFSLFDTNIDDIFNDVFSFDDIAIQDEFSADKLKSFLTESKTEETADLTGGDWNFIIIKLENSKNSRAFISSINKKIEPYGVTAVDWRVAAGISAILLLIIQALFNMGIFLVCVVGIITIINILLIGVFRRTREIGTLRAIGASDLYIASLVLLENLTLTVFAGSVGILGGALFVKWINSLYVAIPNELISSLLGGNILNLGFIPFIAVLSFILAVVLGVAVSVYPVHVTVRVEPMEAVGRLFSAI

SEQ ID NO: 6265 - DNA, 837 bp, Unknown
  Obtained from environmental sample
  misc_feature (1)..(837): n is a, c, g, or t
gtgaaaaacggtctttccgcgggcagggtgcaatcggtagcgttacgcctnatctgcgaaagggaaaaagaagttgaaagttttattcccgaagaatattggacgctggaagctgattttaaattaggcagaacatcatacgccgcccagcttgttttgtggaataacaataaaccggagcttaaaaacgaaaccgaagttaagagtatcatagaaaaaattaaaaacagcgagtgcgtagtttccgatgtccgcgaaacggataaaacaatccgtcccaaagcgccgtttaccacctcgcaattacagcagacggcggcaaacaggcttggttacacatcgcgtaagacaatgcaggtggcgcagcagctttacgaaggcgtaagcataggagccagccgcgtcggtcttattacttacatgcgtacagacagcgtccgtatttcaaataccgcgctggaagacgtgcgcgcgtggcttggaaaaaatttccccggcgagctgcctgaaaaacccgttgaatacacggtgggcaaaaaggctcaggacgcgcatgaagcgataagacccacatacacggaatatactcccgattcggtaaaagaatcgcttacaaaagatcaacttcgcctttatacgattatctgggaaagatttgtttccagccagatgaataacgcaaaaagcagaaccgtcagcgtcgatataaaagttacggaaggacaggacgaggggttgttccgagtcagcgggacaaaactccttgaaaaaggattttataaagcaattaaacttctttcctcaaaagatgaaagcggaaacacctgcccttcgtaa

SEQ ID NO: 6266 - protein, 278 aa, Unknown
  Obtained from environmental sample
  DOMAIN (1)...(275): DNA topoisomerase
  misc_feature (1)..(278): Xaa is any amino acid
MKNGLSAGRVQSVALRLICEREKEVESFIPEEYWTLEADFKLGRTSYAAQLVLWNNNKPELKNETEVKSIIEKIKNSECVVSDVRETDKTIRPKAPFTTSQLQQTAANRLGYTSRKTMQVAQQLYEGVSIGASRVGLITYMRTDSVRISNTALEDVRAWLGKNFPGELPEKPVEYTVGKKAQDAHEAIRPTYTEYTPDSVKESLTKDQLRLYTIIWERFVSSQMNNAKSRTVSVDIKVTEGQDEGLFRVSGTKLLEKGFYKAIKLLSSKDESGNTCPS

SEQ ID NO: 6267 - DNA, 789 bp, Unknown
  Obtained from environmental sample
  misc_feature (1)..(789): n is a, c, g, or t
atgcctttaacgaatgacaaagaacaaagaacaaaaaaaacaatctcacgctatttgcaaatattgtttgtagctattgctttcgggctgatggttttcgcaagctattggtttgtaagcgaccttgagcgcaaacatttgcagaataacgtaaaaaacgcgatttcgcaaacggaagccaatattatcgcggatttaaaagagcctgagactatccttgcgggtttttccgaaaccgtccgcggttttattttacgcggagataacgaaagaagggttcgtgaatacatatattttattaacaattatatgcaggataacgaaaaaaaccggcttttgggcgttttgggtttttacggttattttgatgttttcggaaaaaaatattttgtcgaatcttcggactggattcccccggcggattatgatctggaaagccgcccctggtatatcgcggcggttgaggctaacggcgatataggagtaaccgcgccgtacagaaatttaagactgggagacgttgccgttattacattttcccgccgtatttttgataatgaaggcaaagcgcttgggattatttgtctggatattaaaatggacagggtcagccagcacgctattaatacgcagtttgccgaaaacgggtacggctttctgttaagcgccagcagggatataatcgctcacccggaaccttccgtgataggaaagaatttccgcaatgtaagaagcacaatcgcgtcttatgaagaagaattagtgaaaaaggctatgttaatgaagtaa

SEQ ID NO: 6268 - protein, 262 aa, Unknown
  Obtained from environmental sample
  DOMAIN (162)...(243): Cache domain
  misc_feature (1)..(262): Xaa is any amino acid
MPLTNDKEQRTKKTISRYLQILFVAIAFGLMVFASYWFVSDLERKHLQNNVKNAISQTEANIIADLKEPETILAGFSETVRGFILRGDNERRVREYIYFINNYMQDNEKNRLLGVLGFYGYFDVFGKKYFVESSDWIPPADYDLESRPWYIAAVEANGDIGVTAPYRNLRLGDVAVITFSRRIFDNEGKALGIICLDIKMDRVSQHAINTQFAENGYGFLLSASRDIIAHPEPSVIGKNFRNVRSTIASYEEELVKKAMLMK

SEQ ID NO: 6269 - DNA, 903 bp, Unknown
  Obtained from environmental sample
  misc_feature (1)..(903): n is a, c, g, or t
atgtcgccgccgccgcaggaaatgcagttttggtcgccgggtcctttcgttgcgcagttttactctggaaccacaccggaggacgtagcctggcgatggatattttatccccaaaccggtcttggcgcgggaacccacacccagaccattaccgtgtttgcgaaggccgataacgagaacgccgccgccatcaccccggtgtcatttaccctgagctttacggtcagcgcggccactgttaatttagccgccgtgccgggcgtaaccgccccgcaaaccggggcgaccgcggtaacgacggtcgggactaacagccagtactctggaacggtaagctggtctcccgctctcagcgacggcaaatttgccagcgggaccgcgtacacggcgtacattaccctgacggagacaagcaactactcgctgaccggcgtgaatgcgaacttctttaccgtcgcgggcgcgacatcggtaactaacgccgccaactccggcacgattaccgccgtattcccggcgaccacggcctacggcatcagtctttcaaagagcggcacattcgcgttcccaggcgcagtcgtgaactacagcacccctccctcggcggagacgataaccgttaccaacacgggcaacacggcgacaggcaatcttaacattacgctgtccgggacaaacgcgagcagtttcacgctgtcaaaatcgacaatcaacagtttaacggcgaacggatccgccgataccttcacagtcgtacctaaaacaggcctcgccgccggcacttacacggcaattgtaaccgtgtcggaaggtaacaatattaccgccaactttacggtcagctttaccgtcggccaggcaagctacggcatgacatctcgcagacagcagcctcggcgataa

SEQ ID NO: 6270 - protein, 300 aa, Unknown
  Obtained from environmental sample
  misc_feature (1)..(300): Xaa is any amino acid
MSPPPQEMQFWSPGPFVAQFYSGTTPEDVAWRWIFYPQTGLGAGTHTQTITVFAKADNENAAAITPVSFTLSFTVSAATVNLAAVPGVTAPQTGATAVTTVGTNSQYSGTVSWSPALSDGKFASGTAYTAYITLTETSNYSLTGVNANFFTVAGATSVTNAANSGTITAVFPATTAYGISLSKSGTFAFPGAVVNYSTPPSAETITVTNTGNTATGNLNITLSGTNASSFTLSKSTINSLTANGSADTFTVVPKTGLAAGTYTAIVTVSEGNNITANFTVSFTVGQASYGMTSRRQQPRR

SEQ ID NO: 6271 - DNA, 738 bp, Unknown
  Obtained from environmental sample
  misc_feature (1)..(738): n is a, c, g, or t
atgacggacgacgattttggcgacataaggcagcattacatttatctgctttttaagttcgcccatatcgcctcgccaaactcccaaatggcggccaaattcaaggccaattataacggcctgcccccatatatgaaattggacggccatgacgacaatggcagtatcgacgcctatgtcacggacgctcccccgctattgacctacaacgactacggcatagccacttacaccaaggcaaaaatggcgtataacatgatcagggaattgaacaccgcctggctgtccgatcccctgtatgacggacggccccttattgagattatgggcatacagggccacgacatcctgggccctaccctcgctggcgacaaccagacggcgattgagctgtacgccgatcttatcgacaagggcctgctcagcggcatagcgtattccgagcttgacattaaattaaacgactccgccccaggcggcgcttccctggcgcccgcccccctgaaccaaaggcaggccgacgctttagggtatcaatacgccctgctcttcaaaatgttcgccaaatacgcgcggtacatagaccatgtaataatctggggcattagtggctggggctggcagaacagttatgtgctattcaacgagaaccggcaggccaaccagggctattacggggtaatggacccggacaggttcattaaggggcattcgtatctggacgaatactttaaataa

SEQ ID NO: 6272 - protein, 245 aa, Unknown
  Obtained from environmental sample
  DOMAIN (8)...(231): Glycosyl hydrolase family 10
  misc_feature (1)..(245): Xaa is any amino acid
MTDDDFGDIRQHYIYLLFKFAHIASPNSQMAAKFKANYNGLPPYMKLDGHDDNGSIDAYVTDAPPLLTYNDYGIATYTKAKMAYNMIRELNTAWLSDPLYDGRPLIEIMGIQGHDILGPTLAGDNQTAIELYADLIDKGLLSGIAYSELDIKLNDSAPGGASLAPAPLNQRQADALGYQYALLFKMFAKYARYIDHVIIWGISGWGWQNSYVLFNENRQANQGYYGVMDPDRFIKGHSYLDEYFK

SEQ ID NO: 6273 - DNA, 651 bp, Unknown
  Obtained from environmental sample
  misc_feature (1)..(651): n is a, c, g, or t
atgaccggagtaataagcgcccatggcctggacgttgggtacgacaagaagaccgttgttagtggcgtggaaataaaagccctgaaaggccaggtcatctgtctaatcggccctaacggagcgggcaagtcaacgatactcagaacccttgcgggaatgctcgcccctgtcggcggcgccgtttacattggcagtaacgacattcgcgcaataaagcccaatgacctggcaaaacaaatggccgtagtgctgaccgaatcgttgaacgtcaatatgacttccgcttatgaaattgcttcgatgggcaggattccatacaccggttttttcggcaggctcaatgcggacgatcatcgtatcgtgcgggaatgtatgcaaattgtcggcgcggcagagctagcagaaagggatttttcaagcctcagcgacggcgaaaaacaaaagatcatgattgccagggcactggcccaggaaccggagttaattatactggacgaacctaccagccatcttgatataaaacacaagatagagatcctccgcatacttaatcggctttcggcaattaatggcgtgactgtaattcttgctttgcacgaccttgatatagccgtgaagaactgcnncagttcgatctcgtgccgattctga

SEQ ID NO: 6274 - protein, 216 aa, Unknown
  Obtained from environmental sample
  DOMAIN (30)...(215): ABC transporter
  misc_feature (1)..(216): Xaa is any amino acid
MTGVISAHGLDVGYDKKTVVSGVEIKALKGQVICLIGPNGAGKSTILRTLAGMLAPVGGAVYIGSNDIRAIKPNDLAKQMAVVLTESLNVNMTSAYEIASMGRIPYTGFFGRLNADDHRIVRECMQIVGAAELAERDFSSLSDGEKQKIMIARALAQEPELIILDEPTSHLDIKHKIEILRILNRLSAINGVTVILALHDLDIAVKNCXSSISCRF

SEQ ID NO: 6275 - DNA, 681 bp, Unknown
  Obtained from environmental sample
  misc_feature (1)..(681): n is a, c, g, or t
atgaaacatactttttggataattgcgctcaccgtcttgctctgtatttttgcaggctgcaaggccaaaagcaaaacctcttgccgggaagaaaactttagcaaagaagccagctatgctctggggatgaatgtgggcgcaagcgtgaaaaaggataatctttatcccaatatggaagaattcatccagggaatagaagatgtcgtgaacaacgccacaccccgttactccaatgaagcggcgtatcagattttcagtgacgcatacatgtctattgcggagaaacgcgaggagaaaagcatacagactgaaaatgattttctggcggaaaacagcaaaaaaaccggcgtcactgttaccggcagcggtctgcaatacgaagtgataagtgaaggaatgggccgcaaaccggcggtgaacaatacggtgcgggtgcattatgaaggaaccctggccgacggtacggtttttgacagttcttattcccgcggggagccgatagaattcccgcttagcgaagttattcccggctggacagaaggtctgcaattaatgaatgtgggcagcaagtaccgcctggttataccttcgaatttggcttacggttctcagggctggcagcaaattccgccctacgcaacactgatatttcaggtcgaactgctcgacatcgttcaataa

SEQ ID NO: 6276 - protein, 226 aa, Unknown
  Obtained from environmental sample
  SIGNAL (1)...(22)
  DOMAIN (13)...(128): Domain amino terminal to FKBP-type peptidyl-prolyl isomerase
  misc_feature (1)..(226): Xaa is any amino acid
MKHTFWIIALTVLLCIFAGCKAKSKTSCREENFSKEASYALGMNVGASVKKDNLYPNMEEFIQGIEDVVNNATPRYSNEAAYQIFSDAYMSIAEKREEKSIQTENDFLAENSKKTGVTVTGSGLQYEVISEGMGRKPAVNNTVRVHYEGTLADGTVFDSSYSRGEPIEFPLSEVIPGWTEGLQLMNVGSKYRLVIPSNLAYGSQGWQQIPPYATLIFQVELLDIVQ

SEQ ID NO: 6277 - DNA, 966 bp, Unknown
  Obtained from environmental sample
  misc_feature (1)..(966): n is a, c, g, or t
ttgggctacaaagcccgcttttttggaagacgtacggcgcaaatgaagctcggcggttttgattatattgacgcggcggctatgctttcaaaattcagcggcgaagacaaaattaaattgtattgttgtgtcggcggtacgccttattatctttcgcggattgacaagcagttaagcgttgaaaaaaaccttgaaaaacttttttttgaacctgcgggctatctctatgaagaaccccttatgctgctcaagcaggaattaagagaaggggcagtatacaattcaattataacggctattgctctgggagcggtcaggttaaacgagatttcttcgagaacaggggaagagcgaactaaaatgattcgataccttgatactttgataggccttaacattctgcgtaaggaatttccatttggagaaaatcccgaaaaaggcaaaaggggaatttaccgtatcatggataattgttttcgtttttggtatcgttatgtgttcaccaataaaaccgttattgagcagggcgccggggcagcgcttcttaaatcattcctgccggaattaaacagctacattggcggtccatttgaagatatttgtatgcagtacatgataaggatgaataatcttttagcgctgccttttgtttttacccagtccggaagatggtggggaacaaacccgaaaacccgtcagcaggaagaaattgatatggttttttccgatacaacccattttatttttgccgaatgtaaatggcgcaatgatttgaaagatacggcaattctgaaaacacttattgaaaagtcaaaattgttgattcacgataataatattaatcaacaggatgttttttactatttgttttccaaaacacccttttcaaaatcttgtatatcccttgcgtatcagacgggcaatgtttttttaataggccanaaggaacttttttacccggattag

SEQ ID NO: 6278 - protein, 321 aa, Unknown
  Obtained from environmental sample
  DOMAIN (162)...(266): Archaea bacterial proteins of unknown function
  misc_feature (1)..(321): Xaa is any amino acid
MGYKARFFGRRTAQMKLGGFDYIDAAAMLSKFSGEDKIKLYCCVGGTPYYLSRIDKQLSVEKNLEKLFFEPAGYLYEEPLMLLKQELREGAVYNSIITAIALGAVRLNEISSRTGEERTKMIRYLDTLIGLNILRKEFPFGENPEKGKRGIYRIMDNCFRFWYRYVFTNKTVIEQGAGAALLKSFLPELNSYIGGPFEDICMQYMIRMNNLLALPFVFTQSGRWWGTNPKTRQQEEIDMVFSDTTHFIFAECKWRNDLKDTAILKTLIEKSKLLIHDNNINQQDVFYYLFSKTPFSKSCISLAYQTGNVFLIGXKELFYPD

SEQ ID NO: 6279 - DNA, 615 bp, Unknown
  Obtained from environmental sample
  misc_feature (1)..(615): n is a, c, g, or t
gtgatgaaccgcgaagaaaaacccgacgacaaggacataccaggagaaggggagggtggtgtgaggatcatgtccatccacaaaagcaagggcctggaattccccgtggtgttcatctacgactgtagccatgccggaaacatcaggcgttcaatggatttaatcagttgccatgaacaatacggccttatcctaaacatacctcaggcggaagagctgcctttaggcggaagttattttcgccggatcatggaagaggacgaaagggcaaaagatattgcagagctaaggcgcctcctttacgttgccatgaccagggctgagtacaaggtcttccttaccttcaccctgccaaaacagactgtcaaggaaaaggaagactgggacatggcggctgaagaatttaccaatgaatcaatacgccgccgccttgcccaactggacgaaaaatcggagggcaagaaggatactttcctaatactccttgccggaattcttcacgatagtccacattcgatctgctctttggaagggattccgcttttgaccagggacgagattaaaaagccgcatcctaaagaagggaagcgtggacaggcgaaagtgggtcactag

SEQ ID NO: 6280 - protein, 204 aa, Unknown
  Obtained from environmental sample
  misc_feature (1)..(204): Xaa is any amino acid
MMNREEKPDDKDIPGEGEGGVRIMSIHKSKGLEFPVVFIYDCSHAGNIRRSMDLISCHEQYGLILNIPQAEELPLGGSYFRRIMEEDERAKDIAELRRLLYVAMTRAEYKVFLTFTLPKQTVKEKEDWDMAAEEFTNESIRRRLAQLDEKSEGKKDTFLILLAGILHDSPHSICSLEGIPLLTRDEIKKPHPKEGKRGQAKVGH

SEQ ID NO: 6281 - DNA, 300 bp, Unknown
  Obtained from environmental sample
  misc_feature (1)..(300): n is a, c, g, or t
ttgcttggggccggcagagcaagaatcgtattcatccatatattgccgaacctggcaactcaattgcttcctgccgccgccctgggcctttccaacgcgattctcgccgaggccgctatgagttacctgggattggggattcagccgcctgagccaagctggggaaggatgctttccgaatcgcagaattacctgatcaacgcgccctggtgcgcccttgcccccgggatcttcatcatgctgacggtcattggcttccactgcctcggcgacagcctccgccgctattttggagattag

SEQ ID NO: 6282 - protein, 99 aa, Unknown
  Obtained from environmental sample
  misc_feature (1)..(99): Xaa is any amino acid
MLGAGRARIVFIHILPNLATQLLPAAALGLSNAILAEAAMSYLGLGIQPPEPSWGRMLSESQNYLINAPWCALAPGIFIMLTVIGFHCLGDSLRRYFGD

SEQ ID NO: 6283 - DNA, 783 bp, Unknown
  Obtained from environmental sample
  misc_feature (1)..(783): n is a, c, g, or t
ttgcgatatgccttgctgtgctggcccttgtgggcggggcaggctatttntatttaccgtttgccaaaaaaacccaatgtcccccaacagacggtaaggacagccactgagtatgtgctgaacaacgattcttttgaacgcaggatgtatcctggcgattcgattctggttgttgaaggatcaaactcctataaactggtattctcaagtttaagcgatgctatcacaattaccactcccggagggcctgtaatgctggatcttggccaggaagtaaccgtagatttaaacaccgacgggtttggggaactgcggattttagcggcggattttgtcaaaaacgataatctggcaggagccctgcttcgctttgaacaggaagttctgccgcagatggcggcatcgcctgaattccccatagaaaccattagctccggcagtgaaacgcctttggttctccttaacacaacaagcgcctttccatttacccttcaggccgtattccagggctattgcctgttccgccacgagatactttttgagcgggacaagccgggccgcaacgagcagttctatcagcgctcggatgagctcaacattaccgccatgaacggaatccggcttggcatatcaaacgcccaggcggttaaacttcaggtgattggcgcaggccggactgtgcctttcgaagcaggcagcgcaggcgaagtggtagccgcggatctccgctgggtgcgggacgatgaaaaccgttaccgcctggtattgctccggctggaatag

SEQ ID NO: 6284 - protein, 260 aa, Unknown
  Obtained from environmental sample
  misc_feature (1)..(260): Xaa is any amino acid
MRYALLCWPLWAGQAIXIYRLPKKPNVPQQTVRTATEYVLNNDSFERRMYPGDSILVVEGSNSYKLVFSSLSDAITITTPGGPVMLDLGQEVTVDLNTDGFGELRILAADFVKNDNLAGALLRFEQEVLPQMAASPEFPIETISSGSETPLVLLNTTSAFPFTLQAVFQGYCLFRHEILFERDKPGRNEQFYQRSDELNITAMNGIRLGISNAQAVKLQVIGAGRTVPFEAGSAGEVVAADLRWVRDDENRYRLVLLRLE

SEQ ID NO: 6285 - DNA, 411 bp, Unknown
  Obtained from environmental sample
  misc_feature (1)..(411): n is a, c, g, or t
gtggaaaacgccgagctggaagtgtttatccgcgactttgacaaaaagnaaggcgaaagaaagatcgccgcattggacactttcgcccgcgctgtggaagcccagtttccgggcggaaaaatcgaggcaaacagcaaagttcagtatttgaacatgaaggaaaaaatcggctcgcaccctgaggtgatagaaaaactgcgccaggcgtttttaaacacacatgtagaaattaaagaaaaacccatccgcggcggcaccgacggttccaggctcaccgagatgggcatacccaccccgaatatttttacaggcggccgcaactatcacagccgccttgagtggctttctgtgcctgaaatgattgcttcatgccgccttgtggtggagctaatgcggctctggggtgagtga

SEQ ID NO: 6286 - protein, 136 aa, Unknown
  Obtained from environmental sample
  misc_feature (1)..(136): Xaa is any amino acid
MENAELEVFIRDFDKKXGERKIAALDTFARAVEAQFPGGKIEANSKVQYLNMKEKIGSHPEVIEKLRQAFLNTHVEIKEKPIRGGTDGSRLTEMGIPTPNIFTGGRNYHSRLEWLSVPEMIASCRLVVELMRLWGE

SEQ ID NO: 6287 - DNA, 570 bp, Unknown
  Obtained from environmental sample
  misc_feature (1)..(570): n is a, c, g, or t
ttgtctaacaatattctggttctagtctctggcggcggtacaaatttacaggcccttattgacgcgcaaaaacgaggagagctgagaaacggcaaaataaccgccgtcatctccgatcgaagcggggtttatgctttggaaagggcaaaaactgcgggaattccggcctttgtagaaaaacctgatgcctctcttcccaaacctgaaagaggccgggaactttcggatcgaattttacgtttctgccgtgaaaaagaaatcggccttgttgtctgcgcgggtttcctttcgattctggcgggggatataatcaaagcctacgcaggaagaatgataaaccttcacccggcgctacttcccaagttcggcggtaaaggtatgtacggcgagcacgttcaccgcgcggttttaaaagcgggagaaaccgaatccggctgtaccgtccattttgtggacgccggaaccgataccggttctatactcttacagagaaaagttcctgttctgagcggcgacataccggaaaccttggcgggaaggattcataaggaggagcatatcgccatgtag

SEQ ID NO: 6288 - protein, 189 aa, Unknown
  Obtained from environmental sample
  DOMAIN (3)...(189): Formyl transferase
  misc_feature (1)..(189): Xaa is any amino acid
MSNNILVLVSGGGTNLQALIDAQKRGELRNGKITAVISDRSGVYALERAKTAGIPAFVEKPDASLPKPERGRELSDRILRFCREKEIGLVVCAGFLSILAGDIIKAYAGRMINLHPALLPKFGGKGMYGEHVHRAVLKAGETESGCTVHFVDAGTDTGSILLQRKVPVLSGDIPETLAGRIHKEEHIAM

SEQ ID NO: 6289 - DNA, 546 bp, Unknown
  Obtained from environmental sample
  misc_feature (1)..(546): n is a, c, g, or t
ttgtactttattccgggacgatttactatagtaatgatatctttggtgtcaataagcattaccgtatcaacaaaattggcgggaataatgaatttcatattacccgaagatatgggaaagcccataagtgaagccatggataacggaacagaaatagtaaatgtggttccttctcctgctttagtttgtatcgcgatactgccctttacgcgttcaatattatttttgaccgcgtccattcctactccccggccagaaacatcggagatcgtttccgcggttgaaaaaccgctttggaaaataaagttaattagttcttcttcgccaagagccgcggcggcttccttggaaactaggcccttctcaacgatttttgttctaattccctctatgttaatgcccttcccatcgtcggtgatcgtaaccttcatgtttccgctttcccggacgcagcgaatggttaaaaggcctgcctcgcttttcccaagggcccgccgttcttccggtgtttcaatgccgtggtctatagagtttctaatcatgtga

SEQ ID NO: 6290 - protein, 181 aa, Unknown
  Obtained from environmental sample
  SIGNAL (1)...(27)
  misc_feature (1)..(181): Xaa is any amino acid
MYFIPGRFTIVMISLVSISITVSTKLAGIMNFILPEDMGKPISEAMDNGTEIVNVVPSPALVCIAILPFTRSILFLTASIPTPRPETSEIVSAVEKPLWKIKLISSSSPRAAAASLETRPFSTIFVLIPSMLMPFPSSVIVTFMFPLSRTQRMVKRPASLFPRARRSSGVSMPWSIEFLIM

SEQ ID NO: 6291 - DNA, 840 bp, Unknown
  Obtained from environmental sample
  misc_feature (1)..(840): n is a, c, g, or t
atgattagaaactctatagaccacggcattgaaacaccggaagaacggcgggcccttgggaaaagcgaggcaggccttttaaccattcgctgcgtccgggaaagcggaaacatgaaggttacgatcaccgacgatgggaagggcattaacatagagggaattagaacaaaaatcgttgagaagggcctagtttccaaggaagccgccgcggctcttggcgaagaagaactaattaactttattttccaaagcggtttttcaaccgcggaaacgatctccgatgtttctggccggggagtaggaatggacgcggtcaaaaataatattgaacgcgtaaagggcagtatcgcgatacaaactaaagcaggagaaggaaccacatttactatttctgttccgttatccatggcttcacttatgggctttcccatatcttcgggtaatatgaaattcattattcccgccaattttgttgatacggtaatgcttattgacaccaaagatatcattactatagtaaatcgtcccggaataaagtacaacgggcggataattaaattgttctacctccatcatattttgaaaatcgattcagaaaaaaaacctgatgccggtgattccatttttgtagctattgtccatgcctatgaagaaactgtcgcgctcgcggtgactcaaataagcagtatacggcagttcattcttaaaaatatgccttcatttatggaacagatggatgtattttctggnttggtacanaacgaagactatgaaatggtaccggcgttgcatattccacagtcatcaagatggcgcggcgtacgaaaaccattgacatga

SEQ ID NO: 6292 - protein, 279 aa, Unknown
  Obtained from environmental sample
  DOMAIN (2)...(135): Histidine kinase-, DNA gyrase B-, and HSP90-like ATPase
  misc_feature (1)..(279): Xaa is any amino acid
MIRNSIDHGIETPEERRALGKSEAGLLTIRCVRESGNMKVTITDDGKGINIEGIRTKIVEKGLVSKEAAAALGEEELINFIFQSGFSTAETISDVSGRGVGMDAVKNNIERVKGSIAIQTKAGEGTTFTISVPLSMASLMGFPISSGNMKFIIPANFVDTVMLIDTKDIITIVNRPGIKYNGRIIKLFYLHHILKIDSEKKPDAGDSIFVAIVHAYEETVALAVTQISSIRQFILKNMPSFMEQMDVFSGLVXNEDYEMVPALHIPQSSRWRGVRKPLT

SEQ ID NO: 6293 - DNA, 693 bp, Unknown
  Obtained from environmental sample
  misc_feature (1)..(693): n is a, c, g, or t
atgataactttaagctgtgaagactgtatggacttgatgtccaggtacccggacaagcactttgatctggctttggttgatcctccttttggtatagggcaggaatggaagaaaagacactatagacaccttaaaggcaaccgttttccagaaacttcttataaaaacgacatctgtcctacaaaagaatactttatcgaactattccgtgtttccaatgaacagattatttttggttataattattttgtagaattccttggcccaacaaattacttgataatatgggataagcttagcagcaataatagcactgttctttattcaaaagctgaaattgcttatacctcaattcatataccaatatttataattcaagttccctgggacggttatcgcatgggtaaagaaacacataattccaaaatccacccgcaccagaagcctgtagagctttatataaagatattaagcaaatacgcaaagccggactggtctattcttgatacccacatgggttctggttcttctgtaatcgcctgccataagcttggactcgatgtaaccgcttgcgaaattgatgaaatatattttaacgccgccaaaaagagaatcgatgcggaaaccagacatcangaactttttcttcagagttacgccnattcccagagagcttttattttgagagcttaa

SEQ ID NO: 6294 - protein, 230 aa, Unknown
  Obtained from environmental sample
  DOMAIN (21)...(203): DNA methylase
  misc_feature (1)..(230): Xaa is any amino acid
MITLSCEDCMDLMSRYPDKHFDLALVDPPFGIGQEWKKRHYRHLKGNRFPETSYKNDICPTKEYFIELFRVSNEQIIFGYNYFVEFLGPTNYLIIWDKLSSNNSTVLYSKAEIAYTSIHIPIFIIQVPWDGYRMGKETHNSKIHPHQKPVELYIKILSKYAKPDWSILDTHMGSGSSVIACHKLGLDVTACEIDEIYFNAAKKRIDAETRHXELFLQSYAXSQRAFILRA

SEQ ID NO: 6295 - DNA, 735 bp, Unknown
  Obtained from environmental sample
  misc_feature (1)..(735): n is a, c, g, or t
atgtttctaagagagcttacgtttcctgttgataaattgcggggcgtaggcccttcggtacagcaaacccttattaatgcgggaatcaccaccgtcgcttcgcttttaacccgttacccccgggattgggaagaccggagccgctcagtccccctaaaagactggaacaggggcccggtgtgtaccatcgcaaaggttctggcccactcctggttcggctttggagcaatgagaacccttaaggtttatattgaagatgaaagcgcacaagcggtcctggtttgctttaaccgtccctttctgcaaaaacagcttcctgtaggagcccagatccgtatttggggtaaattctactataaatacggggaactccagtcaaccgcttttgaagtagaaaaccccggctccaggaaattggctttactccccgtgtatgcgctttcaaaagatttaaaacaaaacctactgcgtaagctgatgcaacaggccctggatcaatacggcgcggatctggaaaacgaacttccccccgatgtcatttccagagaaaaactcctttccaaagctgaagcgctaaaggcaattcacttccctccctccacggaaattttgggaacagcccggaataccctgatctacgaagaactcttttacctggaaataatggtaggacggcgcgcactggaaacgcaaaataccggaagaagcgacatccttgntgatcccgnnttgtaa

SEQ ID NO: 6296 - protein, 244 aa, Unknown
  Obtained from environmental sample
  misc_feature (1)..(244): Xaa is any amino acid
MFLRELTFPVDKLRGVGPSVQQTLINAGITTVASLLTRYPRDWEDRSRSVPLKDWNRGPVCTIAKVLAHSWFGFGAMRTLKVYIEDESAQAVLVCFNRPFLQKQLPVGAQIRIWGKFYYKYGELQSTAFEVENPGSRKLALLPVYALSKDLKQNLLRKLMQQALDQYGADLENELPPDVISREKLLSKAEALKAIHFPPSTEILGTARNTLIYEELFYLEIMVGRRALETQNTGRSDILXDPXL

SEQ ID NO: 6297 - DNA, 759 bp, Unknown
  Obtained from environmental sample
  misc_feature (1)..(759): n is a, c, g, or t
atgggtaactacaaattgaataaaatacttgtcgatcgaaaaacaaagaagatttaccttgacggcgacaaggtgataaaacttatgggcgaggaataccctgcgcccgacgttctctccgaagcgcacaaccttgccgcggtgggagaaacagccctcaaggttccccgcctggtagaggttacaaaaatagacggcaagtgggcagtagtgtgggaatatgtcgcgggaaccactcttgcccagcttatggaaaaaaacaaggacaaggaacagcaatatcttgaacgctttgttgacattcagcttgatatgcaccgccatagcgcgacaaggcttcccctgcttatagaaaaaatggagcgcaagataaaagcctccagccttgacgctaccgcccgttacgaaattttgggaaggctggcaagcatgcccaaacacaccaaactctgccacggcgattttaaccccagtaacattgtcatcactgaaaaggacgaggcgtatatcatcgactggtcccacgccactcagggcaacgcctcggcggacgcggcgcacacatacatgttgttctggcttacgggcaacgtcgcgttggcggaagattaccttttaatgttttgcaaaaagagcgatacggcaatacagtacgtggaaaagtggctgtccatagtagcggcctcacagcttcccaaagcaaaaccggaagataaaggattattacttagttgggcgaatgtggtagagtacgtttga

SEQ ID NO: 6298 - protein, 252 aa, Unknown
  Obtained from environmental sample
  DOMAIN (60)...(186): RIO1 family
  misc_feature (1)..(252): Xaa is any amino acid
MGNYKLNKILVDRKTKKIYLDGDKVIKLMGEEYPAPDVLSEAHNLAAVGETALKVPRLVEVTKIDGKWAVVWEYVAGTTLAQLMEKNKDKEQQYLERFVDIQLDMHRHSATRLPLLIEKMERKIKASSLDATARYEILGRLASMPKHTKLCHGDFNPSNIVITEKDEAYIIDWSHATQGNASADAAHTYMLFWLTGNVALAEDYLLMFCKKSDTAIQYVEKWLSIVAASQLPKAKPEDKGLLLSWANVVEYV

SEQ ID NO: 6299 - DNA, 933 bp, Unknown
  Obtained from environmental sample
  misc_feature (1)..(933): n is a, c, g, or t
ttggatagcaatacttctcaaaaaaccagtgattccctgtctaatattcgcttaaacacagaaaggattatgcagattgttaatgacattctggatatttccaaaattgaatccggtgaaatgtcactgaaaaaaaatccatttgatatacacgagctttttgccggatgcagaacattggtaatgcctaaagcggttgaaaaaggtttgttgcttcatttttatgccgagcctagcgttggtaaaaaaccggtcggcgatatagcaaggcttcgccaggtatttgtaaatctgcttttcaatgcggtaaaatatacaaataccggtatggttaaacttgtctctgatattcttagtattgatgataaatcaataacgatacactttgaagttaaagacagcggcgttggtatgacgccggaacagatagcgaaagtatttaaaccgttttcgcaggtggaaaaatcttataaaaacggttccacagggcttagtctgccgattaccaaaagcattatcgaaatgatgggaggcactctctctgtcgatagcacacccggtattggaagcagattcagttttgatcttacatttgacacaattgacatatccatgagtgatatacttcaagaaagagtttcatacagagacattgataaaccgctatttgaaggcgacattctgatatgtgaagacaatcttatgaagcaggaagttattcgcgaacatcttacaaatgttggtcttaaaaccgatgttgcggaaaacggattaatcgggatagagaaggttaagagtcgattaaataaaggcgaaaaattatacgatttaatttttatggatatgcatatgcctataatggatggacttgaggcggcgggtagaattgtaaaatgggcattaagatacctatgtcgccctaccgctacataa

SEQ ID NO: 6300 - protein, 310 aa, Unknown
  Obtained from environmental sample
  DOMAIN (86)...(199): Histidine kinase-, DNA gyrase B-, and HSP90-like ATPase
  misc_feature (1)..(310): Xaa is any amino acid
MDSNTSQKTSDSLSNIRLNTERIMQIVNDILDISKIESGEMSLKKNPFDIHELFAGCRTLVMPKAVEKGLLLHFYAEPSVGKKPVGDIARLRQVFVNLLFNAVKYTNTGMVKLVSDILSIDDKSITIHFEVKDSGVGMTPEQIAKVFKPFSQVEKSYKNGSTGLSLPITKSIIEMMGGTLSVDSTPGIGSRFSFDLTFDTIDISMSDILQERVSYRDIDKPLFEGDILICEDNLMKQEVIREHLTNVGLKTDVAENGLIGIEKVKSRLNKGEKLYDLIFMDMHMPIMDGLEAAGRIVKWALRYLCRPTAT

SEQ ID NO: 6301 - DNA, 810 bp, Unknown
  Obtained from environmental sample
  misc_feature (1)..(810): n is a, c, g, or t
atgcttgccggaagtttcggcggcattaatttggaagacatttccgctccgcgctgttttgaaattgaaagaaaattaaaagctcgctgtgatattcctattttccatgacgatcagcatggaacagcgatagtaacgcttgcggcgctgcttaacgcgctgaagtttacggggaaaaaactggaaaatataagcgtagttaccctgggcgcaggcgctgcgggaatagccgtaatcaggctgttgcagaccgccggtttaaacgacgttgtactatgcgaccgccagggggcgatctacaaaggcagagcgggtcttaacagcgaaaaggcggagatggcggaaatatcaaacaagcaaatgaagaaaggaagttttgccgatgttctgcgaggagccgatgtttttatcggtgtttcagctcccggcatggtaacgccggaaatggtaaaatcaatgtcgcctaaagcgattttatttccaatgtctaacccaacgccggaaatcatgccggatgcggctcttgccgcaggagccgccgtagtgggaacaggacgcagcgattttgcgaatcaaattaacaatgttcttgccttccccggcattttccgcggagcgctggacgtccgagcgagcgacattaacgatgaaatgaaaatagcggcggctcacgctcttgccggtcttgtaaatgaaaacgaattaaaaagcgattacattattcccgcagcttttgacccaagagtaaaagatgctgtggctaacgccacggcgcangcggctaanaaaagcggcgttgcaagaatataa

SEQ ID NO: 6302 - protein, 269 aa, Unknown
  Obtained from environmental sample
  DOMAIN (39)...(262): Malic enzyme, NAD binding domain
  misc_feature (1)..(269): Xaa is any amino acid
MLAGSFGGINLEDISAPRCFEIERKLKARCDIPIFHDDQHGTAIVTLAALLNALKFTGKKLENISVVTLGAGAAGIAVIRLLQTAGLNDVVLCDRQGAIYKGRAGLNSEKAEMAEISNKQMKKGSFADVLRGADVFIGVSAPGMVTPEMVKSMSPKAILFPMSNPTPEIMPDAALAAGAAVVGTGRSDFANQINNVLAFPGIFRGALDVRASDINDEMKIAAAHALAGLVNENELKSDYIIPAAFDPRVKDAVANATAXAAXKSGVARI

SEQ ID NO: 6303 - DNA, 969 bp, Unknown
  Obtained from environmental sample
  misc_feature (1)..(969): n is a, c, g, or t
gtgatgggactgccatgtttcaaggaaagtattgaagaagtaaaaaatattattatcgaagaaaaaccggacatggtctgcgtagaactggatgaaggcagatataacgcgattacgcagaacaaccattgggaaaaactgaatttgtcagaagttttcagggaaggcaaagggtttttggtaattgccaacttggttctcgcgagttttcagcggcggcttggtaatgaattgggggtaaagcccggcgaagaaatgaaagttgcggttgaaacagcgcgggagcaggggataccgcacagtctttgcgaccgtgaggtgcatacaactttacgacgggcatgggcccgctgcggcttatggagcaaggcaaaactgctggcatcgcttatggcaagcgctttttcaaccgaaaaactgagcgagcaggaaattgaagctcttaaaaacagcaatgaacttgacggaatgatgggcgagcttgctggttatctgccaagcgttaaggaaactttaattgacgaaagagaccgatatcttgcctctaaaatttggacatccacgccgccgggtgaaaataaaagaatcgccgcagtaatcggggcgggacacatgaaaggaatcgctgcccatcttgaaaaactttcttccggtaaggaaaatgccgatgtcagcgaacttaacgtaattccctcgccgtccgctttttcaaaaatagcgcgttttattattcccgccgccattgtcgctcttgttgccgccggattcctccgcgcgggaacggcgacgggtttttcaatgatgttaaagtgggtgttgtggaacggctctcttgcggcgcttggggcttgtattgcccttgcccatccactggcaattctggtttcgtttattggagcgcccataacatctcttaatccttttatcggagtggggattctttccggtnctgttcaggtacgtttttaa

SEQ ID NO: 6304 - protein, 322 aa, Unknown
  Obtained from environmental sample
  DOMAIN (1)...(221): TraB family
  misc_feature (1)..(322): Xaa is any amino acid
MMGLPCFKESIEEVKNIIIEEKPDMVCVELDEGRYNAITQNNHWEKLNLSEVFREGKGFLVIANLVLASFQRRLGNELGVKPGEEMKVAVETAREQGIPHSLCDREVHTTLRRAWARCGLWSKAKLLASLMASAFSTEKLSEQEIEALKNSNELDGMMGELAGYLPSVKETLIDERDRYLASKIWTSTPPGENKRIAAVIGAGHMKGIAAHLEKLSSGKENADVSELNVIPSPSAFSKIARFIIPAAIVALVAAGFLRAGTATGFSMMLKWVLWNGSLAALGACIALAHPLAILVSFIGAPITSLNPFIGVGILSGXVQVRF

SEQ ID NO: 6305 - DNA, 681 bp, Unknown
  Obtained from environmental sample
  misc_feature (1)..(681): n is a, c, g, or t
atgaccaatccccgagaaaagagggaacggctccatatccttgtcattaacggagtgaaaaaactttccggccgtgattttgaaataggcccggattttatggaagtgggttcttttatcggacttgcgtccgtaaccggcggagatcttcacattgagggcgcgcgccccagtgatatgcgtccggcaaaaatcgcgtttggcaaactgggaattgtctgggggcatgagggaaacataatacatgtgccaaagaaccaaagcatggaagtaaaccacgatcttggaggaatgattcccaagatagacgatgcgccctggcccggattcccgcccgatcttgtcagtattgtaatggtagtcgccacgcaggtaaaaggaacggttttaattcacgagaaaatgtacgagtcgcgcatgttctttgtagacaaactgattggaatgggagcgagaatcgtgctgtgcgatcctcaccgcgccgtcgtctcaggcccgtcaaaacttcacgggtcagaactgataagccccgatgtccgcgctggaatggcgatgcttattgccgccctgtgcgccgaaggcaagagcgttatacgcaatgtctaccagattgagcggggttacgaacaccttgtcgaaaggctttcttcgctgggtgcgcggatgctgaggaaagagtaa

SEQ ID NO: 6306 - protein, 226 aa, Unknown
  Obtained from environmental sample
  misc_feature (1)..(226): Xaa is any amino acid
MTNPREKRERLHILVINGVKKLSGRDFEIGPDFMEVGSFIGLASVTGGDLHIEGARPSDMRPAKIAFGKLGIVWGHEGNIIHVPKNQSMEVNHDLGGMIPKIDDAPWPGFPPDLVSIVMVVATQVKGTVLIHEKMYESRMFFVDKLIGMGARIVLCDPHRAVVSGPSKLHGSELISPDVRAGMAMLIAALCAEGKSVIRNVYQIERGYEHLVERLSSLGARMLRKE

SEQ ID NO: 6307 - DNA, 867 bp, Unknown
  Obtained from environmental sample
  misc_feature (1)..(867): n is a, c, g, or t
atgattcaatttgtctgcgtacgcgaaattgcagagggagagaggaaacncggaggaagagacnncagagagagagaaaggggtaaaatcggctcttaccgcagtttaacggcggataaaatcatgattcatcccggatctgtaatgttccgcgccgatcctacttatattgtagcgggagaaattgtccgcacgtcaaaaatgtacgcaatgtcggtctcccctctttcaagagagattctggaacgtatcagacccggtcttttcacagaaatcgcagaagacggagatcaaaaacacgcgaaattgaagaaagccagagattttaccaataacataaaaatagcgggcgaagtgtttgaaattgccacaataaaaggaaagaaaaccgttcttcttccgtgggaaaaattaaaaaacataggcgaatatacttcggaaacattttacaagggattaagaggcaaaatatcggtaaatgaccaatataatctgcttgccggagaaaagttggaactaatcctgtctctcgcgccgaaactggacgttgacaacgctttttcccgcgattggccttacaaaatgaattttaattcaaatgataaccttgccgcccttttaaaacatctggacagcctcgcaatgccggttatatggaaaaaaggcgtaaaacatttaggttttttgggccttttcagcgacggcgccggaaattactggttccgcgccctgcgcggcttctacaggagcctgaacgaaagcctttccagtttagaaacattgatagacgacctcggcgaagaagttgccatagagcagaaacacatcgtgaatcaatgttaccgcaggttatcggattatttgtaa

SEQ ID NO: 6308 - protein, 288 aa, Unknown
  Obtained from environmental sample
  DOMAIN (2)...(86): Domain of unknown function (DUF1605)
  misc_feature (1)..(288): Xaa is any amino acid
MIQFVCVREIAEGERKXGGRDXRERERGKIGSYRSLTADKIMIHPGSVMFRADPTYIVAGEIVRTSKMYAMSVSPLSREILERIRPGLFTEIAEDGDQKHAKLKKARDFTNNIKIAGEVFEIATIKGKKTVLLPWEKLKNIGEYTSETFYKGLRGKISVNDQYNLLAGEKLELILSLAPKLDVDNAFSRDWPYKMNFNSNDNLAALLKHLDSLAMPVIWKKGVKHLGFLGLFSDGAGNYWFRALRGFYRSLNESLSSLETLIDDLGEEVAIEQKHIVNQCYRRLSDYL

SEQ ID NO: 6309 - DNA, 855 bp, Unknown
  Obtained from environmental sample
  misc_feature (1)..(855): n is a, c, g, or t
atgaactattttgatcttcctgtctatagaaatcagaaaaaaattttatcaatgcttgaaaataatcaagcgcttgttgttgagagtccgacaggctcgggaaaaacaactcagcttcccgtaattctttacgaagcgggatatactcagcgcggaatcataggcgttactcaaccaagacgcatcgcggcggtatcggtaagcgaattcatcgcgcgtcaaacggaaacagtcattcccggccttatcggttataaaatgcgcttcgccgaccgcaccaaccatgaaactaaaattaagataatgacggacggaatactgcttcaagagatgaaacttgatccctggctgtctaaatacagccttcttgtggtagatgaggcgcatgaaaggagtttaaacatcgattttatccttggattgcttaaaagagtgttggaaagcagacgtgatttcaaagttatcatctcttcggctaccattaacgccgaagtattctccgaatacttcggcgaatgtcctattgttaagatagacgcgcagactttccccgtaacattgatatacgatcctgtcgttaacgctgttgaaaacacttcatttaagcaaaaagacagcataggagaagaaattttattaaaaatcgaagcgattacaacgcgttttataagcgagaaacgcggcggagacatattaatttttcttcccggcgaanaaatgatcaaggactgcatgaaccgcctttctttctgctccgcggggaaatttttgcatattctccctttatacggcaggcttggcaaggagaacaggaaagagtctttgaaaacgctccaaacggtaaaacaaaagtga

SEQ ID NO: 6310 - protein, 284 aa, Unknown
  Obtained from environmental sample
  DOMAIN (9)...(169): DEAD/DEAH box helicase
  misc_feature (1)..(284): Xaa is any amino acid
MNYFDLPVYRNQKKILSMLENNQALVVESPTGSGKTTQLPVILYEAGYTQRGIIGVTQPRRIAAVSVSEFIARQTETVIPGLIGYKMRFADRTNHETKIKIMTDGILLQEMKLDPWLSKYSLLVVDEAHERSLNIDFILGLLKRVLESRRDFKVIISSATINAEVFSEYFGECPIVKIDAQTFPVTLIYDPVVNAVENTSFKQKDSIGEEILLKIEAITTRFISEKRGGDILIFLPGEXMIKDCMNRLSFCSAGKFLHILPLYGRLGKENRKESLKTLQTVKQK

SEQ ID NO: 6311 - DNA, 663 bp, Unknown
  Obtained from environmental sample
  misc_feature (1)..(663): n is a, c, g, or t
gtgaaaaagggcaagcagatggccattgtctcttccggcgcgcaggtagcggggctttctacaatggacaagtgggcgagaaaaaaggatattcactacaggcaggcgttgtgcgcggttggacaggttgagcttatgggagcatggagccgcgcctttgaacaaaacggcctgcacattgggcagatactattaacccgcgaagattttaacgactcgctcagaacattgaatatgcgcaacactatctttactctggcagacgaaggcatcatccccatcatcaacgagaacgacaccgtctctgtagaagaaataaaaatcggcgacaatgacacgcttgcagcgcaatcggcaattttgtggagcgccgacctgttaattcttttcagcgatattgacggggtatacgataaaaatcccaaagagcatgacgacgcctatcttgtcgaagaagtgcgggacattgaagaattgcaaaaaaatatcagtatcgggacgacaaatgattttggcaccggcggcatcgctaccaaacttgacgccgcaaaactggcattaggttacggtatcccggcaattctggcaaacggaggcaaaccccgcagccttgaaaccctcgcggcaggcggacaaaaagggacagtatttcttgcctcttga

SEQ ID NO: 6312 - protein, 220 aa, Unknown
  Obtained from environmental sample
  DOMAIN (1)...(197): Amino acid kinase family
  misc_feature (1)..(220): Xaa is any amino acid
MKKGKQMAIVSSGAQVAGLSTMDKWARKKDIHYRQALCAVGQVELMGAWSRAFEQNGLHIGQILLTREDFNDSLRTLNMRNTIFTLADEGIIPIINENDTVSVEEIKIGDNDTLAAQSAILWSADLLILFSDIDGVYDKNPKEHDDAYLVEEVRDIEELQKNISIGTTNDFGTGGIATKLDAAKLALGYGIPAILANGGKPRSLETLAAGGQKGTVFLAS

SEQ ID NO: 6313 - DNA, 897 bp, Unknown
  Obtained from environmental sample
  misc_feature (1)..(897): n is a, c, g, or t
gtgttttttattgttacagcgaataccctggataccattcccagccctcttgttgaccgtatggagatcatccagctccccggctacatcgacacggaaaaacttgagatagccaagcattacctggttcccaagagcctcgagaaaaacgggctcaaaaaaaaccaggtcaaatacaatcaggaatccctgctttacattgccaacggttacgcaagggaagccggggtaaggaattttgaaaagaacctggacaaaattcaccggaaaatagcgaagcagattgttgacgccgaagaatcgtctattaagccaaagcctgaacctgaccccaacttaaaccaaagcgacggcaaggataacgcgaaagatagtgcgaatgaaaagaaagatccgcaaaagtctacaccgttaaagtttacaatagacaaaaaagtcattgaagaacaccttggcaaaccgattttccccgagggggaaataaaaaaggccgaccgtccggggatgtccgtgggcttagcctggacgagcatgggcggtgacacgttggtaatcgaagctacctcggtgccgggaaaagagggcctgactctcaccggcaagatgggcgacaccatgaaggagagcgccgctatcgccatgaccatggcccaaaaacttggaacagaacgctatggaattgactcttcctggtttgaaaaaaaccacatccaccttcacatccccgaaggcgctactcccaaggacgggccctctgccgggatcaccatggcaacagccctgctttccctggtacggaacaaaattatcacagatcgtatggtgatgaccggggaactcagccttacagggcaggtgcttccaattggtggcctaaagagaactcggccgatctga

SEQ ID NO: 6314 - protein, 298 aa, Unknown
  Obtained from environmental sample
  DOMAIN (141)...(294): Lon protease (S16) C-terminal proteolytic domain
  misc_feature (1)..(298): Xaa is any amino acid
MFFIVTANTLDTIPSPLVDRMEIIQLPGYIDTEKLEIAKHYLVPKSLEKNGLKKNQVKYNQESLLYIANGYAREAGVRNFEKNLDKIHRKIAKQIVDAEESSIKPKPEPDPNLNQSDGKDNAKDSANEKKDPQKSTPLKFTIDKKVIEEHLGKPIFPEGEIKKADRPGMSVGLAWTSMGGDTLVIEATSVPGKEGLTLTGKMGDTMKESAAIAMTMAQKLGTERYGIDSSWFEKNHIHLHIPEGATPKDGPSAGITMATALLSLVRNKIITDRMVMTGELSLTGQVLPIGGLKRTRPI

SEQ ID NO: 6315 - DNA, 372 bp, Unknown
  Obtained from environmental sample
  misc_feature (1)..(372): n is a, c, g, or t
atgtctccgactagcggctggcaaagcacaaagataggcgctggtccctgccccattgaaacatctgaaggctggctggttttttatcacggggtactgacaagctgtaacggttttgtgtattcattcagcgcggcattaatggatcttgaaaagccgtggaaagttatagcgcgcccaaaaccgtacatcatcaacccgcgcgaactttatgaattagccggcgatgtgcccaatgttacattccctgtagccgcgcttgtagacaaagacacaggcaaggtggcaatttactacggctgcgcggatacggtaacaggacttgtctttggtaaagttgatgagatagtcgcttgggtaaaagcgaattaa

SEQ ID NO: 6316 - protein, 123 aa, Unknown
  Obtained from environmental sample
  DOMAIN (1)...(122): Domain of unknown function (DUF377)
  misc_feature (1)..(123): Xaa is any amino acid
MSPTSGWQSTKIGAGPCPIETSEGWLVFYHGVLTSCNGFVYSFSAALMDLEKPWKVIARPKPYIINPRELYELAGDVPNVTFPVAALVDKDTGKVAIYYGCADTVTGLVFGKVDEIVAWVKAN

SEQ ID NO: 6317 - DNA, 441 bp, Unknown
  Obtained from environmental sample
  misc_feature (1)..(441): n is a, c, g, or t
atgcctttatttcatattgataaaaataaattgacgacagccaaacttattaatttttcaaaagaaaaagaaatacagacattaattgaaaataatcttgaagtagtatttaattgcaaatttattgagtcagaattttccacaggctctgaacacgcaggtagaatagatacattggctttgtcagaagattataatcctgtaattattgaatacaaaaaaattgcttcatctgaattggtaaaccaaagtttgtattatttatcatggattaaagatcataaaggagattttcaagtagctgtaaataaaagattaggtaaaaatattgaaattgactgggatgatattcgtgtaatatgtattgctccggaatataaaaaatttgatcttcatgctgtaaggatgatggggggcaaatatagaattatggcaatataa

SEQ ID NO: 6318 - protein, 146 aa, Unknown
  Obtained from environmental sample
  misc_feature (1)..(146): Xaa is any amino acid
MPLFHIDKNKLTTAKLINFSKEKEIQTLIENNLEVVFNCKFIESEFSTGSEHAGRIDTLALSEDYNPVIIEYKKIASSELVNQSLYYLSWIKDHKGDFQVAVNKRLGKNIEIDWDDIRVICIAPEYKKFDLHAVRMMGGKYRIMAI

SEQ ID NO: 6319 - DNA, 468 bp, Unknown
  Obtained from environmental sample
  misc_feature (1)..(468): n is a, c, g, or t
atgaaaaaatatttaatagtattttgcctggtattctttatcgccggtttcgcggcggcccaggtcggtcccaacgcgacattatatgtggcggttaaaaccatagacttgaaatcatcaacagggaaaaaagtggcaaccttaagttacggcgacaaggttacggtgacacaggtaaaggagaaggagaaatccgtggaagttaagagcgcgacggatccctctttaatcggttgggctccaacggcaaatttttccacaaagaagattatcgccggaagtacgtcaacaacatcggcaaaagaagtagcccttgccggaaaaggttttaatcaggatattgaaaactcctacagttcgcagggagaggttaattttgacgatgtggacaaaatagaggcgataacgacggatgaagccgtactaatacgttttattgaagaaggtcatttgtcttcgggaaaatag

SEQ ID NO: 6320 - protein, 155 aa, Unknown
  Obtained from environmental sample
  SIGNAL (1)...(20)
  misc_feature (1)..(155): Xaa is any amino acid
MKKYLIVFCLVFFIAGFAAAQVGPNATLYVAVKTIDLKSSTGKKVATLSYGDKVTVTQVKEKEKSVEVKSATDPSLIGWAPTANFSTKKIIAGSTSTTSAKEVALAGKGFNQDIENSYSSQGEVNFDDVDKIEAITTDEAVLIRFIEEGHLSSGK

SEQ ID NO: 6321 - DNA, 894 bp, Unknown
  Obtained from environmental sample
  misc_feature (1)..(894): n is a, c, g, or t
gtgggctgcgcaggcagtatcgctggggcgcaaaacggcggcagcgctctgcaagtgggcggatactgcggaggtctttctgttcccagttccaatgtgtgcgaacaggacatgntattcggcggaacggatcgtctgcaagaacaaatagagtccaccatcgagctgatggaggggcggctgtatgtggtaataaccggctgcgtaactgaaattatcggggacgacattcgttctgtaacaagcgaattctccgatagggtcgatattgtcgccgccaatacgggcggatttaaaggcaactcctatctgggttacgatattgtcctgtcggagatcgtcaagcggtatgtgaaaaagggagccgagaaaaaaaagaaatccgtaaatattttaggcatcgtcccctacatggactgtttctggcgcggaaaccttatcggagtcaggcggctgttggaaaaaataggagtgcaggtaaacaccttctttacggacgaagatacattagacggcgtaaagaattcatcttcagccgaattaaacatcgtcctttccgacgtatacggactggaaaccgcaaagacttacgaggagacacataacattccttacattacggcgactttgcccgtgggtcccaccgcgagcgcggaacttttaagaactgttgcaaaagctttaaaattggatattgacgttgaggcaatcatcgaagcggaatcccgtcggtattataaatacattacacctttggttgatgtgtacaacgacgttgatttgcaaaagtattccgtcattgtcggcgatgttaactacgccgtagcgttgacccgcttccttaccgacgacttaggctggtcgcccgtactggttcaatttaccgatccgtaa

SEQ ID NO: 6322 - protein, 297 aa, Unknown
  Obtained from environmental sample
  DOMAIN (1)...(295): Nitrogenase component 1 type Oxidoreductase
  misc_feature (1)..(297): Xaa is any amino acid
MGCAGSIAGAQNGGSALQVGGYCGGLSVPSSNVCEQDMXFGGTDRLQEQIESTIELMEGRLYVVITGCVTEIIGDDIRSVTSEFSDRVDIVAANTGGFKGNSYLGYDIVLSEIVKRYVKKGAEKKKKSVNILGIVPYMDCFWRGNLIGVRRLLEKIGVQVNTFFTDEDTLDGVKNSSSAELNIVLSDVYGLETAKTYEETHNIPYITATLPVGPTASAELLRTVAKALKLDIDVEAIIEAESRRYYKYITPLVDVYNDVDLQKYSVIVGDVNYAVALTRFLTDDLGWSPVLVQFTDP

SEQ ID NO: 6323 - DNA, 633 bp, Unknown
  Obtained from environmental sample
  misc_feature (1)..(633): n is a, c, g, or t
atgacagattcggccgagagcgcttacgcggagcttgtgcttactcccggcaaggacggcatgaagggcgcaatcagaaaagccgaggagctttcgctcttttttgaaaaatcttttattcctcagcagtttaacaatcccgctaacgcccgcgttcaccgcgagaccaccgccgttgaaatctggaacgatcttgacggagagcttgacgtatttgtggcgggcgtcggaacgggcggcactatcacaggtgtcggcgaagttttaaaagaaaaaaatcccaagataaaaattgtagccgtggagccttttgactctcccgtactttcgggcggcgttccgggaccgcacaagattcaaggcatcggcgcgggattcattccgaatgtactgaacacaaaagtaatagatgaagtatttaaagtaagaacggaacaagcctttgaaaccgcgcaggacttggcgcggacggaagggcttttagtcggtatatcttcggcggcggcggctttcgcggcggcggagattgcgaaacgttcggaatacaaaggcaagaccgttgtggctctgctgcccgacacgggagaaagatacctttccaccccgttgtttgacagaccgcaagcaatataa

SEQ ID NO: 6324 - protein, 210 aa, Unknown
  Obtained from environmental sample
  DOMAIN (1)...(194): Pyridoxal-phosphate dependent enzyme
  misc_feature (1)..(210): Xaa is any amino acid
MTDSAESAYAELVLTPGKDGMKGAIRKAEELSLFFEKSFIPQQFNNPANARVHRETTAVEIWNDLDGELDVFVAGVGTGGTITGVGEVLKEKNPKIKIVAVEPFDSPVLSGGVPGPHKIQGIGAGFIPNVLNTKVIDEVFKVRTEQAFETAQDLARTEGLLVGISSAAAAFAAAEIAKRSEYKGKTVVALLPDTGERYLSTPLFDRPQAI

SEQ ID NO: 6325 - DNA, 867 bp, Unknown
  Obtained from environmental sample
  misc_feature (1)..(867): n is a, c, g, or t
atgaaggaaataattaaaaatgtagaaatattttttccattattagatcctgagttgaaaactgatgacagcagtttttttgaaaaaacaaccaaagatataaccgatacggaagaattgaaaaaatataaaaaagtgtatattctgtccattttaattatcagtcaattgcatgtaaataataaaaatgagaaatcagtagcttattatacaaataaaactaccttgcagaaaatgttgctcaatgataatgcgttcagattaaatgccattaattattccaatgaccccaccgaggggcaagttttagttgattacctttttgagagaggaaaatatccttcaaaagaatttaactcaggatatggggcatttgctggttgttttacatttaaccacgatagtttgaatcaattccgtctttacggcaaagagggcaacattgaagggacaggattgtcgcttgtttttaagaccaccttttttagcagggaagcgaaaatggcggtaaagcagaccaccttttttggcagggaggagaaaatggtggtaaagcaagaaaatatatccgcagaagataagctgcaagcactgttccgatgtatatatattgatccagagacgcggcgggtagaaacagtggggcgaaaagaaaaatatcttttttaccacgaaaataatgataaggagtcggataaggatacagaaaatagaataaacgaatataacagttatattacggatataatagaaagtgtcgaacaagaaatggaagaattaaaacaaatagtcgaaaatttaagacctgagataataggaccgttactgattaatttacgctatcttactaaacacattgccttttag

SEQ ID NO: 6326 - protein, 288 aa, Unknown
  Obtained from environmental sample
  misc_feature (1)..(288): Xaa is any amino acid
MKEIIKNVEIFFPLLDPELKTDDSSFFEKTTKDITDTEELKKYKKVYILSILIISQLHVNNKNEKSVAYYTNKTTLQKMLLNDNAFRLNAINYSNDPTEGQVLVDYLFERGKYPSKEFNSGYGAFAGCFTFNHDSLNQFRLYGKEGNIEGTGLSLVFKTTFFSREAKMAVKQTTFFGREEKMVVKQENISAEDKLQALFRCIYIDPETRRVETVGRKEKYLFYHENNDKESDKDTENRINEYNSYITDIIESVEQEMEELKQIVENLRPEIIGPLLINLRYLTKHIAF

SEQ ID NO: 6327 - DNA, 654 bp, Unknown
  Obtained from environmental sample
  misc_feature (1)..(654): n is a, c, g, or t
atgttgtcagcctggtcttcggtggcggaggatttgaacaaggaagcgccattaaagtcaatgggggcctcagagttggcagtcacgtgggtgatgtcggtattaatgcccatggctacttcgactggtaacagcagaactaaattacaatttccgcagtctaatatacgagggggcaggagaagtgtgaagggagatgaaacgccggaataccttgcaggccgggcatcgcggggcgacgaagacagttttgccgctctatgcggcgttttgaaaacgaagcttttccgtacggcgaaaggcgtacttggcaatgaaaccctcgcccttgacgccgtcagtgaagctgtcttccgggcgtataagggaattaagcggctccgcgaacccaaatacgcggaaacatggtttatccgcatcgtattgaatgtggcaaaggatattaagaggaggcaaaagcatgagatagttatggggacagtgcctgaaggcgcgcattacgataatcacggcgatatggaatttttcgccctgattgaacctttacaaaaggagcttcgcgaaatcatcagtttgaagtattattccggttatacgctttcagaaatatcggaaatactgaacataccggaggaacggttaaaagccgtttaa

SEQ ID NO: 6328 - protein, 217 aa, Unknown
  Obtained from environmental sample
  DOMAIN (87)...(155): Sigma-70 region 2
  misc_feature (1)..(217): Xaa is any amino acid
MLSAWSSVAEDLNKEAPLKSMGASELAVTWVMSVLMPMATSTGNSRTKLQFPQSNIRGGRRSVKGDETPEYLAGRASRGDEDSFAALCGVLKTKLFRTAKGVLGNETLALDAVSEAVFRAYKGIKRLREPKYAETWFIRIVLNVAKDIKRRQKHEIVMGTVPEGAHYDNHGDMEFFALIEPLQKELREIISLKYYSGYTLSEISEILNIPEERLKAV

SEQ ID NO: 6329 - DNA, 816 bp, Unknown
  Obtained from environmental sample
  misc_feature (1)..(816): n is a, c, g, or t
gtgtctcaatattacacggaaacaaaatcgtattttcagcgggcggcaaaaggggaaacgtatttgttaaacgcgtataatcatttttccatgcatttgctggctttgtttttccagatgccgcctgttccaaagacggaaggacgcgccgttttgattcttttttcgcccgtgtattttaacagcaatctaagttacggtataaatcaatcttttttaataaataccggcggcgacgttctggttcacccgaattttgaaatggtaaagaattccgcaaatatttcccacatggattatatcggcaggattcgcgagaatgtcatgttaagcaggcaggatttacgcgaagttgacggggtaaactattatatcgctttttcaaaattaaaagcggacgcgtccattgtaattacaagaattgaatacgataaaatatttgaggaaataaacgcggtaacgcgccgtaatatttatttatccctcgttatcatatttatatcgatactttttgtccgctacttttccggagccatttccggtgatttgttaattctctgcgccgccgcgcaaaaacttgaaagcggcgattttaacctcgatttagagccgagagcccgcgatgaaatcggttttcttacatacaactttcagcgtatgagcgccgcgttaggcgcttttgggcagtttgcgaaccgtgaaattgcgcttaaagccatgcgcggcgaaataaaacccggcggcgcgcttaaaaacgcctcaatttcattctgcggcattcgcggcttttcccaaagattaaaatttcgcgaataa

SEQ ID NO: 6330 - protein, 271 aa, Unknown
  Obtained from environmental sample
  DOMAIN (157)...(226): HAMP domain
  misc_feature (1)..(271): Xaa is any amino acid
MSQYYTETKSYFQRAAKGETYLLNAYNHFSMHLLALFFQMPPVPKTEGRAVLILFSPVYFNSNLSYGINQSFLINTGGDVLVHPNFEMVKNSANISHMDYIGRIRENVMLSRQDLREVDGVNYYIAFSKLKADASIVITRIEYDKIFEEINAVTRRNIYLSLVIIFISILFVRYFSGAISGDLLILCAAAQKLESGDFNLDLEPRARDEIGFLTYNFQRMSAALGAFGQFANREIALKAMRGEIKPGGALKNASISFCGIRGFSQRLKFRE

SEQ ID NO: 6331 - DNA, 603 bp, Unknown
  Obtained from environmental sample
  misc_feature (1)..(603): n is a, c, g, or t
ttgtgtggatcggagcagcaggaggaattttattcgcagattaccgcgtccgcggtgaatctgagcagaaaatttcattttgacgagccccacgcccgccatgtcgcgaatctttgcatgacgctttttgacgcgctggaaaaggaacacggcatgaattcccgccagcgcatgatgttgaaaacagccgccattctccacgacataggggcctttataagaacctcgggccacaacaggcacggccagtacattgtttcccattcggaaatattcggactgccccgcgacgaactggatataatcgccaatgttatacgctaccaccagggacgcgaaccaacgcaggcggacattgaatatataagccttcagagggaagaaaggatcatagtgctgaagatggcttccattctgcgggtcgccgacgcccttgacagggggcatacccagcacctgaaaaacctcagcgtggagcgcagagccgaaacaatcgccctgcacgcgcagggcgcctatgacatctcacaggaactcatcgcgctggaagaaaaagccgactacttccaggcggtgtttggatataaaatcgttcttaactaa

SEQ ID NO: 6332 - protein, 200 aa, Unknown
  Obtained from environmental sample
  DOMAIN (28)...(148): HD domain
  misc_feature (1)..(200): Xaa is any amino acid
MCGSEQQEEFYSQITASAVNLSRKFHFDEPHARHVANLCMTLFDALEKEHGMNSRQRMMLKTAAILHDIGAFIRTSGHNRHGQYIVSHSEIFGLPRDELDIIANVIRYHQGREPTQADIEYISLQREERIIVLKMASILRVADALDRGHTQHLKNLSVERRAETIALHAQGAYDISQELIALEEKADYFQAVFGYKIVLN

SEQ ID NO: 6333 - DNA, 672 bp, Unknown
  Obtained from environmental sample
  misc_feature (1)..(672): n is a, c, g, or t
gtgcttaatgctgctggcattgccgcgctggcaacgatgctggcggatctgctgccgctggatagctttattcgcccagtcgcccctgtgctggcagggacaccgtggctggccatacacgtgccaatcatcatggccggatacgccctattggccatgggaatggcggcggcccacttgcatcttggtgcacacgtcttttgcactcgagggagcgatggcagtgcattggcggataaattttatgacatgctacattggtacaatattatcgggtcatttttattgctggcggggataattactggctcgatgtgggcatcatcgtcttggggaaggtgctggggctgggaccccaaagaagtgtggtcgctggtggccctcttggcttacattgcgatagcccatgctcgcgccgctgggctgattggaaaacttggcaccgcgatttgcagcgtcctagcctttcagacgatcctgatggcctacttgggcgtcaactatgtcttggcgacgggcctgcactcctacggcatgggcaactcgccgatggcgatgtggctgctgattgtcggtgtggtagagttggcgtttgttggcgcggcttcaagggggcatggaatagggctggacttgtcgagcgttcgctcactccgccgccctaagccttaa

SEQ ID NO: 6334 - protein, 223 aa, Unknown
  Obtained from environmental sample
  DOMAIN (1)...(175): Cytochrome C assembly protein
  misc_feature (1)..(223): Xaa is any amino acid
MLNAAGIAALATMLADLLPLDSFIRPVAPVLAGTPWLAIHVPIIMAGYALLAMGMAAAHLHLGAHVFCTRGSDGSALADKFYDMLHWYNIIGSFLLLAGIITGSMWASSSWGRCWGWDPKEVWSLVALLAYIAIAHARAAGLIGKLGTAICSVLAFQTILMAYLGVNYVLATGLHSYGMGNSPMAMWLLIVGVVELAFVGAASRGHGIGLDLSSVRSLRRPKP

SEQ ID NO: 6335 - DNA, 945 bp, Unknown
  Obtained from environmental sample
  misc_feature (1)..(945): n is a, c, g, or t
ttgggtactcactttttgcaacaggaaattttaaacgctttaaatgagttgcaaattccgcacataaccttgcagcaagaaaatgaaaatccctcagcacaagagtccgagcttatggagctttttcaaaagaacattccccgccttgttctctgtgtgaatgcaaagggcttggattccgagggtattttgctgagcgtgtgcaaaagattttccgtgccaatacatatttggtttgtggacgacccacgccccatagcttgtttgctgaacaaatcccaatgcaaaaacatattcgcatggacttgggaaaaggcttatatcccgtggctaaaggagaaaggctttgccgatgcgcagtggctacccctagctggagacccgcatctattttatccgcaaaacaaaaaaactatttacgatttgctcttcaccggctctgcaatggcggaaaattttttgaacaaaatatgggaacgtattccttacgataaagaagaagctctacctatagcacagaatacggctttccacgttctgacgggaaaaatcaacgcagagcatatcccagtcgataccagagatgaggcttggtttgcgagttattgcattcatctagcgagcaatgaaaagcgacgtttgtgtttggagccgctgctgcatttgggtttgcaattcgcaggcgacccgcaaggatggaaaatgatgtttggaccagcaataaaaaccctgccagacatagattaccgcaagggtttgaattctcattactctttgggaaacattcacataaacataaccagttgccaaatgcctggtgcggtcaatcaaagagtttttgacatccccctttgcgagcgttttgttatcagcgacacccagagtgatttgtttgaacttttcccgcaaaatgcgatatgcgtagccaattcccccgaagaatag

SEQ ID NO: 6336 - protein, 314 aa, Unknown
  Obtained from environmental sample
  misc_feature (1)..(314): Xaa is any amino acid
MGTHFLQQEILNALNELQIPHITLQQENENPSAQESELMELFQKNIPRLVLCVNAKGLDSEGILLSVCKRFSVPIHIWFVDDPRPIACLLNKSQCKNIFAWTWEKAYIPWLKEKGFADAQWLPLAGDPHLFYPQNKKTIYDLLFTGSAMAENFLNKIWERIPYDKEEALPIAQNTAFHVLTGKINAEHIPVDTRDEAWFASYCIHLASNEKRRLCLEPLLHLGLQFAGDPQGWKMMFGPAIKTLPDIDYRKGLNSHYSLGNIHINITSCQMPGAVNQRVFDIPLCERFVISDTQSDLFELFPQNAICVANSPEE

SEQ ID NO: 6337 - DNA, 891 bp, Unknown
  Obtained from environmental sample
  misc_feature (1)..(891): n is a, c, g, or t
ttgcggctcgctgggcagataggcagcggcttggagggtgttctctacgttcttgacgaacctaccataggcttgcaccaaagcgacaccaaaaaacttttggattcactttataaactgcgcgatttggggaacaccatcgtggttgttgagcacgatttggaatttataagagcaagcgattatgttgtggatttaggcccaagggcgggagaatttgggggagaggttgtggcaactggaactccaaaagaaatatcaaatgcagccgctaaattcccgcacagcttgacaatcccttatttggcgggaaaaaaaactctctgcgatacggaacacaaggcattggatatgagccaaggagacaatttttttgaactgaacaaccttgcaaaaaacaaccttaaaaatatctccgtgaaaattccgtttggggctataacagcaatttctggggttagcggttccggcaaaagtactcttatggagtgcatttacgactacgcagaaaaaaagaaaaagcctgtttgctttatagaccaaactcccataaattcaagccctcgctctacgcctgtgagctatatgagcattttggaaaaactgagggctttattcgccaagttaccggagagcaaaacgcgcggttatgatattgggcgctttgcctacaacaaagagggcggccgctgcgaagtgtgcgaaggcaggggctaccagttgatagagatgcactttctctccgatgtctgggagctttgcgatgaatgcaaaggcaaaagatataacaaagaaactctaaaaattttgtggaaaggcaaaagcatagcggatattttggatatgcgtatagaagtagcttgcgagttttttaaaatatcgcaaaaataa

SEQ ID NO: 6338 - protein, 296 aa, Unknown
  Obtained from environmental sample
  misc_feature (1)..(296): Xaa is any amino acid
MRLAGQIGSGLEGVLYVLDEPTIGLHQSDTKKLLDSLYKLRDLGNTIVVVEHDLEFIRASDYVVDLGPRAGEFGGEVVATGTPKEISNAAAKFPHSLTIPYLAGKKTLCDTEHKALDMSQGDNFFELNNLAKNNLKNISVKIPFGAITAISGVSGSGKSTLMECIYDYAEKKKKPVCFIDQTPINSSPRSTPVSYMSILEKLRALFAKLPESKTRGYDIGRFAYNKEGGRCEVCEGRGYQLIEMHFLSDVWELCDECKGKRYNKETLKILWKGKSIADILDMRIEVACEFFKISQK

SEQ ID NO: 6339 - DNA, 720 bp, Unknown
  Obtained from environmental sample
  misc_feature (1)..(720): n is a, c, g, or t
atggtatttttgctgaatttttactctgcgctttttattgttttaacttctccatatcagcagaatcctgcatcggctttgggacacgtgtttcttttgcaagcagattcgctttcatatcctttatggaacacaatagaatttgtgtcagaaacgagagatgccagtaaactcagttatataccgaaaggcatatatggcggctttgtggcaaattatgaaataatgccattttatgaaaaaattcataaatacgtggataaagagaaacgtgatttgtttatttacccgcttaaaatttcaaatgcggaactagcaaaattcaacgatactttaaattcttggaaaacaaaaggagattcatataaatttttcacaaataattgtgtagacggaatttataatttgctgaaaaacacccttgattctgttcaagaagctcctgttttgctaaccccgcaaaatttaatcaggttattaaatgaaagtggcaaaatagaaaaaccgatattgctacaatcttctggagccgaaaaagaagaggaaaattttaccccgcaaaaagatatgcaacttcctcacaaatacagccgctttgacattggaatgttattccttgaaaaattttatacgaatttgcgttttaggttatttttacacgatgtaagtgattatgggggctattattcaaatttcataaattttgaagtattcgcttga

SEQ ID NO: 6340 - protein, 239 aa, Unknown
  Obtained from environmental sample
  SIGNAL (1)...(21)
  misc_feature (1)..(239): Xaa is any amino acid
MVFLLNFYSALFIVLTSPYQQNPASALGHVFLLQADSLSYPLWNTIEFVSETRDASKLSYIPKGIYGGFVANYEIMPFYEKIHKYVDKEKRDLFIYPLKISNAELAKFNDTLNSWKTKGDSYKFFTNNCVDGIYNLLKNTLDSVQEAPVLLTPQNLIRLLNESGKIEKPILLQSSGAEKEEENFTPQKDMQLPHKYSRFDIGMLFLEKFYTNLRFRLFLHDVSDYGGYYSNFINFEVFA

SEQ ID NO: 6341 - DNA, 834 bp, Unknown
  Obtained from environmental sample
  misc_feature (1)..(834): n is a, c, g, or t
ttgtaccggggatttttggtcgattttgtagttgtgtgcgagaacccaatcgaaatcatggaatacaaccctgccctttccggcgatatacacgttcccgcttcgcaaatggattattatataaacaaactgtcctcaaataaaaatgatgcggctattaaaaacgcagccgaagatgatacagccggaattataggcgaacgcgccgccagggaattgcgctccggccagatagttaatttaggcatcggctttcctgaaatggtaggaatatacgcttctaaaattggcatcttaaaagatattactattactgttgaagcgggcggtataggcgggcttccggcgcctggctttgcgtttggtgcaacaatcggcgcggatattatcaccgatatggcgacccagtttgatttttatgacggtggcggacttgacatctgctttttgggagggttggaagccgatagagaaggcaacgtgaatgctcataaactggaaggaagttacgcaggaatcggcggctttgccaacatcactcacgctacaaaaaccgtagtgttctgcatgagttttacaactaaagggcttctcacaacaaatgagaatggcaggatacaaataaagcaggaaggctcaataactaaattcaaaaaatcagtttccgcgatcagtttctccggtaaaaacgccgtcaggcgcgggcagagagtgttgtatgttaccgaacgatgcgtattcgagttgaccgtaaaagggctcaagttaaaagaggtatatcccggaattgacgaaacgcgccaaattcgcaatatgctggattttgagtgctga

SEQ ID NO: 6342 - protein, 277 aa, Unknown
  Obtained from environmental sample
  DOMAIN (62)...(271): Coenzyme A transferase
  misc_feature (1)..(277): Xaa is any amino acid
MYRGFLVDFVVVCENPIEIMEYNPALSGDIHVPASQMDYYINKLSSNKNDAAIKNAAEDDTAGIIGERAARELRSGQIVNLGIGFPEMVGIYASKIGILKDITITVEAGGIGGLPAPGFAFGATIGADIITDMATQFDFYDGGGLDICFLGGLEADREGNVNAHKLEGSYAGIGGFANITHATKTVVFCMSFTTKGLLTTNENGRIQIKQEGSITKFKKSVSAISFSGKNAVRRGQRVLYVTERCVFELTVKGLKLKEVYPGIDETRQIRNMLDFEC

SEQ ID NO: 6343 - DNA, 720 bp, Unknown
  Obtained from environmental sample
  misc_feature (1)..(720): n is a, c, g, or t
atgaatatagcggcgcatcaacttaatttcaaggaactgaacaaaatgataagaaccgccaaggaggctgtctgcatagacggctgtttcgggcagcggtttatcgccagcggcatgaccgacaaaaacctgacgattaacggaacgccggggaacgcgttaggcgcttactttaacggcggaaccattatggtaaacggtaacgctcaggacgccgtaggcgacacgatgaatgacggtaaaataatcattcacggcagcgccggtgacgcgctgggctacgccatgaggggcggggaaatttatgtccgcgacaacgcgggatacagaactggaattcacatgaaggaatacagggaaaaaaagcctgtaatcgtcattggcggtagagcaggcagttttttgggtgaatacctcgccggcgggctcattgtggttcttggaataggctgtaataatgaaatcccggtctggtattttacgggaaccggaatgcacggcggaaaaatctttatcagaaccaacaaggaactctcttcactcccggcgcaggtcattgaggaagtagccgatgaccatgatctgcatgagattgcgccgtatgtcggagagtttgcgaaatatttcggcatggacgcgcagcagttgttgaaagacaggtattatgtgttgaaacctaacgcgaggaacccgtataagcagttatatacggccaattag

SEQ ID NO: 6344 - protein, 239 aa, Unknown
  Obtained from environmental sample
  DOMAIN (1)...(209): GXGXG motif
  misc_feature (1)..(239): Xaa is any amino acid
MNIAAHQLNFKELNKMIRTAKEAVCIDGCFGQRFIASGMTDKNLTINGTPGNALGAYFNGGTIMVNGNAQDAVGDTMNDGKIIIHGSAGDALGYAMRGGEIYVRDNAGYRTGIHMKEYREKKPVIVIGGRAGSFLGEYLAGGLIVVLGIGCNNEIPVWYFTGTGMHGGKIFIRTNKELSSLPAQVIEEVADDHDLHEIAPYVGEFAKYFGMDAQQLLKDRYYVLKPNARNPYKQLYTAN

SEQ ID NO: 6345 - DNA, 705 bp, Unknown
  Obtained from environmental sample
  misc_feature (1)..(705): n is a, c, g, or t
ttgctcttcattccaaaaaatttgagattacttgtacttttctatatacttatagcaggagtattaatgcttatagggcttaccgggaagtattgcgctggaaaaaactatgcggcggcctttttggaaaaacgcgggcttccggttctggatgtggataaactgggacatatagcccttgaaaataaaaaggacgaagttttttaccgttttggaaatgagttaaaaaacccggacggatcggttaaccggcgcttgcttgggaaaaaggtctttgggaaaaaagacgctattaccgcgctggaagcgattgtccacccgcaggccgatcgtatgatactggaatggattgcctcgcaaaacggcaaaacctgcgttataaacgcggcgttgctccacaaatcggcggtttttgggcaatttgactgcgttttattgattaccgccccgttctttgtccggctgttacgggcaaagcgcagggacaggctctcctggatttcaattttaaggagattaatgagccagaagcgttttactcttcaatatttggccggaaatgccgatatttacatagtagaaaaccttgggacaggaggttttttaccaggttccgccggcaagaaatcaaaacttgaacggcagatcaacgagattctgcaaaaaatagagcttaaaaacaataaaattcaaggaggtctttag

SEQ ID NO: 6346 - protein, 234 aa, Unknown
  Obtained from environmental sample
  SIGNAL (1)...(24)
  DOMAIN (23)...(200): Dephospho-CoA kinase
  misc_feature (1)..(234): Xaa is any amino acid
MLFIPKNLRLLVLFYILIAGVLMLIGLTGKYCAGKNYAAAFLEKRGLPVLDVDKLGHIALENKKDEVFYRFGNELKNPDGSVNRRLLGKKVFGKKDAITALEAIVHPQADRMILEWIASQNGKTCVINAALLHKSAVFGQFDCVLLITAPFFVRLLRAKRRDRLSWISILRRLMSQKRFTLQYLAGNADIYIVENLGTGGFLPGSAGKKSKLERQINEILQKIELKNNKIQGGL

SEQ ID NO: 6347 - DNA, 1008 bp, Unknown
  Obtained from environmental sample
  misc_feature (1)..(1008): n is a, c, g, or t
atgggatttaaaagtatgcgtgggtttgacccggatgcgccaacgagcgatttgtcatttcncagtgaagaaaacctgacntgcctttcccggtgcatcgtaataaatgatgatgattttgatgngcagggagacgctcccctgaattacccgtgcgctttcagtatcctctacgaaacacatgttaaggggttaaccgcccatcctcattcaaaagttaaacatccgggaacctttttaggcgttatcgaaaaaattccctactttaaggaactgggtattaccagcctggaattcctccctatacatgaattcaacgagcatgaattcccccgaatcaatccccgtaccggcaatccgttgaccaattattggggttattccaccgtggctttttttgcccccaaggaatcttacgccgttgaccatagccccggagcccaagtaaatgaatttaaactcatggtgagggaactgcacaaggcgggaatagaggtgattttagacatcgtatttaaccacactgccgaaggtaacgaacagggaccgactttttcttttcggggactggacaatcccatttattacatattgagcgagaacaagcgctattatcaaaactactccggctgcggcaatacggtcaactgtaatcatcccgttgtccgtacctttatcatgaactgtcttcattattgggtagttgaaatgcacgttgacggtttccgttttgatctggggtcgattttggggcgggaccagcagggccgtctcatggaatctccgccgatgctggagcggattgccgaagaccccattttaagctccgccaagataatcgccgaggcctgggatgccggaggggcgtatcaggtgggctggttccccggcggacggtgggcggaatggaatgaccgctaccgcgataatgtccgcaaatactggcgaggggatcccaaagaaacccgctatcttgccacacggcttcgggcagtctcggccatctga

SEQ ID NO: 6348 - protein, 335 aa, Unknown
  Obtained from environmental sample
  DOMAIN (59)...(335): Alpha amylase, catalytic domain
  misc_feature (1)..(335): Xaa is any amino acid
MGFKSMRGFDPDAPTSDLSFXSEENLTCLSRCIVINDDDFDXQGDAPLNYPCAFSILYETHVKGLTAHPHSKVKHPGTFLGVIEKIPYFKELGITSLEFLPIHEFNEHEFPRINPRTGNPLTNYWGYSTVAFFAPKESYAVDHSPGAQVNEFKLMVRELHKAGIEVILDIVFNHTAEGNEQGPTFSFRGLDNPIYYILSENKRYYQNYSGCGNTVNCNHPVVRTFIMNCLHYWVVEMHVDGFRFDLGSILGRDQQGRLMESPPMLERIAEDPILSSAKIIAEAWDAGGAYQVGWFPGGRWAEWNDRYRDNVRKYWRGDPKETRYLATRLRAVSAI

SEQ ID NO: 6349 - DNA, 306 bp, Unknown
  Obtained from environmental sample
  misc_feature (1)..(306): n is a, c, g, or t
atgagtatgggcgcgaccgccggcgctgtgttgcgggtttttatgctcaacggcattgtggtgggcttcttcgggtcaacgataggcgtaaccttaggcgcggcgctcggtctgctgcagcagaagtggcgcttcattcccatacccggcgatttatactttgtcaacacgctgcctatggaggtgagcccgcttgacgtggggattatctatatagccgcgaatctgatatgctgggcggccacgatctatcccgcgagggcggcggcggcgctgttgccggcggagtctatacggtatgagtga

SEQ ID NO: 6350 - protein, 101 aa, Unknown
  Obtained from environmental sample
  misc_feature (1)..(101): Xaa is any amino acid
MSMGATAGAVLRVFMLNGIVVGFFGSTIGVTLGAALGLLQQKWRFIPIPGDLYFVNTLPMEVSPLDVGIIYIAANLICWAATIYPARAAAALLPAESIRYE

SEQ ID NO: 6351 - DNA, 498 bp, Unknown
  Obtained from environmental sample
  misc_feature (1)..(498): n is a, c, g, or t
atgactttcatcgccgataacacgttccatatagaacgctctccgctttatacagataatttgtcgatcaacggaatagggaccgtagaatttatccgcgccaagggcgacaacttaattcttgtcgaagcaaaggaagcttttccaaaaccggacgaagacccaagcgccaagaagcgtagacagtttgagattagtgtggaagaagtttgcgagaagtttgtacattcgctgaatctatactcgtccgtcaaagtcggggttagggaaacccaattgccggaagattttctgccgccggataaagttacgcttaaattcgtcttggtcgtgaaaaaccacaaactagaatggtgcagaaacatcaaaaccgcgctcgatgaggctctaccatcatatctgcgtaagatttggaaacctatggtgtacgttataaatcacgatacagccataacgcgcaatttggctgttataccggagggaaacatcaatggctga

SEQ ID NO: 6352 - protein, 165 aa, Unknown
  Obtained from environmental sample
  misc_feature (1)..(165): Xaa is any amino acid
MTFIADNTFHIERSPLYTDNLSINGIGTVEFIRAKGDNLILVEAKEAFPKPDEDPSAKKRRQFEISVEEVCEKFVHSLNLYSSVKVGVRETQLPEDFLPPDKVTLKFVLVVKNHKLEWCRNIKTALDEALPSYLRKIWKPMVYVINHDTAITRNLAVIPEGNING

SEQ ID NO: 6353 - DNA, 564 bp, Unknown
  Obtained from environmental sample
  misc_feature (1)..(564): n is a, c, g, or t
atggaaatgccacaatttaatgaaatgtttaaccctcttttagaagccttacatgaactgggtggttctggctcaattgaagagataaacaataaggtcattgaattacaaaattaccctgctgagattgttgatgtaattcatggagaggggccaagaactgaaatagaatatagattggcttggtcaagaacttatctaaagaaatatggtttgctcgaaaattctagtcgtggaatatgggcaatttcgaatgataaacgtaatataaaaaaaataaatcaaaaagaagtggtagactttgtacattcattatcaaaagacaaaaaagataaaagtactgataattcaattatcgaagataatgatgaagataatgaaaatgaaaacaaaacatggcaagaagaattaattgaattattattttcattatctccagatgcttttgaaagacttgttcaaagaatactacgtgaatcangattttcacaagtcgaagtttactggaaaactggcgatggcggaatagacggaaaggaatatttaaatagctggcccttatag

SEQ ID NO: 6354 - protein, 187 aa, Unknown
  Obtained from environmental sample
  misc_feature (1)..(187): Xaa is any amino acid
MEMPQFNEMFNPLLEALHELGGSGSIEEINNKVIELQNYPAEIVDVIHGEGPRTEIEYRLAWSRTYLKKYGLLENSSRGIWAISNDKRNIKKINQKEVVDFVHSLSKDKKDKSTDNSIIEDNDEDNENENKTWQEELIELLFSLSPDAFERLVQRILRESXFSQVEVYWKTGDGGIDGKEYLNSWPL

SEQ ID NO: 6355 - DNA, 375 bp, Unknown
  Obtained from environmental sample
  misc_feature (1)..(375): n is a, c, g, or t
gtgcttaatgacgagaaatcaatcgaaaaactctgtaaagcttgtacgccccacggcgctcctcttgccattgttatttgtgcggaaaaaaccagcgcatgggtgcgcccatttgacaaagccaatatgggcgagattgacagcacaatagccgccgaccatatgatgatgtgcgcccaggatttagggctttcttcctgttggataacgtattttgaccctaaaatcgtccgcaaagaatttaacatacccgatgatattataccctttaatatccttgttattggttatggggcagacgagccgcaatctcctgatcgccatgcacaaacaaggaaaccgcttgattctatagtcaagtattcatcattttag

SEQ ID NO: 6356 - protein, 124 aa, Unknown
  Obtained from environmental sample
  misc_feature (1)..(124): Xaa is any amino acid
MLNDEKSIEKLCKACTPHGAPLAIVICAEKTSAWVRPFDKANMGEIDSTIAADHMMMCAQDLGLSSCWITYFDPKIVRKEFNIPDDIIPFNILVIGYGADEPQSPDRHAQTRKPLDSIVKYSSF

SEQ ID NO: 6357 - DNA, 453 bp, Unknown
  Obtained from environmental sample
  misc_feature (1)..(453): n is a, c, g, or t
ttgcgccttattcttgagaaagaccaggtagtactgaccaaaggcgccgatccctgcctttggttatatactgccgaggactggaaagagcgactaaagacgattgtggatactacggaccctgattctgcccgaggccgcgacatacggaggcgttatatcggtcctgctcatcctcttgacatggataagcagggaagagttttgattgctccgcctttgcgtgaatttgccgggttatccagggagtgtgtggtagtaggtcagcacagttacattgaaatttgggataaagagcgctacaaagcgtatgaatgcagtcaggataagtacgaagaaaggtccgagatattcgccaaagagaaaaaggaactaagaaatgatggaaatagcgcacacgccggcgttactggaggagaccatacagtatctcgctccgaggggcaggtgtga

SEQ ID NO: 6358 - protein, 150 aa, Unknown
  Obtained from environmental sample
  DOMAIN (53)...(125): MraZ protein
  misc_feature (1)..(150): Xaa is any amino acid
MRLILEKDQVVLTKGADPCLWLYTAEDWKERLKTIVDTTDPDSARGRDIRRRYIGPAHPLDMDKQGRVLIAPPLREFAGLSRECVVVGQHSYIEIWDKERYKAYECSQDKYEERSEIFAKEKKELRNDGNSAHAGVTGGDHTVSRSEGQV

SEQ ID NO: 6359 - DNA, 975 bp, Unknown
  Obtained from environmental sample
  misc_feature (1)..(975): n is a, c, g, or t
gtgcgggcttgcagatgcgcccgagtatactggaacaatctcccgcttgtaaaaatcgccataccggcttcttcgggaaaaaccacaaccaaagaaatagccgccgccatnatcggcgcggaaaaaaacaccgtgatgaatccgggaaattataattccgaaacgggactgccccttgccgtttttgccgtcagaccctgtcatgaagtcggcgtttttgagatgggtatgaaccgcgcgggggaaatcgccgaacttgcccgcgtgcttaaaccttgtatcgcggcggtcaccaacataggttctgcccatatcggaattctcggcagtaaagaggcaatagctgaggaaaagaaaaaaattttttcacagttcgacggaaagggcgtcgccctgatccccgccgattcccccttccgcgattttctggcggaagggctgcggggtaaggctgttttttacggggaacaaacctttgccgatttgggcggagtgcggaatttgggactggatgggactgaaattatctgggcgggacaacgcgtccgttttcccctgccgggcaggcataatcttgctaacgcctttgccgctattgccatcgcgcaggaggttcctgtcagcgccgaggcggtccggcagggccttgaatcggttaagcccttgtttggccgcggcgagattcttcagggcagggtgacagtgatacaggattgctataattcaaacccggagtctgtaacagaggcgctggaattttgcgacagcctggattggccagggcgcaaaatttatgttctgggagaaatgcgggagttagggggggattcccgcgcagcccatgaagacctgggccggcttttgtcgggttcaaaagccggcatggtctttctctttggggatgaaataagaccggccgccgaaatcttagaaacgcggcgctctttcttatacgcatacctgcgatatggatga

SEQ ID NO: 6360 - protein, 324 aa, Unknown
  Obtained from environmental sample
  DOMAIN (222)...(309): Mur ligase family, glutamate ligase domain
  misc_feature (1)..(324): Xaa is any amino acid
MRACRCARVYWNNLPLVKIAIPASSGKTTTKEIAAAXIGAEKNTVMNPGNYNSETGLPLAVFAVRPCHEVGVFEMGMNRAGEIAELARVLKPCIAAVTNIGSAHIGILGSKEAIAEEKKKIFSQFDGKGVALIPADSPFRDFLAEGLRGKAVFYGEQTFADLGGVRNLGLDGTEIIWAGQRVRFPLPGRHNLANAFAAIAIAQEVPVSAEAVRQGLESVKPLFGRGEILQGRVTVIQDCYNSNPESVTEALEFCDSLDWPGRKIYVLGEMRELGGDSRAAHEDLGRLLSGSKAGMVFLFGDEIRPAAEILETRRSFLYAYLRYG

SEQ ID NO: 6361 - DNA, 537 bp, Unknown
  Obtained from environmental sample
  misc_feature (1)..(537): n is a, c, g, or t
gtggcaatcagcggtatgcaccttgccccgtatattcaggtcgcgacgcatttaatcggcaaatcgcgcgaaggcggcggaaatatgttccgtcatcagcttgacaccttggggattcttatcgactacggttatgttaattcggtattgcttaaagcctcccttgtccacgacgtgcttgaggatatccccggctttaatcacaatattttgctttccatcgacaccgacagctccgccgtttataaccttgttcttgaagttacgcgcaaacaaggagagacaaaaccggattttcttacgcgtatatgtgaaaaaggttcttttgacgcaaaaactttaaaagtcgcggatcgtatttccaatatgatttcccttggatttgtaaataaccttgcctttgtggatcgttatataaacgagacggaaaaatatctttttccccttgccgcgcaggtaaacggtaatatgcttactgaacttacggaccttgtaaaaataaaacgtaaatatttggaagatattaattacaaatga

SEQ ID NO: 6362 - protein, 178 aa, Unknown
  Obtained from environmental sample
  misc_feature (1)..(178): Xaa is any amino acid
MAISGMHLAPYIQVATHLIGKSREGGGNMFRHQLDTLGILIDYGYVNSVLLKASLVHDVLEDIPGFNHNILLSIDTDSSAVYNLVLEVTRKQGETKPDFLTRICEKGSFDAKTLKVADRISNMISLGFVNNLAFVDRYINETEKYLFPLAAQVNGNMLTELTDLVKIKRKYLEDINYK

SEQ ID NO: 6363 - DNA, 381 bp, Unknown
  Obtained from environmental sample
  misc_feature (1)..(381): n is a, c, g, or t
gtgattgacgctgagggcaaggtaatgggcagggttgcggcaaaggtcgcgtccatagtccggggtaaaaacaagccaattttcgcgccccatcaggaaatgggggattttgttgtggttatcaatgccgataaggtcaccgttaccggcagaaaaacccagcaaaaaatctattaccggcattcgggctatgtaggcgggttaaaagccgtcaactttgagaaactaatcgccaaacaccccacccagcccctggaaaacgccattaaaggaatgctcccaaaaggaccgcttggcaggaaactggcaaaaaacgcaaaaatttacgccggggcagcgcatccccatgccgcccaaaacccaacggcgattgacttatag

SEQ ID NO: 6364 - protein, 126 aa, Unknown
  Obtained from environmental sample
  DOMAIN (2)...(126): Ribosomal protein L13
  misc_feature (1)..(126): Xaa is any amino acid
MIDAEGKVMGRVAAKVASIVRGKNKPIFAPHQEMGDFVVVINADKVTVTGRKTQQKIYYRHSGYVGGLKAVNFEKLIAKHPTQPLENAIKGMLPKGPLGRKLAKNAKIYAGAAHPHAAQNPTAIDL

SEQ ID NO: 6365 - DNA, 393 bp, Unknown
  Obtained from environmental sample
  misc_feature (1)..(393): n is a, c, g, or t
gtggtcaagaatctaggaataggcacaggcagaagaaaaacttctgtggcgcgggtgtatgtcaggtcaggaagcggcaaaatctcgataaatggcaaggagcttacccaatattttccccagggcgagcattgcctgatagtccgccagccgttaatggtaacagccagtgaagacaagtttgatattttgataaacgtgtacggaggcggaaacaacggtcaggcgggagcctgccgccacggtcttgcccgcgccctggtcaatgttgatcaggccaattatacaagcctgcggagcaacggatacctcacccgcgattcgcgcatggtggagcggaagaaatacggccgccgcggcgctcgcagacgcttccagttctccaaacgctag

SEQ ID NO: 6366 - protein, 130 aa, Unknown
  Obtained from environmental sample
  DOMAIN (10)...(130): Ribosomal protein S9/S16
  misc_feature (1)..(130): Xaa is any amino acid
MVKNLGIGTGRRKTSVARVYVRSGSGKISINGKELTQYFPQGEHCLIVRQPLMVTASEDKFDILINVYGGGNNGQAGACRHGLARALVNVDQANYTSLRSNGYLTRDSRMVERKKYGRRGARRRFQFSKR

SEQ ID NO: 6367 - DNA, 864 bp, Unknown
  Obtained from environmental sample
  misc_feature (1)..(864): n is a, c, g, or t
gtgcgcggcgccagcaagggcgaggggctcggcaaccagttcctgggccacataaagagcgtggacgccgtggcgcacgtggttcgctgcttcgacgacggcgacgtggtgcacgtggacggcggcgtagaccctctgcgggacatctccacggtcgacacggagcttatgctcaaggatttcgagaccgccgagaaggggctgacccgcgtctccaaggccgccaagaccggcgacaaggagatgaaggggcgtctggccgtctacgagaagatccacgcggcgctcggcaagggcgtcccggcgcgcaaggcgctcgacgccgaggagctggcggtcgtctcggacatgcaccttttgacctccaagcccgtcctctacgtcacaaacgttggggagggcgacctgcaggaggacaacaagtacgtgaaagccgtggccgagcacgccgccggcgagggggcctcctacgtgaagatctgcggcaaggcggagtcggagatagcggagctcccgccggaggagcgcgccgactttctcgacagcttggggcttaaggagccggggctgaacgtcttggcgcgaggcatatacaagctgctgggtttggagaccttcttcaccgccggaaaggaggagaaccgcgcctggacgatccacgccggggccaccgcgccgcaggccgccggggtgatccataccgactttgagaagggcttcatcagggcggacgtctactcgctctccgaccttgagacctacaaatcggaggccgcgataagggccgccgggaagatccggtccgagggacgggagtacgtcgtgaaggacggggatattatgttcttcaagttcaacgtgtga

SEQ ID NO: 6368 - protein, 287 aa, Unknown
  Obtained from environmental sample
  DOMAIN (203)...(286): Protein of unknown function (DUF933)
  misc_feature (1)..(287): Xaa is any amino acid
MRGASKGEGLGNQFLGHIKSVDAVAHVVRCFDDGDVVHVDGGVDPLRDISTVDTELMLKDFETAEKGLTRVSKAAKTGDKEMKGRLAVYEKIHAALGKGVPARKALDAEELAVVSDMHLLTSKPVLYVTNVGEGDLQEDNKYVKAVAEHAAGEGASYVKICGKAESEIAELPPEERADFLDSLGLKEPGLNVLARGIYKLLGLETFFTAGKEENRAWTIHAGATAPQAAGVIHTDFEKGFIRADVYSLSDLETYKSEAAIRAAGKIRSEGREYVVKDGDIMFFKFNV

SEQ ID NO: 6369 - DNA, 372 bp, Unknown
  Obtained from environmental sample
  misc_feature (1)..(372): n is a, c, g, or t
atgcgcctattcaacgattacatagacctctaccctaaaggtgtttacgcggacagcgctaagaccctctataccgtgctgctcaataggttggccgagaaggagttcaacaacgcgctcttttaccgcaagcagaaggagcacaacgccgcgctcatatactatcgggcggtgctctcggagtatcctgattccaagttcgcgccggaggctgtcgtggggatggcggagatgcttgtgacgctgcagcgcacgaaggaggcggcggaggcggtggaggagttggacgcctcggtctttgacgaggggcttagggcgcggatcgaggcggtcaggcagaaggtcggttcggttgaaaaggataatggttag

SEQ ID NO: 6370 - protein, 123 aa, Unknown
  Obtained from environmental sample
  misc_feature (1)..(123): Xaa is any amino acid
MRLFNDYIDLYPKGVYADSAKTLYTVLLNRLAEKEFNNALFYRKQKEHNAALIYYRAVLSEYPDSKFAPEAVVGMAEMLVTLQRTKEAAEAVEELDASVFDEGLRARIEAVRQKVGSVEKDNG

SEQ ID NO: 6371 - DNA, 900 bp, Unknown
  Obtained from environmental sample
  misc_feature (1)..(900): n is a, c, g, or t
gtgcagacgatagcggaagagtctacggcttggccgatggtctcgcgtccggcctacgtgggggggctcggcttcgggatgaagtggaacatgggatggatgcacgacacgctcgtatacatggccaaagactccatctacaggaagtaccaccacagcgagttgacgttcagcatgttgtacgcgtttacagagaattacgtgctgccgctttcgcacgacgaggtcgtccacgggaaaaattctcttgtcaacaagatgccgggggacgattggagacggcttgcgaatttgcggttgttgctcagctatcagttcaaccatcccggtaaaaaactgctcttcatgggcggcgagttcgcgcagtttgtggagtggaaccacgaccaccagctcaattgggagttgacgcagtgggaccgccacagcggtatacagcggttggtgagcgatttgaaccggatttacaaaaaggaaccggcgttgcactactacgactttgagcccaagggctttgagtggatagactgcaacgattgggagcagagcattctcggttttatcaggaaggggccggatgagtttgaccggttgctgatagtgctgaacttcacgccggagccgcgccggggttaccatgtgggcgtgcctgtcgccggtttttgggaggagatattcaacagcgacgcgcttgaatacggcgggagcggcgtcggcaacgcgggcggcatggagacggaggcgaaatcgtggcacggtcacaaccagtcgctgccgctgacgctgccgccgcttggcgcggtgctgttcaaaatcaggaagctggaaccggagcctaaggcggaggtcgttcaggcgaaacgcgccgacggggcgaatgttgcggggcagggtcaatag

SEQ ID NO: 6372 - protein, 299 aa, Unknown
  Obtained from environmental sample
  misc_feature (1)..(299): Xaa is any amino acid
MQTIAEESTAWPMVSRPAYVGGLGFGMKWNMGWMHDTLVYMAKDSIYRKYHHSELTFSMLYAFTENYVLPLSHDEVVHGKNSLVNKMPGDDWRRLANLRLLLSYQFNHPGKKLLFMGGEFAQFVEWNHDHQLNWELTQWDRHSGIQRLVSDLNRIYKKEPALHYYDFEPKGFEWIDCNDWEQSILGFIRKGPDEFDRLLIVLNFTPEPRRGYHVGVPVAGFWEEIFNSDALEYGGSGVGNAGGMETEAKSWHGHNQSLPLTLPPLGAVLFKIRKLEPEPKAEVVQAKRADGANVAGQGQ

SEQ ID NO: 6373 - DNA, 606 bp, Unknown
  Obtained from environmental sample
  misc_feature (1)..(606): n is a, c, g, or t
atggatagattcggccgagacaaggtggacgcgattataaaactgggagacaacatagttccggttgactcgaaattccccctggaaagttttcaaaaatttatagccgcggataacgaggaaagcaaaaaaacgttcagaaaagattttatttcgagcgttaaaaaatgcattgatgatatagccgcaaaatatatcaaccccgccgaaggaacttacgacttcgcaatcatgtatattcccgccgagaatgtctactatgaaaccattataaacgattcatttaccaacaaggattatgaactgctgaattactccatggaaaagcacgtcatccctgtttcacctaacagtttttacgcctaccttatggctatttcattcggcttaaaaggccttacaatcgaacaggaagccaaaaccatacttggagacattgcccaggttcaggacaggtttggaaagttcttcacggacttcagccttgtgggaaagcacatttcaaacgctttgggcaagtacaacgattcagccaaacgcgcggaaaagttaaacgatcagatgaacaggctcacggggcaaaagacggagcttattgaaggatag

SEQ ID NO: 6374 - protein, 201 aa, Unknown
  Obtained from environmental sample
  DOMAIN (1)...(201): RmuC family
  misc_feature (1)..(201): Xaa is any amino acid
MDRFGRDKVDAIIKLGDNIVPVDSKFPLESFQKFIAADNEESKKTFRKDFISSVKKCIDDIAAKYINPAEGTYDFAIMYIPAENVYYETIINDSFTNKDYELLNYSMEKHVIPVSPNSFYAYLMAISFGLKGLTIEQEAKTILGDIAQVQDRFGKFFTDFSLVGKHISNALGKYNDSAKRAEKLNDQMNRLTGQKTELIEG

SEQ ID NO: 6375 - DNA, 342 bp, Unknown
  Obtained from environmental sample
  misc_feature (1)..(342): n is a, c, g, or t
ttgacgacgacaacaggactttttcacactacaaggggcggactttccgaacaatttgttttgcaggaacttatttcagctaattataaacttccggtttactactgggcggctgaaaaaaataccgcagagattgaatttgttatacagtacaataataaaattatcccgattgaagtaaagtcaggcaaaaatgtcaaatctgaaagtttaaatgtgtatagaaaagaatattctcccgcctgcgccgtccgcgcttcgctgaaaaattacggcgttaaagacggattgtactccatacctctttatctgacaggcagcttgtccgctatccttcaataa

SEQ ID NO: 6376 - protein, 113 aa, Unknown
  Obtained from environmental sample
  misc_feature (1)..(113): Xaa is any amino acid
MTTTTGLFHTTRGGLSEQFVLQELISANYKLPVYYWAAEKNTAEIEFVIQYNNKIIPIEVKSGKNVKSESLNVYRKEYSPACAVRASLKNYGVKDGLYSIPLYLTGSLSAILQ

SEQ ID NO: 6377 - DNA, 513 bp, Unknown
  Obtained from environmental sample
  misc_feature (1)..(513): n is a, c, g, or t
ttgagccggcgcgaagtgtcaaaaaacagcgcggtaattcattttgtcggagcggctgatgagcttaactgtcatttgggactgattaaagcgatgattagtaacgatgatgcatggcaattctcaggtaagtctgcgagtatttttttggagagaatccaaaaaaacataggtttaattatgtctcatgtttccgatataaaaaacagtaatttttttctgccggaagatgaagttgtcattcttgaaaaagaaatagacagattaaacgccaatcttccgaaacaattaaagctggttataccaggaaaaaatattatagaagcgcaaattcaaataggacggacaatagcaagaagagcggagaggttgtttttcaccgtcaaagaacaacagcttttaaagccggaagccggagcgtacttaaacaggttatcggattatttatttgttttgtctcagcaggaatcattgattaacgttaatttcataaatgaggttgccggtatttaa

SEQ ID NO: 6378 - protein, 170 aa, Unknown
  Obtained from environmental sample
  DOMAIN (2)...(158): Cobalamin adenosyltransferase
  misc_feature (1)..(170): Xaa is any amino acid
MSRREVSKNSAVIHFVGAADELNCHLGLIKAMISNDDAWQFSGKSASIFLERIQKNIGLIMSHVSDIKNSNFFLPEDEVVILEKEIDRLNANLPKQLKLVIPGKNIIEAQIQIGRTIARRAERLFFTVKEQQLLKPEAGAYLNRLSDYLFVLSQQESLINVNFINEVAGI

SEQ ID NO: 6379 - DNA, 849 bp, Unknown
  Obtained from environmental sample
  misc_feature (1)..(849): n is a, c, g, or t
atggaattcatgaaggacatgatgaacgcccccatcgaatacggctatacgcacaggggctactactacaccgaaaaaaccttcaggcttcccgccgcctttgcctccgccgaagacatgctggccctggggatggcgaagaccctcctttccctttaccaaaacacaccgatatacgatgcggcaaaagggctcatggaaagcgttaccgcgcctctcggaggcggcgaaaaccccctctggtacgaagagcgcgttatcgtgccgccagtaccggctgtgcagttttccccggaagtatggaacgctgcctgcgaagcgctgcggaaaaaccgcgtcctaaagtttgaataccgcagcacgtggaaaagcggctacacaccccgccgcgtccgcccctatcagcttctttttgacaacggcgcatggtatctctacgcctattctacggaaggccggggcatgagaatgtactcccttccccgcatacaaaatatcagccttgaagatgaaacctttgctttccctgcggatgccgattaccgcgcccgcgtggacggaagttacttcggcgcgtattcaaccgaaaagacacgccgcttccgcatcgccttttacaacgatggggccatgcgaattaaagaacgcctttgggcggcggatcagcgcataaaggaaacccccagcggcgtaatcctcagtttttccagctcccaatacggcaaggttctggaactggtccttgccaacggccgcgatgcccagccccttgagccaaaggaactggtcagcgactggcaggaaaacattcaggatatgcggaaactggcggaaccatcaaaaaagtga

SEQ ID NO: 6380 - protein, 282 aa, Unknown
  Obtained from environmental sample
  misc_feature (1)..(282): Xaa is any amino acid
MEFMKDMMNAPIEYGYTHRGYYYTEKTFRLPAAFASAEDMLALGMAKTLLSLYQNTPIYDAAKGLMESVTAPLGGGENPLWYEERVIVPPVPAVQFSPEVWNAACEALRKNRVLKFEYRSTWKSGYTPRRVRPYQLLFDNGAWYLYAYSTEGRGMRMYSLPRIQNISLEDETFAFPADADYRARVDGSYFGAYSTEKTRRFRIAFYNDGAMRIKERLWAADQRIKETPSGVILSFSSSQYGKVLELVLANGRDAQPLEPKELVSDWQENIQDMRKLAEPSKK

SEQ ID NO: 6381 - DNA, 975 bp, Unknown
  Obtained from environmental sample
  misc_feature (1)..(975): n is a, c, g, or t
atgaagataacgataggcaacagggagtccaaagagggccacggagagtaccagccggactactacgactcgaacggcgtcctccaaaagggcaagaacatgtacgactactcggtcgactacgaaaccggcatgataaccgtctacaacaccgacgttatgcgtgacatgagaccggagtggctcggcggccccggcatgaaaaaccagttctcgtccacggtcagcggcataacaagctcgagcgcgcccatcccgctctactactacccgaacataccggcggccggccagatcgaccccgcttcggtattggtgacggtgggcggcatcgcgctggtcgacggcgtggattataccattgatcccactaacggtactttcagcgtggtttccggtagcaaatacgacgacatcaaaacggcgttcaaaatagacttcggtgtgattaacccacaagacctgcccggcaacatgtacaggccataccagctccaaatgaacttcgactacatcacccgcggcgtggacatgtacggcgacatggtgaccagcaagggcgacatcctgcggaacatagaggaaggcatagtagtctccataaatataggcgccgactacctgctcagagaccccaggagcggcaaagacatggtcggcaccctgctgcgctacagccaagccctcctcaaagacgaccgcgacggcatccaaaacgccctcgacgaactgacgaacatgtacgacgccgtccttaacagccaaagccagatgggcgccaaaatcttccgcttcgaacttaccgaacagcgcaacggcgagcaaaccatagaggtaggccagcaactgtcaagcctggccgacgccgacctcgcggaggtgatatctagactgatgctggccgaaagcgtctacaacgccgccctgcagtcggccatgagggtgctgcaaccgtcgctggcgaactacatgtaa

SEQ ID NO: 6382 - protein, 324 aa, Unknown
  Obtained from environmental sample
  misc_feature (1)..(324): Xaa is any amino acid
MKITIGNRESKEGHGEYQPDYYDSNGVLQKGKNMYDYSVDYETGMITVYNTDVMRDMRPEWLGGPGMKNQFSSTVSGITSSSAPIPLYYYPNIPAAGQIDPASVLVTVGGIALVDGVDYTIDPTNGTFSVVSGSKYDDIKTAFKIDFGVINPQDLPGNMYRPYQLQMNFDYITRGVDMYGDMVTSKGDILRNIEEGIVVSINIGADYLLRDPRSGKDMVGTLLRYSQALLKDDRDGIQNALDELTNMYDAVLNSQSQMGAKIFRFELTEQRNGEQTIEVGQQLSSLADADLAEVISRLMLAESVYNAALQSAMRVLQPSLANYM

SEQ ID NO: 6383 - DNA, 507 bp, Unknown
  Obtained from environmental sample
  misc_feature (1)..(507): n is a, c, g, or t
ttgttcggaacgctaattgcaattttaagaaaaggcactcccattgcaggcttaattcagctccccgcgctgaacggcaaagtgtgggctaccgagggtggtggagcttttgcagacgatggtcgtgctgtgaaggtttccgatactcttgaactcaaaaattcccttgtgctttctggaaccataaataccattgagagcaagggttatggtgagtggtttgagaacattcgcaaaaatgcaaaactgtatcgtggctggggagattgctttggttattacctagttgcctgtggaaaggcagaaattatgacagaccctgtagtatcgctttgggacatagccccttatccgcttatttttgcagaagctggaggggcattttcaacgctaaaaggcgaaaaattgctcttttccgcaaaaggcgaacccttgcatcccatatatgaaggttatactgctatagccagcaatggaaggtttaatattcctttgccactcacgtaa

SEQ ID NO: 6384 - protein, 168 aa, Unknown
  Obtained from environmental sample
  misc_feature (1)..(168): Xaa is any amino acid
MFGTLIAILRKGTPIAGLIQLPALNGKVWATEGGGAFADDGRAVKVSDTLELKNSLVLSGTINTIESKGYGEWFENIRKNAKLYRGWGDCFGYYLVACGKAEIMTDPVVSLWDIAPYPLIFAEAGGAFSTLKGEKLLFSAKGEPLHPIYEGYTAIASNGRFNIPLPLT

SEQ ID NO: 6385 - DNA, 717 bp, Unknown
  Obtained from environmental sample
  misc_feature (1)..(717): n is a, c, g, or t
atggctgacgaggacaattacacggaagaagacatccattctcttgaggactaccagcaggaagaacagatagacggcggatcgttcgcgggagaagatctatcctcgctgagccaggatacacctgtctaccgccttcgccttgtttattcacgggaaactttccacgccgcctatgccggtgaaaccctggaacctggaacaaaggtgcttgtacctacccgttacggccgggatctggctgaagttatacattcgattcaatgcgaggccgggcaaataccccaggccgttacccggattgagaggatcgccagcagcgatgatatatccaaagtcgcctcgcataaacaacaggaaaaagaagctttcgatgtttgcaagaagaaaatcgaagtccacaaactggatatgaagcttgtttctgtccattacatactggaagaaccgaaaattctctttttttttactgccgaaagccgggttgactttcgggagctggtaaaagatttggtaaatatctttaagaccagaatagaattgcgccaaatcggagtccgggatgaatcgcgggtgttgggcggccttggcgtctgcggaagatgttactgctgccacgcagtctcggacaaactaaagcccgtctccataaaaatggcaaaagatcaaaacctgtccctgaattctaccaaaatatccggcccctctcggccataa

SEQ ID NO: 6386 - protein, 238 aa, Unknown
  Obtained from environmental sample
  DOMAIN (97)...(184): PSP1 C-terminal conserved region
  misc_feature (1)..(238): Xaa is any amino acid
MADEDNYTEEDIHSLEDYQQEEQIDGGSFAGEDLSSLSQDTPVYRLRLVYSRETFHAAYAGETLEPGTKVLVPTRYGRDLAEVIHSIQCEAGQIPQAVTRIERIASSDDISKVASHKQQEKEAFDVCKKKIEVHKLDMKLVSVHYILEEPKILFFFTAESRVDFRELVKDLVNIFKTRIELRQIGVRDESRVLGGLGVCGRCYCCHAVSDKLKPVSIKMAKDQNLSLNSTKISGPSRP

SEQ ID NO: 6387 - DNA, 690 bp, Unknown
  Obtained from environmental sample
  misc_feature (1)..(690): n is a, c, g, or t
ttgttccgggaagtgaggaattttgagcctgccctttcaagcacgctttcagttcttggagccgacactgcgggcttaagcagaatttctcaagccgcgggcggcgatttggcatctttttttgatatcaaagaaagcccggcgggtacccttcaggaagtagaagacttgcggcggctttcagtgttttttactaccgccacaaccccaattaaggaaataggcactcttcttaattcccagggcgctttgttgacggaaattcccagtatttggcccataaagggtaatcagggacatatttccatgcttttcggacagaatgaaaacccttttacaggacaatactacattcataaaggaattgatatctcaacctacaggcagggcgaccccattgtagctaccgctgacggccaggttgtggcccttgagtatgattacaacggcttcggcaacaatgttatcatccggcacaaacacggtttttatacccgttacgcccatatgctttcgtttaatgtgcgctccgggcagcgtgttcaacagggagaaataataggctacataggaaacaccggtttatcaacaggccctcatcttcattatgaggttcatattggttccgatgtagtagacccctataagtatattactatacgttccagcattgcgagaaacgcgcgctag

SEQ ID NO: 6388 - protein, 229 aa, Unknown
  Obtained from environmental sample
  DOMAIN (117)...(214): Peptidase family M23
  misc_feature (1)..(229): Xaa is any amino acid
MFREVRNFEPALSSTLSVLGADTAGLSRISQAAGGDLASFFDIKESPAGTLQEVEDLRRLSVFFTTATTPIKEIGTLLNSQGALLTEIPSIWPIKGNQGHISMLFGQNENPFTGQYYIHKGIDISTYRQGDPIVATADGQVVALEYDYNGFGNNVIIRHKHGFYTRYAHMLSFNVRSGQRVQQGEIIGYIGNTGLSTGPHLHYEVHIGSDVVDPYKYITIRSSIARNAR

SEQ ID NO: 6389 - DNA, 660 bp, Unknown
  Obtained from environmental sample
  misc_feature (1)..(660): n is a, c, g, or t
gtgagcagggattcgctgcccccgccgttaacttttacaaacggagattttatgctggggatcaattggaaacttgtacaagcgctcttgctgacagcggcgtttgcggctatgccggtaggaacggcggcggtgcagacggggtcgctggccgacgaccgggacgggcataagtacaagacggtcaagatcggcgaacgcacgtggatggcggagaatctgaattataagacggaaagcggctcctggtgctacgacggcgacaactccaactgcggcaaatacggcaggctctacgattggaatacggctagggcggtctgccccaaaggctggcacctcccgtctaaaaacggatggagagagctaagcgccaccgcggcgggctctaagacaggcggcgttaaattgaaatcaaggagcggctgggacgacggcggcggcggcacggacgactacggattctcggccctgcccggcggacgccggataagcgacggcaaattccgcaacgccggcaagcgcggatactggtggacggccacgggtcacggcagcgccttcgccttcaaccggttcatgtactactccaaagagtacgtggacgaggatttcaacttcaggagcgaagctttctcggtgcgctgcgttcaagattag

SEQ ID NO: 6390 - protein, 219 aa, Unknown
  Obtained from environmental sample
  misc_feature (1)..(219): Xaa is any amino acid
MSRDSLPPPLTFTNGDFMLGINWKLVQALLLTAAFAAMPVGTAAVQTGSLADDRDGHKYKTVKIGERTWMAENLNYKTESGSWCYDGDNSNCGKYGRLYDWNTARAVCPKGWHLPSKNGWRELSATAAGSKTGGVKLKSRSGWDDGGGGTDDYGFSALPGGRRISDGKFRNAGKRGYWWTATGHGSAFAFNRFMYYSKEYVDEDFNFRSEAFSVRCVQD

SEQ ID NO: 6391 - DNA, 789 bp, Unknown
  Obtained from environmental sample
  misc_feature (1)..(789): n is a, c, g, or t
atgagcgatactatatttgatattcaaaacctgaccaagtccttcgtcgtcagaggcgagcgtctggaggtattaagaggaatatccttgtccgtctcccgaggagacgtatatggcattatcgggctttccgaggcgggaaaatccactctggcgcgttgtattaaccggatcgaaacgccggatgccggacgcattaacattggcggcgtcgatatgctgacgcttcccaaacgccgccttctggaacagcggcagcgtataggcatgatttttcagaacttcaacctttttgaggcaaaaacggtttacaaaaacatcgcgtatccgcttgccattcgcggcgtaaaaaaagcggaacgctcacggcgcgtgcgggaaatagcggaaattgtcggcttgcaggataaactggacgcttacccggcgggactttccggcgggcagaaacagcgcgtgggcattgccagggcgcttgccaataaccccgacattctgctttccgatgaggccaccagcgcccttgatccgcagacaaccttgagcattttggaactgctcaaaaacatcaaccgcgatttggggctgaccatcatactgatcacccatgagctggatgtcattaaatacaccaccagaaacatggccgtgctggaagacggcgtaatccgcgaaagcggcagaaccaaagatattttcgccaatcccaacagcgtaaccggcaaaatgtttttgaaagtttactttgaattacaggatagagatatggaaggaggcgacggtatatga

SEQ ID NO: 6392 - protein, 262 aa, Unknown
  Obtained from environmental sample
  DOMAIN (35)...(221): ABC transporter
  misc_feature (1)..(262): Xaa is any amino acid
MSDTIFDIQNLTKSFVVRGERLEVLRGISLSVSRGDVYGIIGLSEAGKSTLARCINRIETPDAGRINIGGVDMLTLPKRRLLEQRQRIGMIFQNFNLFEAKTVYKNIAYPLAIRGVKKAERSRRVREIAEIVGLQDKLDAYPAGLSGGQKQRVGIARALANNPDILLSDEATSALDPQTTLSILELLKNINRDLGLTIILITHELDVIKYTTRNMAVLEDGVIRESGRTKDIFANPNSVTGKMFLKVYFELQDRDMEGGDGI

SEQ ID NO: 6393 - DNA, 306 bp, Unknown
  Obtained from environmental sample
  misc_feature (1)..(306): n is a, c, g, or t
ttgccggttacgctgttgggattggcgaaaatatctttggttctgccgctttcgcggattacgccgtcttccagcacggccatgtttctggtggtgtatttaatgacatccagctcatgggtgatcagtatgatggtcagccccaaatcgcggttgatgtttttgagcagttccaaaatgctcaaggttgtctgcggatcaagggcgctggtggcctcatcggaaagcagaatgtcggggttattggcaagcgccctggcaatgcccacgcgctgtttctgcccgccggaaagtcccgccgggtaa

SEQ ID NO: 6394 - protein, 101 aa, Unknown
  Obtained from environmental sample
  misc_feature (1)..(101): Xaa is any amino acid
MPVTLLGLAKISLVLPLSRITPSSSTAMFLVVYLMTSSSWVISMMVSPKSRLMFLSSSKMLKVVCGSRALVASSESRMSGLLASALAMPTRCFCPPESPAG

SEQ ID NO: 6395 - DNA, 1035 bp, Unknown
  Obtained from environmental sample
  misc_feature (1)..(1035): n is a, c, g, or t
ttgatggccgagatccgacacactttcaccgatcaggtaaatcctcccgatatgctttcgattatcgcgtcttccgccgccgttcatatttccgatattccgtttaacggcccggtcgccggagtcagggtctgccaggtggacggcgagcttattgtcaacccgacctatgagcagattgaaaaatccactctggaaattgtggtcgccggaaccaaagacggcatcaccatggtggaaggcggagcgaaagaggtaagcgaggaattgatgatcgaagcgctggaaaaagcgcataagatgatcatcgaattctgtatcttgcaggaaaaactgcgcgagcttgccggaaagcaaaaacttccgcttaacgttcccgattattcgctggagaacaaggacgccatccgcgccgcggcttatcctaaactggaaaccgcctgcttccttcccggaaaacaggaaaggcacgacgccatcaaagcggtaaaaaccgaatttgaaaccgcgcacacggctcagcttgaagacgaaaaacagaaaaaacttttcaacgcgttattcgaagatatgcagtacgaaatactgcgctcttcaatattaaacaaaggcaaaagagtggacgggcgcgggcttgaagacatacgcaatatcacctgcgaaataggcattttacagcgcacgcacggctcggctctttttacgcgcggtgaaactcaggcgctggttgttacaaccctgggaaccgtttttgacgaacagatcttcgacgacatagaaggcgacaagcgcgaaaacttcatgctgcattacaattttcccccgtattcggtgggcgaggtcggcaggatggggacaggaaggcgcgaaatagggcacggcaaccttgcgcgccgttctctggaagctatggttccgcccaagaaagtttcccgtataccgtgcgcgttgtttccgaaatatgaatcaacggctcatcctcgatggcgtcgtctgcggcggcaccctttccatgctcacgcgggcgtcccatga

SEQ ID NO: 6396 - protein, 344 aa, Unknown
  Obtained from environmental sample
  DOMAIN (37)...(101): 3' exoribonuclease family, domain 2
  misc_feature (1)..(344): Xaa is any amino acid
MMAEIRHTFTDQVNPPDMLSIIASSAAVHISDIPFNGPVAGVRVCQVDGELIVNPTYEQIEKSTLEIVVAGTKDGITMVEGGAKEVSEELMIEALEKAHKMIIEFCILQEKLRELAGKQKLPLNVPDYSLENKDAIRAAAYPKLETACFLPGKQERHDAIKAVKTEFETAHTAQLEDEKQKKLFNALFEDMQYEILRSSILNKGKRVDGRGLEDIRNITCEIGILQRTHGSALFTRGETQALVVTTLGTVFDEQIFDDIEGDKRENFMLHYNFPPYSVGEVGRMGTGRREIGHGNLARRSLEAMVPPKKVSRIPCALFPKYESTAHPRWRRLRRHPFHAHAGVP

SEQ ID NO: 6397 - DNA, 627 bp, Unknown
  Obtained from environmental sample
  misc_feature (1)..(627): n is a, c, g, or t
atgccaaaggttcgtatgatttgggattcaataccgcttcatctttccaaagagaaaaaaaaatttatgtataaagaaatcaagacaggcgcgagggcggcggcttatgaaaacgcgcttgactggcttataaatacgggacttgtttataaagtgaatagaacaaacgaggcaaagctgcccatcgccgcgtatgccgaccgtgacgctttcaagatatatatgcttgatacggggcttctatccgcggcgtcgggactggatataacaaccttttacaatcccgatccgcttgtcttcaaagaattcaaaggcgctattaccgaacaatttgtgttacaggaattgaagacacttggtaatataccaatatcttattggggcagggacgaaggcaagagcgaggtggattttgtcgtacaatggcgaaatgaaattgtcccaatagaggtcaaatcgggaatccgcaaaaaaactaaaagccttgatatatattgcgggttataccacccggctcatgccgttcgcacatcccttaaagggtttggtataagcgacggcttgtattccattccgctttatatgatagcgagctttgccgatatgcttgcagatgagaaaaaataa

SEQ ID NO: 6398 - protein, 208 aa, Unknown
  Obtained from environmental sample
  misc_feature (1)..(208): Xaa is any amino acid
MPKVRMIWDSIPLHLSKEKKKFMYKEIKTGARAAAYENALDWLINTGLVYKVNRTNEAKLPIAAYADRDAFKIYMLDTGLLSAASGLDITTFYNPDPLVFKEFKGAITEQFVLQELKTLGNIPISYWGRDEGKSEVDFVVQWRNEIVPIEVKSGIRKKTKSLDIYCGLYHPAHAVRTSLKGFGISDGLYSIPLYMIASFADMLADEKK

SEQ ID NO: 6399 - DNA, 840 bp, Unknown
  Obtained from environmental sample
  misc_feature (1)..(840): n is a, c, g, or t
ttgttttcagttctcagggaaatcccngttttaagcaaagacgatccttatgtaattcactatattgatccgcagagcgcgcccgtcgatatttccgacataagaaacgctatgtccggctttacccagagcgtcgccgtgcagaacatcggaacgcccgccgaacgtcattttatgattcgcgtagaagacaaagcggacgagcgcgtgaaatcggatgaaattgtacaggttcttgaagctcatttcggttcaggcggcattgccgttatgcgctccgactatgtcggctcaagccagtccaaaaaacttattgatcaggtattttacctgatacctcttactttgcttttaattttagtttacttggttatccgctttaaagtgcaatatgccattggcggcgtaatcgccattttacacgacttgcttgtaataattgcatacttggtttgggcaagaatggaatttaacaccacgacaatcgcggcgattcttacaattcttgggtattctatcaacaacacaattattttatttgaccgcgtaagggaaaatatccgcgtgtatcccgataacacattcaccgatattatggatatttcactaacaggtattttgggacgttctattataacaacattgacgacaatgcttgccgtattgtccctgttcatttttacaacaggttcaatgaaagatttcgcccttgtactgttgataggaatgacatccggcacatacacgtcgctctttatcgcctccggttttgtaaacttctgggaaaagacagtnaaaacagagcaaagaaaaagcggcagcataggcaaaatgacataa

SEQ ID NO: 6400 - protein, 279 aa, Unknown
  Obtained from environmental sample
  DOMAIN (77)...(264): Protein export membrane protein
  misc_feature (1)..(279): Xaa is any amino acid
MFSVLREIPVLSKDDPYVIHYIDPQSAPVDISDIRNAMSGFTQSVAVQNIGTPAERHFMIRVEDKADERVKSDEIVQVLEAHFGSGGIAVMRSDYVGSSQSKKLIDQVFYLIPLTLLLILVYLVIRFKVQYAIGGVIAILHDLLVIIAYLVWARMEFNTTTIAAILTILGYSINNTIILFDRVRENIRVYPDNTFTDIMDISLTGILGRSIITTLTTMLAVLSLFIFTTGSMKDFALVLLIGMTSGTYTSLFIASGFVNFWEKTVKTEQRKSGSIGKMT

SEQ ID NO: 6401 - DNA, 1002 bp, Unknown
  Obtained from environmental sample
  misc_feature (1)..(1002): n is a, c, g, or t
gtggtgaagtcgccccacgcggccatcacgcacagcggcacggcggttggctcccccggctacatgtcgcccgaacagatagacgacctggacgtggacgcccgctccgacatcttctccttcggcatagtgctatacgaaatgctgaccggcgtacaccccttcctccgcgacaccgtgcaggccaccttctacgctacgctaagctgcaactacaagccgatacgcgaactccgtgaggacgctccggagaaacttgtgaaattcgtggagatgtccctggtcgccgacagaaacctgcgcataataaactcggacgaactatgctcaatgatagcggactgcctgagcgacaacgacaccaaaacgcggatgatgcgcgtaggcacgggcaaacacggcgcggtcaagaaagtaaagttcggcttcgcgctggcgctgcggaagctcaggtcgcttaagaagaatatgccgccggccgcaaaccgcgtggtaaccgccgccggcgactcgtacagaaaaaacatcctgccggtcgccaaaaacgccgtcaacaaagtatacggcccgctggaaaaacgcttctcgaagaagcagatcacaatcgccgtaacaagcgtatcatcccttttggccgccgtcgtgctgatactgctgttcgcctccgtaaactcaaaaataaacgacaacaaccgcctggtgagagcggcgcaggaaaagggctacgcggtcaaaaacggcaaacaaattataagcgcctgccgagagtacattgacaaatgcgactactttcacgcgaacgagctggccggcatccctaccacgggcaaggacagaaactatgtcctgaacggcagcccctgtcacgcgatgtccgccctctgcgccgacaaatttcacgacgcctccgcgctcttcgccaaagtgcaaaagctgaaaggcggcgaagccgcgatacgcaaagagcaccgctttctacacagatactggaagcgtggatag

SEQ ID NO: 6402 - protein, 333 aa, Unknown
  Obtained from environmental sample
  misc_feature (1)..(333): Xaa is any amino acid
MVKSPHAAITHSGTAVGSPGYMSPEQIDDLDVDARSDIFSFGIVLYEMLTGVHPFLRDTVQATFYATLSCNYKPIRELREDAPEKLVKFVEMSLVADRNLRIINSDELCSMIADCLSDNDTKTRMMRVGTGKHGAVKKVKFGFALALRKLRSLKKNMPPAANRVVTAAGDSYRKNILPVAKNAVNKVYGPLEKRFSKKQITIAVTSVSSLLAAVVLILLFASVNSKINDNNRLVRAAQEKGYAVKNGKQIISACREYIDKCDYFHANELAGIPTTGKDRNYVLNGSPCHAMSALCADKFHDASALFAKVQKLKGGEAAIRKEHRFLHRYWKRG

SEQ ID NO: 6403 - DNA, 642 bp, Unknown
  Obtained from environmental sample
  misc_feature (1)..(642): n is a, c, g, or t
ttgaatgacaaggaacggctgctcatagcgtgcctgcgccggggtgacagcgccgaagcccagaatatcgcgcgaaatctgctggccgatatcagcaattccgccgggggcgattttgagtacttcaaaatgaaggcaatagaactggtggtcctggtttcaagaaccgggacaaattccgaaaatgaggcggaacttgttgaagcgaacagccgtaatataaaacagcttgaggattccaatacccccgaggaattggctgataacgtctgcctgattctggaaaggatggccgggaaaattttctctttccaggggattcgccacgcgtccgcgctcaggaaagccgagcgttttatctgggagaattacaccagaaagatcagcctgaaagagattgccgacgcatccgggctttcagcgccttatttcagcacggtattcaagaatgaaatgggcgagaacctgtcaaattaccttaacaggctcagggttgaaaaagccttaatgatgcttagtgaaaccgattctcccattaacaaaatttcggcggaatgtgggtttgaagaccaaagctggttttcaaaagtattcaaaagttataccggtatcagcccttatgaataccgtaagaatggctga

SEQ ID NO: 6404 - protein, 213 aa, Unknown
  Obtained from environmental sample
  DOMAIN (115)...(161): Bacterial regulatory helix-turn-helix proteins, AraC family
  misc_feature (1)..(213): Xaa is any amino acid
MNDKERLLIACLRRGDSAEAQNIARNLLADISNSAGGDFEYFKMKAIELVVLVSRTGTNSENEAELVEANSRNIKQLEDSNTPEELADNVCLILERMAGKIFSFQGIRHASALRKAERFIWENYTRKISLKEIADASGLSAPYFSTVFKNEMGENLSNYLNRLRVEKALMMLSETDSPINKISAECGFEDQSWFSKVFKSYTGISPYEYRKNG

SEQ ID NO: 6405 - DNA, 876 bp, Unknown
  Obtained from environmental sample
  misc_feature (1)..(876): n is a, c, g, or t
atggactctctttccagcttactccgtcaaggctcctctatttactttgtaggtataaagggtactggcgtttgtgcccttgcggaattgatccatggcatgggactcaaaacagccggttcggatacaaacgaggtcttctatacggacggtatcctgagagagcttggcattcctttccatgaaacctttgagccggcgcatatcacaagcgatattgatctggttatccattcagccgcctacagcgaggagaataatgccgagcttgccgaagcggcgcgaaggaatatcccgctgatgtcttacccgcaggcgcttggcgcgttttccgccggttttgattcaacgggtattgccggcgttcacggtaaaaccacgactaccgccatggccggatgccttgtccgcggccttgaattgccggcaagggttctggtcggcagcgccgtgtcaaatttcgggggaagatcaacgctggcgcagggcgataaatatttcatcgcggaaacctgcgagtaccgcaggcattttcttctgttccatccaaagcgcatagttttaaccgccgttgaaagcgaccaccaggattattttccaacttacgaatcgatccgcgacgcctttgttgaatactgccgcctcatcccctcagtcggggaattgatttactgcgccgatgatcccggggcgagcgaaatcgcanatatcataaaanatgaagggcggggcattacccttgtcccctacgggtttacagctcanggcgactttcatgtcgcctcttaccgcgttggaaatgagaaggcgttttttcgcgttaacgcgtttaatctggaactcagcctgcctgtcccgggagacatcaggcactga

SEQ ID NO: 6406 - protein, 291 aa, Unknown
  Obtained from environmental sample
  DOMAIN (117)...(288): Mur ligase middle domain
  misc_feature (1)..(291): Xaa is any amino acid
MDSLSSLLRQGSSIYFVGIKGTGVCALAELIHGMGLKTAGSDTNEVFYTDGILRELGIPFHETFEPAHITSDIDLVIHSAAYSEENNAELAEAARRNIPLMSYPQALGAFSAGFDSTGIAGVHGKTTTTAMAGCLVRGLELPARVLVGSAVSNFGGRSTLAQGDKYFIAETCEYRRHFLLFHPKRIVLTAVESDHQDYFPTYESIRDAFVEYCRLIPSVGELIYCADDPGASEIAXIIKXEGRGITLVPYGFTAXGDFHVASYRVGNEKAFFRVNAFNLELSLPVPGDIRH

SEQ ID NO: 6407 - DNA, 819 bp, Unknown
  Obtained from environmental sample
  misc_feature (1)..(819): n is a, c, g, or t
atgacaagcatgacaggcttcgcctacagggaatgggcaaatgataacatttcaatttctgtggagattaaaggctacaacaaccgcttccttgaaattttcgtgaacacgccgccatggcttccgcagttggaacaaagggcgcggacgattataagcgggttatgcggcaggggtaaagttgaagtttccatacgggtaagagaaacaaacgcccccttgaatgtttccgtgaatgtgaacgcggcaaacgcctatatgcaggcgatctccggccttgcgtctggtcttggccttgaagaaaaattaagcctgtcgatgttaatcggcatggaaggcgtgcttgaaattgaaaaaaaccgcgatgacgagcgttactgggccctgattgaaccggtcctgaccgaggccgccggggtatttcaggctgaacgaatcagggagggaaagcataccgaagaagacattctcaattcaataagcctcatcgaatcggctctgcaaacggtggaggcccacctccccgctctggaatcttccattaaagaaaacatcaaaacacgctttaaggaaatttcaggcggtgaaatcgacgagcatcgaatccttgccgaaaccgccatactgcttatgaagtacactgtttccgaggaaatttcccggttatcttcccatctcgcggaattcagggctgaaacggcaaaaaatgaccgcccggggaaaaaacttgattttctctgccaggaaataaaccgcgaaattaacacaatcggctcaaaaagcgttattctggaagtaggcatggccgtagggaaatga

SEQ ID NO: 6408 - protein, 272 aa, Unknown
  Obtained from environmental sample
  DOMAIN (201)...(270): Domain of unknown function (DUF1732)
  misc_feature (1)..(272): Xaa is any amino acid
MTSMTGFAYREWANDNISISVEIKGYNNRFLEIFVNTPPWLPQLEQRARTIISGLCGRGKVEVSIRVRETNAPLNVSVNVNAANAYMQAISGLASGLGLEEKLSLSMLIGMEGVLEIEKNRDDERYWALIEPVLTEAAGVFQAERIREGKHTEEDILNSISLIESALQTVEAHLPALESSIKENIKTRFKEISGGEIDEHRILAETAILLMKYTVSEEISRLSSHLAEFRAETAKNDRPGKKLDFLCQEINREINTIGSKSVILEVGMAVGK

SEQ ID NO: 6409 - DNA, 984 bp, Unknown
  Obtained from environmental sample
  misc_feature (1)..(984): n is a, c, g, or t
atggcgaggcagagccttactcatatctttctgcataaaaaaacttggcggaaacccgccgttatatacggggcaggcagtaccgggaaacttgtcgccgaatgccttacgaataacatcagaaccggctatattcctgttctttttttggacgattccgcgcctggtgaaaatgaaattatgggcatcccggtaattcatgatacttccataggccccgagattgtcaagcggtataatataaaaatggctattgtggcgatgccggaactggatgccgacaaactgaaaattcttttaaaaaaatcagtatcggcgttccgttacaatgtccttattccaaatttttttaatatctccaatatctggatgtccgtacgggacttttcaggtattttgggaatagaaaccagtcataaattaaaattaaattttaatcttggaataaaacgccttatggatattttatttgtgctttttggcggcattctgattcttccgtttcttttatttatcgcgctgttaataaaagttacttccccgggacctgttctgtacaaacataaacgtctgggtaaaaacgggaaacctttttacgcgtataaattccgaaccatgaaaaaaaacgcggagcagctgcttgaagaattgcttaaatcagatccggcagtcagggaagaatgggaaaaataccataaattaaaaaacgacccaagggtaacggcggttggcaaagtattgcggcgtatcagttttgacgaatttccccagcttatcaatataatcaagggggaaatgagccttgtagggccgcgtcctatcgtaaatgaagaaatggaaaaatacggcgacgatnttgaccgcatattttccattagacccggtcttacangcctttggcaggtatcgggaaaggtcagacacaattactctgagcggatttcctatgacgcntatatcttcaagctggtcagcgtggcttga

SEQ ID NO: 6410 - protein, 327 aa, Unknown
  Obtained from environmental sample
  DOMAIN (150)...(326): Bacterial sugar transferase
  misc_feature (1)..(327): Xaa is any amino acid
MARQSLTHIFLHKKTWRKPAVIYGAGSTGKLVAECLTNNIRTGYIPVLFLDDSAPGENEIMGIPVIHDTSIGPEIVKRYNIKMAIVAMPELDADKLKILLKKSVSAFRYNVLIPNFFNISNIWMSVRDFSGILGIETSHKLKLNFNLGIKRLMDILFVLFGGILILPFLLFIALLIKVTSPGPVLYKHKRLGKNGKPFYAYKFRTMKKNAEQLLEELLKSDPAVREEWEKYHKLKNDPRVTAVGKVLRRISFDEFPQLINIIKGEMSLVGPRPIVNEEMEKYGDDXDRIFSIRPGLTXLWQVSGKVRHNYSERISYDAYIFKLVSVA

SEQ ID NO: 6411 - DNA, 729 bp, Unknown
  Obtained from environmental sample
  misc_feature (1)..(729): n is a, c, g, or t
ttgacttcaaacttcggctgcaaagttgaaaaaattgatggcgcaaccgtgcattacacgacaaaagacggcgcgggtcaaagacccgtggccgaaaagcaggaagccgatttggtattgatggctgttggacggcggcctgttctggatacatggggagcgcaggcggcgggccttgatatcagcccccgcggagtcgccgtggatgacatgatgcggaccaacattccccgcatttgggccgccggagatgtaaccggcaaaagccttcttgcccattgtgcctaccgcatgggtgaagtcgccgttgcggatattcttgcaacgcttaataacggaactgttaataaaactaatcgcatgagatacaacgccataccctgggccgtttacggcatcaccgaggccgccggtgtcggaattaccgaacaggaggccaacgcaaaaggaatcgccgttcttaaggcgactcttcccatgaaagtatcgggccgctttgccgcggaaaacactttttcaggagcaggggcggttaaagttatcgccggcgcggcggaccaccgtattctgggtatacacgcggtcggcgcgtattcgccggaattcatctggggcggcgcggcccttatcgaacaggaattccgcgttgacgaagttaagcagcttatttttccccatcccacggtgagcgaactcatacgtgacgcggtgtggagtatcggagaatag

SEQ ID NO: 6412 - protein, 242 aa, Unknown
  Obtained from environmental sample
  DOMAIN (126)...(237): Pyridine nucleotide-disulphide oxidoreductase, dimerisation domain
  misc_feature (1)..(242): Xaa is any amino acid
MTSNFGCKVEKIDGATVHYTTKDGAGQRPVAEKQEADLVLMAVGRRPVLDTWGAQAAGLDISPRGVAVDDMMRTNIPRIWAAGDVTGKSLLAHCAYRMGEVAVADILATLNNGTVNKTNRMRYNAIPWAVYGITEAAGVGITEQEANAKGIAVLKATLPMKVSGRFAAENTFSGAGAVKVIAGAADHRILGIHAVGAYSPEFIWGGAALIEQEFRVDEVKQLIFPHPTVSELIRDAVWSIGE

SEQ ID NO: 6413 - DNA, 657 bp, Unknown
  Obtained from environmental sample
  misc_feature (1)..(657): n is a, c, g, or t
atgggtcaaggtcatcccagtttttctgaagtgtatgaaggtcttggcagcagtttgcccattccaacgcaaatatgcatcaagacttcaaatatcntgctgcattatagctacattgtgcttgccgcaattgtcgtgcttgttatcctgtacaggcagtactacaagaccgctgcgggaaaattgcagattgattcgatgtacctaaagctcccgatatttggcgacatcattagaaaagttactattgccaggttctgccgcacattgggaaccttggtcagctctggagttccaatcctagagggaatggacatcacggcaagaaccgctggaaaccaagtgatccaaaacgcgatacttaaatgccgcgactctgtcgagcaggggcgcaccattgccgccccgcttgccgaaacaaaagtgtttccgccaatggttgtccagatggtcggcgttggcgaagccacgggtgcccttgatgccatgctggcgaaagtggccgacttttatgacgatgaagttgacaacgccgttgcgtcattgactgcccttatggagccaatgatgatagtcgtccttgccgtgataatcggcttcatcgtgatttcgatgtacatgcccatattcatgctgggcgaagcgtttgggggttga

SEQ ID NO: 6414 - protein, 218 aa, Unknown
  Obtained from environmental sample
  DOMAIN (86)...(208): Bacterial type II secretion system protein F domain
  misc_feature (1)..(218): Xaa is any amino acid
MGQGHPSFSEVYEGLGSSLPIPTQICIKTSNIXLHYSYIVLAAIVVLVILYRQYYKTAAGKLQIDSMYLKLPIFGDIIRKVTIARFCRTLGTLVSSGVPILEGMDITARTAGNQVIQNAILKCRDSVEQGRTIAAPLAETKVFPPMVVQMVGVGEATGALDAMLAKVADFYDDEVDNAVASLTALMEPMMIVVLAVIIGFIVISMYMPIFMLGEAFGG

SEQ ID NO: 6415 - DNA, 717 bp, Unknown
  Obtained from environmental sample
  misc_feature (1)..(717): n is a, c, g, or t
atggctggagtgggcactaagatttccatggccaccactcggcccttgcctgatgattttggaaccaagttttggcagatgatgccttcaagcaccaatgaaagctgggcgcgtatctgttgctgctggtgggcgggaaagacatctattattcggtttatcgtctggatggccgaattggtgtggagcgtggcaaacgccaagtgtcctgtttccgctatcgtgagcgcagattctacagtttcgaggtcgcgcatttcaccgatcatcactacatcggggtcttgtcggagcgcagaccgcagagcttttttgaaactcgaagtgtctgaatgtatttcgcgttggttcacgagactttttttgtgctggtgtacgtattccactgggtcttcgatagtcagaatatggccgtgttcgctgctgttgattttgtcaatcatggcggcaagcgtcgtggactttccgctgccggtgacgcccgttacaagcacgaggccccgcggcctgtcgcacagcgcttggactgcctgcggcagccctaattcgtccatggtgcgtatcttctcagggatagccctaaacgttccagcggttgaaccgcgctggctatatacatttgctcggaagcgagaaacgccgttgatgctgaatgaaaaatctacttccatgtcggattcgaacctcagcctctgcatgtccgtcatcacgccgtag

SEQ ID NO: 6416 - protein, 238 aa, Unknown
  Obtained from environmental sample
  misc_feature (1)..(238): Xaa is any amino acid
MAGVGTKISMATTRPLPDDFGTKFWQMMPSSTNESWARICCCWWAGKTSIIRFIVWMAELVWSVANAKCPVSAIVSADSTVSRSRISPIITTSGSCRSADRRAFLKLEVSECISRWFTRLFLCWCTYSTGSSIVRIWPCSLLLILSIMAASVVDFPLPVTPVTSTRPRGLSHSAWTACGSPNSSMVRIFSGIALNVPAVEPRWLYTFARKRETPLMLNEKSTSMSDSNLSLCMSVITP

SEQ ID NO: 6417 - DNA, 813 bp, Unknown
  Obtained from environmental sample
  misc_feature (1)..(813): n is a, c, g, or t
gtggccgtggtctttgtggtcatgctcattctcatcgccctcataatagtagtcttcaacatattcatagccggattcctcaaatcgctgcgccgcacgatggactcactggagacatccgccagatacaaaagcgaatttctggcaatgatgagccacgagatacgcacccccatgaacgccatactcggcatggcggaattggcaatgcgggaaaaagaactcccccgcgcccaagaacacgttctcacaataagaaaatccggcatgaacctgctctcaatcatcaacgatattctcgacttctccaaaatagagagcgggaaaatggacatcgtccccgtggactaccactttatgtctctcatcaaagacgttacgagcatcatcggcataaaagcggcggaatctcaactcgaattccgcgtaagcgtggacaaccgcattccgcaggccctgttcggcgacgaggtgagaatccgccagatcatcctcaacatcctcagcaacgccgtcaagtacacctccaaaggcttcgtggctcttacagtaaaaagccagcgcctcgacgaagacaaggtgaacatcataatagaggtggccgacagcggcagggggataaagcaggaggacatcggcaaactcttcaaagacttcgtgcaaatagatttggtcaaaaacaagggaatagagggaacgggcctcggcctggccatcacgcgcagcctggtaaaggccatgagcggcgcgataaacgtgcgctctaagtacggtaaaggcagcgtcttcacagtcgtgctgccgcagagataa

SEQ ID NO: 6418 - protein, 270 aa, Unknown
  Obtained from environmental sample
  DOMAIN (43)...(108): His Kinase A (phosphoacceptor) domain
  misc_feature (1)..(270): Xaa is any amino acid
MAVVFVVMLILIALIIVVFNIFIAGFLKSLRRTMDSLETSARYKSEFLAMMSHEIRTPMNAILGMAELAMREKELPRAQEHVLTIRKSGMNLLSIINDILDFSKIESGKMDIVPVDYHFMSLIKDVTSIIGIKAAESQLEFRVSVDNRIPQALFGDEVRIRQIILNILSNAVKYTSKGFVALTVKSQRLDEDKVNIIIEVADSGRGIKQEDIGKLFKDFVQIDLVKNKGIEGTGLGLAITRSLVKAMSGAINVRSKYGKGSVFTVVLPQR

SEQ ID NO: 6419 - DNA, 459 bp, Unknown
  Obtained from environmental sample
  misc_feature (1)..(459): n is a, c, g, or t
atggcttcgacaccngcgctgttcctatacgacggcataaactacatgatgacgctcgacgagtaccgcaaactcttcgcctccgtctacgacgtcctcctgccaggcggactgttcctcttcgacatcaccacgcaggagaactcgctgaggcatttcgtctactacgtagacttcgcggactacggcgacatcagctacgcccgccacagctactacgacgagataagggcgatccaacacaacgacttcaccatctaccgcctgtcggacgaccacccgccctactatgaaaagtttatagaaaggcacgtgcaaaagatactttccgtgccggagatagagaaagccatccccaaaaaacgctttgaggtacttgggatatgggacgggtttctgttcaaaaagtattccggaaaatcgatacgaatacactttttattgcgtaggcttgactaa

SEQ ID NO: 6420 - protein, 152 aa, Unknown
  Obtained from environmental sample
  misc_feature (1)..(152): Xaa is any amino acid
MASTPALFLYDGINYMMTLDEYRKLFASVYDVLLPGGLFLFDITTQENSLRHFVYYVDFADYGDISYARHSYYDEIRAIQHNDFTIYRLSDDHPPYYEKFIERHVQKILSVPEIEKAIPKKRFEVLGIWDGFLFKKYSGKSIRIHFLLRRLD

SEQ ID NO: 6421 - DNA, 447 bp, Unknown
  Obtained from environmental sample
  misc_feature (1)..(447): n is a, c, g, or t
atgatacaattcatgcacgtaagcaaagagtacgagggcggcttccgcgccttagacgccctctctttcttcattgacaaagcggaattcgtcttcctgacaggcgcgagcggcgccggcaagaccacgctcctcaaacacatctacatggaggagcgccccaccacaggccaagtcttggtgtgcggctacgactcccgcagcgtgacccacagcgacatcccctacctgcgccgcaaattaggcatcgtcttccaagacttcagactgctccacgaccgcaacgtcttcgaaaacgtcgccttcgcgctacgcgttaccggcaccccggaacgcgagataaaacgcaaagtcttcaaagtgcttgcgcagacaggcctcagccacaaaagctcaaactaccctcaaccaactctccggcggcgaaacaacaacgcgtctccatag

SEQ ID NO: 6422 - protein, 148 aa, Unknown
  Obtained from environmental sample
  DOMAIN (28)...(145): ABC transporter
  misc_feature (1)..(148): Xaa is any amino acid
MIQFMHVSKEYEGGFRALDALSFFIDKAEFVFLTGASGAGKTTLLKHIYMEERPTTGQVLVCGYDSRSVTHSDIPYLRRKLGIVFQDFRLLHDRNVFENVAFALRVTGTPEREIKRKVFKVLAQTGLSHKSSNYPQPTLRRRNNNASP

SEQ ID NO: 6423 - DNA, 333 bp, Unknown
  Obtained from environmental sample
  misc_feature (1)..(333): n is a, c, g, or t
ttgaacctgtttaagcaattgggggtaaaaatatccgtcagcgagcttgatgttctgatagtaacgtatcaggagtttgcgccttatggcagcggacccaacaaacaaaattccattacaggagatacaagaattaacggactaaagaaacaagctgaattatacggtcaattttttgaggtatatctggaatttagcgacatcattgagcgcgttacattttggggcgtcactgatgataaaagctggagatccgccgcgctgccattgttatttgacgcagacggaaacgcgaaagaagcttactacagtgtaatcggctcgttaaagtaa

SEQ ID NO: 6424 - protein, 110 aa, Unknown
  Obtained from environmental sample
  misc_feature (1)..(110): Xaa is any amino acid
MNLFKQLGVKISVSELDVLIVTYQEFAPYGSGPNKQNSITGDTRINGLKKQAELYGQFFEVYLEFSDIIERVTFWGVTDDKSWRSAALPLLFDADGNAKEAYYSVIGSLK

SEQ ID NO: 6425 - DNA, 513 bp, Unknown
  Obtained from environmental sample
  misc_feature (1)..(513): n is a, c, g, or t
ttgcggctgaagaccggaaggacaagcaaaacaatttatcacgcgaggaatacgcttacccaaagaacttttgagcctgcctgcgagggtactgccgctttagagcctgtgaacatgaaagacggcgacaaggcgggtattgttttattgcaggctatttcgggatttgcgggaattgagcaggaaaatggtaaaaaatatattataatgtacaccggtgataatgaaaacaacaaaggaatgaacgcggctgaaaccagacacgccaggctggagtttacaggcaataggatatatttgaaagtaagctgccggttcaggacggatgcctgtacagaggaaagggcggagttttcgtacagccgggacggaataaactggcagcgcataggaactgatgtaaatatgcggtggacaatgactcattttacaggcgcgcgtttcggattattttattacgcggcaaaaacaccgggcggatatgtggattttgattattttcatgtgaattaa

SEQ ID NO: 6426 - protein, 170 aa, Unknown
  Obtained from environmental sample
  misc_feature (1)..(170): Xaa is any amino acid
MRLKTGRTSKTIYHARNTLTQRTFEPACEGTAALEPVNMKDGDKAGIVLLQAISGFAGIEQENGKKYIIMYTGDNENNKGMNAAETRHARLEFTGNRIYLKVSCRFRTDACTEERAEFSYSRDGINWQRIGTDVNMRWTMTHFTGARFGLFYYAAKTPGGYVDFDYFHVN

SEQ ID NO: 6427 - DNA, 822 bp, Unknown
  Obtained from environmental sample
  misc_feature (1)..(822): n is a, c, g, or t
gtggtacggaaggccatcaactactctcttgattatcccaccatggcaaataacgcggccagcgggtattctgccgcggttgttccttcttacatggtaccggttccccaggagatggcgctggttgactgggatgccttgaagccctaccagtgggatcctaatgacagaccgggtcgtatagcccaagccaacagggaacttgacgcggcgggctgggttcgcggcgccgacggtatccgttcgaaggggggagtacggcttgcctttaccgcgatatgtcctacagggtggtcggattatcaggctactcttgaggttgtagcccaatctacaagggaagtagggatttcggttattaccgagtacccccaatcccagacagtgacttcgagggtgcagaacggagattttgaaataaatctcggcggttatggcggtatcggcctcttcaacccctggggcaggtttaacagcgccttctcaactacccaattgccccctatcggtacgcagaactctgtcgggaactttggccgctgggaaaacgcggaagtcaacaggcttattgatgacctttcccgcgaaatcagcaacgacgcgaggagaaaggagatgtacacccggcttaacataatttatctgcaggaacatcccgtaggggttatgtggtacaggccgcagtatttctataccgttaatacaacagtgtgggaaggattcccaatgatgaatgacgggaccaacattccgccggacctgctctccgacggttacggatttttgggtatctttaacattagactaaaaggttcaaggtag

SEQ ID NO: 6428 - protein, 273 aa, Unknown
  Obtained from environmental sample
  misc_feature (1)..(273): Xaa is any amino acid
MVRKAINYSLDYPTMANNAASGYSAAVVPSYMVPVPQEMALVDWDALKPYQWDPNDRPGRIAQANRELDAAGWVRGADGIRSKGGVRLAFTAICPTGWSDYQATLEVVAQSTREVGISVITEYPQSQTVTSRVQNGDFEINLGGYGGIGLFNPWGRFNSAFSTTQLPPIGTQNSVGNFGRWENAEVNRLIDDLSREISNDARRKEMYTRLNIIYLQEHPVGVMWYRPQYFYTVNTTVWEGFPMMNDGTNIPPDLLSDGYGFLGIFNIRLKGSR

SEQ ID NO: 6429 - DNA, 741 bp, Unknown
  Obtained from environmental sample
  misc_feature (1)..(741): n is a, c, g, or t
atgatagatttgcaggcccaatgnggctntacggttcaggaaaaagagagagccgatgttctgcgcatactgggaaccgataactttggccgggacgttatgacccagcttgtgtacgccattcgtaccagccttcttatcgcggttatggcgggaagcatcgccaccctgatcggtcttaccgtaggccttgtatccggatataaggggggaactgttgataatgtccttgcctcggtcatcaatattgttattgtcattcctaccatcgtaattcttattctgatatccgtcagcgtgagaacccgcagttttgttaccaccgctttcatcatcggtatgacatcctggccctggaccgcacggtcggtacgcgctcaaactacgagcttgcggaaccgggatcatgtgaatctttccaagctttcggggcactccatggcaaggatcattataaaggacatccttccctacgaggcttcctacgttttaatggctttcattttgcagatggtcgcggggattctggcggaagcgagcctttccatgcttggtctgggcccccataatgtggcgagccttggcctcatgatgtcctgggcaatgactttcaacgcccttgccaacggcgcgtggtgggccttcttgccggtagttgcgacgatcgccctgattacattctccctgaatcttgtaaattccgggctggatcagatattcaatccccagataaggagctga

SEQ ID NO: 6430 - protein, 246 aa, Unknown
  Obtained from environmental sample
  DOMAIN (41)...(246): Binding-protein-dependent transport system inner membrane component
  misc_feature (1)..(246): Xaa is any amino acid
MIDLQAQXGXTVQEKERADVLRILGTDNFGRDVMTQLVYAIRTSLLIAVMAGSIATLIGLTVGLVSGYKGGTVDNVLASVINIVIVIPTIVILILISVSVRTRSFVTTAFIIGMTSWPWTARSVRAQTTSLRNRDHVNLSKLSGHSMARIIIKDILPYEASYVLMAFILQMVAGILAEASLSMLGLGPHNVASLGLMMSWAMTFNALANGAWWAFLPVVATIALITFSLNLVNSGLDQIFNPQIRS

SEQ ID NO: 6431 - DNA, 828 bp, Unknown
  Obtained from environmental sample
  misc_feature (1)..(828): n is a, c, g, or t
ttggcgtccagtggcaccccgaaaatctggtggcactggaaggcgacggcggcaaagcggcaagggacttgttcagggcctntgcggcgcgactgggatagccaaagaagaatgaacctgatagctccaacggccttcaaaggtaccatgacaccaatggaggcggcgcgtttcttggcgtcccctgacgacctgctgctgcccttgagcgacggcggcgacggcttcatcgaatgtctccaaaacaaactggggggcaccatggaagaaccgtcggcagccgacccattcgggcgcgtcagaccagtgccaatcctcgtgttgccggacggggccgttgccgtggagtgcgcgaaggtagtcggcatggcgggtctcaaagaactgaacccgcaaaaagcctccagcaacggcctgggggagctgctgcgccaactccagtccgcgcccaagttgcttataggacttggcgggagcgccacggtcgacggcggcatgggttggccaaagatgaccttgccgccaacaaaggtgttctgcgacgtaacgaccgacctgcccgatgcagtgagactgttcgcaccccaaaaaggagcgctccccgccgatctgcccgccctgcgcgaccggctgatggcattggggcttcccaccggcaagcacaccggggcagccggcggcctaggggcaaagctgaagtcgcttggcgcggaactgctggacggcgcggaggccatgcttgaaacgctgggcttcgatgacgcatgcaaagtctgcgacgctgtggtcacgggcgaaggaagactgaccgctcctcggccaatctga

SEQ ID NO: 6432 - protein, 275 aa, Unknown
  Obtained from environmental sample
  DOMAIN (37)...(274): Glycerate kinase family
  misc_feature (1)..(275): Xaa is any amino acid
MASSGTPKIWWHWKATAAKRQGTCSGPXRRDWDSQRRMNLIAPTAFKGTMTPMEAARFLASPDDLLLPLSDGGDGFIECLQNKLGGTMEEPSAADPFGRVRPVPILVLPDGAVAVECAKVVGMAGLKELNPQKASSNGLGELLRQLQSAPKLLIGLGGSATVDGGMGWPKMTLPPTKVFCDVTTDLPDAVRLFAPQKGALPADLPALRDRLMALGLPTGKHTGAAGGLGAKLKSLGAELLDGAEAMLETLGFDDACKVCDAVVTGEGRLTAPRPI

SEQ ID NO: 6433 - DNA, 510 bp, Unknown
  Obtained from environmental sample
  misc_feature (1)..(510): n is a, c, g, or t
atgtctccaaaacaaactggggggcaccatggaagaaccgtcggcagccgacccattcgggcgcgtcagaccagtgccaatcctcgtgttgccggacggggccgttgccgtggagtgcgcgaaggtagtcggcatggcgggtctcaaagaactgaacccgcaaaaagcctccagcaacggcctgggggagctgctgcgccaactccagtccgcgcccaagttgcttataggacttggcgggagcgccacggtcgacggcggcatgggttggccaaagatgaccttgccgccaacaaaggtgttctgcgacgtaacgaccgacctgcccgatgcagtgagactgttcgcaccccaaaaaggagcgctccccgccgatctgcccgccctgcgcgaccggctgatggcattggggcttcccaccggcaagcacaccggggcagccggcggcctaggggcaaagctgaagtcgcttggcgcggaactgctggacggcgcggaggccatgcttga

SEQ ID NO: 6434 - protein, 169 aa, Unknown
  Obtained from environmental sample
  misc_feature (1)..(169): Xaa is any amino acid
MSPKQTGGHHGRTVGSRPIRARQTSANPRVAGRGRCRGVREGSRHGGSQRTEPAKSLQQRPGGAAAPTPVRAQVAYRTWRERHGRRRHGLAKDDLAANKGVLRRNDRPARCSETVRTPKRSAPRRSARPARPADGIGASHRQAHRGSRRPRGKAEVAWRGTAGRRGGHA

SEQ ID NO: 6435 - DNA, 723 bp, Unknown
  Obtained from environmental sample
  misc_feature (1)..(723): n is a, c, g, or t
gtgcgcgcgattgacggtcttctcgcggttggcaaggggcagaggctgggaattttttccggctcaggagtcggaaaatccactctccttggaatgatagcgcgtaacacttccgcggatgttaacgtggtcgccctaatcggcgagcgcgggcgggaagtgaatgattttatagactacgatcttggtcccgaagggctaaagcgcagcgtactgattgtaactccttccaattctccgcctcttgcccgtcttcgcggggcatacgtggctaccgccgtcgccgagtatttccgcgatcagggaaacgatgttatgcttttatttgactctgttacgcgatttgcccgcgccatgagggaaatagggcttgccgccggcgagcctcccgcgcaaagaggttttcctcccagtatgtttgactcaatgccaaaactacttgaaaggtcaggcacttccgacaaaggaagcataacgggcttttatacggttcttgtagacggcgatgatgagaacgaacctgtctcggatacggttcggggaatagtggacgggcatattcatctttcaagggatttggctcaagccaatcattatcctgctattgacatattacccagcatttcacgtctcgcgccgaaaatatcgggacccgcgagcaaagcggctgccggtattatccgcaaaaatatggcggcttacgcggcggctcggccgatctga

SEQ ID NO: 6436 - protein, 240 aa, Unknown
  Obtained from environmental sample
  DOMAIN (1)...(209): ATP synthase alpha/beta family, nucleotide-binding domain
  misc_feature (1)..(240): Xaa is any amino acid
MRAIDGLLAVGKGQRLGIFSGSGVGKSTLLGMIARNTSADVNVVALIGERGREVNDFIDYDLGPEGLKRSVLIVTPSNSPPLARLRGAYVATAVAEYFRDQGNDVMLLFDSVTRFARAMREIGLAAGEPPAQRGFPPSMFDSMPKLLERSGTSDKGSITGFYTVLVDGDDENEPVSDTVRGIVDGHIHLSRDLAQANHYPAIDILPSISRLAPKISGPASKAAAGIIRKNMAAYAAARPI

SEQ ID NO: 6437 - DNA, 381 bp, Unknown
  Obtained from environmental sample
  misc_feature (1)..(381): n is a, c, g, or t
gtgttacgcgctatcattccaaggagagtggattttccgactcctgagccggaaaaaattcccagcctctgccccttgccaaccgcgagaagaccgtcaatcgcgcgcacgcccgttgttatgcgctctgttattctttttcttttaagcggattaggcgggcttgcgagcgcgggatacgaacaggtagacgaaatatcgcccttgtcgtctatagggtttccaagagcgtctatgacgcgccctaaaagttatcggaaacaggcacttcaagacggctgcccagggcaatcactctgtcgccgacttcaattccgtctgtttcttcataagccattagttgtacgatttcatatcttaatctntacacttcgggcttaa

SEQ ID NO: 6438 - protein, 126 aa, Unknown
  Obtained from environmental sample
  misc_feature (1)..(126): Xaa is any amino acid
MLRAIIPRRVDFPTPEPEKIPSLCPLPTARRPSIARTPVVMRSVILFLLSGLGGLASAGYEQVDEISPLSSIGFPRASMTRPKSYRKQALQDGCPGQSLCRRLQFRLFLHKPLVVRFHILIXTLRA

SEQ ID NO: 6439 - DNA, 459 bp, Unknown
  Obtained from environmental sample
  misc_feature (1)..(459): n is a, c, g, or t
gtgaaccaggaccttgacgcccttgtcctgatacgggacctttcaagcgatgaatttgagatgtttagcgcggcgcttcatatacttacgtcaaaaacgtttatcatccggggcgttgacaaagaacgggaactttacgattttacgatcaggaacatcgcgctctttgacgcgtggttttcctgtatggatgctaatctggtacgggacgaaagtttgggtgtaatcgcctttcgcggttcggggaatacccggttgtatttttcaaaagatgaaatttgcgctgttcttgttctgcgccttctctatgaagacaaaaaacttgaagtaacattaacaaaatttccggtggtaaccgtaagggattttcaggacaagtataacgccatgaccggtgaagaaataaagaaaaccgccctcatcaattattgcgccgccttctccctcgtgccgatctga

SEQ ID NO: 6440 - protein, 152 aa, Unknown
  Obtained from environmental sample
  misc_feature (1)..(152): Xaa is any amino acid
MNQDLDALVLIRDLSSDEFEMFSAALHILTSKTFIIRGVDKERELYDFTIRNIALFDAWFSCMDANLVRDESLGVIAFRGSGNTRLYFSKDEICAVLVLRLLYEDKKLEVTLTKFPVVTVRDFQDKYNAMTGEEIKKTALINYCAAFSLVPI

SEQ ID NO: 6441 - DNA, 942 bp, Unknown
  Obtained from environmental sample
  misc_feature (1)..(942): n is a, c, g, or t
gtgttgatagcgccgactttgatgacgccccatttggacggaaaaatttggtatccttcccttatatcgtgccacgcggcgctggccgcgtggataaccggcggccctgtaaaaatcatgcttaagcgtgaagaagactttattttctcgccgaagcggaacaggtctgaaattgaaatgtgcagcgccctggaagagaaagggacgattaggagttccatcgtacaggtacaactggacctgggagcgcacgctgtctttgagaatgaaataatggaccacaccattctgggttcgcttggaaattgcaatcacggcgcttttgaaatcgaaagctcaggcgtgttaaccaatatccccccgcaagggccttttgcgggctttgggcttgcccagggtttttttgcggcagaacgccatttttcacacattgctgacactttaggccaggatccggcggagtggagaaaaaacaattgcgttaagaaaaatcaaaattttgtctttgatctgtctataaaagatatgcctccccttgaaaaacttattgacggcgccgcgtttatgagcgattactaccgtaagtgggcatcttacgagcttttaaggaaacggcgcaggggagaaaagtgggaatcggattcaataccgttgcgtggcataggaatttccacagcatttcaaggtaacggttttttaaatgcaggcgaatcgggaaccggaaattattcagtagaagtaaccctggaaaaagacggatcccttgaaataaaaaccagcgtaatctcatcagccgcaatgtttcagaacacatggcagaatctggctcaggagatccttggggtagatccttcaatgattaagctgactgggtataccgttattgccccggattcagggcccggaactctttcaagaacatcagcttgggtacccggctga

SEQ ID NO: 6442 - protein, 313 aa, Unknown
  Obtained from environmental sample
  DOMAIN (3)...(312): Aldehyde oxidase and xanthine dehydrogenase, molybdopterin binding domain
  misc_feature (1)..(313): Xaa is any amino acid
MLIAPTLMTPHLDGKIWYPSLISCHAALAAWITGGPVKIMLKREEDFIFSPKRNRSEIEMCSALEEKGTIRSSIVQVQLDLGAHAVFENEIMDHTILGSLGNCNHGAFEIESSGVLTNIPPQGPFAGFGLAQGFFAAERHFSHIADTLGQDPAEWRKNNCVKKNQNFVFDLSIKDMPPLEKLIDGAAFMSDYYRKWASYELLRKRRRGEKWESDSIPLRGIGISTAFQGNGFLNAGESGTGNYSVEVTLEKDGSLEIKTSVISSAAMFQNTWQNLAQEILGVDPSMIKLTGYTVIAPDSGPGTLSRTSAWVPG

SEQ ID NO: 6443 - DNA, 789 bp, Unknown
  Obtained from environmental sample
  misc_feature (1)..(789): n is a, c, g, or t
ttgttcaataagtttaaggcaggtgcaggctcttggcaaaaatattcagaaataggtggttttcccgaagttgtgaaaacagataattccgatattttagcagcattgttttctgacatactaaacagagatatagcagttcggcacggaataagagatattctttctttgaaacagctttcctcttatttggtttccaatgccggaagtttggtttcggcaagaaaattactgcaaccgcttggaattcacagttcaaccacaattttggaatatttctcttttttggaagactgctatctgataaattttatgcctaaattcagttattcatcaaaagcgcaagcaataaatcctaagaaaatatttgttatagacccaggcattttatcggttgcctcgcaatcgttttctcccaacaaagggcatttgcttgaaaacctagtttattggcatttcaggcggcaagggaaggaattgttttattttcaggaaaagcaaggggaatgcgattttgttgttttcaaaaacggcaagtttgaattggcagttcaggtgtgctacgaacttagccaagaaaattccacaagggaaaagaacggattgaacgaagctttgaatttttttggtagcgataaaggcattattctcacttttaatcaaaaagacgcttatatccgcaatggaaagaaaattgagattaaaccagcgtgggaatttatgaaccttactcgctggcgaacatccgcaggatggtcattctcccgattaaaaggattcacccgataa

SEQ ID NO: 6444 - protein, 262 aa, Unknown
  Obtained from environmental sample
  misc_feature (1)..(262): Xaa is any amino acid
MFNKFKAGAGSWQKYSEIGGFPEVVKTDNSDILAALFSDILNRDIAVRHGIRDILSLKQLSSYLVSNAGSLVSARKLLQPLGIHSSTTILEYFSFLEDCYLINFMPKFSYSSKAQAINPKKIFVIDPGILSVASQSFSPNKGHLLENLVYWHFRRQGKELFYFQEKQGECDFVVFKNGKFELAVQVCYELSQENSTREKNGLNEALNFFGSDKGIILTFNQKDAYIRNGKKIEIKPAWEFMNLTRWRTSAGWSFSRLKGFTR

SEQ ID NO: 6445 - DNA, 333 bp, Unknown
  Obtained from environmental sample
  misc_feature (1)..(333): n is a, c, g, or t
ttgaaccggataaaaacaccccagtcaggactgatactactcaataaaaaacccggcgttacttcctttgaagcgttaggtgaagttaaacgcgccctaggaacgggaaaggtagggcacaccggaactctggataaattcgctcaaggacttttactggttcttacaggcagggcgctcaggctcaccccttggttttcgcactgcgacaaacagtatcgggggcgtattcacttcggcgcggagaccgataccctcgaccctgagggcaatgtaacagcggaagcgcagccgccttcgcgcgatagcgtagagcaggctataaagcattaa

SEQ ID NO: 6446 - protein, 110 aa, Unknown
  Obtained from environmental sample
  DOMAIN (30)...(110): TruB family pseudouridylate synthase (N terminal domain)
  misc_feature (1)..(110): Xaa is any amino acid
MNRIKTPQSGLILLNKKPGVTSFEALGEVKRALGTGKVGHTGTLDKFAQGLLLVLTGRALRLTPWFSHCDKQYRGRIHFGAETDTLDPEGNVTAEAQPPSRDSVEQAIKH

SEQ ID NO: 6447 - DNA, 384 bp, Unknown
  Obtained from environmental sample
  misc_feature (1)..(384): n is a, c, g, or t
atgccggctttcagaacagaacgtctcggtcagacgatacaggaaaaaataggctcgctgattcttgaaggcaaaataaaagattctcgcgttaacacatttctttctattacaaaagtagacgtatcaaaagacttatcctttgccgatgtgtatgtttcagacattcgcggaaaaataaacgaaaaggaagtggaaggcttgcaaagcgcggctggctttattcagtcccagcttggagcgacaatgcacatcagaaaaatcccccgccttcgtttccacgccgataaaagcataggcgaaagttttgaaataataaagaaaatagaggaactagttgaaccggataaaaacaccccagtcaggactgatactactcaataa

SEQ ID NO: 6448 - protein, 127 aa, Unknown
  Obtained from environmental sample
  DOMAIN (5)...(109): Ribosome-binding factor A
  misc_feature (1)..(127): Xaa is any amino acid
MPAFRTERLGQTIQEKIGSLILEGKIKDSRVNTFLSITKVDVSKDLSFADVYVSDIRGKINEKEVEGLQSAAGFIQSQLGATMHIRKIPRLRFHADKSIGESFEIIKKIEELVEPDKNTPVRTDTTQ

SEQ ID NO: 6449 - DNA, 873 bp, Unknown
  Obtained from environmental sample
  misc_feature (1)..(873): n is a, c, g, or t
atgacagattggccgagtagaattgatcccgtcaacgcctttgtgattgagcgtcttggcgcttactgctccacctggagcaccggcattcatgtaaagatgcctttcatcgaccgcatcgccagtaaggtttccctcaaggaacttgtggcggactttgagccccagccggttatcaccaaggataatgtcaccatgatgattgacacggtgatctacctgcaaataaccgatcccaagctctacacatacggagtggcgcatcctatggccgctatcgaaaaccttaccagtaccacgctgaggaatatcatcggagagctggaactggacgaaacgcttaccagccgcgacatgataaacaaccgtatgcgcctggtgcttgacgaggccaccgatccctgggggatcaaggtgaaccgcgtggaggtgaagaatatcgcgccgcccaaaagcattcaggaagcgatggaaaagcagatgcgggcggaacgcgagcgccgcgaatccatactcaaggccgaaggcgaaaagcagtcggcgattctggtcgccgaggggcaaaaggcttcagccatccttaaagcggaggctgaaaaagccgcggtgatcctccaggcggaagccgccaaggaagcggcaatacgcgaagccgaaggtgaagcccaggcgattctcaatgtgcaaagggctaccgcggacggccttgcgatgataaaagctgttgatgcggatgccgctctcatcaagctgaaaagccttgaagccctgcagaaagtcgctgatggtcaggctaccaagatcatcataccttccgacatccaaaaccttgccggactggttacgagtgtgacggaattggctaagaaatag

SEQ ID NO: 6450 - protein, 290 aa, Unknown
  Obtained from environmental sample
  DOMAIN (7)...(178): SPFH domain / Band 7 family
  misc_feature (1)..(290): Xaa is any amino acid
MTDWPSRIDPVNAFVIERLGAYCSTWSTGIHVKMPFIDRIASKVSLKELVADFEPQPVITKDNVTMMIDTVIYLQITDPKLYTYGVAHPMAAIENLTSTTLRNIIGELELDETLTSRDMINNRMRLVLDEATDPWGIKVNRVEVKNIAPPKSIQEAMEKQMRAERERRESILKAEGEKQSAILVAEGQKASAILKAEAEKAAVILQAEAAKEAAIREAEGEAQAILNVQRATADGLAMIKAVDADAALIKLKSLEALQKVADGQATKIIIPSDIQNLAGLVTSVTELAKK

SEQ ID NO: 6451 - DNA, 702 bp, Unknown
  Obtained from environmental sample
  misc_feature (1)..(702): n is a, c, g, or t
atgaaaaagtcaaaatatttgtcgttctttcttttttcagccggtctcttaatacttgccggcagtttgtttatttcctgcaaggggaaaaaagtccttcccgatcctgaatatatcgcggcggtttcaagcggagttttaagtaaagactctcccgtagtcgtagaattaaaattcgcccaggacacgtccgcgccattatcgtctaacgctattgttctaagcccgaagatcaagggcgccgtttcatggcaggacgagtatactcttgtttttactcccgacgaaaattataaaccgggacagcggtatgacgtggccgtgaatataaccgggataccgccttttaatttcgattttacggcggcggttcccgttttttcggttgagcttgaacctgttcagttaagcaacaacaataatgttcttatcgctggaatagtcaccgcggaacaggacgcggaaatttccaaaatagaacagaccgtaagctcaagggaacttggtaaaccaacttggacgcacaccgatggcgttcaccgattttctttcgcgcctgtcaaacgcggcgaagcttccagaacagcggaagttacatggaaaggaaaaccggttggatctgaagcggacggagctactaccgtaatgattcccggtctggatatttttcagatgctggatcttaattcgcgaataacataa

SEQ ID NO: 6452 - protein, 233 aa, Unknown
  Obtained from environmental sample
  SIGNAL (1)...(20)
  misc_feature (1)..(233): Xaa is any amino acid
MKKSKYLSFFLFSAGLLILAGSLFISCKGKKVLPDPEYIAAVSSGVLSKDSPVVVELKFAQDTSAPLSSNAIVLSPKIKGAVSWQDEYTLVFTPDENYKPGQRYDVAVNITGIPPFNFDFTAAVPVFSVELEPVQLSNNNNVLIAGIVTAEQDAEISKIEQTVSSRELGKPTWTHTDGVHRFSFAPVKRGEASRTAEVTWKGKPVGSEADGATTVMIPGLDIFQMLDLNSRIT

SEQ ID NO: 6453 - DNA, 597 bp, Unknown
  Obtained from environmental sample
  misc_feature (1)..(597): n is a, c, g, or t
gtgacaaaggtggaatataagggcaagcaactccgccccatccgaaaattggagtactacgcntactgcaaaccgcgcgaggtgatggtgaccaacagcgaccccgaaggccggctcacgatctacgaggcgctgcgccgcgacggcctcgacgccgggctgctcaaatacgtgggacggctcgactacctctcggagggcctcttactgctgaccaacgacggcgacctgatccacgctctcacgcacccgcgcttccaaataaagaagatctacatggtgagaacatcgcggccgcttgacagaggcgacatctcaaaattgatcgacggcgtggagtcggagggccagttgctccgcgccgcctccgtcgccgccgtggatgtcaaacctgatcaatactggtacgagatagcgctctttgagggaaagaaccgtcaaatccgccgaatgttggaaggcataggccacgaggtaaggcgcctgcgccgcaccgccttcggatcggtgaggctgggcaacatgacggcgggggagtacagagagcttaccccaagggagatagcggggttgaagaacgctggatttaaaaattaa

SEQ ID NO: 6454 - protein, 198 aa, Unknown
  Obtained from environmental sample
  DOMAIN (18)...(154): RNA pseudouridylate synthase
  misc_feature (1)..(198): Xaa is any amino acid
MTKVEYKGKQLRPIRKLEYYAYCKPREVMVTNSDPEGRLTIYEALRRDGLDAGLLKYVGRLDYLSEGLLLLTNDGDLIHALTHPRFQIKKIYMVRTSRPLDRGDISKLIDGVESEGQLLRAASVAAVDVKPDQYWYEIALFEGKNRQIRRMLEGIGHEVRRLRRTAFGSVRLGNMTAGEYRELTPREIAGLKNAGFKN

SEQ ID NO: 6455 - DNA, 609 bp, Unknown
  Obtained from environmental sample
  misc_feature (1)..(609): n is a, c, g, or t
ttgcaacgcgcagttcctatccgtatgcaaacggtagaaatcgtaggcctgcagcaactggtaactgaactctgtaaaagagatgccctgctcccagcggcctttcacggaatccttggccaccatgtaattgaccgtgatgtgcttccccacctcccgcaggaattcgagtacggtgacatccttagtccactcgtaattgttcgccatctccgcgccgcccgcgccgccgtcgaagaccaaaaacttctgcaactgcttgcggatagactcggcgttcgccgccacggcctcgggggagagcatattccgctccaccgacttgcccgacggatcgcccaccatccccgtcgcgccgccgacaagcgcaataggcttgtgcccgcaacgctgaaagtgcatgagcagcatgatgggtatcatgtgcccgatgtgaagcgacttgcccgtgggatcgaacccgatatacccggagaccgccccagccgcgagtttttcctccaaaccgggggtaacatcgtggatcatgccacgccaacgcaattccgttatgaagtccatgcccgtaaaaataatatattccgcgaggcggtgtttttaatcttttaa

SEQ ID NO: 6456 - protein, 202 aa, Unknown
  Obtained from environmental sample
  misc_feature (1)..(202): Xaa is any amino acid
MQRAVPIRMQTVEIVGLQQLVTELCKRDALLPAAFHGILGHHVIDRDVLPHLPQEFEYGDILSPLVIVRHLRAARAAVEDQKLLQLLADRLGVRRHGLGGEHIPLHRLARRIAHHPRRAADKRNRLVPATLKVHEQHDGYHVPDVKRLARGIEPDIPGDRPSREFFLQTGGNIVDHATPTQFRYEVHARKNNIFREAVFLIF

SEQ ID NO: 6457 - DNA, 387 bp, Unknown
  Obtained from environmental sample
  misc_feature (1)..(387): n is a, c, g, or t
atgtcaatggcatcaacttattcggatcagtcaaggaaagaaggtttacaacttgtaatcgcctcggaaaaaggcgatgttgaaaccgcaaaaacattactcaaaaaggatgtttatatccacgcgcaggacagggaaggcaaatgcgcccttgtggctgccgcttacaagaactatcttgaaattgtcgatttgttgattgcagccggcgcggatgtcaacatgaaagacaataccctgcaaagcgcctatttgatttcaacttctgatgggttcacagagttactgaagaaaacactcaaggccggagcggatgtccactgtacggacagttacaatggaaccggactgatccgggctgcggaccgcggacatgtgaagtcataa

SEQ ID NO: 6458 - protein, 128 aa, Unknown
  Obtained from environmental sample
  DOMAIN (46)...(78): Ankyrin repeat
  misc_feature (1)..(128): Xaa is any amino acid
MSMASTYSDQSRKEGLQLVIASEKGDVETAKTLLKKDVYIHAQDREGKCALVAAAYKNYLEIVDLLIAAGADVNMKDNTLQSAYLISTSDGFTELLKKTLKAGADVHCTDSYNGTGLIRAADRGHVKS

SEQ ID NO: 6459 - DNA, 837 bp, Unknown
  Obtained from environmental sample
  misc_feature (1)..(837): n is a, c, g, or t
atgttgttgccgccagggtcggaaagccattcatttgaaccttctccaagggatattatcaacgtgcaaaatagcgacatttttatccatataggcggcgaaggagacgcttgggtagatcgtattctcaagtcaatgaatacaagaaacaagaaaattcttgccttgatggatacggttgatgtggttgaggaagaaactgtcgaaggaatggaagaagagcaagagcctgtagaacgtggaagatatattgctcgtttttttgcattcattacagggcgttcccaaaaaagccaagtcaaggaaattgaatatgatgaacacgtgtggacttctccccgcaatgcgattttgattgttcaaagaataacgaatctactatgcgaggctgattccgacaacgcaagtttttatcggcaaaatgcttctacctatattaaatctttagaggaaattgacgaggaatttaccaaaattgtcgccggagcaaaacgaaagacaatagtttttggcgaccgtttcccatttcgctattttgccaatgcctatgggcttaactattttgcggctttccccggttgttcaaccgaaaccgagccgagtgttgcaacggtcgctttcctcatcaataaaatcagagatgaaaaaatacctgttgtgtttcacattgaactttcaaatgaacgtatggctgatacaatcagtatggaaacaggcgcaaagaaacttctttctcatgnctgtcataatgtttcaaaacgggattttgaagccggtttaggctatcttgacttcatgcgcccgtatgcagaaaatttacggcaagcattgtactaa

SEQ ID NO: 6460 - protein, 278 aa, Unknown
  Obtained from environmental sample
  DOMAIN (1)...(278): Periplasmic solute binding protein family
  misc_feature (1)..(278): Xaa is any amino acid
MLLPPGSESHSFEPSPRDIINVQNSDIFIHIGGEGDAWVDRILKSMNTRNKKILALMDTVDVVEEETVEGMEEEQEPVERGRYIARFFAFITGRSQKSQVKEIEYDEHVWTSPRNAILIVQRITNLLCEADSDNASFYRQNASTYIKSLEEIDEEFTKIVAGAKRKTIVFGDRFPFRYFANAYGLNYFAAFPGCSTETEPSVATVAFLINKIRDEKIPVVFHIELSNERMADTISMETGAKKLLSHXCHNVSKRDFEAGLGYLDFMRPYAENLRQALY

SEQ ID NO: 6461 - DNA, 960 bp, Unknown
  Obtained from environmental sample
  misc_feature (1)..(960): n is a, c, g, or t
gtggcgtttttcttcctgccgctnggaaaaaatctttcgcaaaaatttaagatagtcagcattttcagctttacatggacagtgcgggcgattggaatgattacggcggttttcgccccgattgcggcgcatcttggtcatcatgatacggcgcttggattgaccatgctgggggtagctattttccatgtgatacggggtattggaatgatagccaataaccctgttttgagcaatctttcaatgggacctgaccgcagcagctacatgacacagatacagatcatcaacagcgcggtgggaatgttttcaggttttgccattgcggttattctgggcaaggaaccggggttatttctgtattcaatcattatgtccgccggcgttgtctgcgggattatcagcggtatgctgatagggaaagtgccggagcctcccaccgaagaaagcgccgtaaaaaccagccttgtcagccttgtccgtgaagcccttctggagccaaaaatcaaactttttttaataatattgcttcttgtcattctggtatcaggcgtgtcgaggactttccttgtcgtttatgcccgcgaggtatttttacaggaagacggcatggtgctgctgtattctgtttttggcggactgggaaatttattggcgaatatgctgataaaattccttgttgacagaatcggggcaaagccgatttttattctctgtgtgcttcttggttttataatgatgattcctatagtgttttttccgctttcgtctgttaacagtctgaccatggtgatcctttttctttccttcttgttctttatgttgaatttcggttttcttggttcagagggaatcgcgcagacttatttcatggggctggttccaactgaaaaaatgctggacatggggatgctgtatttctttgttttcggagttgccggcgccgctcggccgatctga

SEQ ID NO: 6462 - protein, 319 aa, Unknown
  Obtained from environmental sample
  misc_feature (1)..(319): Xaa is any amino acid
MAFFFLPLGKNLSQKFKIVSIFSFTWTVRAIGMITAVFAPIAAHLGHHDTALGLTMLGVAIFHVIRGIGMIANNPVLSNLSMGPDRSSYMTQIQIINSAVGMFSGFAIAVILGKEPGLFLYSIIMSAGVVCGIISGMLIGKVPEPPTEESAVKTSLVSLVREALLEPKIKLFLIILLLVILVSGVSRTFLVVYAREVFLQEDGMVLLYSVFGGLGNLLANMLIKFLVDRIGAKPIFILCVLLGFIMMIPIVFFPLSSVNSLTMVILFLSFLFFMLNFGFLGSEGIAQTYFMGLVPTEKMLDMGMLYFFVFGVAGAARPI

SEQ ID NO: 6463 - DNA, 678 bp, Unknown
  Obtained from environmental sample
  misc_feature (1)..(678): n is a, c, g, or t
atgaagatgggaagcgcccaccggacatcccacggacccctgaagtttcatggggggcggcagcgggctggggctctccatcgtcaagggggttgtggagcgccacggcgggccgtttgggtggagagcgaaggcaccgacgagggcaccttccccggcagcacgtttcacgtctctctgccgctgcgctccgcgataagctgggacgacgacgagtcgaacctctctgaaagccgcttgcaggaggccgacaacatagatttggacgccctagatgatgaaaatcctggaaagcctgtcatcctgttcatagaccaagacaaggaatcgaccgcgagggccagcaccgtgatcgaaaacgtctacgacatattggtcgcggagagcggggagcagggcctgatcacggctctgacccagaatccctccctaatactgatagactcgcgtctgccggggttggacgggtatacattgtgccgcatactgcgctcgctcgacgagacaaagagcacccccatcgccatcttctccgccggagtgcgggacgaagagatacagaaaggcttctccagcggcgcggacgacttcatagtgaagccgttcaccggaagggaactggttgagaaagttgtcaggctgttaatgaagaagcaagaggccgaggtattcaagtag

SEQ ID NO: 6464 - protein, 225 aa, Unknown
  Obtained from environmental sample
  DOMAIN (99)...(212): Response regulator receiver domain
  misc_feature (1)..(225): Xaa is any amino acid
MKMGSAHRTSHGPLKFHGGRQRAGALHRQGGCGAPRRAVWVESEGTDEGTFPGSTFHVSLPLRSAISWDDDESNLSESRLQEADNIDLDALDDENPGKPVILFIDQDKESTARASTVIENVYDILVAESGEQGLITALTQNPSLILIDSRLPGLDGYTLCRILRSLDETKSTPIAIFSAGVRDEEIQKGFSSGADDFIVKPFTGRELVEKVVRLLMKKQEAEVFK

SEQ ID NO: 6465 - DNA, 489 bp, Unknown
  Obtained from environmental sample
  misc_feature (1)..(489): n is a, c, g, or t
atgacagtagaattacaaaattatgtagaacctttcgtagaagttacggtcaacacttttaaagaatttgtaggtgttgacgtaagcccaaggcatccgcactttctggatcctgaaaaggcctttgaatgggatatttctgcggtaataggtctttccggtgtggttaaaggcgctgttatagtctccatgaagtctgaattggcgattaaattaaccgacctgttaaccggagttgaacacacggaacttgacgccgatgtaatcgacgcaattggcgaagtaaataacatcattgccggaaacataaagccaaaagtgccgaatggggacaaaattgtaatttcaattcctacaattatcagaggaaaagaacattcaatcgcatggcccagcaaacagacgcgtattctttgtattccgcacaaagcgtttgataacgatatttttcacctaatggtagctattgaacttgattatgcatcttag

SEQ ID NO: 6466 - protein, 162 aa, Unknown
  Obtained from environmental sample
  misc_feature (1)..(162): Xaa is any amino acid
MTVELQNYVEPFVEVTVNTFKEFVGVDVSPRHPHFLDPEKAFEWDISAVIGLSGVVKGAVIVSMKSELAIKLTDLLTGVEHTELDADVIDAIGEVNNIIAGNIKPKVPNGDKIVISIPTIIRGKEHSIAWPSKQTRILCIPHKAFDNDIFHLMVAIELDYAS

SEQ ID NO: 6467 - DNA, 381 bp, Unknown
  Obtained from environmental sample
  misc_feature (1)..(381): n is a, c, g, or t
atggattgcgtcattgtaaacgcgtcattcagattaaaaaaatgcaataaagaagaacaagaaaaaatgttaaacaacataaataaatacagggaagacagagaaaaaaaagggcattaccgtttccccagcgccggttccgcttttaagaacaaccgtgattttggaaaacccacagggcaaatcatagacgaacttggtttaaaaagccggcaaataggcggcgctcaaatagcccccttccacggaaatatcatcattaacacaggcagcgcgtccgcgaatgacatccgcgctcttgtggacgaaacagctttagaagttaaaaaaaagacaggatttatacttgaaccggaaatactttttgtcggtgaatggtag

SEQ ID NO: 6468 - protein, 126 aa, Unknown
  Obtained from environmental sample
  DOMAIN (20)...(124): UDP-N-acetylenolpyruvoylglucosamine reductase, C-terminal domain
  misc_feature (1)..(126): Xaa is any amino acid
MDCVIVNASFRLKKCNKEEQEKMLNNINKYREDREKKGHYRFPSAGSAFKNNRDFGKPTGQIIDELGLKSRQIGGAQIAPFHGNIIINTGSASANDIRALVDETALEVKKKTGFILEPEILFVGEW

SEQ ID NO: 6469 - DNA, 933 bp, Unknown
  Obtained from environmental sample
  misc_feature (1)..(933): n is a, c, g, or t
atgggcagcgactttttggggacggaacacctgctgtttgccgccatgagggagcaggattccagcgttcagtcatatttaagccacaaagcggttgatgttgatatgattcgggtcgtggttcagacgacttttaaccggccttccgtggcgcgcagcgaccggccttttgtcgccgccaacggctgtccttcctattttatccaccgggaccgccccggccgctatcccgaccagtatgccgtggcgggcgcggagaggcagccgcgggtcagacccgccacctatcctgtccttacccccacgctggacactttttcccgcgatttaagcgccctcgcgcgggcgggcaaactggacccggttattggcagggaagacgagatgaaccgcattgtgcggattcttgcccggcggaccaagaacaatcccatactggtcggcgagccgggggtgggcaaaacggccattgttgagggccttgcccaactgctcgcttcggataaagcgccggaagcccttgccggcaaacgaatcctttcccttgatatggggtccattgtggcgggaaccaagtaccggggtgaatttgaggaacgcctcaaaaaaatcacccgggagataacccagtcgggaagcgtaattctgtttattgatgagatacattcgatcatcggggcgggcggcgctgagggaaccattgacgcttccaatatgctcaagccgggcctttcccgcggcgacattcagtgcataggcgctaccacgcttgccgaataccgcanacattttgaaaaagacgcggcgcttgaacggcgtttccaggccgttctggttgaagagccggacatggatgaaaccctgctgatactccggggcatccagaaaaatatgaagatcatcataaagtctgctacaccgatggcgcggtaa

SEQ ID NO: 6470 - protein, 310 aa, Unknown
  Obtained from environmental sample
  DOMAIN (143)...(282): ATPase family associated with various cellular activities (AAA)
  misc_feature (1)..(310): Xaa is any amino acid
MGSDFLGTEHLLFAAMREQDSSVQSYLSHKAVDVDMIRVVVQTTFNRPSVARSDRPFVAANGCPSYFIHRDRPGRYPDQYAVAGAERQPRVRPATYPVLTPTLDTFSRDLSALARAGKLDPVIGREDEMNRIVRILARRTKNNPILVGEPGVGKTAIVEGLAQLLASDKAPEALAGKRILSLDMGSIVAGTKYRGEFEERLKKITREITQSGSVILFIDEIHSIIGAGGAEGTIDASNMLKPGLSRGDIQCIGATTLAEYRXHFEKDAALERRFQAVLVEEPDMDETLLILRGIQKNMKIIIKSATPMAR

SEQ ID NO: 6471 - DNA, 462 bp, Unknown
  Obtained from environmental sample
  misc_feature (1)..(462): n is a, c, g, or t
atgtcgccgcgggaaaggcccggcttgagcatattggaagcgtcaatggttccctcagcgccgcccgccccgatgatcgaatgtatctcatcaataaacagaattacgcttcccgactgggttatctcccgggtgatttttttgaggcgttcctcaaattcaccccggtacttggttcccgccacaatggaccccatatcaagggaaaggattcgtttgccggcaagggcttccggcgctttatccgaagcgagcagttgggcaaggccctcaacaatggccgttttgcccacccccggctcgccgaccagtatgggattgttcttggtccgccgggcaagaatccgcacaatgcggttcatctcgtcttccctgccaataaccgggtccagtttgcccgcccgcgcgagggcgcttaaatcgcgggaaaaagtgtccagcgtgggggtaaggacaggatag

SEQ ID NO: 6472 - protein, 153 aa, Unknown
  Obtained from environmental sample
  misc_feature (1)..(153): Xaa is any amino acid
MSPRERPGLSILEASMVPSAPPAPMIECISSINRITLPDWVISRVIFLRRSSNSPRYLVPATMDPISRERIRLPARASGALSEASSWARPSTMAVLPTPGSPTSMGLFLVRRARIRTMRFISSSLPITGSSLPARARALKSREKVSSVGVRTG

SEQ ID NO: 6473 - DNA, 618 bp, Unknown
  Obtained from environmental sample
  misc_feature (1)..(618): n is a, c, g, or t
ttgccgcaaggcttaccgcgccatcggtgtagcagactttatgatgatcttcatatttttctggatgccccggagtatcagcagggtttcatccatgtccggctcttcaaccagaacggcctggaaacgccgttcaagcgccgcgtctttttcaaaatgtntgcggtattcggcaagcgtggtagcgcctatgcactgaatgtcgccgcgggaaaggcccggcttgagcatattggaagcgtcaatggttccctcagcgccgcccgccccgatgatcgaatgtatctcatcaataaacagaattacgcttcccgactgggttatctcccgggtgatttttttgaggcgttcctcaaattcaccccggtacttggttcccgccacaatggaccccatatcaagggaaaggattcgtttgccggcaagggcttccggcgctttatccgaagcgagcagttgggcaaggccctcaacaatggccgttttgcccacccccggctcgccgaccagtatgggattgttcttggtccgccgggcaagaatccgcacaatgcggttcatctcgtcttccctgccaataaccgggtccagtttgcccgcccgcgcgagggcgcttaa

SEQ ID NO: 6474 - protein, 205 aa, Unknown
  Obtained from environmental sample
  misc_feature (1)..(205): Xaa is any amino acid
MPQGLPRHRCSRLYDDLHIFLDAPEYQQGFIHVRLFNQNGLETPFKRRVFFKMXAVFGKRGSAYALNVAAGKARLEHIGSVNGSLSAARPDDRMYLINKQNYASRLGYLPGDFFEAFLKFTPVLGSRHNGPHIKGKDSFAGKGFRRFIRSEQLGKALNNGRFAHPRLADQYGIVLGPPGKNPHNAVHLVFPANNRVQFARPREGA

SEQ ID NO: 6475 - DNA, 867 bp, Unknown
  Obtained from environmental sample
  misc_feature (1)..(867): n is a, c, g, or t
gtgctggcccgcagtgaggaaaaagggaagggcgcgcgcgggttgtcgtttttcctttataagcgtgatgatgattcggggaagccgacaatgatcatacggcggctggaacacaagctgggcatacacggttcccccacctgcgaactgcaatttaatcacgctccggcggaattagtcggcgaacgccagcggggactgaccaaatacaccctgtggctgatgaacaatgcccgtctcggcgtcgccgcccagggagtcggcattgccgaagccgcttaccgcgaagccgacctctacgccgccaagcggattcaattcggcgcgccggtgcgggatttagcgccggtgtttgaaatgctcacggagatgaaagtcgccgttgaagcgggacggactcttctttatgaaaccgcccgttttgttgatcttaaagaagtgctggaagaatattccgacaagcatcccgaagagaaaggcgaaataatcgaagagaaaaagcgttacgcgaaactcgccggtttctttaccccgatgatcaaagcctacgccaccgagatggcgaataaagttgccaacgacgcgattcaaattcacggcggaaccggttacatgaaggaatttaacgccgagcgccattaccgcgacgcgagaatcaccaacatttacgagggaaccactcagttgcaggttgtcgccgccattggcccggtaacttccggcgtggcgcagatgattctggaccagtatgatgcggccacctatacttacggagaggatctgctggcganaatcgggaaagccggaaagtcttcaatgaagcccttgaatacgcaaaggcgtatgaaggccacgatcaattcctga

SEQ ID NO: 6476 - protein, 288 aa, Unknown
  Obtained from environmental sample
  DOMAIN (80)...(228): Acyl-CoA dehydrogenase, C-terminal domain
  misc_feature (1)..(288): Xaa is any amino acid
MLARSEEKGKGARGLSFFLYKRDDDSGKPTMIIRRLEHKLGIHGSPTCELQFNHAPAELVGERQRGLTKYTLWLMNNARLGVAAQGVGIAEAAYREADLYAAKRIQFGAPVRDLAPVFEMLTEMKVAVEAGRTLLYETARFVDLKEVLEEYSDKHPEEKGEIIEEKKRYAKLAGFFTPMIKAYATEMANKVANDAIQIHGGTGYMKEFNAERHYRDARITNIYEGTTQLQVVAAIGPVTSGVAQMILDQYDAATYTYGEDLLAXIGKAGKSSMKPLNTQRRMKATINS

SEQ ID NO: 6477 - DNA, 354 bp, Unknown
  Obtained from environmental sample
  misc_feature (1)..(354): n is a, c, g, or t
ttgatggagtatttcaaggaacatctttcagaagatatttctctggagactctttctaaaacttttaatatgagcacttcccatattgaacgccttacaaacaaggaatttggctgtggggctattcatcttttcaaccgccttaagattgacagagctcgtatactgctgcaaacatctgatctttgtatttcggaaattgccgctgttttggggtttgaagatcaggggtatttttcacggctctttaataagcttacgggagtcagaccaaataaatataaaaaagggggaattttaacaacctacaattctgttaccgatttaataaatagagggaacccgcatccttaa

SEQ ID NO: 6478 - protein, 117 aa, Unknown
  Obtained from environmental sample
  DOMAIN (52)...(96): Bacterial regulatory helix-turn-helix proteins, AraC family
  misc_feature (1)..(117): Xaa is any amino acid
MMEYFKEHLSEDISLETLSKTFNMSTSHIERLTNKEFGCGAIHLFNRLKIDRARILLQTSDLCISEIAAVLGFEDQGYFSRLFNKLTGVRPNKYKKGGILTTYNSVTDLINRGNPHP

SEQ ID NO: 6479 - DNA, 936 bp, Unknown
  Obtained from environmental sample
  misc_feature (1)..(936): n is a, c, g, or t
ttgaagctcgcttccgctgttgccgaagcgatagaagacgcggaaatgatggccggccttcaggttgaggactgctgggcgggcatcggcggaaatcacataaacggacttaattcgcgcggagtagtaggcgtatcgggaaaaaaacgcgatacaaaggaaagagaaataagccaggaagatgttgatcgcgtaatagaggcggcaaaagccgtcgtgataccaaccgacaggcaaatattggaagtaatacctcaaaattacaaagtagacgatcaaaaaggtataaggaatccgctggacatgctgggtatacgccttgaatgtgaggtgcatataattacctgtacggtaacaggtgcgcaaaatttaattaaatgcgttaatcgtgcggggtttatggtaaatgagcttattttacagacgcttgccgcaggccgcgccgttcttacgcaggaagaaatggatcttggagccgtgttacttgatctgggagcgggcactacagacgttctggtttatgttgacggtactccctattctacatataccattccggccggcggaacgcaggctacaagcgatatatccataattaaaaatatttcttttgacaacgcggaaaaaataaaaattgacaccggctgctgctgggattcatttctggaagatgacgaagttgtaattgttcccggagtcggcggaaggcctcccatgtcaattccgcgttctcaaatactgactatcataaaacccagaatggaagagctttttaagatggttaaacagcatcttgatactttgaatctttcgcgtcagcttggcggaagagtagtgcttaccggcggaggagcgcagttgcacggcgttgtagaacttgcaaacagcatcttaaaactgcggcgcggcttgaactccataccgacaaaaatttga

SEQ ID NO: 6480 - protein, 311 aa, Unknown
  Obtained from environmental sample
  DOMAIN (1)...(149): Cell division protein FtsA
  misc_feature (1)..(311): Xaa is any amino acid
MKLASAVAEAIEDAEMMAGLQVEDCWAGIGGNHINGLNSRGVVGVSGKKRDTKEREISQEDVDRVIEAAKAVVIPTDRQILEVIPQNYKVDDQKGIRNPLDMLGIRLECEVHIITCTVTGAQNLIKCVNRAGFMVNELILQTLAAGRAVLTQEEMDLGAVLLDLGAGTTDVLVYVDGTPYSTYTIPAGGTQATSDISIIKNISFDNAEKIKIDTGCCWDSFLEDDEVVIVPGVGGRPPMSIPRSQILTIIKPRMEELFKMVKQHLDTLNLSRQLGGRVVLTGGGAQLHGVVELANSILKLRRGLNSIPTKI

SEQ ID NO: 6481 - DNA, 837 bp, Unknown
  Obtained from environmental sample
  misc_feature (1)..(837): n is a, c, g, or t
atgagcgccaccacctacattaaggctatgccgcagacctgcgccgcgaatatcggcgtgtttttcggactgaccggcagaattattacaactaacacggcctgcacgtcgagcagccaggccatcggtttcgcgtacgagacaataaggcagggtatacaggacgttatgctcgccggcggcgcggatgagttaaacgccgcggacgccgccgtatttgacacgctcttcgccgcgagttccaaaaacgacagcccggaaaaaactccagccgcctatgataaaaaccgcgacggccttgtcatcggcgaaggggcggggactttgattttggaagaatacgagcacgcaaaaaaacgcggggcgaaaataatcgccgaaattatcggatttggaaccaataccgacggcactcacattacccagcccaaccgcgccactatgggcatagccatgaagctcgcacttgaagacgcggaactggaccccgcctccatcgcttatgtgaatacgcacggaaccgccacagacgcgggcgatgtcgcggaaagctgggctaccgcggatgtctttcaaaggcccgttccggcaagcaccttaaaaagctacataggccacaccctgggagcctgcggcgttattgaggcttggatcgccattaacatgatgagggaaaaatggttctgtcccaatcttaatcttgaggagcttgatcctcgctgcggaccgctggattatatcaccggagacggacggataattgacggggagtatataatgtcaaataatttcgcctttggcggaattaatacttctcttatcttcagaaaattgtaa

SEQ ID NO: 6482 - protein, 278 aa, Unknown
  Obtained from environmental sample
  DOMAIN (1)...(117): Beta-ketoacyl synthase, N-terminal domain
  misc_feature (1)..(278): Xaa is any amino acid
MSATTYIKAMPQTCAANIGVFFGLTGRIITTNTACTSSSQAIGFAYETIRQGIQDVMLAGGADELNAADAAVFDTLFAASSKNDSPEKTPAAYDKNRDGLVIGEGAGTLILEEYEHAKKRGAKIIAEIIGFGTNTDGTHITQPNRATMGIAMKLALEDAELDPASIAYVNTHGTATDAGDVAESWATADVFQRPVPASTLKSYIGHTLGACGVIEAWIAINMMREKWFCPNLNLEELDPRCGPLDYITGDGRIIDGEYIMSNNFAFGGINTSLIFRKL

SEQ ID NO: 6483 - DNA, 441 bp, Unknown
  Obtained from environmental sample
  misc_feature (1)..(441): n is a, c, g, or t
atgggcgatgtcgtcagcctcgttgaaaaagcgcaggaagtaatcgatcaaaaagaagcgcttgaactccagaaaaaaatggagaaagaaaactttactcttgatgattggcttaaccagcttcgagctgtaaaaaaaatgggttcactgcaatcaatgctggagatgatcccaggaatgcagggtcaaatcaatgaggaagatattgacaaagcggaattaaaaaagcaggaagcgatattaagctcaatgacacgcaaagaacgcgacaaccacctgataataggacctccgcgccgcagccgtattgccagaggttcgggcacttctgttgcggaagtcgcccgtttaattaaaaagtttgaaaaaatgcgcagtatgatgaagaaaatggcaaagggcgcaaagaacgatatgtttaatatacccggaatgttctag

SEQ ID NO: 6484 - protein, 146 aa, Unknown
  Obtained from environmental sample
  DOMAIN (31)...(128): Signal peptide binding domain
  misc_feature (1)..(146): Xaa is any amino acid
MGDVVSLVEKAQEVIDQKEALELQKKMEKENFTLDDWLNQLRAVKKMGSLQSMLEMIPGMQGQINEEDIDKAELKKQEAILSSMTRKERDNHLIIGPPRRSRIARGSGTSVAEVARLIKKFEKMRSMMKKMAKGAKNDMFNIPGMF

SEQ ID NO: 6485 - DNA, 555 bp, Unknown
  Obtained from environmental sample
  misc_feature (1)..(555): n is a, c, g, or t
gtgctggccctggcaaaactcctcatggtgacatcggcggacaacagaccgggcctgtttgagctttggtgcaatttaacaggaagcctgtaccgccctgatttcagcatgagcgacataatcgcgagcctgcccccctttaccactacggcggcatccgcgacggaagcggtgctaaaaatcaccagtaccgagcatggcgcgttgaaaggccgttatcagaagctcttcatagctgagtgggagaaacgcaaagaacagctcgcggctaattacggcatatacagatgggaagcgaaagcgtacaatgggatagaggagcgcgatgtgtccgccgattttgcgcaagccggaaaggggggactaaaaatatgcttcctcaactctggcggcaggccgcttgcttcgatatggatgagaggctccgccaccgagccggtcttccgtattatggcggatgtcgaagggacagaccggcggtttgaacaggaattgataaactggcagcgctgcatgacaataaaagcagacgagactgaatcaaacaggagttaa

SEQ ID NO: 6486 - protein, 184 aa, Unknown
  Obtained from environmental sample
  misc_feature (1)..(184): Xaa is any amino acid
MLALAKLLMVTSADNRPGLFELWCNLTGSLYRPDFSMSDIIASLPPFTTTAASATEAVLKITSTEHGALKGRYQKLFIAEWEKRKEQLAANYGIYRWEAKAYNGIEERDVSADFAQAGKGGLKICFLNSGGRPLASIWMRGSATEPVFRIMADVEGTDRRFEQELINWQRCMTIKADETESNRS

SEQ ID NO: 6487 - DNA, 675 bp, Unknown
  Obtained from environmental sample
  misc_feature (1)..(675): n is a, c, g, or t
atggacgggcatttctggttagaatccgaaacagggaagggagcgacatttctctttactttccgctcggaaataggaaagacggaaacatgcgcgttaactcgggaagtttccgttaaagcgccctcggatacatccggggaaaaaaccgcgcaagcttctgcgtatgcagtagcgaatgaagggcagggctcggatacatccgtggatgatgtttataagggcaaacgcatattgcttgcggaagatgttgatgtaaacagggaaatagtcattgccgtgctggaacctttgggactgaaaattatcgaagccgaagacggacagaaagccttcgatttattccgcgccgatcccgattctttcgatctgatttttatggatattcacatgccgggcgtagacggttatgaatccacaaggcttatccgcaactttgaggcggaacgcaataaaaacatttcagagaatgtcagcacgagtttcaccgaaggtgaaactcgaagcaatgataggaatttgcgcaagcaaattcctatcattgcaatgaccgccaatgttttcaaggaagatattgaacgctgtcacgccgccggtatgaatgatcatatagggaaaccgcttgatttttccgtagtaacggatgttttaaagaaataccttacgcaaacttaa

SEQ ID NO: 6488 - protein, 224 aa, Unknown
  Obtained from environmental sample
  DOMAIN (76)...(218): Response regulator receiver domain
  misc_feature (1)..(224): Xaa is any amino acid
MDGHFWLESETGKGATFLFTFRSEIGKTETCALTREVSVKAPSDTSGEKTAQASAYAVANEGQGSDTSVDDVYKGKRILLAEDVDVNREIVIAVLEPLGLKIIEAEDGQKAFDLFRADPDSFDLIFMDIHMPGVDGYESTRLIRNFEAERNKNISENVSTSFTEGETRSNDRNLRKQIPIIAMTANVFKEDIERCHAAGMNDHIGKPLDFSVVTDVLKKYLTQT

SEQ ID NO: 6489 - DNA, 840 bp, Unknown
  Obtained from environmental sample
  misc_feature (1)..(840): n is a, c, g, or t
ttgatgataatacntttaaaggagcaagacatgaacgcactaggatattacaacggaaaatggggtcctcttgacgaaatgaccgtgccgatgaacgacaggggctgcttctttggagacggcgtgtacgacgctacctgcgccgctaacggggtgatttttgccctggatgagcacattgacaggtttttcaacagcgcaaaactcctggaaatagaaatcggttttacaaaagaggaactgaaaaaaaccatcaatgaaatgtactccaaagtggataagggggagtaccaggtttattggcaggcgactcgtggaaccggccggcgaagccatgtatttccggcaggtccctcaaatctctggataatgattaagcctaatcacgtcgacgatctttatagaaaaataaagctcattaccacggaagatacccgctttttccactgcaacatcaaaacacttaaccttattcccaatgtcattgcttcccagcgagcgctggaagcgggctgccacgaggcagtttttcaccggggcgaaacagtgaccgaatgcgcccatagcaatgtccacataattaaggacggcaggtttattactcatcaaactgacaacctgatcctccctggcatagcccgcagccatttgttgcaagcctgcgacaggctgaatgttccggttgacgaacgggaatttaccctttcggaattgttcggcgcggatgaggtacttgtgtccagcagcggcacactcggtcttagcgccgatacaatagacggaaaaaatgtgggagggaaagcgccggaactgctaaaaagaattcaggacgaagtgtga

SEQ ID NO: 6490 - protein, 279 aa, Unknown
  Obtained from environmental sample
  DOMAIN (18)...(278): Aminotransferase class IV
  misc_feature (1)..(279): Xaa is any amino acid
MMIIXLKEQDMNALGYYNGKWGPLDEMTVPMNDRGCFFGDGVYDATCAANGVIFALDEHIDRFFNSAKLLEIEIGFTKEELKKTINEMYSKVDKGEYQVYWQATRGTGRRSHVFPAGPSNLWIMIKPNHVDDLYRKIKLITTEDTRFFHCNIKTLNLIPNVIASQRALEAGCHEAVFHRGETVTECAHSNVHIIKDGRFITHQTDNLILPGIARSHLLQACDRLNVPVDEREFTLSELFGADEVLVSSSGTLGLSADTIDGKNVGGKAPELLKRIQDEV

SEQ ID NO: 6491 - DNA, 423 bp, Unknown
  Obtained from environmental sample
  misc_feature (1)..(423): n is a, c, g, or t
atggttattatgatgagtacatatatgtcgtttcccgcggctatttcaaattcgggagaggaaatgtcatttgaaaacgatttatccgagtcgcaaatatacaaaaaaatatataaggagcagcaaatgaccaaaacaaatacntttgtggatactgaagaacggaaactcataaagtcgcttgagacagacggatggacgccggcaaaaaacattgaatcctggaaaatccacctggctgagacagcaaccaatacattaaccaaagatcagcggatgaatattcgtattaccagaaaagaccttgacggtattaaactcaaggcggcggaagaaggcatgccgtatcaaacattggttgccagtattattcacaaatatgtcaccggaaggttaacggaaaaacatggtctcaaagggtaa

SEQ ID NO: 6492 - protein, 140 aa, Unknown
  Obtained from environmental sample
  misc_feature (1)..(140): Xaa is any amino acid
MVIMMSTYMSFPAAISNSGEEMSFENDLSESQIYKKIYKEQQMTKTNTFVDTEERKLIKSLETDGWTPAKNIESWKIHLAETATNTLTKDQRMNIRITRKDLDGIKLKAAEEGMPYQTLVASIIHKYVTGRLTEKHGLKG

SEQ ID NO: 6493 - DNA, 717 bp, Unknown
  Obtained from environmental sample
  misc_feature (1)..(717): n is a, c, g, or t
atgatgataggttataattttaacgatataaaaaccaataaccgctacgaaataattcaaatgatttaccagtgcaccgacgtaaaccgtaattttataactcaaagaacgggcctgaccaacgcggcggtaacaaagataatcgattcccttattaaagagcagtttatttcggaaaaggattattttagccatttccgcgacagaaaagcgcgttaccttgcgatctgtgagggttctttcggggttattaatctttatctgggaagaagcctgattatagcgtcaattgccgatatttgcggtaaaatcatatattcacagcagtatttaatcaattttcgcatgatagacgacacaattttaagcgaaattgcctgtgagacaatccgccattttcccgaaagcctttcatgccttggctgtgtggttatcagcccaggcataaggtcggttcaggaacatgacgatcatgccagaaaatcggatgcgccgtatttctggaaccttaaaaagctgaacgatgtagtcagtggcacgtaccatatgccgttatacacagacaacctctgcaacgccgctctgcttggagaaaaatggttcggcaaggggcggaattccaataatttcgtgttgtatagcataggcagaggtattggttccgcggttaatcgatatgggtgtagagatattgcatccgcttcaagctctggctaa

SEQ ID NO: 6494 - protein, 238 aa, Unknown
  Obtained from environmental sample
  DOMAIN (88)...(237): ROK family
  misc_feature (1)..(238): Xaa is any amino acid
MMIGYNFNDIKTNNRYEIIQMIYQCTDVNRNFITQRTGLTNAAVTKIIDSLIKEQFISEKDYFSHFRDRKARYLAICEGSFGVINLYLGRSLIIASIADICGKIIYSQQYLINFRMIDDTILSEIACETIRHFPESLSCLGCVVISPGIRSVQEHDDHARKSDAPYFWNLKKLNDVVSGTYHMPLYTDNLCNAALLGEKWFGKGRNSNNFVLYSIGRGIGSAVNRYGCRDIASASSSG

SEQ ID NO: 6495 - DNA, 744 bp, Unknown
  Obtained from environmental sample
  misc_feature (1)..(744): n is a, c, g, or t
ttggtggggaggtctaaacctataaaatcaacatcgacatcctgccccctctgcgattccaccgccttgtccctcataagccaagacgagaggcataagcgccctttctacctttgccgtgactgcgctctaatatccgtcccgccgcgataccatctgtcaaaaaccgacgaactggcccgctacgccctccacgacaacaccatatcaaacaagggctatgtcgcctttctatccgaagtcgccgatgtagccgttaatatagcctcagaaatgcagcgtatcgccggtttacccattaacgaccctagggagcgtcccataaaactgctcgatttcgggtgcggctctgaggcggtgctctgccgtttgcttgcgatgcgggggataggtatagactgccgcccctacgacccgttgtacgaagggttgcggatgttgccggacgcggttggcaaatacgatataattgttgcaagcgaggtcattgagcaccttcgcgacataacgggggatttgcgtctgatggtcgggttgctgcgcggcggcggcgcgattattttgcggacgcggctatacgacgattccggcgtagacgcatcgtcagatttccaaagctggtggtacgctcaggatcctacgcatataaattttttcagcgggaaatcgctttctaggctggcgatgattgccggtaagcggattgaggagactgggtgtcgggatatatttgttcttaggtga

SEQ ID NO: 6496 - protein, 247 aa, Unknown
  Obtained from environmental sample
  misc_feature (1)..(247): Xaa is any amino acid
MVGRSKPIKSTSTSCPLCDSTALSLISQDERHKRPFYLCRDCALISVPPRYHLSKTDELARYALHDNTISNKGYVAFLSEVADVAVNIASEMQRIAGLPINDPRERPIKLLDFGCGSEAVLCRLLAMRGIGIDCRPYDPLYEGLRMLPDAVGKYDIIVASEVIEHLRDITGDLRLMVGLLRGGGAIILRTRLYDDSGVDASSDFQSWWYAQDPTHINFFSGKSLSRLAMIAGKRIEETGCRDIFVLR

SEQ ID NO: 6497 - DNA, 618 bp, Unknown
  Obtained from environmental sample
  misc_feature (1)..(618): n is a, c, g, or t
gtgaagtgggaaaaaagggatatttctcctgagctggtaaaaagcctctcgtccaaatacggatgcgatctcttaacagcgtccattttggcgcgccgcgacattattacaggcgaagaaattcaatactttctggaagatgacgtaagacgcctgaaaaacccctttgaacttcccggtatggaagacgcggtggaacggatccttgccgcaaaagaagaaggtgaaaaaatactaatctcgggcgacagggacgtagacggtataaccagcaccgctttactcgccggctttttaagctccctgggtatggacgtgagctgccggctcccaaccggggacgagccttacggcctttcgctaaaagccgtcgaagactttgccgccgccttcggaacgctgataattacagtggattgcggtatttccaattttgaagaggtaaaaagggcggaggagctgggcgtcaatgtgatcatcacggaccaccacaacccccaggaaaaactcccccctgccctggctatcgtaaacccgaaactatcaactaagctcttcaaagacctgactggctgtgccgtggcttataaactcgtttccgctctgcgttttgcttaa

SEQ ID NO: 6498 - protein, 205 aa, Unknown
  Obtained from environmental sample
  DOMAIN (71)...(203): DHH family
  misc_feature (1)..(205): Xaa is any amino acid
MKWEKRDISPELVKSLSSKYGCDLLTASILARRDIITGEEIQYFLEDDVRRLKNPFELPGMEDAVERILAAKEEGEKILISGDRDVDGITSTALLAGFLSSLGMDVSCRLPTGDEPYGLSLKAVEDFAAAFGTLIITVDCGISNFEEVKRAEELGVNVIITDHHNPQEKLPPALAIVNPKLSTKLFKDLTGCAVAYKLVSALRFA

SEQ ID NO: 6499 - DNA, 837 bp, Unknown
  Obtained from environmental sample
  misc_feature (1)..(837): n is a, c, g, or t
gtgcaggcagcgccgctggaaacgtcgtcagactttatgccgttctggaaagcggacacggtttttcgcagcccaaggcttacggaacgggtgctggcaatccttgacaactataacggggttccatcccccggcgcgccggggaacaccgccgtaccggaggcccttgccgcttttcttgattcccagcggaacgcccagcgcggccttcctttaagcggcaacaatcgcataacggtcgaaattattgacagtcctgaaaatcatggggatttgtacgtggtggtgatgcacagcttccggggcggggctgttaactatccgcttgtactggccctgtcccaggaactggaagaaacgctgaagctcagggtggaatcgttttccaatgacgattcgcttctcctgttaataccccggctgggcgttgaaggaaatttaaaacagattgaaaatatttttcgcaacgccgttacagaacttaacaaaagcggcgggggcggcctttgccgcggggagaggctgttcaggaaccggctggaggcttcaggcgtcttcggggcgaatttccgcgaagccgcggaaaggagcctccttctgcctcaagcgggttttggaaaacggaccccgctgtggatcacaaggcagcgttccaggcggctttttgacgcggtgcgcggcgaagatggttttcctgttaccgccgaagcgtggcggagctgcctggtcgatttattcgacatggaaggtttcccgcgattgttaggtgcattnaatgataatacggtcgccctgtcttttttctgcagcagcatccccagcttncttttcgcgtga

SEQ ID NO: 6500 - protein, 278 aa, Unknown
  Obtained from environmental sample
  DOMAIN (72)...(277): DEAD/H associated
  misc_feature (1)..(278): Xaa is any amino acid
MQAAPLETSSDFMPFWKADTVFRSPRLTERVLAILDNYNGVPSPGAPGNTAVPEALAAFLDSQRNAQRGLPLSGNNRITVEIIDSPENHGDLYVVVMHSFRGGAVNYPLVLALSQELEETLKLRVESFSNDDSLLLLIPRLGVEGNLKQIENIFRNAVTELNKSGGGGLCRGERLFRNRLEASGVFGANFREAAERSLLLPQAGFGKRTPLWITRQRSRRLFDAVRGEDGFPVTAEAWRSCLVDLFDMEGFPRLLGAXNDNTVALSFFCSSIPSXLFA

SEQ ID NO: 6501 - DNA, 621 bp, Unknown
  Obtained from environmental sample
  misc_feature (1)..(621): n is a, c, g, or t
ttgaacgaagtaaaaaaaatactttttaagcgggctattcaaaccatttcttaccttccgcacttcctttcctgggttatagttacaggccttgtatcccagatgctcacaacggatagcggggctgtaaacaatgtatttgtggcattaggctttatcaaggagccgatattgtggcttggaaatccgaagtatttctggggaataatcggtattacctatgtatggaaagaagtaggatggaatacgattatttaccttgcggctatagcgggcattgatccaaatttatacgaagccgctgatattgacggctgcaacaggtaccaaaagatgtggcgcattacccttccctctataaagccgaccataataattttgttaataatgagcatagggcacatacttgacgcgggttttgaattgcagtacttgctgcgaaacgggcttgtcatggacgtatcggacacaattgatgtctatgtgcttgtattcggcatgcgctattcaaattattctcttgcgacagccgccgggatgtttaagaattttgtaaatatttcactcatatttatcgccaatgagatcgccaaaagatcgggcgaggagcgtcttatatga

SEQ ID NO: 6502 - protein, 206 aa, Unknown
  Obtained from environmental sample
  misc_feature (1)..(206): Xaa is any amino acid
MNEVKKILFKRAIQTISYLPHFLSWVIVTGLVSQMLTTDSGAVNNVFVALGFIKEPILWLGNPKYFWGIIGITYVWKEVGWNTIIYLAAIAGIDPNLYEAADIDGCNRYQKMWRITLPSIKPTIIILLIMSIGHILDAGFELQYLLRNGLVMDVSDTIDVYVLVFGMRYSNYSLATAAGMFKNFVNISLIFIANEIAKRSGEERLI

SEQ ID NO: 6503 - DNA, 777 bp, Unknown
  Obtained from environmental sample
  misc_feature (1)..(777): n is a, c, g, or t
ttggacaaacaaaaaaaacactccatcgaaattatcgtagaccggcttgtgattggaaaggatatacgttcgcggttagcggaatccgttgaaaccgcggtgcagacggccgacggccttatgattgtgcttgtcaacgaagacggaaaaaacagcgaacacgttttctcgcagaagaattcatgcccggactgcggcgtttctatcccggaattgcagcctcggcttttttcgtttaacaaccctttcggcgcgtgcacaggctgttcggggataggcagtaaaatggaatttgatcccgaccttgtaatccccgaccgttctctttcatttaacgaaggggcggttatcccttacaacccggacgcggcgtggaaccgcagcaggtttcagagcctttctaaacattacggattcagccttgacactccttttaaacaattatctaaaaaagttgtaaacgcgattctttacggctccgatgacaatataaaagtgcgttatgtgaaccgcgacggtacgggtcattttgagtatcaggcaaagtttcaggggattcttgaggaattaaaacggcgttatgtggaaacacagtcgccgggcgtgaaagactggctggaaaaattcatgagccagaaaccatgcgaagactgcggcggcaaacgccttaagccagaggtgttaggcgtaactgtcgcgggaaaaaatatctgggaactttcatgtctttcggtaacggattccttaaaatttttgaaaccgtctcggccgatctga

SEQ ID NO: 6504 - protein, 258 aa, Unknown
  Obtained from environmental sample
  misc_feature (1)..(258): Xaa is any amino acid
MDKQKKHSIEIIVDRLVIGKDIRSRLAESVETAVQTADGLMIVLVNEDGKNSEHVFSQKNSCPDCGVSIPELQPRLFSFNNPFGACTGCSGIGSKMEFDPDLVIPDRSLSFNEGAVIPYNPDAAWNRSRFQSLSKHYGFSLDTPFKQLSKKVVNAILYGSDDNIKVRYVNRDGTGHFEYQAKFQGILEELKRRYVETQSPGVKDWLEKFMSQKPCEDCGGKRLKPEVLGVTVAGKNIWELSCLSVTDSLKFLKPSRPI

SEQ ID NO: 6505 - DNA, 756 bp, Unknown
  Obtained from environmental sample
  misc_feature (1)..(756): n is a, c, g, or t
ttgcaaattaacgagattatgnaagcatatctaaaacnccgttngcagaatgattttggagtccttgttttcgcgctggacatcggcgctatagaggcggataaagagagtgaaggctaccggtctttaatgtctgtaacgaaagatataagcgctcaaatcacccagacgcaagcgacggttagtgttaaaaacatggcggatatgcagcagatcaacgcggacaacatggaagcgacactggcgattcaacgggaagaaacgcagcatgcccagcgtatgcggaccgacgccgccaatttcgcccttcatcagttgaaccagcaggcggatgtcgccaaagccggagccgaagcgctgggacaaatgggcgcgggcaatactatgaatatgggcgcaggcggcggcatgaaccccgccgcgatgatgaccggtatggcaatgggcggggttatgggccagcaaatggcgaacatgatgggcggcatgatgcagggaataaatcatccgcccgccggagtaatgccgccaccgccgcctattgtgcaatataatgtagcggtaaatggacaaagtaccgggccttttacatttgaccagttgcggcagatggcggcacagggacaatttacagcgcagtcacaggtgtggaagcaggggatgtccggctggaccgcagccggaaccgtggcagaacttgcgccggtattcgcgcagtcagcgcccccgcccccgccgcctcccgccgcgcaataa

SEQ ID NO: 6506 - protein, 251 aa, Unknown
  Obtained from environmental sample
  misc_feature (1)..(251): Xaa is any amino acid
MQINEIMXAYLKXRXQNDFGVLVFALDIGAIEADKESEGYRSLMSVTKDISAQITQTQATVSVKNMADMQQINADNMEATLAIQREETQHAQRMRTDAANFALHQLNQQADVAKAGAEALGQMGAGNTMNMGAGGGMNPAAMMTGMAMGGVMGQQMANMMGGMMQGINHPPAGVMPPPPPIVQYNVAVNGQSTGPFTFDQLRQMAAQGQFTAQSQVWKQGMSGWTAAGTVAELAPVFAQSAPPPPPPPAAQ

SEQ ID NO: 6507 - DNA, 651 bp, Unknown
  Obtained from environmental sample
  misc_feature (1)..(651): n is a, c, g, or t
atggtatttgtaaattaccgtgctggacaaaggcaggtaaagaaatgttatattgtttatatgttcaacagtatccgtggaaccataacggaaaaattaacggacagcgtttatattctttccgctggtgtggaatgggacattgcggttccggctacggacatttccaggctgcctcaagctggggaagaatgccgcatttttacctggctttaccacagggaagaccagatgaagctctacggtttttgcgcgcaagagcggcgaattacttttcttgagcttttgaaagtagaagggatagggccgaaaggggctttgaaaattatggggggtattggccaagaagagcttgaaagggcgcttgaagccgaagacctggcgcgtttggaggcggtgccgggattggggaagaaaacagcccagaagatgattcttgccctgaaaggcaagctggctattgcaaaaacctcatctgaaacgccctacggcgatctggtggaagcccttgccgagatgggctacgacaagcgcgccgccgccgaagcgctttccagggccgagggcgagcttccgcctggcgcgtccggggaggagaaagaaacgcttcttttcaaacaggccatcgtatatctaagtggtattatttaa

SEQ ID NO: 6508 - protein, 216 aa, Unknown
  Obtained from environmental sample
  DOMAIN (21)...(82): RuvA N terminal domain
  misc_feature (1)..(216): Xaa is any amino acid
MVFVNYRAGQRQVKKCYIVYMFNSIRGTITEKLTDSVYILSAGVEWDIAVPATDISRLPQAGEECRIFTWLYHREDQMKLYGFCAQERRITFLELLKVEGIGPKGALKIMGGIGQEELERALEAEDLARLEAVPGLGKKTAQKMILALKGKLAIAKTSSETPYGDLVEALAEMGYDKRAAAEALSRAEGELPPGASGEEKETLLFKQAIVYLSGII

SEQ ID NO: 6509 - DNA, 327 bp, Unknown
  Obtained from environmental sample
  misc_feature (1)..(327): n is a, c, g, or t
gtgccgcgcccgtcgtactgggcgttcaaaatggcgagccacagcttgggccgcgggtcgctcttggaatcgaccacagggaacgaccgcgtatctagctactacacgcacgacggcaagaaaaagtcgctaatgatcgtcaacaagcaccccaagagcgtggcggatgttacaatcaacatcccgggtttccaaggtagcgccaagaaactcatcctgaacgccgaaaatgcaaagaaggggccgacggaggagaccattgaggtgaagccgggcatgaagctgtctatgccggcgcactcggtggtcacgcttacggttgagtaa

SEQ ID NO: 6510 - protein, 108 aa, Unknown
  Obtained from environmental sample
  misc_feature (1)..(108): Xaa is any amino acid
MPRPSYWAFKMASHSLGRGSLLESTTGNDRVSSYYTHDGKKKSLMIVNKHPKSVADVTINIPGFQGSAKKLILNAENAKKGPTEETIEVKPGMKLSMPAHSVVTLTVE

SEQ ID NO: 6511 - DNA, 810 bp, Unknown
  Obtained from environmental sample
  misc_feature (1)..(810): n is a, c, g, or t
gtgcagctgatagaagaagacaactcatcggaagaagatgaaagcgatgacggcaaaaaacaacagaattccaaaaaccgcgccgcggcaaacgataaagaaacgtcacttgttgacgatccgataaggctctacctgcgtgaaataggaaaagaacacctgttaacggcggaacaggaaatcgagctttccaaaaaaatggaagaaggggaaaacataataaaatccgtaataaaaaggtcgggcatgataattcctgagttttttcagatagcccaaaaggcatttgccaaaaaagacatgaaggaattgaatttctcaaaaaaagaaattaccgagtacatgacggaatgcagaaggctgaaccagttttacaaagacaccttacggacaattcacggcgatcttcgcaactacatagatctgaaaaatcatttaatttccaaggatatggattatcttgaagacaaggattgttcaactatccgcaaacgtataatgagagcgttaaaaaatattcatatacatcctgacgagatactggctttttccgaaaaatttcttcaggcttcaaaaaagattaaaaaatacgtcaaagaacaggaacgtcttcaaaaacacctgaaagttgtttcccttaaagagcttcgcactttggggcgttatcttacaattaaggacgagcgggaaagggtggaggcggaactggggcttccttcggatganataaaggaaaagataaaacttgttcaggttacacaaaanaaattnaaggactctggaagccgaatttngaggaactaccgataa

SEQ ID NO: 6512 - protein, 269 aa, Unknown
  Obtained from environmental sample
  DOMAIN (39)...(75): Sigma-70 factor, region 1.2
  misc_feature (1)..(269): Xaa is any amino acid
MQLIEEDNSSEEDESDDGKKQQNSKNRAAANDKETSLVDDPIRLYLREIGKEHLLTAEQEIELSKKMEEGENIIKSVIKRSGMIIPEFFQIAQKAFAKKDMKELNFSKKEITEYMTECRRLNQFYKDTLRTIHGDLRNYIDLKNHLISKDMDYLEDKDCSTIRKRIMRALKNIHIHPDEILAFSEKFLQASKKIKKYVKEQERLQKHLKVVSLKELRTLGRYLTIKDERERVEAELGLPSDXIKEKIKLVQVTQXKXKDSGSRIXRNYR

SEQ ID NO: 6513 - DNA, 597 bp, Unknown
  Obtained from environmental sample
  misc_feature (1)..(597): n is a, c, g, or t
atggacgcgataagcactcagcgcgaatatgaggcacttgacaaagaaatccgagacgcttccgaaaaagaacagcagtaccgtaaagatttacagcaaagggaacacctgcttgtggaactggacgaacagattaaacagcataccgcccttatccagcagcaggaagccgaacatgaagagcgcagaaaaaaagtggaagctgaaatagcggacaaacaaaaacaaatagaaacgcttaagaaaaaagaggcgaaacttaccgaaaatcttgatcaagaaatggtctttaagtttgaacgcattatcaacaacaaaatgggcataggaattgtcgctattaaaggcagtgtctgtatgggctgtcatatgattcttcccaaacaattcgcaaacaaggtgcaccaaggcgaggaatttgttttctgcccgtattgttcgcgtattctttattacgaagaatccgaagaaggcgaggaagatttctttaacaccgacgatatgggcgccctttccgatcttgacgaaacggaagaagaagaggaagaagaagacgaagaagaggaagagattgtaaataacgattcagaagagtaa

SEQ ID NO: 6514 - protein, 198 aa, Unknown
  Obtained from environmental sample
  DOMAIN (1)...(154): Uncharacterized ACR, COG1579
  misc_feature (1)..(198): Xaa is any amino acid
MDAISTQREYEALDKEIRDASEKEQQYRKDLQQREHLLVELDEQIKQHTALIQQQEAEHEERRKKVEAEIADKQKQIETLKKKEAKLTENLDQEMVFKFERIINNKMGIGIVAIKGSVCMGCHMILPKQFANKVHQGEEFVFCPYCSRILYYEESEEGEEDFFNTDDMGALSDLDETEEEEEEEDEEEEEIVNNDSEE

SEQ ID NO: 6515 - DNA, 882 bp, Unknown
  Obtained from environmental sample
  misc_feature (1)..(882): n is a, c, g, or t
atggccgagattatcgaagcccctcttatgctccacaaaaacggcttggacaatgttgtttgccgtgaattgaaattcaccgcccctgaaccagatttaagcgaatggcaagctatgatgcaaaaagttgcaacaagaaatagagaaatttgcattgccattgttggaaaatacatacaacttcacgatgcgtatctctctattattgaaagtttgaaccacgcagggtttgaagtgggtgcaaaagtgaaaataagttggatagacagcaaaaacataactaatgaaaacgccggagaaatactgagcggaatagacggaatgatagtccctggtggttttggcgatagaggcattgacggaaaaatagccgcctgccgatatgcaagagaaaacaatgtgccgtatttgggtatttgcctaggtatgcaaattgccgttattgaatttgcccgcaatgtttgcgaactcaaagatgcccattcaagcgaatttgacgaaacctctccgcaccgcgtaattgaccttatgcccgaccaagcaggcttggtagggagcggtggcactatgcgtttgggtgcctacccttgcaaaaccgccccgggttccttattaaacaaactctacggtcgtgacgaaataagcgaaaggcaccgacaccgctttgaattcaacaacgaataccgcgaaattctcacgggcaaaggtcttgtgatttgcggaacatcgctgaacggcaaccttgttgaagcagttgagttacctggagacagcttttttgtgggcgttcaatttcaccctgaattcacaagccgcccgaataaaccgcatccgttgtttgtgggcttgctgagggcggcaatcagcacgagaggagggtag

SEQ ID NO: 6516 - protein, 293 aa, Unknown
  Obtained from environmental sample
  DOMAIN (52)...(268): Peptidase C26
  misc_feature (1)..(293): Xaa is any amino acid
MAEIIEAPLMLHKNGLDNVVCRELKFTAPEPDLSEWQAMMQKVATRNREICIAIVGKYIQLHDAYLSIIESLNHAGFEVGAKVKISWIDSKNITNENAGEILSGIDGMIVPGGFGDRGIDGKIAACRYARENNVPYLGICLGMQIAVIEFARNVCELKDAHSSEFDETSPHRVIDLMPDQAGLVGSGGTMRLGAYPCKTAPGSLLNKLYGRDEISERHRHRFEFNNEYREILTGKGLVICGTSLNGNLVEAVELPGDSFFVGVQFHPEFTSRPNKPHPLFVGLLRAAISTRGG

SEQ ID NO: 6517 - DNA, 384 bp, Unknown
  Obtained from environmental sample
  misc_feature (1)..(384): n is a, c, g, or t
gtgccaccgctccctaccaagcctgcttggtcgggcataaggtcaattacgcggtgcggagaggtttcgtcaaattcgcttgaatgggcatctttgagttcgcaaacattgcgggcaaattcaataacggcaatttgcatacctaggcaaatacccaaatacggcacattgttttctcttgcatatcggcaggcggctatttttccgtcaatgcctctatcgccaaaaccaccagggactatcattccgtctattccgctcagtatttctccggcgttttcattagttatgtttttgctgtctatccaacttattttcacttttgcacccacttcaaaccctgcgtggttcaaactttcaataatagagagatacgcatcgtga

SEQ ID NO: 6518 - protein, 127 aa, Unknown
  Obtained from environmental sample
  misc_feature (1)..(127): Xaa is any amino acid
MPPLPTKPAWSGIRSITRCGEVSSNSLEWASLSSQTLRANSITAICIPRQIPKYGTLFSLAYRQAAIFPSMPLSPKPPGTIIPSIPLSISPAFSLVMFLLSIQLIFTFAPTSNPAWFKLSIIERYAS

SEQ ID NO: 6519 - DNA, 372 bp, Unknown
  Obtained from environmental sample
  misc_feature (1)..(372): n is a, c, g, or t
gtgtatataaacgccggccacaacccgccgcttgttatgcggcgcgggaatggttttgattttcttctttcgccatccgaccttgtgcttgccggcatggacgatacgcgctaccacaaacgccttatgcggttggagcctggcgacattctgttcctctatacggacggcatagtggaggcggaaaacgccaaaggcgagttttacggcaaagtccggctaaaggctttccttgacgcgaatgccggcaagcccctgcgcgaaatggtcgacaggttccgtgatgatatagcggcttttacttgcggcgcggagcaatcagatgatatcaccatgtttgtcctgaaaatcggagggtcaggagcttattga

SEQ ID NO: 6520 - protein, 123 aa, Unknown
  Obtained from environmental sample
  DOMAIN (1)...(118): Stage II sporulation protein E (SpoIIE)
  misc_feature (1)..(123): Xaa is any amino acid
MYINAGHNPPLVMRRGNGFDFLLSPSDLVLAGMDDTRYHKRLMRLEPGDILFLYTDGIVEAENAKGEFYGKVRLKAFLDANAGKPLREMVDRFRDDIAAFTCGAEQSDDITMFVLKIGGSGAY

SEQ ID NO: 6521 - DNA, 306 bp, Unknown
  Obtained from environmental sample
  misc_feature (1)..(306): n is a, c, g, or t
gtgacaatgaatatagaacaggagagaattggcaaatcaacagtgacgctgacgctttacggacgccttgacacggtaaacgcccccctgcttgagagcaaaattaaagaacaggaagacataacggaactgacgcttgattttaagggggttgaatatatttccagtatggggcttaggattctgctccaggcaaaaaagacaatgaaagcaaacggcgtcagactgacaattattaatatgcaggattctgtccgtgagatttttgaaatgaccggtttcctgaatctgatggcgaaagaataa

SEQ ID NO: 6522 - protein, 101 aa, Unknown
  Obtained from environmental sample
  DOMAIN (1)...(99): STAS domain
  misc_feature (1)..(101): Xaa is any amino acid
MTMNIEQERIGKSTVTLTLYGRLDTVNAPLLESKIKEQEDITELTLDFKGVEYISSMGLRILLQAKKTMKANGVRLTIINMQDSVREIFEMTGFLNLMAKE

SEQ ID NO: 6523 - DNA, 894 bp, Unknown
  Obtained from environmental sample
  misc_feature (1)..(894): n is a, c, g, or t
atgctggaggccgtgccctaccgccgcttccgccagataagcgttgccgcagggaaagagaggcttgaggcccaggtgctggacataatggacaagaccgacagccagctgcacgtcctcagcgacgtcctggccgagagggtggagcgcctgttgaagggcgatgagcttctgcctggagtcctcaaaaacgtcaaagtgtacgtcgccgtcaagcgcaagctgcaggttggcgacaaaatggccggcaggcacggcaacaagggcgtggtcagccgaatactcccaatcgaggacatgccatacctgccagacgggactccggttgacatcgtccttaacccactgggcgtgccatcccgcatgaacatcggccagatactagagacccaccttgggtgggccggcagggtgatgggagtgcatttcaccacgcccgtcttcgacggcgcgcgcgaatccgaaatcaaggaatggcttgaaaaggcgtacgaaaaaaatgggcgcagcggcccagacgcgtcgggcaagacaaagctgtacgacggcatgacgggcgaggccttcgagcagcccgtggtcgttgggtgcagctacatgatgaagctgcaccaccttgttgacaacaagatacacgctaggagcattgggccctacagcctaatcacgcagcagcccttgggcggcaaggcgcagttcggcggccagcggttcggcgaaatggaagtctgggcactggaggcctacggcgcggcccacgtcctgcaggaactgctgacgtacaagtcggacgacatgcacgggcgcacccagatataccaagctatcatcaagggcgagggcatcaaagagcccagcctcccagagagctggaatgtcgtcaggaagagctga

SEQ ID NO: 6524 - protein, 297 aa, Unknown
  Obtained from environmental sample
  DOMAIN (234)...(297): RNA polymerase Rpb2, domain 7
  misc_feature (1)..(297): Xaa is any amino acid
MLEAVPYRRFRQISVAAGKERLEAQVLDIMDKTDSQLHVLSDVLAERVERLLKGDELLPGVLKNVKVYVAVKRKLQVGDKMAGRHGNKGVVSRILPIEDMPYLPDGTPVDIVLNPLGVPSRMNIGQILETHLGWAGRVMGVHFTTPVFDGARESEIKEWLEKAYEKNGRSGPDASGKTKLYDGMTGEAFEQPVVVGCSYMMKLHHLVDNKIHARSIGPYSLITQQPLGGKAQFGGQRFGEMEVWALEAYGAAHVLQELLTYKSDDMHGRTQIYQAIIKGEGIKEPSLPESWNVVRKS

SEQ ID NO: 6525 - DNA, 534 bp, Unknown
  Obtained from environmental sample
  misc_feature (1)..(534): n is a, c, g, or t
atgccgtcgtacagctttgtcttgcccgacgcgtctgggccgctgcgcccatttttttcgtacgccttttcaagccattccttgatttcggattcgcgcgcgccgtcgaagacgggcgtggtgaaatgcactcccatcaccctgccggcccacccaaggtgggtctctagtatctggccgatgttcatgcgggatggcacgcccagtgggttaaggacgatgtcaaccggagtcccgtctggcaggtatggcatgtcctcgattgggagtattcggctgaccacgcccttgttgccgtgcctgccggccattttgtcgccaacctgcagcttgcgcttgacggcgacgtacactttgacgtttttgaggactccaggcagaagctcatcgcccttcaacaggcgctccaccctctcggccaggacgtcgctgaggacgtgcagctggctgtcggtcttgtccattatgtccagcacctgggcctcaagcctctctttccctgcggcaacgcttatctggcggaagcggcggtag

SEQ ID NO: 6526 - protein, 177 aa, Unknown
  Obtained from environmental sample
  misc_feature (1)..(177): Xaa is any amino acid
MPSYSFVLPDASGPLRPFFSYAFSSHSLISDSRAPSKTGVVKCTPITLPAHPRWVSSIWPMFMRDGTPSGLRTMSTGVPSGRYGMSSIGSIRLTTPLLPCLPAILSPTCSLRLTATYTLTFLRTPGRSSSPFNRRSTLSARTSLRTCSWLSVLSIMSSTWASSLSFPAATLIWRKRR

SEQ ID NO: 6527 - DNA, 471 bp, Unknown
  Obtained from environmental sample
  misc_feature (1)..(471): n is a, c, g, or t
atggatgttaccgccacgcaaatcatgggctatcctccgaaagaaacaccggtgaacaaagaagccttaagccggggcctatggctttcgaatattgaagaaattgaatatccggggcttttaccttccgatctgcaaattccagattttgttagagtctcttttaaaaaatcatcttcccggtttcttgattttattcttccccgacctctaaaaagatggatagattcctttgcccccggaccggaaatcaatcacaatatctgcatacgctgcggagactgtaaacgtatatgtaattcccaggccataagtatgacaggcaacgagaatgattcttcaaaagcaataatggtgatcgattaccgccgctgcataaggtgtttttgctgccacgagatatgtccggtaaaagcaattgacgtaaagaagagaccgaataaaaatcaggatgggctcggatttatttaa

SEQ ID NO: 6528 - protein, 156 aa, Unknown
  Obtained from environmental sample
  DOMAIN (82)...(105): 4Fe-4S binding domain
  misc_feature (1)..(156): Xaa is any amino acid
MDVTATQIMGYPPKETPVNKEALSRGLWLSNIEEIEYPGLLPSDLQIPDFVRVSFKKSSSRFLDFILPRPLKRWIDSFAPGPEINHNICIRCGDCKRICNSQAISMTGNENDSSKAIMVIDYRRCIRCFCCHEICPVKAIDVKKRPNKNQDGLGFI

SEQ ID NO: 6529 - DNA, 603 bp, Unknown
  Obtained from environmental sample
  misc_feature (1)..(603): n is a, c, g, or t
atggcaaagattaagctcaccaaaaacgagctaaaaaaacaaaaagattcacttaaaatgtacaggcgttatttgccgacgcttatgctgaaaaaacagcagttgcagagagaaataaggctcaccgatttacggttaaacgaactgtatgcagtcagagataaacttgatgaatcttttaaaccatggattgcggttttcggtgagacaggatttttcacggataatactttaaaaattgtaaattttaggacaggacacggaaacattgccggcgtttcgattccggtatttgaaggcgcggattttgaaaccgcaaaatacgatcttgcgcgtactcctgcatggctggataaggcaatagatgtgatgaagcaggctctgctgcttgatcttgaagcgcagattgtcgaggaacagcgcagaagacttgatcgtgaattgcgtataactactcagcgtgtaaatctttttgaaaaagtaaaaatacctgaagcaagaggaaatattaaaaaaattcaggtttacctcggtgatcagcaaaccgcctctgttgtgcgcgggaaaatcgccaaaggcggaacagggaaggcggctatatga

SEQ ID NO: 6530 - protein, 200 aa, Unknown
  Obtained from environmental sample
  DOMAIN (2)...(196): ATP synthase subunit D
  misc_feature (1)..(200): Xaa is any amino acid
MAKIKLTKNELKKQKDSLKMYRRYLPTLMLKKQQLQREIRLTDLRLNELYAVRDKLDESFKPWIAVFGETGFFTDNTLKIVNFRTGHGNIAGVSIPVFEGADFETAKYDLARTPAWLDKAIDVMKQALLLDLEAQIVEEQRRRLDRELRITTQRVNLFEKVKIPEARGNIKKIQVYLGDQQTASVVRGKIAKGGTGKAAI

SEQ ID NO: 6531 - DNA, 774 bp, Unknown
  Obtained from environmental sample
  misc_feature (1)..(774): n is a, c, g, or t
atgactatggtgattatttccggccttttgcgctttgttcaggaattgagaagcacgggagccgcgaaacgtctgtccgagatggtagaaaccacagcttgcgcggcgcgaaagtttgaggataaggaaagcggcgaaatccgttcggaaaaaaaagaaattcccatggacgaaattgttgtcggggatttggtttatcttaccgctggggacatggttccggcggatgtaagaattattcaggcaaaggacctttttataagccagtccgccctgacaggtgaaagcgagcctgtggagaaattttccgttacggcgtccaataccaccggaggcaatccccttgagtttaacaatttggcttttatgggaactaacgtcatctcagggtcggcttccgctttggttatcacagtcggtgatgacaccgttcttggctccatagcgcggcaactacaggttaaagcgccgcccaccagttttgaaagaggagtcagttctgtttcgtgggtactgattcgcttcatgatgatcatggtgcccgttgtccttctggtaaacggatttaccaaaggcgattggcttcaggcctttctcttcgcgctttcggttgccgtcggtttgaccccggaaatgcttccgatgattgtctccgccaaccttgccaagggcgctgtatccatgtcaaaaaagcgggtcatagtaaaaaaccttaactcaattcaaaacttcggcgccatggacattctttgtacggataaaccggcacgataa

SEQ ID NO: 6532 - protein, 257 aa, Unknown
  Obtained from environmental sample
  DOMAIN (1)...(243): E1-E2 ATPase
  misc_feature (1)..(257): Xaa is any amino acid
MTMVIISGLLRFVQELRSTGAAKRLSEMVETTACAARKFEDKESGEIRSEKKEIPMDEIVVGDLVYLTAGDMVPADVRIIQAKDLFISQSALTGESEPVEKFSVTASNTTGGNPLEFNNLAFMGTNVISGSASALVITVGDDTVLGSIARQLQVKAPPTSFERGVSSVSWVLIRFMMIMVPVVLLVNGFTKGDWLQAFLFALSVAVGLTPEMLPMIVSANLAKGAVSMSKKRVIVKNLNSIQNFGAMDILCTDKPAR

SEQ ID NO: 6533 - DNA, 327 bp, Unknown
  Obtained from environmental sample
  misc_feature (1)..(327): n is a, c, g, or t
atgctgttagttagagcgattatccgccccgaaaagtcggggatcgttatgcgtgaactggccgccgccggctttcccgccgtgaccaagcttgacgtctacgggcgcggcaagcagaagggcatcaccgtgggcgatgtgcactacgacgagatacccaaggacatgcttgtcatagtctgtaacgacgaagacaaggaagaccttgttaagatcatcatccgcactgccaagaccgaagcgaagggcgctttcggcgacgggcgtatattcgtgtcgcccgttgaatcggcatacaccatcagttccggcgcggccggcctgtaa

SEQ ID NO: 6534 - protein, 108 aa, Unknown
  Obtained from environmental sample
  DOMAIN (4)...(104): Nitrogen regulatory protein P-II
  misc_feature (1)..(108): Xaa is any amino acid
MLLVRAIIRPEKSGIVMRELAAAGFPAVTKLDVYGRGKQKGITVGDVHYDEIPKDMLVIVCNDEDKEDLVKIIIRTAKTEAKGAFGDGRIFVSPVESAYTISSGAAGL

SEQ ID NO: 6535 - DNA, 534 bp, Unknown
  Obtained from environmental sample
  misc_feature (1)..(534): n is a, c, g, or t
ttgttaagatcatcatccgcactgccaagaccgaagcgaagggcgctttcggcgacgggcgtatattcgtgtcgcccgttgaatcggcatacaccatcagttccggcgcggccggcctgtaagggggggagcgaggttatgcgggaaataatgtgttttatcaggatgaacaaggtcaacgacaccaagagggcgctcgccgaacacggctttcctgccttcacgtgccgtaagtgcctcgggcgcggaaagaagagcatagaccccgaactgctcaacgccgtgatcgcgacgggcgagatgcccatgtcgcccgtcggcgagaacctgacggagtcggcgcggcttatcgccaagcgcttcttcacgctcgtcgttgacgacaaggacgtgaagaaagcggttgacgtgattatcgccgcgaatcagacgggcaatccgggcgacgggaaaatctttgtcttgccgattacggagacgttctccgtaaggacgggcgagggccacactgaaatatcaaaggggggggcatga

SEQ ID NO: 6536 - protein, 177 aa, Unknown
  Obtained from environmental sample
  DOMAIN (50)...(166): Nitrogen regulatory protein P-II
  misc_feature (1)..(177): Xaa is any amino acid
MLRSSSALPRPKRRALSATGVYSCRPLNRHTPSVPARPACKGGSEVMREIMCFIRMNKVNDTKRALAEHGFPAFTCRKCLGRGKKSIDPELLNAVIATGEMPMSPVGENLTESARLIAKRFFTLVVDDKDVKKAVDVIIAANQTGNPGDGKIFVLPITETFSVRTGEGHTEISKGGA

SEQ ID NO: 6537 - DNA, 624 bp, Unknown
  Obtained from environmental sample
  misc_feature (1)..(624): n is a, c, g, or t
atggcggacttaaaaagctcttcgataaaaaacgtgaaaaaaggcagttatacgattatcggttttttaaaatcgctcagagaacacacggattcaaaaggcaatattatggccttcggaactttacaggattttgaaggcgatattgatcttattttcttttccaaggcttattcagaatgtaagactctgttaaatcttgatgaaattatagcttttaggggaaatatcgatcccgaaaacgagcgagatccgcaaaaaataacttttaaagtttcaagtatcgctgattttgcacaacttacccgcatagcggcgagaaaaacagcggcgggagaaaaacctcctgcagctaatatggaagaacaaaaaccgtcggtaaaaccggctgatgaaatacacataaaattaacggaaggcgcggcggataatgaagaaaacctgattccgttacgcgattatcttgctgagaattcaggctccggcttggtattcctgcacattccgttaactggaaaagaaaaaataatacgtacattttccggattggaaatttccggcggcaatagtgtaattgaagatatatcaaaattcaaatgcgtaagccatgtgtggaggaagtaa

SEQ ID NO: 6538 - protein, 207 aa, Unknown
  Obtained from environmental sample
  DOMAIN (17)...(98): OB-fold nucleic acid binding domain
  misc_feature (1)..(207): Xaa is any amino acid
MADLKSSSIKNVKKGSYTIIGFLKSLREHTDSKGNIMAFGTLQDFEGDIDLIFFSKAYSECKTLLNLDEIIAFRGNIDPENERDPQKITFKVSSIADFAQLTRIAARKTAAGEKPPAANMEEQKPSVKPADEIHIKLTEGAADNEENLIPLRDYLAENSGSGLVFLHIPLTGKEKIIRTFSGLEISGGNSVIEDISKFKCVSHVWRK

SEQ ID NO: 6539 - DNA, 795 bp, Unknown
  Obtained from environmental sample
  misc_feature (1)..(795): n is a, c, g, or t
atgtcgtcaaatgtgccgatggcgcgtcttttacaaggcgatgtcgggtcaggaaagacattagtttcttttcttgccgcgcttaaagccgtagaagagaaagggcaggcggcaattatggccccgactgaacttttggcgcgccagcacgcggaaaacgcgggccgtctattggaacctttgggctgccgcattgcttttcttacgggaaatatcaaagccgcagggcgcaaagaattgttaaaacatcttcagaccggagagattgatattgtcgtggggactcacgctcttttttcaagagacgtaacatataaaaacctgaaactggtagtaatagacgaacagcatcgttttggcgtaacgcagagatcgcttatcatgtcaaaaggggacaatcccggtcttttaatgatgagcgcgacgccgataccgcggacgcttgcgtttaccgttttcggagacatggacgtttcggtaatcaaggatatgccgccgggaagaaaacccgttaaaacccatcttgccaaagaatcaaacgaaaagaaagtttatgattatgtcctaagggaactggaacagggacggcaggcatattttgtctatcctttaattgagggcggcgatgagataaaagacgctgtcacaatggcggacaggcttgcgaaagaagtgttcccaaaatacaaaacagctcttattcattcaaaattgcccgaagatgaaaaaaggcggacaatggatgattttcgtatgggaaagataaaaattctgcagcgactcggccgattctga

SEQ ID NO: 6540 - protein, 264 aa, Unknown
  Obtained from environmental sample
  DOMAIN (2)...(151): DEAD/DEAH box helicase
  misc_feature (1)..(264): Xaa is any amino acid
MSSNVPMARLLQGDVGSGKTLVSFLAALKAVEEKGQAAIMAPTELLARQHAENAGRLLEPLGCRIAFLTGNIKAAGRKELLKHLQTGEIDIVVGTHALFSRDVTYKNLKLVVIDEQHRFGVTQRSLIMSKGDNPGLLMMSATPIPRTLAFTVFGDMDVSVIKDMPPGRKPVKTHLAKESNEKKVYDYVLRELEQGRQAYFVYPLIEGGDEIKDAVTMADRLAKEVFPKYKTALIHSKLPEDEKRRTMDDFRMGKIKILQRLGRF

SEQ ID NO: 6541 - DNA, 813 bp, Unknown
  Obtained from environmental sample
  misc_feature (1)..(813): n is a, c, g, or t
ttgggtttttacggcggtgacgagcttctggctatgggcatggtgaaggcccttcttgtcatgtataaagacactcctatctatgacacggcgtacaatcagcttaaaaatattaccacgcccgttgactcgaaaggcaattccgactggtacgaaaaccgtattgtagtcccgcctcctccctcaacccctgtagagcctgatatgtgggaggcgatcataacagccttgcgggaaaaccgcattcttgcttttgattctaaagataatggagacagaacttacagaaattaccggttttgtccataccagcttctgttcgacaacggtctttggtatttatacgggcaggaattggataagaacaactcacggattttcgcgttgagcagtatgaaaaacgttttgcttgctaaaggcactttccgtttgccaaaaaattttgattaccgggatatttttggaagcagctgtttcggcgtctctgccggggtagggatgaagaagtacaaatttaagattgcctttgacggcgcttcagccgattgggtaaaggagcgcaaatgggcggacgatcaggaaatcaccgaaactgacaacggggttattatcacttttaccagcagccactttgacaaagttgttgagtggatgctttcaaggggttgtcaagcatgtccgttggagcctaaaggcctcgtagacttatggcagataaatatcaaagggctaaagctggcaggggaaattagcaatggaagaaaaagacctcacgcaaaggcgcaaaagcgcggagaacgcaaagggaaataa

SEQ ID NO: 6542 - protein, 270 aa, Unknown
  Obtained from environmental sample
  misc_feature (1)..(270): Xaa is any amino acid
MGFYGGDELLAMGMVKALLVMYKDTPIYDTAYNQLKNITTPVDSKGNSDWYENRIVVPPPPSTPVEPDMWEAIITALRENRILAFDSKDNGDRTYRNYRFCPYQLLFDNGLWYLYGQELDKNNSRIFALSSMKNVLLAKGTFRLPKNFDYRDIFGSSCFGVSAGVGMKKYKFKIAFDGASADWVKERKWADDQEITETDNGVIITFTSSHFDKVVEWMLSRGCQACPLEPKGLVDLWQINIKGLKLAGEISNGRKRPHAKAQKRGERKGK

SEQ ID NO: 6543 - DNA, 894 bp, Unknown
  Obtained from environmental sample
  misc_feature (1)..(894): n is a, c, g, or t
gtggcggataggctgcctnccagaatggacattcgccgcggcgcgccgctgaaacttcctcacattttgctgcttatcgacgacgatacggaaagcctgctgccggctcttgccgggcgcgccgaaaaacaggctcctgtttacaataccccgcttatgatggacagcggaaatataaacggctggtttttggatacggaagaagattttggttttattgcggataaacttgctgaactttgcagccgctccgttaaccgttacggaaataagaatccttttctctttgcggtgggagacggaaaccattcgcttgcagccgccaaaggtatttgggaagaaataaaaaaagccgaccttgtaaacagttttgcaaatccatgccgttatgcgcttgtagagatagaaaatatctatgatccggccattcaatttgagcctattcaccgtctggttttcgatgtcggatttgacgaaacgctttctatcctttctcagcttccggatttttcatgccgtccggtagtcaaggctgaagagcttccgcatttgtgcaaagtgtcttccgccgcaaactgttttggcgtaatttcgcaggattgttgtatgttagcggaaacctccgccgcaggaatttcaaccgcatgtttacagcccctgctcgataattacaaaggcagatcgttatctattgattatatccacgatgatgaagagttgttacgtttggctgtaaaagacaataagtcaacgggtattttactgcctcctgtgcaaaaatccgggctttttgaaaccgtaggacggcttggccccttgccgaggaaaagcttttccatgggacattcctgcgaaaaacgtttttatctggagtgccgcagtctttttatgtag

SEQ ID NO: 6544 - protein, 297 aa, Unknown
  Obtained from environmental sample
  DOMAIN (1)...(293): Protein of unknown function (DUF1015)
  misc_feature (1)..(297): Xaa is any amino acid
MADRLPXRMDIRRGAPLKLPHILLLIDDDTESLLPALAGRAEKQAPVYNTPLMMDSGNINGWFLDTEEDFGFIADKLAELCSRSVNRYGNKNPFLFAVGDGNHSLAAAKGIWEEIKKADLVNSFANPCRYALVEIENIYDPAIQFEPIHRLVFDVGFDETLSILSQLPDFSCRPVVKAEELPHLCKVSSAANCFGVISQDCCMLAETSAAGISTACLQPLLDNYKGRSLSIDYIHDDEELLRLAVKDNKSTGILLPPVQKSGLFETVGRLGPLPRKSFSMGHSCEKRFYLECRSLFM

SEQ ID NO: 6545 - DNA, 366 bp, Unknown
  Obtained from environmental sample
  misc_feature (1)..(366): n is a, c, g, or t
ttgaaattcaacacattcgtctgcgaaatagatttatccattttggagagcgcgttcttagctcctgtttctttcaaggaattttccaagcagatgattattgagcgcgatgtttccatagaagcggaagaggccataacacacgcggaattgctttcaaagttcaaaggctttaacccaaagtacttgaccagcattgagcttatgagcatttaccaaggcgataaaattgcggcgggcaaaaaaaacttgctctaccgtttttattaccaagccccagaccgtactttgacagacgatgagataaacgctattcatacaaaactacgcgaaaaaattgccggagcagggttggtgttgagatag

SEQ ID NO: 6546 - protein, 121 aa, Unknown
  Obtained from environmental sample
  DOMAIN (36)...(121): Ferredoxin-fold anticodon binding domain
  misc_feature (1)..(121): Xaa is any amino acid
MKFNTFVCEIDLSILESAFLAPVSFKEFSKQMIIERDVSIEAEEAITHAELLSKFKGFNPKYLTSIELMSIYQGDKIAAGKKNLLYRFYYQAPDRTLTDDEINAIHTKLREKIAGAGLVLR

SEQ ID NO: 6547 - DNA, 453 bp, Unknown
  Obtained from environmental sample
  misc_feature (1)..(453): n is a, c, g, or t
atgctcataacccttgacaagaccattcttgatttgcacggagttttagagccttatttttctgtacagtatttggattcaaaagatatttccaaagatagccttaaagattcagctgctttgatagttcgctcaacgagaaagtatggggcagaaactttggagggcacgggcgttaaattcataggaacggttacatctgggtttgagcatatagataccgagttttgcgaaaggagcggcgtttttttggcaaccgctcacgggagcaatgccgagtctgttgcggaatatgtatctgccgctttagcagaaatttcaaaaaaaacaggcaagccgttaaacaagttttcgctggggatagtgggcgtgggcgcggttggcgggtgtgttaagagagatgcggaaaagtttgggatgagagtttttttatgcgacccacaaaaaatctga

SEQ ID NO: 6548 - protein, 150 aa, Unknown
  Obtained from environmental sample
  DOMAIN (1)...(141): D-isomer specific 2-hydroxyacid dehydrogenase, catalytic domain
  misc_feature (1)..(150): Xaa is any amino acid
MLITLDKTILDLHGVLEPYFSVQYLDSKDISKDSLKDSAALIVRSTRKYGAETLEGTGVKFIGTVTSGFEHIDTEFCERSGVFLATAHGSNAESVAEYVSAALAEISKKTGKPLNKFSLGIVGVGAVGGCVKRDAEKFGMRVFLCDPQKI

SEQ ID NO: 6549 - DNA, 375 bp, Unknown
  Obtained from environmental sample
  misc_feature (1)..(375): n is a, c, g, or t
atgggaagcgaacaggaacggacgctgaggcataacgagggactggtaaaactcctcgcgggaatcggtgaactggaaattaaaacccccacaaaggaatcgggcgagcgcccggcggggtcaatcggcatggcgggcgcgggttttgaaattttcgtctttatcggcgaggcggttgatattgcggcgctcaggaaaaaatttgagaaggaccttgcccgcgataacgcctttgtccagagtttgcgggtaaaactcgccaatgagcaattcgtaaaaaacgccccgccggaactggttgccgccgaaaaactaaagctggaagaaggtcttgcccgtacaggcaaaattgaatcttatcttcgcggactgtaa

SEQ ID NO: 6550 - protein, 124 aa, Unknown
  Obtained from environmental sample
  misc_feature (1)..(124): Xaa is any amino acid
MGSEQERTLRHNEGLVKLLAGIGELEIKTPTKESGERPAGSIGMAGAGFEIFVFIGEAVDIAALRKKFEKDLARDNAFVQSLRVKLANEQFVKNAPPELVAAEKLKLEEGLARTGKIESYLRGL

SEQ ID NO: 6551 - DNA, 432 bp, Unknown
  Obtained from environmental sample
  misc_feature (1)..(432): n is a, c, g, or t
ttgtcaggttacataacagagggacagattgttcttgatcgcgagcttttccagcgcggcatttatccgccggtagcaggacttccaagcctttcccgtttgatgaaggacggaatagggccgggcatgacaagggaagatcacaaagacgtatccagtcagctttttgccgcttacgcaagagttaaacaggtgcgcaacctagcctcgattatcggcgaagaagaactttccgcagacgataaaaggtatttgaaattcggggaaaagtttgagcaggtattccttatacagggtgaatatgaaaaccgcgacataggccgtacattggatctcggctggaaagtgcttgcggatcttccgagagaagaattattgcgcgtaaaagaagaatttatagaaaagtatttagagccggcggcaaggatgtaa

SEQ ID NO: 6552 - protein, 143 aa, Unknown
  Obtained from environmental sample
  DOMAIN (49)...(138): ATP synthase alpha/beta chain, C terminal domain
  misc_feature (1)..(143): Xaa is any amino acid
MSGYITEGQIVLDRELFQRGIYPPVAGLPSLSRLMKDGIGPGMTREDHKDVSSQLFAAYARVKQVRNLASIIGEEELSADDKRYLKFGEKFEQVFLIQGEYENRDIGRTLDLGWKVLADLPREELLRVKEEFIEKYLEPAARM

SEQ ID NO: 6553 - DNA, 468 bp, Unknown
  Obtained from environmental sample
  misc_feature (1)..(468): n is a, c, g, or t
atgaaaaacattggattatttttattattacttataatcgcgcaaatggttatcgcgcaggatcaacagcagaaaaaagacgaattttcatcttcgtctgagcttgttttacaggccgaaaccaggccggggataaaactgggatttaccgaacatttttacattccttttatgcggggagaaagctctcttacaaaagataacaacatcaacatcgcgctgacgggggaaatatcccctgtttcgcttaacggtcttatagaagctgtctggacgcctgtcgcgttttttcagtttgccgtcggcggaagattcgggtcaggctggaacatcgggcttcttgggaaaactgtgcgcgggattgggattacaggcctgacgcggcaggcagggccgaacacatcggaaaaagcgtttgacgtttgctctggaaagcgncagtcggcgcagttcttcaggcggatttag

SEQ ID NO: 6554 - protein, 155 aa, Unknown
  Obtained from environmental sample
  SIGNAL (1)...(19)
  misc_feature (1)..(155): Xaa is any amino acid
MKNIGLFLLLLIIAQMVIAQDQQQKKDEFSSSSELVLQAETRPGIKLGFTEHFYIPFMRGESSLTKDNNINIALTGEISPVSLNGLIEAVWTPVAFFQFAVGGRFGSGWNIGLLGKTVRGIGITGLTRQAGPNTSEKAFDVCSGKRQSAQFFRRI

SEQ ID NO: 6555 - DNA, 807 bp, Unknown
  Obtained from environmental sample
  misc_feature (1)..(807): n is a, c, g, or t
gtggcggacgcgatacatgaactttctccgcgaaaagattttccgcttgtaaaggtacactgcgccgctctttcttctactcttctggagagcgagctcttcggccatgaaaaaggagcttttacgggcgcggtttcccaaaggcacgggcgttttgagctcgcctcaggcggaacccttttccttgacgaaatcggcgaaattgaccagaacattcagataaaacttttgcgggtgctgcaggaaaagaaatttgaacgcgtaggcggcgagaaaactgttgaggttgacgtgcgcattgtcgccgccacaaacaaggacttaaagactgagattgataaaggcaatttccgcgaagacctgtacttccgcctgaatgtggtaaatatttttgtaccgccgttacgcgaaagaaaagacgatattccccttttagcagcctctttcctgaaggaattttcgcaggagaacggaaaaacaatcgaaggcatacacgaaaaagcgcgctcccgcctttactcctacgaatggccaggaaacatccgcgaattgcgcaactgtatcgagagcgcggttgttatgtgccagtcaaacatgataaccgtggatgatctgcctcccgccctgcgcgacgccgccgacgagggctggataaacatcaggctgggagcgagtatggaagagtgcgagcaaataattatccgcgacaccctttcccactgcaaagggaacaaaaccaaagccgccgacatgctcggtataggaaggaagacgcttctgcgcaagcttgacggcgggggagaatga

SEQ ID NO: 6556 - protein, 268 aa, Unknown
  Obtained from environmental sample
  DOMAIN (226)...(263): Bacterial regulatory protein, Fis family
  misc_feature (1)..(268): Xaa is any amino acid
MADAIHELSPRKDFPLVKVHCAALSSTLLESELFGHEKGAFTGAVSQRHGRFELASGGTLFLDEIGEIDQNIQIKLLRVLQEKKFERVGGEKTVEVDVRIVAATNKDLKTEIDKGNFREDLYFRLNVVNIFVPPLRERKDDIPLLAASFLKEFSQENGKTIEGIHEKARSRLYSYEWPGNIRELRNCIESAVVMCQSNMITVDDLPPALRDAADEGWINIRLGASMEECEQIIIRDTLSHCKGNKTKAADMLGIGRKTLLRKLDGGGE

SEQ ID NO: 6557 - DNA, 615 bp, Unknown
  Obtained from environmental sample
  misc_feature (1)..(615): n is a, c, g, or t
ttgatggccgagtatcggcttgcgggggtagaattggtcaagaaccgggtggacctagcctatattcttaacgccgaagcaatcgtcctccatttcaatcagccctggcagcgtattgaacaagaaaaggattattgggattatttttaccgcaactccttgcgctcctttgatgagcttgagccctactgcaaaacacggcgtatcaagctgtgcgttgaaaatgaattccacgcttccccagctcattccttccgtatgtttgatacgctttttgaacgctatgacccggcgtacatgggactctgttttgacacaggccacgccaacatggcctgtaaagaaaactgccttgtgttcgcggaacgctacaacgaccggcttttcatgatccatattcacgataaccacggagaaggcgacgaacacctgataccctttgaaggcgggtttaactgggagggctttgcccgaactctggcccgttccccctaccgctttcccatcttgatggagccaagctgcagagtagaaggggacgactcggcctggctgcaaaaggcttttgaagtcggtaaccgtttctcaggaatggtggaaaaacaccgcgggtga

SEQ ID NO: 6558 - protein, 204 aa, Unknown
  Obtained from environmental sample
  DOMAIN (1)...(151): Xylose isomerase-like TIM barrel
  misc_feature (1)..(204): Xaa is any amino acid
MMAEYRLAGVELVKNRVDLAYILNAEAIVLHFNQPWQRIEQEKDYWDYFYRNSLRSFDELEPYCKTRRIKLCVENEFHASPAHSFRMFDTLFERYDPAYMGLCFDTGHANMACKENCLVFAERYNDRLFMIHIHDNHGEGDEHLIPFEGGFNWEGFARTLARSPYRFPILMEPSCRVEGDDSAWLQKAFEVGNRFSGMVEKHRG

SEQ ID NO: 6559 - DNA, 552 bp, Unknown
  Obtained from environmental sample
  misc_feature (1)..(552): n is a, c, g, or t
ttgaacaaaagattttcaataaatactgaaagattaataatacgccagtttactaaaaaagattatgcggatctctatgagtatttatcagataaacagacttataaatatgaacccggaaaactaataacgatagaggaatcgaaaaaactgtgtattgaaagatccaaaaatcgaatatttttagcggttgaattaaaatctgaaaaaaaacttattgggcatatttattttaacataatagaaccaaagagtttattgacctatgaaatcggatatattttcaacaaaaaataccagggacatggatatgctacagaagcaatacaacaatttattaagcatcaatttctggtatcagatattcacaagattgttgcccattgtaatcccaaaaatataaaatcctggaaattattggaaagattaaagttcaaacgggaaggtaaattaaggaagaacatatttttcaataaggataataacaacaatcctatatggctcgatacttatgaatacggattactaaaagaggatataattgatggataa

SEQ ID NO: 6560 - protein, 183 aa, Unknown
  Obtained from environmental sample
  DOMAIN (64)...(146): Acetyltransferase (GNAT) family
  misc_feature (1)..(183): Xaa is any amino acid
MNKRFSINTERLIIRQFTKKDYADLYEYLSDKQTYKYEPGKLITIEESKKLCIERSKNRIFLAVELKSEKKLIGHIYFNIIEPKSLLTYEIGYIFNKKYQGHGYATEAIQQFIKHQFLVSDIHKIVAHCNPKNIKSWKLLERLKFKREGKLRKNIFFNKDNNNNPIWLDTYEYGLLKEDIIDG

SEQ ID NO: 6561 - DNA, 945 bp, Unknown
  Obtained from environmental sample
  misc_feature (1)..(945): n is a, c, g, or t
ttgttaaaggaaaggctttccgattatgttaaggaacctcaggtcgatttaaaagacggactgccgcagtatgaaattgttcttgaccgcgaaaaaatgtacgcgcttggccttaacacattaaccgtaggcaacgaaataaaggcggcggttgacggagttaccgcgaccagatacaagtccggcggaaaggattacgacgtagtattaatactggctgaagcggatcgaaacgcgctgcctgatcttgataaaatatttatcaacagccagatggcaggaagggttcccctttcaagctttgttcattacaagcagggaacgggacctttaacaatcaaccgtgaaaaccaaagccgcgttattcacgtaacggcgggggctaagcccggagtaaaaacaaatcttatacaggaacttgtggaagatttggtcagaagcgaaattcccattgaagacgacgtaattattgagtatggcggcgcaaacgccgaaatgataaaattattcggacgttttatattgatctgcattgtagcggtttttcttgttttcggagttatggcgagcctttttgaatcattcagggacccgtttatcataatccttacaattccgctttctttgataggaattgtggctatctaccttataacaaatactatctttaacgtactgaccgccgtagggcttctggtactgttaggtgtaattgtaaacaacggaattgtactggttgactacacaaaccttctgcgcaagaggggttattcgcttaacgacgcctgtatagaagccgccggaaacaggcttcgcccgatattgatgacgactcttactacagtactgggtcttttaccaatggcgtttctccccggcgaaggcacggaacttgtcgccccaanttgggcagacggtcnttggcggcttttcattcgcacataa

SEQ ID NO: 6562 - protein, 314 aa, Unknown
  Obtained from environmental sample
  misc_feature (1)..(314): Xaa is any amino acid
MLKERLSDYVKEPQVDLKDGLPQYEIVLDREKMYALGLNTLTVGNEIKAAVDGVTATRYKSGGKDYDVVLILAEADRNALPDLDKIFINSQMAGRVPLSSFVHYKQGTGPLTINRENQSRVIHVTAGAKPGVKTNLIQELVEDLVRSEIPIEDDVIIEYGGANAEMIKLFGRFILICIVAVFLVFGVMASLFESFRDPFIIILTIPLSLIGIVAIYLITNTIFNVLTAVGLLVLLGVIVNNGIVLVDYTNLLRKRGYSLNDACIEAAGNRLRPILMTTLTTVLGLLPMAFLPGEGTELVAPXWADGXWRLFIRT

SEQ ID NO: 6563 - DNA, 924 bp, Unknown
  Obtained from environmental sample
  misc_feature (1)..(924): n is a, c, g, or t
ttgaaaatgttttccgccgccggtattcccgcctttgtcgttccgggaaaccatgatatcaacaatcccgacgctgtaaaattcaacggggatacgactgaacctgtcccctcaataaacgccgatgattttgcgcgtatctataaagactttggatttaactccgcgattaagcgcgacgacgattctttaagctatgttacggaacccattgaaggtttgtggctgctcgctctggacgcctgccgttaccgcgaaaataagccgggaaaacatgaaattgtttccggtaaaataagccaaaggacagtggactggataacatccgtgttacgtgaagcggcggacaggaacatacctgttttggcaatgatgcaccacggcgcggttgagcattggataggacaaagtaaacttcatccggattatttaatacaggattacgttaatttcgggaattttctcgcctcgtggaacgtaaggttcatttttacgggacattatcacgctcaggatgttacgcgcggcgagtataacggaaaaacgatccatgatattgagacaggctctcttgtaaccgctccgtgccctgtgcgctatgttaatatcgatgacaacagcttgaatatccgcaccgaaacaatcgttgacaagcttcatcccggcactgactttgcgcctaacggcatagcttttgtaaaaaagacagttatgctggaaaacggaagcgtattaaaaaaatacggagtttcaaagaaagatatcgccataatagccgacgccgtangagacgctttcaacgctcattataacggggatgaaaatcccctcttacgcaaagctgtggacaaatcaggcttaccttttgggggcgtttttatctgggacaggagcatatgtccttggacgcctttgctggattaa

SEQ ID NO: 6564 - protein, 307 aa, Unknown
  Obtained from environmental sample
  misc_feature (1)..(307): Xaa is any amino acid
MKMFSAAGIPAFVVPGNHDINNPDAVKFNGDTTEPVPSINADDFARIYKDFGFNSAIKRDDDSLSYVTEPIEGLWLLALDACRYRENKPGKHEIVSGKISQRTVDWITSVLREAADRNIPVLAMMHHGAVEHWIGQSKLHPDYLIQDYVNFGNFLASWNVRFIFTGHYHAQDVTRGEYNGKTIHDIETGSLVTAPCPVRYVNIDDNSLNIRTETIVDKLHPGTDFAPNGIAFVKKTVMLENGSVLKKYGVSKKDIAIIADAVXDAFNAHYNGDENPLLRKAVDKSGLPFGGVFIWDRSICPWTPLLD

SEQ ID NO: 6565 - DNA, 831 bp, Unknown
  Obtained from environmental sample
  misc_feature (1)..(831): n is a, c, g, or t
gtggcatacatgggctgccgcacgcgcgttatgtcgaattgcaacggggctcaaataaccaattcaaggggaaatctgtcttttactacgattaatctgccgcgcttagggcttcgcgccggaaaagatttagcgctgttctggaaactgctcgacgagattatcgatcttaccgttgaacagcttataacaaggtataacgttcagaaaaatcttaaagtaagggattttccgtttttaatggggcagaaactgtaccttgacagcgaaggattgtcagctaacgatactattgaaaaggcaatccgccacggaacgctcagtatcggttttatcgggctggcggaatgtcttaccgcgttgataggcaggcatcacggggaaagcgccgacgctcaggatcttggtcttgccattgtaggacatataaggcgcaggtgcgacgaggcgacaaagcaatacaaactgaacttctcgcttcttgctacgcccgcggaacagttaagcggtaaattcacaaaacttgacataaaacaatacggcgtaattccgggtgtaacggacaaggagtggtatacaaattcgtttcatattccggtagagtatcagattaccgctcaggaaaaaatcgcgaaagaaggcgcgtatcataaacattgtaacgcggggcatatttcttacgttgaattagccgccgcgccggaagacaacatcgaggcttatgaatcgctgattaaagcgatggcggaggcggacatgggttacgccgcggtaaatttcccgattgacatctgccatgactgcggcctgaacggactcgtgccgatctga

SEQ ID NO: 6566 - protein, 276 aa, Unknown
  Obtained from environmental sample
  misc_feature (1)..(276): Xaa is any amino acid
MAYMGCRTRVMSNCNGAQITNSRGNLSFTTINLPRLGLRAGKDLALFWKLLDEIIDLTVEQLITRYNVQKNLKVRDFPFLMGQKLYLDSEGLSANDTIEKAIRHGTLSIGFIGLAECLTALIGRHHGESADAQDLGLAIVGHIRRRCDEATKQYKLNFSLLATPAEQLSGKFTKLDIKQYGVIPGVTDKEWYTNSFHIPVEYQITAQEKIAKEGAYHKHCNAGHISYVELAAAPEDNIEAYESLIKAMAEADMGYAAVNFPIDICHDCGLNGLVPI

SEQ ID NO: 6567 - DNA, 747 bp, Unknown
  Obtained from environmental sample
  misc_feature (1)..(747): n is a, c, g, or t
atggtgtggatacaaggcggcagcttccagatgggaagcaacaacggcaatagtaatgaagaatcggtatatacggtaacggtgggttctttttacatgggaaaatacgaggtaacacagaaagagtatcaggcaataatggggacgaaccccagcagcttcaaaggggacaacctgccggtggaaaatgtaagctggtatgacgcgatagagtactgcaacaagcggagccagaaggaagggctgagcccggcgtatacgatagacaggagccggaaggatccgaacaataagaaccgtaatgatactataaaatggacagtaacgttgaataaaaacgccaacggttaccggctgccgaccgaggcggagtgggaatacgcggcgagaggcggcaacggatcgccgagggattacacgtattccggcggcaataatgtaggcgatgtggcgtggtatagcgataacagcgggaggaggacacatactgtcgggacaaaacaaccgaacggcttagggctgtacgacatgactgggaacgtatgggagtggtgctgggactggtacgggacttactccagtggagcgcagaccgatcctgtgggagcggatgctggcttctaccgggtgttacgcggcggcagttggtacagcaatgcctccgacgcgcgttcggtcgatcggtacaacgacaacccgggcaactggaatagctacttcggcttccggctggttcgccctctatag

SEQ ID NO: 6568 - protein, 248 aa, Unknown
  Obtained from environmental sample
  DOMAIN (1)...(246): Domain of unknown function (DUF323)
  misc_feature (1)..(248): Xaa is any amino acid
MVWIQGGSFQMGSNNGNSNEESVYTVTVGSFYMGKYEVTQKEYQAIMGTNPSSFKGDNLPVENVSWYDAIEYCNKRSQKEGLSPAYTIDRSRKDPNNKNRNDTIKWTVTLNKNANGYRLPTEAEWEYAARGGNGSPRDYTYSGGNNVGDVAWYSDNSGRRTHTVGTKQPNGLGLYDMTGNVWEWCWDWYGTYSSGAQTDPVGADAGFYRVLRGGSWYSNASDARSVDRYNDNPGNWNSYFGFRLVRPL

SEQ ID NO: 6569 - DNA, 561 bp, Unknown
  Obtained from environmental sample
  misc_feature (1)..(561): n is a, c, g, or t
gtgattgacataggatgcggggaggggaatcttttatccatactcgtcaaggaagggcagtttgtacggatcgcgggtacggatgtctcccatgtcgcgcttaaaagggcgagcgataaattgaaactcgatagggtcagcgacagtatgcgggaacgcataacgctgtttcaaggctctctcatgtataaagattcccgttttaagggttacgacgccgcaagcgtcgtagaggtcattgagcatttggacttgccgcgccttgccgcttttgaaaaggtattgtttgaatacgccaaacctgttgtcgtggttttgaccacgccgaaccgcgaatacaacgtaaaatacgaaaaccttggcggcggcgcgtcgctttgcgacgcgaacgctctgcggcacggcgaccatcgttttgaatggacacgggttgaattccgcgaatgggcggagaagacggccaaaaagtacggttacgcggttcgaatctctgaaatcggggagctcgacgaagcccttggcgcgccgacccagatgggggtgtttacgatatgcgcatag

SEQ ID NO: 6570 - protein, 186 aa, Unknown
  Obtained from environmental sample
  DOMAIN (2)...(105): Methyltransferase domain
  misc_feature (1)..(186): Xaa is any amino acid
MIDIGCGEGNLLSILVKEGQFVRIAGTDVSHVALKRASDKLKLDRVSDSMRERITLFQGSLMYKDSRFKGYDAASVVEVIEHLDLPRLAAFEKVLFEYAKPVVVVLTTPNREYNVKYENLGGGASLCDANALRHGDHRFEWTRVEFREWAEKTAKKYGYAVRISEIGELDEALGAPTQMGVFTICA

SEQ ID NO: 6571 - DNA, 837 bp, Unknown
  Obtained from environmental sample
  misc_feature (1)..(837): n is a, c, g, or t
atgaaaagaaaaggaaaaagaagggagcgaaagttgggatttgaagaattgcacgatggcgaaatatttacagacaacacccaatttgaaaggaataaacaatgtaaggactgtatttatcaaagtgacggcacggctaatactaacgactaccagaaatgcgaatgcgtaatataccaataccctgaagaaaaaccggattatgtcaggcacaataccgggaaatgcgaagactacgaaaaggacgaggcgaaactaattgaatcggttctcttgggcgtggcggttggggatgccctcggcgttccgtttgagttcctgccacgcggcactttcattgccgttgacatggcaggccacggaacccatgaccagccccccggcacgtggtcggacgacacctcgctcacgctttgcctggcgtgggctatgtccaagcattggaatacggaaagcattttgaatgaaactgcacgtggctttttgcgatggcgagatgatgcggaattcacggtgcatggtgctgtatttgacgtgggcaatgccacagcgagggcaatcaataagctccggaaaggggtgccgccaacgcaatctggaggctccaccataaacgataacgganacggctccctgatgcgaattgccccgattgccttttttgtcgcgngcaggccgcttccagagcggtttgacatcgtaaggaaggtatcgtcaataacacacgcgcatcccatttcggttctttcctgcatcgtctatgtcgagtacctgctcaaactgctcaagggcgacaataaaattcgcggccttttgaagcggtacagaaagaaataa

SEQ ID NO: 6572 - protein, 278 aa, Unknown
  Obtained from environmental sample
  misc_feature (1)..(278): Xaa is any amino acid
MKRKGKRRERKLGFEELHDGEIFTDNTQFERNKQCKDCIYQSDGTANTNDYQKCECVIYQYPEEKPDYVRHNTGKCEDYEKDEAKLIESVLLGVAVGDALGVPFEFLPRGTFIAVDMAGHGTHDQPPGTWSDDTSLTLCLAWAMSKHWNTESILNETARGFLRWRDDAEFTVHGAVFDVGNATARAINKLRKGVPPTQSGGSTINDNGXGSLMRIAPIAFFVAXRPLPERFDIVRKVSSITHAHPISVLSCIVYVEYLLKLLKGDNKIRGLLKRYRKK

SEQ ID NO: 6573 - DNA, 576 bp, Unknown
  Obtained from environmental sample
  misc_feature (1)..(576): n is a, c, g, or t
atgtatattgtgttttttaaagtatttgaaataaatcacgaagtatatataagtcaagcttgggaaaaagatcccaatgaggaagtacaaaattttagtcagaaagatatcaaagaaccttggaatggtgagtattatgtttcgtataatagaaactggaatgatgcaactaaatatggatttattagtgcgggtggtggaaaatggtatagtgataaattatcattattaaatattaatgacagaatttgggtaaaaaatccagaatatggatttattggagttggattagttattgacactatgcataaagcggatgaggtgcaatttgaacacgatggaaagaaaggaacgatctatgaattaccacacgagggagagtttggtgaaaagaatattaataatgatgataaagcagagtatattgttaaagtagaatggataaaaattgttgatatagaaaaggcaatttctgaagttgggttttttggaaatcaaaatactgtttgtagaccaacctcaaagaaatggaatcttactatagaaagacttaaaaatatttggggtatcaattaa

SEQ ID NO: 6574 - protein, 191 aa, Unknown
  Obtained from environmental sample
  misc_feature (1)..(191): Xaa is any amino acid
MYIVFFKVFEINHEVYISQAWEKDPNEEVQNFSQKDIKEPWNGEYYVSYNRNWNDATKYGFISAGGGKWYSDKLSLLNINDRIWVKNPEYGFIGVGLVIDTMHKADEVQFEHDGKKGTIYELPHEGEFGEKNINNDDKAEYIVKVEWIKIVDIEKAISEVGFFGNQNTVCRPTSKKWNLTIERLKNIWGIN

SEQ ID NO: 6575 - DNA, 438 bp, Unknown
  Obtained from environmental sample
  misc_feature (1)..(438): n is a, c, g, or t
atgccgtcgatgatggccagggtcagcggcagccagagggtcagggtcgaaccctggccgaagacggaggtgaattccaccttgccccggagcttctcaatggactgctggaccacgtccatgcccacgccccggcctgaaatctcgctgatttggtcggccgtggaaaagccgggctggaagaccagggcgtggatggccgcgtcgctcaaggtcttgcccggcggaaccaagccgttgtcctgggctttcttcaacgctttcgccttgtccaggccccggccgtcgtcttgcatctcgatgacgacgttgccgctctggtggtgggccttaaggcgcaccaccccttgggggggcttgccggcggcctggcgttcggccggggtttcgatcccgtggtccagggagttgcgcaccaagtgcaccaaggggtcgtag

SEQ ID NO: 6576 - protein, 145 aa, Unknown
  Obtained from environmental sample
  misc_feature (1)..(145): Xaa is any amino acid
MPSMMARVSGSQRVRVEPWPKTEVNSTLPRSFSMDCWTTSMPTPRPEISLIWSAVEKPGWKTRAWMAASLKVLPGGTKPLSWAFFNAFALSRPRPSSCISMTTLPLWWWALRRTTPWGGLPAAWRSAGVSIPWSRELRTKCTKGS

SEQ ID NO: 6577 - DNA, 939 bp, Unknown
  Obtained from environmental sample
  misc_feature (1)..(939): n is a, c, g, or t
ttgaccactatcaaagacttcgatgaaatttctgcgatgtctatttattccagcaacgggtttattatggcaagctacgtccccgatcggatagggaaacagatggttgacgcggaggtgcaattcggcagttatataaacgaagccttcgatgctgttaaaaaggcagaagaatttgcgtgctacagttgggcgcctacgatgaaaacaaacatacaaattgccgttgtccctgttactctggggcaatcgaatacaacctggtcgataatggcaggtacagaagaatggtacataatgaaggatattaacccgatgattatgtttgccattattatcgcaggtgtagcgatagcagtgtcggcggtaattatattcattgttctggacagaacaaccaagccaatcagtatagtagccgaaaccttaaaaattgtagccgaaggcgatcttacaaagactgtcgaagtcaaaacaaaagacgaagtaggcgggcttgccaaagactttaactttactatcagtaaaatcaaagacctggtgcttcttatcaagaaacaggcggctatgttgtcggacatcggcaatgatttgtccagtaatatgaccgaaacggcggcggctataaacgaaattacctccaacatacagagtataaagggaagggtaattaaccagagcgcaagcgtaaccgagactaacgccaccatggaacaggttatcgccaacatcaacaaactcaacggacatattgaaagaatgtcgaaaaatgtcggttcagtaacaaacacgctgctcaacaacgccgccaatgtaaaaacattactggaagcctctgaggtgggaaaagccggattggcggaagtagtaacggacattcaggaaatcgcccgggaatcccgaggcttgctggaaatcaacgccgtgatggaaacatag

SEQ ID NO: 6578 - protein, 312 aa, Unknown
  Obtained from environmental sample
  DOMAIN (110)...(179): HAMP domain
  misc_feature (1)..(312): Xaa is any amino acid
MTTIKDFDEISAMSIYSSNGFIMASYVPDRIGKQMVDAEVQFGSYINEAFDAVKKAEEFACYSWAPTMKTNIQIAVVPVTLGQSNTTWSIMAGTEEWYIMKDINPMIMFAIIIAGVAIAVSAVIIFIVLDRTTKPISIVAETLKIVAEGDLTKTVEVKTKDEVGGLAKDFNFTISKIKDLVLLIKKQAAMLSDIGNDLSSNMTETAAAINEITSNIQSIKGRVINQSASVTETNATMEQVIANINKLNGHIERMSKNVGSVTNTLLNNAANVKTLLEASEVGKAGLAEVVTDIQEIARESRGLLEINAVMET

SEQ ID NO: 6579 - DNA, 312 bp, Unknown
  Obtained from environmental sample
  misc_feature (1)..(312): n is a, c, g, or t
atgcggctgacggcgaaaattatgaatggacggacatgtatgccggngtttgcaaaaacggcgaaagaagagggctttacagaaattgcggtattgtttgaaaaggtaggacaaatcgaaaaagagcacgaagagcgttaccgcaaactgctcgccaatgtaaacggcaatctggtgttctcgcgcgacggcgaccaaatttggcaatgcgccaactgcggccacattgttgtcggcaagaacgcgccggaactctgcccggtctgcaagcatcccaaggcgtattttcaaattaaagcgaataattactga

SEQ ID NO: 6580 - protein, 103 aa, Unknown
  Obtained from environmental sample
  DOMAIN (65)...(96): Rubredoxin
  misc_feature (1)..(103): Xaa is any amino acid
MRLTAKIMNGRTCMPXFAKTAKEEGFTEIAVLFEKVGQIEKEHEERYRKLLANVNGNLVFSRDGDQIWQCANCGHIVVGKNAPELCPVCKHPKAYFQIKANNY

SEQ ID NO: 6581 - DNA, 438 bp, Unknown
  Obtained from environmental sample
  misc_feature (1)..(438): n is a, c, g, or t
atgcttggacctccaacctatcaaccaggtagtctccctggtacctttaggggggttaaacccccagggatggcttatcttgaggggggcttcccgcttagatgccttcagcggttatcccttccgaacgtagctacccggcacttgcccttggcaggacaaccggtacaccagaggttcgtccatttcggtcctctcgtactaaaaacagctcctctcaaccatccaacgcccatggcagatagggaccgaactgtctcgcgacgttctgaacccagctcacgtaccgctttaattggcgaacagccaaacccttgggacctgcttcagccccaggatgcgatgagccgacatcgaggtgccaaaccttcccgtcgatgtgaactcttggggaagattagcctgttatccccggagtaccttttatccgttaagtga

SEQ ID NO: 6582 - protein, 145 aa, Unknown
  Obtained from environmental sample
  misc_feature (1)..(145): Xaa is any amino acid
MLGPPTYQPGSLPGTFRGVKPPGMAYLEGGFPLRCLQRLSLPNVATRHLPLAGQPVHQRFVHFGPLVLKTAPLNHPTPMADRDRTVSRRSEPSSRTALIGEQPNPWDLLQPQDAMSRHRGAKPSRRCELLGKISLLSPEYLLSVK

SEQ ID NO: 6583 - DNA, 576 bp, Unknown
  Obtained from environmental sample
  misc_feature (1)..(576): n is a, c, g, or t
atgattcgtgccgggcaagcaaaaaatattttagttataggagcggaaatttgctcaaggattatggactggagcgaccgcaatacatgtattctctttggagacggcgcggcggcgattctgctatcggcaagcgaggatagcagtcgggggtttgttgccgccgcgctcgcatccgatgggaacttagcaaacatactttacttaaacacgcttggagcagaggcttcttttttgagaatggaaggaaccgctgtgtataagctcgctgtgtctgagctagaagctataaccaaaaaagcgttggaaagcgcagggctttccgttgcggacatagatttatttgtgcctcaccaggcaaatatccgcataataaaatcagttggcaaaaggctggggcttgcggaagaaaaggttatagcaaacgtggaaaaatacggaaacacctcctccgcctctattcccatcgcgcttcacgaagcacagcaaaaaggcattttaaaacctggtatgctcgtggcaatgcctgccataggtggcggcatgaattggggatgcgttttgttcaggtggtag

SEQ ID NO: 6584 - protein, 191 aa, Unknown
  Obtained from environmental sample
  DOMAIN (1)...(61): 3-Oxoacyl-[acyl-carrier-protein (ACP)] synthase III
  misc_feature (1)..(191): Xaa is any amino acid
MIRAGQAKNILVIGAEICSRIMDWSDRNTCILFGDGAAAILLSASEDSSRGFVAAALASDGNLANILYLNTLGAEASFLRMEGTAVYKLAVSELEAITKKALESAGLSVADIDLFVPHQANIRIIKSVGKRLGLAEEKVIANVEKYGNTSSASIPIALHEAQQKGILKPGMLVAMPAIGGGMNWGCVLFRW

SEQ ID NO: 6585 - DNA, 789 bp, Unknown
  Obtained from environmental sample
  misc_feature (1)..(789): n is a, c, g, or t
ttgtattattattgcgtggtcatcaatgtctgcggcaacgatacttccaaggttagcggcaagcacaccgtaatgccctgcacaccgcctaccattacctctcagccaagcacgaaagatacaacccacgttcagaatgcccttgccggcggttttccggaacttaaggtagtagctaatggtacaccccatccggtctatcagtggtatgttattacggaagacaatatcacaagcggtggtacgaaagttggtaccaatttaaatgcctatacgccacccgacacaatggccggagattcgtggtactattgcacgataaccaatgcctgcggcgacgctacgtccaacatcagcggccaacacaccgtaacgacctgtgagaagcctgtctttacctctcaaccaaatgataaagattcgatcaaatttcagaatgccaccgcgggcggtttttcggcccttacggtaacggctgtcgggacaaccccacctccattagactttaagtggtatgccaacacaactaatagtaacacaggcggttggccttataccggaacggtaccgaacacaattacaagttcgggttcaagtagtacgccaaggaatgattcggccaccacgcggtattactattgcgttgtaaccaatgcttgtggcagcgatacgtcggcccccagtggcatgcgtaaattagattcctgtacagcgcccaccattaccacccagacgagcccgtcaacacaaagcatccccccaaaatggtacggcatttcagccccctaa

SEQ ID NO: 6586 - protein, 262 aa, Unknown
  Obtained from environmental sample
  misc_feature (1)..(262): Xaa is any amino acid
MYYYCVVINVCGNDTSKVSGKHTVMPCTPPTITSQPSTKDTTHVQNALAGGFPELKVVANGTPHPVYQWYVITEDNITSGGTKVGTNLNAYTPPDTMAGDSWYYCTITNACGDATSNISGQHTVTTCEKPVFTSQPNDKDSIKFQNATAGGFSALTVTAVGTTPPPLDFKWYANTTNSNTGGWPYTGTVPNTITSSGSSSTPRNDSATTRYYYCVVTNACGSDTSAPSGMRKLDSCTAPTITTQTSPSTQSIPPKWYGISAP

SEQ ID NO: 6587 - DNA, 387 bp, Unknown
  Obtained from environmental sample
  misc_feature (1)..(387): n is a, c, g, or t
gtgacggcggtagtcgcccgcgaatctgccggcaacccgcacgcgatctcccccaagggcgcaaaggggctcatgcaacttatggacggcacggctagagatatgggcgtcagcagttctttctctcccatagagaatctcaccggcggagttaagtatctaaagaacatgctcgattctttcaacggcgacgagagtctcgccctcgcctcgtacaacgcggggcccggcgctgtcaaaaagtacaacggcatacctccataccgggaaactcaggattacgtacgcgcggtgctggcactcaaggcaaaggccgcggagggcgcgctcacgattaccgcgggcgacgaaaataacacggttaacacggaaagcggggcaatataa

SEQ ID NO: 6588 - protein, 128 aa, Unknown
  Obtained from environmental sample
  DOMAIN (1)...(95): Transglycosylase SLT domain
  misc_feature (1)..(128): Xaa is any amino acid
MTAVVARESAGNPHAISPKGAKGLMQLMDGTARDMGVSSSFSPIENLTGGVKYLKNMLDSFNGDESLALASYNAGPGAVKKYNGIPPYRETQDYVRAVLALKAKAAEGALTITAGDENNTVNTESGAI

SEQ ID NO: 6589 - DNA, 429 bp, Unknown
  Obtained from environmental sample
  misc_feature (1)..(429): n is a, c, g, or t
atgctaaatggggcatatactttcatggccgaccttgcccgcgcggtggatctggattttcagatacacttcatgaaggcgtccagctacggccaaggccaagagagcagcggttctgtaaatatttccttgacacccggttgcncgataggtgggaaagacattttgattgtcgaggacatcattgacacgggccagacgctctccaaggtggttggcttcctgcaaggccagtcgcccgccagtatccgcatttgctcatttttggataagccaagccgacgcaaagtagatataacagttgattatattggatttataatagaagatttctttgcagttggctacgggatggacgtaaacgaaaagtacaggaacctgccatacataggggcctatgggcaggagggggcagagccttctaattga

SEQ ID NO: 6590 - protein, 142 aa, Unknown
  Obtained from environmental sample
  DOMAIN (1)...(109): Phosphoribosyl transferase domain
  misc_feature (1)..(142): Xaa is any amino acid
MLNGAYTFMADLARAVDLDFQIHFMKASSYGQGQESSGSVNISLTPGCXIGGKDILIVEDIIDTGQTLSKVVGFLQGQSPASIRICSFLDKPSRRKVDITVDYIGFIIEDFFAVGYGMDVNEKYRNLPYIGAYGQEGAEPSN

SEQ ID NO: 6591 - DNA, 303 bp, Unknown
  Obtained from environmental sample
  misc_feature (1)..(303): n is a, c, g, or t
ttgaaaagtagacggcacggtgcttgctgtgggaaaaaacggatgtggacaatgcaatatagacaatggcggaatatcatcgcgatgccgctgggtattcatacagtcggcttaaaagcagacggtacggtggtcgctgttggatacaatacagatggcccgtacaacactggaagttggcgggatattggccctgttcctgaagagctggttttgaaatggaaaggtatatgcaaatattgcggtggcaagctcggcggtttgttcaacaagaagtgcaaggcttgcggaagggagaattag

SEQ ID NO: 6592 - protein, 100 aa, Unknown
  Obtained from environmental sample
  misc_feature (1)..(100): Xaa is any amino acid
MKSRRHGACCGKKRMWTMQYRQWRNIIAMPLGIHTVGLKADGTVVAVGYNTDGPYNTGSWRDIGPVPEELVLKWKGICKYCGGKLGGLFNKKCKACGREN

SEQ ID NO: 6593 - DNA, 930 bp, Unknown
  Obtained from environmental sample
  misc_feature (1)..(930): n is a, c, g, or t
ttgtacaacgcttctaccggcaacataacgatttccggcggcacggtttccgtggcgacctcatcaaatgtgatcgcggtaaacaacttaggcaacatgaccatcacaggcggcacgatttcacaggcgggcgaaggggtggcggtgaccaacagaggcaacataaacatcacaggcggcacgatttccgcgataaatagagaagcggtggaacaccaaggaaccggcaagattaccgtggatggaacagcgctgattacctcatccggcatccaaacgatttctgtggcgcctttgagcggttcaacgaacactcccgagattgaaattaaaggcggcagggtagaaaataccaatccctccccatattcgatttcaagaccgaatcatacgatatacaacagcggcacggcaacgatttccggcggcacgatttcatcggtaaatggcgttacggtgggtaacaatttcagatccgacgccacgctaaacatcagcggcggcacgatttcaacggggggcggcagagcggtcaataacgattacggtacggtaaatatatcaggcggcacgatttcagcgacaacgggccaagcggtgtacaacaattacaccggaaaaactactgtgtcgggaacggcaaagctgagctcggcaaacgtaacagcgaccagtggcacggccgttgtttttaacaacaacggaaccgccgaaaccgacgaccggctggtaattgaaggcggcactatagaaaacaccgccgctaacggcaacgcggtgtatagtttaggcggagtaaaaatttcaggcggcacggttcangcaggggcaggcgggtacgcggtatacaacaaccacgcanacgccaggattaccctggancacaccccgcccatacggcatactgcggtcctacgcgcaggncaatga

SEQ ID NO: 6594 - protein, 309 aa, Unknown
  Obtained from environmental sample
  SIGNAL (1)...(26)
  misc_feature (1)..(309): Xaa is any amino acid
MYNASTGNITISGGTVSVATSSNVIAVNNLGNMTITGGTISQAGEGVAVTNRGNINITGGTISAINREAVEHQGTGKITVDGTALITSSGIQTISVAPLSGSTNTPEIEIKGGRVENTNPSPYSISRPNHTIYNSGTATISGGTISSVNGVTVGNNFRSDATLNISGGTISTGGGRAVNNDYGTVNISGGTISATTGQAVYNNYTGKTTVSGTAKLSSANVTATSGTAVVFNNNGTAETDDRLVIEGGTIENTAANGNAVYSLGGVKISGGTVXAGAGGYAVYNNHAXARITLXHTPPIRHTAVLRAGQ

SEQ ID NO: 6595 - DNA, 753 bp, Unknown
  Obtained from environmental sample
  misc_feature (1)..(753): n is a, c, g, or t
gtgaaaggttcagataccgttcttcctctttcgcaacaagaggctgaaagtttcacaaaggcaaataaaagtgctaacgtcacggtaactggggggggaagtggcgttggcatttccgcattattagaaggtaccaccgatattgcccaatcttcgcgcaaaataaaatttgaagaaaagcaaaaacttcaggaaaaaggggataaggtagttgagaaaataatagcctacgatgcccttgcggttattgtgcatccttcaaatcccgttagcaaacttacccgcgaacaaatggaagatattttcacaggcaaaaccacaaattggaaagaagtgggcggccccgatatgaaaataatcccttattcccgcgaaacatcttctgggacttatgagttttttaaggaacacgttttgaaaaacaaaaactatgtgaatggtataatgagtatgcctgccactggcgcaatagtccaatccataagtcaaacaaaaggtgctattggttatattggtctagcttatttagacaagaaaataaaatccgttgaagtttcttttgaccaaggaaaaacctacacagcaccttctgtgaaaagcgccatggacgagacttatccaattgttcgcccgcttatttactactacgtagaaaaatccgaaagcactgtgaaaccatttgtggactatgtactttctactgctgggcaaaaaattgttagggatattgggtttattccaattagtaaataa

SEQ ID NO: 6596 - protein, 250 aa, Unknown
  Obtained from environmental sample
  misc_feature (1)..(250): Xaa is any amino acid
MKGSDTVLPLSQQEAESFTKANKSANVTVTGGGSGVGISALLEGTTDIAQSSRKIKFEEKQKLQEKGDKVVEKIIAYDALAVIVHPSNPVSKLTREQMEDIFTGKTTNWKEVGGPDMKIIPYSRETSSGTYEFFKEHVLKNKNYVNGIMSMPATGAIVQSISQTKGAIGYIGLAYLDKKIKSVEVSFDQGKTYTAPSVKSAMDETYPIVRPLIYYYVEKSESTVKPFVDYVLSTAGQKIVRDIGFIPISK

SEQ ID NO: 6597 - DNA, 474 bp, Unknown
  Obtained from environmental sample
  misc_feature (1)..(474): n is a, c, g, or t
ttgccatttcctgtttttagtaattttaattgcgaaacaatgatttataacggagattcaaatgaaattatccactcattgcctgaagttgacgtagcatatttggatcccccttacaatcaacatccttatggttccaattactttatgctcaatttaattttggagtataaatatcctgaaaattttagcaaaatatccggaataccggaaaattggaaaagatcggattattataagggaaattacgcgttaagagcgttaacgtctcttgtggaaaatattaagtcaaaatatatcattatttcatttaattcagaaggctttattaattttgatgaaatgaaaaacatgctggaaaaagttggtaaagttgaaatactggaaacaaaatacaatactttcaggggatgcaggaatttaaataatcgtgaaattcatataaaagaatatttatacttagtggagaaatga

SEQ ID NO: 6598 - protein, 157 aa, Unknown
  Obtained from environmental sample
  misc_feature (1)..(157): Xaa is any amino acid
MPFPVFSNFNCETMIYNGDSNEIIHSLPEVDVAYLDPPYNQHPYGSNYFMLNLILEYKYPENFSKISGIPENWKRSDYYKGNYALRALTSLVENIKSKYIIISFNSEGFINFDEMKNMLEKVGKVEILETKYNTFRGCRNLNNREIHIKEYLYLVEK

SEQ ID NO: 6599 - DNA, 333 bp, Unknown
  Obtained from environmental sample
  misc_feature (1)..(333): n is a, c, g, or t
ttggttattcttagctcttcaggtgccttcccatttacccttcaagccgtattccagggctattgcctttttcgctacgaaattcttcttgagcgggacaaacagggccgcaacgaacagtattaccaacgctcggaagaaataaacgtcaccgcgatgaacggaatccggctgggtatatcaaacgcccaggcggttaaaatgcaggtgattggcgccggccgtacagttccttttgaggcaggcggcgcaggcgaagttgttgccgctgatctccgttgggtgcgtgacgatgaaacccgttaccgactggtactgctccgcctggagtag

SEQ ID NO: 6600 - protein, 110 aa, Unknown
  Obtained from environmental sample
  misc_feature (1)..(110): Xaa is any amino acid
MVILSSSGAFPFTLQAVFQGYCLFRYEILLERDKQGRNEQYYQRSEEINVTAMNGIRLGISNAQAVKMQVIGAGRTVPFEAGGAGEVVAADLRWVRDDETRYRLVLLRLE

SEQ ID NO: 6601 - DNA, 360 bp, Unknown
  Obtained from environmental sample
  misc_feature (1)..(360): n is a, c, g, or t
atgtcaatgtcaaatttcgacagcggcggcggcagttcctcgttcagcagcgcgccgccgtacacaccgccgccgcgcaagagcacttacgacgggccgaaagaaaatatagacctgctgttggatgtggaactggacattaacatagagctgggtaaatcagagttgtcaattaagagaatcctagaactggcccccggttcaattgtggagcttgacaaaatggccggcgagcctgttgaccttatagtcaataacaaagtggtggctaggggcgaggtggttgtggtggacgagaatttcggaataagaattgtctcattagtatcagcggaggacagggttaagagtttgaagtga

SEQ ID NO: 6602 - protein, 119 aa, Unknown
  Obtained from environmental sample
  DOMAIN (36)...(112): Surface presentation of antigens (SPOA) protein
  misc_feature (1)..(119): Xaa is any amino acid
MSMSNFDSGGGSSSFSSAPPYTPPPRKSTYDGPKENIDLLLDVELDINIELGKSELSIKRILELAPGSIVELDKMAGEPVDLIVNNKVVARGEVVVVDENFGIRIVSLVSAEDRVKSLK

SEQ ID NO: 6603 - DNA, 693 bp, Unknown
  Obtained from environmental sample
  misc_feature (1)..(693): n is a, c, g, or t
atgacgatctttcacgcggcagacattatgtttccgtactggaagcagtatttaccggatgctttagccgcgctgctgttgttgttctgcatgggcattggaatgacggccatgccccttatctgctttctggcggcggaaggcgcgcgccatacgaagaaccggaagaaatatttgctgagaatatcgctgtgggctgttccctcgcatatcgcgtacacgctggcggctgctaaaccgctaaacccctttgccggtccgttcatcatgcacacaagcgtattgtggacaataagctgcggcataggcgcttttttcgcgctgacgcgccggacgcaattcaggatagagctgatgctgttattgctggcgctgggactgtacggggattggggtatatgcgctgcggccgcgattctgtgcatggcattgacgcggaatgattttaacaggcaaatattgtcaatgatattatgcttttgtatagggcttgtttatacatatatccgtcagggattcgcgttggccctggtacaggcctgctttttattctcaattcccgcgctgaaaaggtacaacggaaaactgtgtaacgaaggctcaaaaccgctgccgagattcgctttttactggtattatccggtacatttggttgtattggcggggttaagacagataacagtgaacagataa

SEQ ID NO: 6604 - protein, 230 aa, Unknown
  Obtained from environmental sample
  misc_feature (1)..(230): Xaa is any amino acid
MTIFHAADIMFPYWKQYLPDALAALLLLFCMGIGMTAMPLICFLAAEGARHTKNRKKYLLRISLWAVPSHIAYTLAAAKPLNPFAGPFIMHTSVLWTISCGIGAFFALTRRTQFRIELMLLLLALGLYGDWGICAAAAILCMALTRNDFNRQILSMILCFCIGLVYTYIRQGFALALVQACFLFSIPALKRYNGKLCNEGSKPLPRFAFYWYYPVHLVVLAGLRQITVNR

SEQ ID NO: 6605 - DNA, 435 bp, Unknown
  Obtained from environmental sample
  misc_feature (1)..(435): n is a, c, g, or t
atgcttacaaaactagccatattagacaaaacaagcatccctgttgcgagcaaggggttagatgcttatgcccataggggcagggctattgctaataatatagccaatgtaagcaccccagggtaccgccgcatagaagtttcctttgaagaccaattgcgcagggcactcgacaaacaactcaatttggctggggaacgcaccgatggcaatcatttatttttaggtcgcccagagcttgaacacgtgaaaagcgaaggatatcgcgtggacgactatacaaatcctggtgaaataaacaatgtagatatagatatagaaatggcaaaacttgcagaaaacgaaattgcttttaattttgcaaccgcattcataagagaccgtagcggagcaataggggaggcaattagaggaagcaggttcggaggtgaatag

SEQ ID NO: 6606 - protein, 144 aa, Unknown
  Obtained from environmental sample
  DOMAIN (13)...(43): Flagella basal body rod protein
  misc_feature (1)..(144): Xaa is any amino acid
MLTKLAILDKTSIPVASKGLDAYAHRGRAIANNIANVSTPGYRRIEVSFEDQLRRALDKQLNLAGERTDGNHLFLGRPELEHVKSEGYRVDDYTNPGEINNVDIDIEMAKLAENEIAFNFATAFIRDRSGAIGEAIRGSRFGGE

SEQ ID NO: 6607 - DNA, 303 bp, Unknown
  Obtained from environmental sample
  misc_feature (1)..(303): n is a, c, g, or t
atggcaatggtaggactttttacaggcttgaatataagcgcaacgggtttaagggctcagcgtgttaggcaaaacgttattgcctcaaacatagcaaacgtagaaaccacccgcaccccaaacggcggcccatacaaaaggcagcacgtgattttagaggcagaccctcttgaatttgaccagttcttggtaaaagagcaaaacaaaataagaggaacaaaaacccaagaagggcacataaacattccacaaccggaatggccaatctccagagagcacataggcagcggcgtanaagtctag

SEQ ID NO: 6608 - protein, 100 aa, Unknown
  Obtained from environmental sample
  DOMAIN (10)...(46): Flagella basal body rod protein
  misc_feature (1)..(100): Xaa is any amino acid
MAMVGLFTGLNISATGLRAQRVRQNVIASNIANVETTRTPNGGPYKRQHVILEADPLEFDQFLVKEQNKIRGTKTQEGHINIPQPEWPISREHIGSGVXV

SEQ ID NO: 6609 - DNA, 420 bp, Unknown
  Obtained from environmental sample
  misc_feature (1)..(420): n is a, c, g, or t
atgtcgatgattaaaacggtcgaagtgtgtaaaaccttccacggcagggaggggcgcgggccgcttgaagtgcttaaaagcgtttccctgactgtggagcaaaaggaagtggtatgcattatcggcccttccggttcagggaaatccacttaccttcgcacacttaacaggcttgaaacaatagacgaagggcagatatttatagaagacaagctcctttttgattgcagcaggggaatcagcagcgttaagatgcaccacgacgaacgtaacaagatcctgcttgaagttggcatggtttttcagcgcttcaacctgttcccatcacagagcgcccttgagaacgtaatgcttgccctcgataacgtgcgaaagctgcccgttgaagaagcgcgtgaaagatcccggaagaattcttga

SEQ ID NO: 6610 - protein, 139 aa, Unknown
  Obtained from environmental sample
  misc_feature (1)..(139): Xaa is any amino acid
MSMIKTVEVCKTFHGREGRGPLEVLKSVSLTVEQKEVVCIIGPSGSGKSTYLRTLNRLETIDEGQIFIEDKLLFDCSRGISSVKMHHDERNKILLEVGMVFQRFNLFPSQSALENVMLALDNVRKLPVEEARERSRKNS

SEQ ID NO: 6611 - DNA, 720 bp, Unknown
  Obtained from environmental sample
  misc_feature (1)..(720): n is a, c, g, or t
atgaacggggaaacgatttttaccgatccgtttttttccaatagcgctctggtagtaaaaaagaaggtagcgcttaaatttgattattccaatgtcccctcaaagccgatagtgctgataagccataaccattacgatcatctggataaaagcacaataaaagaaatgataaaaaaggacgcgatttttttggttcccctgaaacttaaaaatttttttactaagttgggcgctaaagaggtctacgaacttgactggtggcaaagcgtaaacgtaaatcaagtgcgttataccttcctgcctgcccagcactggtcgcgtcgcatcggccaaaaagcgggagcgaccctttggggcggatggcttgttcagggctctaaaaccgttttcttttccggggactcaggctacttccggggctttgaggaattcggaaaccgctttgatattgactacgcccttgtcggcgcaggcgcttatgaaccgcgctggttcatgcactattcccacatgaatgtgcaggagtttcttcgcgctgcggatgaactcaaagccggagtttctatcccgattcatttcggtataatatccctcagcgatgaacctctggtttatccggtctacgaaattgacaagtttctttcgatgaatggaaaatatgaaggaaaactaaaaccgctgagggtaggggagtacataattctaaataaggatggatag

SEQ ID NO: 6612 - protein, 239 aa, Unknown
  Obtained from environmental sample
  misc_feature (1)..(239): Xaa is any amino acid
MNGETIFTDPFFSNSALVVKKKVALKFDYSNVPSKPIVLISHNHYDHLDKSTIKEMIKKDAIFLVPLKLKNFFTKLGAKEVYELDWWQSVNVNQVRYTFLPAQHWSRRIGQKAGATLWGGWLVQGSKTVFFSGDSGYFRGFEEFGNRFDIDYALVGAGAYEPRWFMHYSHMNVQEFLRAADELKAGVSIPIHFGIISLSDEPLVYPVYEIDKFLSMNGKYEGKLKPLRVGEYIILNKDG

SEQ ID NO: 6613 - DNA, 432 bp, Unknown
  Obtained from environmental sample
  misc_feature (1)..(432): n is a, c, g, or t
atggatgatttatcatttgaaacggatgatatagggtataagaaattaaaggttattctggacggaagaattgaacggcagcctctaaacattttattttacgcaacttcaaacagatttcatattatcaatgaaacctggaaagaccgggaaggtgatgaaattcatttccgggataccatgaacgaaaagttgtcgttatctgaacgattcggaattcgtgtaaactttgttacaacaaaaacaagcgatgattattataaaataattgaaggaattttatcactcgaaaacattcaattcacagatgaaataaaaaaagaagcgacgcgctgggaaactttatataatggacgttcaggcagaaccgccgcacagtttgcaaaaaccataattgcttcaaaggtttttcgcagccctccgacattataa

SEQ ID NO: 6614 - protein, 143 aa, Unknown
  Obtained from environmental sample
  DOMAIN (35)...(128): Protein of unknown function (DUF815)
  misc_feature (1)..(143): Xaa is any amino acid
MDDLSFETDDIGYKKLKVILDGRIERQPLNILFYATSNRFHIINETWKDREGDEIHFRDTMNEKLSLSERFGIRVNFVTTKTSDDYYKIIEGILSLENIQFTDEIKKEATRWETLYNGRSGRTAAQFAKTIIASKVFRSPPTL

SEQ ID NO: 6615 - DNA, 330 bp, Unknown
  Obtained from environmental sample
  misc_feature (1)..(330): n is a, c, g, or t
ttgtcggatcaggcgaagctgtttatggcccttttccataccggttggtttgtggaatccctctggtcgcagactctggttatccacatgatccgtaccccgaagataccttttatccagagcagagcttcggcgcaggttgccctatttacctctctgggaatagccacaggaaccatcatcccctataccttgtttggggatcatttgaagatggtcaaccttccgtcaatttatttcgcttatcttggggggataatcctggcctacatgctcttggcgacattgatgaaaaaggtctttgtgtggaaatacggggagttgttataa

SEQ ID NO: 6616 - protein, 109 aa, Unknown
  Obtained from environmental sample
  misc_feature (1)..(109): Xaa is any amino acid
MSDQAKLFMALFHTGWFVESLWSQTLVIHMIRTPKIPFIQSRASAQVALFTSLGIATGTIIPYTLFGDHLKMVNLPSIYFAYLGGIILAYMLLATLMKKVFVWKYGELL

SEQ ID NO: 6617 - DNA, 318 bp, Unknown
  Obtained from environmental sample
  misc_feature (1)..(318): n is a, c, g, or t
atggaaaccctttacttcggaaaaaacgtaacaagcgcaatccccgtcgccgaagcgcgcggagtgatttccgtcgcaatagcggaaaagggcatccctctttttgaattgacacctaacgcaatcaagcagggagtggtgggcagcgcccgcgccgataaagagcaggttcaggagatggtgcgtattattttaagtttaaaagaaaccccaaaaccggatcacgccgcggacgctttaggagccgctatctgcgcggctaattccgcctcgtataacgaatcatccgctaaaattaccaggggttcaaaaggttaa

SEQ ID NO: 6618 - protein, 105 aa, Unknown
  Obtained from environmental sample
  DOMAIN (1)...(86): Crossover junction endodeoxyribonuclease RuvC
  misc_feature (1)..(105): Xaa is any amino acid
METLYFGKNVTSAIPVAEARGVISVAIAEKGIPLFELTPNAIKQGVVGSARADKEQVQEMVRIILSLKETPKPDHAADALGAAICAANSASYNESSAKITRGSKG

SEQ ID NO: 6619 - DNA, 411 bp, Unknown
  Obtained from environmental sample
  misc_feature (1)..(411): n is a, c, g, or t
gtgaaatacatgctggataccaatgtgatatccgaactgcaaaaatcaaattgcaatcaaaatgtaaagttattcgcacaggatatacactgggaagacatgtgtttatccgtaatcaccataggggaattgtgctatggggtggaaaaacttccggcaggcaggaaaaagcacgaattatcagtctggttatacacaaaattaccggaatggtttaagggacgcataatagaaattgatacggaagtaattattgaatggggaaaaatccgcgcaaaaacaaagaggagtctgcctgtcgcggattcattaatcgcggcatgcgcaattacaaaccacgcgtttcttgttacaaggaatacaaaagattttgaagatatcgagggaattaaccttttgaacccctggtaa

SEQ ID NO: 6620 - protein, 136 aa, Unknown
  Obtained from environmental sample
  DOMAIN (3)...(135): PIN domain
  misc_feature (1)..(136): Xaa is any amino acid
MKYMLDTNVISELQKSNCNQNVKLFAQDIHWEDMCLSVITIGELCYGVEKLPAGRKKHELSVWLYTKLPEWFKGRIIEIDTEVIIEWGKIRAKTKRSLPVADSLIAACAITNHAFLVTRNTKDFEDIEGINLLNPW

SEQ ID NO: 6621 - DNA, 303 bp, Unknown
  Obtained from environmental sample
  misc_feature (1)..(303): n is a, c, g, or t
ttgacaccattttttaataaaaatttacagagtgtgaccattcctaacagcgttaattctatcggagataaggcatttgctgataatccgctcactagcgtaaatattccagacagtgttaccacatttaacaacgatgtattttcaggagcaagtaacttaacacgcattagcattggtgcaaatgttaatattacagggtctgaagccatagtatttaattttgaagattactatttgctcaataatcggcaagcaggagtttacactttcagtaatggtaagtggaattttcaaatttag

SEQ ID NO: 6622 - protein, 100 aa, Unknown
  Obtained from environmental sample
  misc_feature (1)..(100): Xaa is any amino acid
MTPFFNKNLQSVTIPNSVNSIGDKAFADNPLTSVNIPDSVTTFNNDVFSGASNLTRISIGANVNITGSEAIVFNFEDYYLLNNRQAGVYTFSNGKWNFQI

SEQ ID NO: 6623 - DNA, 582 bp, Unknown
  Obtained from environmental sample
  misc_feature (1)..(582): n is a, c, g, or t
atgtctcttaaacagcaggaatcagtaaaagatttgatggaagttgcgggacttgggcaagaatccatgaaaaaaaccattcaatcaataagtgaaatctctcaatctgtgnaaggtataagttcggcaatccgcataatttcttcaatagcggcaaataccaatttgctgtcaatgaatgcggcgattgaagccgctcatgccggagacgctggaatgggttntgcggtagtcgccggagaaatacgccgtctttcagaaaccaccagagaaaattccgtaaatatttcccgtacacttaaaagtattatcggcggaatatccgacacgacaaaacaatccggcgaaacagatacacgaatagcccaaatgtccaaagagataagcggttttgccgaaactatgtctgcttttatgaacacatttaatgaattatcggcaaaaagcggaaacattaccgcctctcttgtaagcctgaaagagcaaagttcggcggttaaaacaagttatgcgcaaatgattgaaatgacaaataaacttgctaaagcgctgaaagacttatccgagttgtcaaaaagataa

SEQ ID NO: 6624 - protein, 193 aa, Unknown
  Obtained from environmental sample
  DOMAIN (3)...(189): Methyl-accepting chemotaxis protein (MCP) signaling domain
  misc_feature (1)..(193): Xaa is any amino acid
MSLKQQESVKDLMEVAGLGQESMKKTIQSISEISQSVXGISSAIRIISSIAANTNLLSMNAAIEAAHAGDAGMGXAVVAGEIRRLSETTRENSVNISRTLKSIIGGISDTTKQSGETDTRIAQMSKEISGFAETMSAFMNTFNELSAKSGNITASLVSLKEQSSAVKTSYAQMIEMTNKLAKALKDLSELSKR

SEQ ID NO: 6625 - DNA, 966 bp, Unknown
  Obtained from environmental sample
  misc_feature (1)..(966): n is a, c, g, or t
atgactatgcaccttttaatgaaagagattgaggcgggcaaagcgtcctatgatgaattaatcccgattacaaaagaaagctgggcgcaaagccagcccccgcgctcaagtttgatgttcctcgctcccggtcagattgtaacgttacgcgaaattatgcttggtcttgcaattccctcaggaaatgacgccgctgtcgccgccgctcttcgtctcgctcccactatggatgatttcgccgctttaatgaatgcggaagctaggcgcatgggtcttactgtaacgcgctttacggaagcgtccggcatatcggaatttaacatgacaaccgccgccgaattcgctcatttttgccgtcaatatgtaatacttcatccgcaaagcttaaaagattttcattcagtgcctgtttttccctatcctgtcgcggaaaatgtgccgcaagcttaccgaggcaatgttagaacaattacccaatacaaccataataacctgttaagaacttttccgggagtagacggccttaagaccggctatattgacgaatccggttataacatcgcccttacagcgcaaagagacaacacccgtattatcgccacaatcttcggcgcgccggcggaaccgggtggaggacgtatccgcgacgatgacgctttgcgacttcttacatgggcgtttgagaatttcagaacagtccggcccggaataccatggattgaaaatgtccgtttgtggaaggggaaattgaactttgctgagattcagatcgcgcaaattacggattttacagctcctttcaaccgcgctgagaatcttcgatatgaaatttttattgataaaaagttaaccgccccgcttcccgcaggagcaattgcgggttattacataatctacgatgactacggcggagtaaatcgcgtgccgctaatacacagcgctcttacgaaagggaagtatttttaa

SEQ ID NO: 6626 - protein, 321 aa, Unknown
  Obtained from environmental sample
  DOMAIN (1)...(207): D-alanyl-D-alanine carboxypeptidase
  misc_feature (1)..(321): Xaa is any amino acid
MTMHLLMKEIEAGKASYDELIPITKESWAQSQPPRSSLMFLAPGQIVTLREIMLGLAIPSGNDAAVAAALRLAPTMDDFAALMNAEARRMGLTVTRFTEASGISEFNMTTAAEFAHFCRQYVILHPQSLKDFHSVPVFPYPVAENVPQAYRGNVRTITQYNHNNLLRTFPGVDGLKTGYIDESGYNIALTAQRDNTRIIATIFGAPAEPGGGRIRDDDALRLLTWAFENFRTVRPGIPWIENVRLWKGKLNFAEIQIAQITDFTAPFNRAENLRYEIFIDKKLTAPLPAGAIAGYYIIYDDYGGVNRVPLIHSALTKGKYF

SEQ ID NO: 6627 - DNA, 534 bp, Unknown
  Obtained from environmental sample
  misc_feature (1)..(534): n is a, c, g, or t
gtgtcaaccatggtatatctgcaactctgctatacgtttttcatcatcgggctgtttggctttggcggcggttacgccatgctctcgctcatacagcatgaggtggtggtgcggcatgggtggatttcggcgcaggagtttaccgatattgtggctatttcgcagatgacgcccggtcctatcagcatcaacggcgcaacgtacattggctacgcggcaacgggcagcgtgtggggcgcggcgctggctacggtggcgctggcgttgccctcgttcatcatcatgctcagcatctgcaaaatgttggctcgcttcaagggtaacaagtaccttgaggggatacttcgtgggatacgccctgccgtttcggggcttattgccgcagcagcgctcacgctgctcacaggcgacaacttttcggactacaagagcctcatcatttttgccgctgcctttgttgccctgtggcggttcaggctgcacccaattttggtgattgtactggcgggagtggtgggaatggtgatgtactaa

SEQ ID NO: 6628 - protein, 177 aa, Unknown
  Obtained from environmental sample
  DOMAIN (4)...(177): Chromate transporter
  misc_feature (1)..(177): Xaa is any amino acid
MSTMVYLQLCYTFFIIGLFGFGGGYAMLSLIQHEVVVRHGWISAQEFTDIVAISQMTPGPISINGATYIGYAATGSVWGAALATVALALPSFIIMLSICKMLARFKGNKYLEGILRGIRPAVSGLIAAAALTLLTGDNFSDYKSLIIFAAAFVALWRFRLHPILVIVLAGVVGMVMY

SEQ ID NO: 6629 - DNA, 450 bp, Unknown
  Obtained from environmental sample
  misc_feature (1)..(450): n is a, c, g, or t
ttggggccgaccaactatttgataatttgggacaagctcggcaacagccataactttattttttattccgacgcggaaatagcgtatacctcgatacacatacccgtttccgtattccgcgtccaatgggacgggcaccgcatgggcagggaaaccggggagcggaagatccatccgcaccaaaagcccgtggagctatacgtaaaaatactgaagaaatacgcgaagccgggatggcacgtgctcgacacgcacatgggatcgggatcgtcggcaatcgcctgccacaggctcgggcttggcatgaccgcctgcgaaatcgacccgcactatttcaacgccgcaaaaaagagaatagacgcggaaaccaggaagcaggagctctttttgccggaactgcggaagttccaggaaagccatttgttcgagggtctcaaagaagcgctatga

SEQ ID NO: 6630 - protein, 149 aa, Unknown
  Obtained from environmental sample
  misc_feature (1)..(149): Xaa is any amino acid
MGPTNYLIIWDKLGNSHNFIFYSDAEIAYTSIHIPVSVFRVQWDGHRMGRETGERKIHPHQKPVELYVKILKKYAKPGWHVLDTHMGSGSSAIACHRLGLGMTACEIDPHYFNAAKKRIDAETRKQELFLPELRKFQESHLFEGLKEAL

SEQ ID NO: 6631 - DNA, 648 bp, Unknown
  Obtained from environmental sample
  misc_feature (1)..(648): n is a, c, g, or t
ttgcgtaatttgcagcgcagcgaaatcggggaaatacgggaaggttttaccgcggatcaggatggttcttccaccatgccgcaaaagcgtaatccatggaattcggaacacgttaaaagtttatggaaggcttttatgccgcgggtgaatacgttctttatggatcagatcagcgaacatcagcgggacctttccaattcggcaagccagcgctttattgccgattacatcgccggtttctgtctggcaatttcccgcatgacgggagtgattgaagggctgggcgcggaccgcgagcggttgctttccaatttgcgcggcggcggtgtccttgccggtggcagcagccgcggcgtattggcggaacctgcgtatatactgttagctgaaagcggcgtgtccgacgctcatgaggtgatccgtaaaattacacttaacgccgagaaatcaaacataagttttgcccacgctcttgttcaggaaccggatgtgttacaacgggttggcggcaaaatggtggaactgggtttggtttcttcgcctgaagaagcgctgtcgttttttaataaaccggaacggtactgcggacttgcggcgcacaaagcgaaatcattggcgcgtaaatataagacattaatgggaggttga

SEQ ID NO: 6632 - protein, 215 aa, Unknown
  Obtained from environmental sample
  misc_feature (1)..(215): Xaa is any amino acid
MRNLQRSEIGEIREGFTADQDGSSTMPQKRNPWNSEHVKSLWKAFMPRVNTFFMDQISEHQRDLSNSASQRFIADYIAGFCLAISRMTGVIEGLGADRERLLSNLRGGGVLAGGSSRGVLAEPAYILLAESGVSDAHEVIRKITLNAEKSNISFAHALVQEPDVLQRVGGKMVELGLVSSPEEALSFFNKPERYCGLAAHKAKSLARKYKTLMGG

SEQ ID NO: 6633 - DNA, 828 bp, Unknown
  Obtained from environmental sample
  misc_feature (1)..(828): n is a, c, g, or t
atgagccgtatacgggagcttttgggcaggactcctgacctggagcgtttaagttcccggatagccatggataaggcccacgggaaagatatggcaggggtaaaaaacgccctcgccctgtgcgcccttatcgaagatgaatgtaaggatctcggtctcgcttttgaatcttctgacgcggccctgcttgagaggactagcgccaacgcgagcttttcaaggctcatggaattaagggaacacctggaaagggccttagccgaggatccttcgatactccttaccgaggggaaccttataagggacaattacgacaaaaacctggattccctccggcagctccgggataacggcagaaaactcctggaaggctaccttgaggaagaacgccaggcaacggctattcccagcctgaagatacgctataaccggatgatcggctatttttttgaggttaccaagaaccacctttccaaagttccgtcccattttatccggcgccagggtattaacgccggggagcgctttaccacggaccgcctggcccagcttgaatcggatatcaacggcgcttccgaaaggatcattgagctggagaaagaactcttccttgagcttcgggaaaaagcgaaaaccctgctcccggaactaagcgcagcgggacaccgggtcgccgagattgacgcgggccagtcccttgcccattcggcaaccacccacggctggatccggccccaggtggatgaccagaacaggctccgcattatcgaaggccgccatcctgtggtagaggcccatctgcctagggggggagtatatccccaatga

SEQ ID NO: 6634 - protein, 275 aa, Unknown
  Obtained from environmental sample
  DOMAIN (1)...(239): MutS domain III
  misc_feature (1)..(275): Xaa is any amino acid
MSRIRELLGRTPDLERLSSRIAMDKAHGKDMAGVKNALALCALIEDECKDLGLAFESSDAALLERTSANASFSRLMELREHLERALAEDPSILLTEGNLIRDNYDKNLDSLRQLRDNGRKLLEGYLEEERQATAIPSLKIRYNRMIGYFFEVTKNHLSKVPSHFIRRQGINAGERFTTDRLAQLESDINGASERIIELEKELFLELREKAKTLLPELSAAGHRVAEIDAGQSLAHSATTHGWIRPQVDDQNRLRIIEGRHPVVEAHLPRGGVYPQ

SEQ ID NO: 6635 - DNA, 777 bp, Unknown
  Obtained from environmental sample
  misc_feature (1)..(777): n is a, c, g, or t
gtggacgtatcttatgacatgggggacaactggcaaagccttttaacggcggcggaattggacggtcttcgcggtcccgttaacaacaattttacaaaaacacttgatcttaccgcgattgatgacggttcaattaacattttaataaaggtggctaataaatcaggtcttgaatcggttgcaaattttacagtattaaaagacacaacgcctccgcaggcccagacaattatgccaatcgctgaagccccggtaaacggaacaatacgcatggcctttgccgtggaagaaatgggcgccataaagtccattacatacagccggaatattccggcaccggcggctcctgcggctacaactcctgccagacccggaactcccgccgccgccgcgactcctgccgcaacatccgtggtaaaagaaatttttaatgacagcaaatgggataaagattaccagccgaggttcttcgaggtattaatggattcgctggaaatgccccttgataaaaatatgcgttttacatttacggataaggcaggcaattcaagcgaagtcaacacatggttattcgtaattgatcaggaaatggacgttcctatcgtgcaaataattctgcccttggaaaacgaagtaattacaaatgatttcatcgtttcgggcgtaatgtttgacgatgacggagttaaaaagtatcaatggagaatagacaataatccgtggcaaactgaggacgccgaatacggttttatcattcagtggctatatcctcgctga

SEQ ID NO: 6636 - protein, 258 aa, Unknown
  Obtained from environmental sample
  misc_feature (1)..(258): Xaa is any amino acid
MDVSYDMGDNWQSLLTAAELDGLRGPVNNNFTKTLDLTAIDDGSINILIKVANKSGLESVANFTVLKDTTPPQAQTIMPIAEAPVNGTIRMAFAVEEMGAIKSITYSRNIPAPAAPAATTPARPGTPAAAATPAATSVVKEIFNDSKWDKDYQPRFFEVLMDSLEMPLDKNMRFTFTDKAGNSSEVNTWLFVIDQEMDVPIVQIILPLENEVITNDFIVSGVMFDDDGVKKYQWRIDNNPWQTEDAEYGFIIQWLYPR

SEQ ID NO: 6637 - DNA, 897 bp, Unknown
  Obtained from environmental sample
  misc_feature (1)..(897): n is a, c, g, or t
atgcaaaggagggggtatcagcagtacatggaaagcagaatagcttcgctgctgaccgaagaagaacgcaaatacatacaggaacaccccgtaataccaatcggcgctgacttcagcaattatccgatttcattttacaatacccattccaataaatgggagggggtatatttcgaggcgctggatgaagtgtcaaagcttaccgggcttaaatttgaaaccgccaacaacccggatacgcccttgctcaaggtgataggcaacgttgagaaaggcggcgcgttgatcctgccggagctgtttcagatagaagaatataaggaccgtttcctgtggtcggatgttccgcttataagcgataacttcgcctttatatccaattcgaatatgcgcaatgttgatataaactacatatttcatttacgcgtggccgtacgcaaagaatccatatattccgaaatgttcaaaaaagtttttcccgcccacaggaattttatcgaatatgagactatggaacaaacatgggacgcgttagataacgacgaagttgacgtgattttcgcaagccggcgaaggctggttatttacaccaattactatgaacgggcggattttaagcttaatctggttttcgaccatacatttaactcttatatggcctataacaaggatgccgctattcttaaatcaattgtcgataaagccctgcattttgtcaatgtaggaaatatggcaaaccagtggatatacaagacctacgattaccggagtaaaatggcggccgcccagcgcctctggctgataggagcggcggcttcattttttctggtgcttttctgctgtacaatttatgtaataagaaagcgcagttcccgcagacactggaaagagtggtag

SEQ ID NO: 6638 - protein, 298 aa, Unknown
  Obtained from environmental sample
  misc_feature (1)..(298): Xaa is any amino acid
MQRRGYQQYMESRIASLLTEEERKYIQEHPVIPIGADFSNYPISFYNTHSNKWEGVYFEALDEVSKLTGLKFETANNPDTPLLKVIGNVEKGGALILPELFQIEEYKDRFLWSDVPLISDNFAFISNSNMRNVDINYIFHLRVAVRKESIYSEMFKKVFPAHRNFIEYETMEQTWDALDNDEVDVIFASRRRLVIYTNYYERADFKLNLVFDHTFNSYMAYNKDAAILKSIVDKALHFVNVGNMANQWIYKTYDYRSKMAAAQRLWLIGAAASFFLVLFCCTIYVIRKRSSRRHWKEW

SEQ ID NO: 6639 - DNA, 1008 bp, Unknown
  Obtained from environmental sample
  misc_feature (1)..(1008): n is a, c, g, or t
atggcgtttatcatcccgtttaccatcgtgctttttgccctggcagtaatatcccttgtctcagaagatttccctgcagtgattatgatcctctccatggtgtttatcagcggccttctgcgtttttttcaggaactgcgaagcggcaacgccgccaagcgcctgtccgagatggtagaaaccacggcctgcgctgccaggaaatataaagacaaggaaagcggcgaaaccttctcgcaaaagaaggaaatccccatggacgagatcgtggtaggcgacgtggtctaccttgcggcgggagacatggttcctgcggacgtgcggattctccaggcgaaggacttgttcataagccagtccgccctgaccggcgaaagcgagcccgtggagaagttcgccgagaccgcggccaaaatcggaaacaatcccctggaaatgaataacctggcgttcatgggaaccaacgtgatctccggctcggccaccgccctggttatcaccgtcggggatgatacggttcttggcaccatcgcgcagcagttacagacgaagaaagtgcccaccagttttgaaaaaggagtcaactcggtctcctgggtgctgatccgttttatgctggtcatggttcctgttgtacttctgataaacggctttaccaaggggagctggttcgacgccttccttttcgccctgtcggtggcggtcggccttacgccggagatgctgccaatgatagtttcagctaacctcgcgaaaggcgccgtgtccatgtcaaaaaaacgcgtcatcgtgaaaagcctgaactcgattcagaatttcggcgcgatggatgtgctgtgtaccgacaaaaccgggaccatcacccaggacaaggtcatactggaactgcacctggatattcacggcaatgacaatgttgacgtacttcgccgggcgtttctcaacagctattatcaaaccggacgaaaaaccttatggatatttcgttataatacccactcgctataa

SEQ ID NO: 6640 - protein, 335 aa, Unknown
  Obtained from environmental sample
  SIGNAL (1)...(21)
  DOMAIN (29)...(272): E1-E2 ATPase
  misc_feature (1)..(335): Xaa is any amino acid
MAFIIPFTIVLFALAVISLVSEDFPAVIMILSMVFISGLLRFFQELRSGNAAKRLSEMVETTACAARKYKDKESGETFSQKKEIPMDEIVVGDVVYLAAGDMVPADVRILQAKDLFISQSALTGESEPVEKFAETAAKIGNNPLEMNNLAFMGTNVISGSATALVITVGDDTVLGTIAQQLQTKKVPTSFEKGVNSVSWVLIRFMLVMVPVVLLINGFTKGSWFDAFLFALSVAVGLTPEMLPMIVSANLAKGAVSMSKKRVIVKSLNSIQNFGAMDVLCTDKTGTITQDKVILELHLDIHGNDNVDVLRRAFLNSYYQTGRKTLWIFRYNTHSL

SEQ ID NO: 6641 - DNA, 699 bp, Unknown
  Obtained from environmental sample
  misc_feature (1)..(699): n is a, c, g, or t
gtggattttaccgtggtgaacggcgaaaactcggcggatgggttcggcatgacagaagcgactttgaagcggatcatcgccgccggcgcggatgcggtgacatcgggaaaccatgtctgggaaaagcgggaattctggcctgtgcttgaaaccggcgatcgcatactgcgcccggcgaattatcccgccggctgcgcgggcaagggctggctttgcgttgaaaaggccgggctgcgctggttcgtcattaatctgcagggcagggaattgatgacgcccattgattgtcccttccgttgttttgataatattgttaaagatattaacaatatttcacccctcatcatcgttgatttccatgccgagtcaagccgtgaaaaagaggcgatggggcattacattgacggacgggccgcgctgatcgcgggaactcatacccatgtccaaaccgcggacgagcgtgttctgcccaaggaaaccgcctacattaccgatttggggatgaccggggtcactaacagcattatcggcatggataccgaaatctgcatggacaggatacgcaaacaggtgctttaccgcatggaacccgccgttgacaaaaagattaacggaaaaagcagcgccggggtgcagggcgttatcgcggaaatcaacactgaaacaggaaaagctatttccatcaggcgaattcagtga

SEQ ID NO: 6642 - protein, 232 aa, Unknown
  Obtained from environmental sample
  misc_feature (1)..(232): Xaa is any amino acid
MDFTVVNGENSADGFGMTEATLKRIIAAGADAVTSGNHVWEKREFWPVLETGDRILRPANYPAGCAGKGWLCVEKAGLRWFVINLQGRELMTPIDCPFRCFDNIVKDINNISPLIIVDFHAESSREKEAMGHYIDGRAALIAGTHTHVQTADERVLPKETAYITDLGMTGVTNSIIGMDTEICMDRIRKQVLYRMEPAVDKKINGKSSAGVQGVIAEINTETGKAISIRRIQ

SEQ ID NO: 6643 - DNA, 474 bp, Unknown
  Obtained from environmental sample
  misc_feature (1)..(474): n is a, c, g, or t
ttgtccgtccagagcgacagctccgccaaaaaaacaaccacaacccaaagaagacgcctgccggaaactgtaaagatgaaagaccgcaaggtcatcctggccgaagacgtggcgatcaaccgcgacctgatagcgatgtacttcgacggctccggcgtaaagttcgagttcgccgtgaacggcagagaggtctgcgaaaagttcgagcgcgacccgagcgcctacagcctcatcctaatggacatccaaatgccggagatggacggctacgaagtctcaaaaagaatacgcgccatggacgccgactgggccaaacaaattcccatcattgcaatgacaggcaacgatcaaaaagaggacatagacctatgctttgaagcgggaatggacgatcatatcccaaaacccatagatatggaagtcctgcaagataaggtgtttgacatattgacactgaatgcggaaagtttttga

SEQ ID NO: 6644 - protein, 157 aa, Unknown
  Obtained from environmental sample
  DOMAIN (29)...(147): Response regulator receiver domain
  misc_feature (1)..(157): Xaa is any amino acid
MSVQSDSSAKKTTTTQRRRLPETVKMKDRKVILAEDVAINRDLIAMYFDGSGVKFEFAVNGREVCEKFERDPSAYSLILMDIQMPEMDGYEVSKRIRAMDADWAKQIPIIAMTGNDQKEDIDLCFEAGMDDHIPKPIDMEVLQDKVFDILTLNAESF

SEQ ID NO: 6645 - DNA, 318 bp, Unknown
  Obtained from environmental sample
  misc_feature (1)..(318): n is a, c, g, or t
gtgacgctccactggccggagccgaatttgggcaagggcacggcggaggcggcggtgatatacatagaccgcttcggcaacgcgataacctctataagcccgcgagaggtggtcttctcctgcggcgacgccccggagtgcattttggagaacgacaggcgcgtgccgctcggcaaccactacagcgacgtccccttgtggaacgcggtggcctatcccgggtcggcggggttgatggagataggcgtgaacggaggaaacgcggcggagattttggaattggatgtggggagcaacgtttgcttcacggcgcattga

SEQ ID NO: 6646 - protein, 105 aa, Unknown
  Obtained from environmental sample
  misc_feature (1)..(105): Xaa is any amino acid
MTLHWPEPNLGKGTAEAAVIYIDRFGNAITSISPREVVFSCGDAPECILENDRRVPLGNHYSDVPLWNAVAYPGSAGLMEIGVNGGNAAEILELDVGSNVCFTAH

SEQ ID NO: 6647 - DNA, 975 bp, Unknown
  Obtained from environmental sample
  misc_feature (1)..(975): n is a, c, g, or t
ttgagaagaaccgtaaatataataatccacggccatgaacccgccctttcggaattgctaactgtagtcgtggcagacccggaaatcttggcttacgctaaagccgcaggcgcgaacgggatcaccctggcgggcatctgctgtaccgccaatgagattctgatgcgccacggcgtccccgtggccggtaactttttgcaacaggaattggcaattgccaccggagccgttgagcttatggttatcgacgtgcagtgctgtatgccgagcctgccggaaatagccaaaaattaccacaccgagatcgtttccacatccgacatcgccagaaccatcggcgcggtacacaaaagcataggccacggcagcgaaccgctaaatgtagccagagatattgtcaggcgtgccatcgacaatttcaaaaaacgcgatgctgcgaagatcagcataccaagacaaaaggaagacctcatcgcgggtttttccgtggacgccattaagtacatacttggcggacggttccgcgcatccttccggcccctgaacgacgcgatcatacaaaacagaattttgggcgtggtcggtatcgttggctgtaacaacacgaagtgcaaaacagacgaatataccaatgtgcttaccgctgaattaataaagcggaacgtgctggtgcttcagacaggctgttccgcgattgccagcgccaaggcggggatgctcaagccggaagtagctttgagccaggccgggccgggcctgcgggaagtctgcgaggccgtaggaattccgcctgtcctgcaccttggcagttgtgttgacaacagccggatactggaagctcgcaccgaatcgattcttgagggcggccttggtgaggatatgggaggctatcctgctgattgcgtcccgcccgaatgnatgagtgaaaaagccntcncaatcgcctgttattttgtggcaagcggattcccgtag

SEQ ID NO: 6648 - protein, 324 aa, Unknown
  Obtained from environmental sample
  DOMAIN (1)...(324): Prismane/CO dehydrogenase family
  misc_feature (1)..(324): Xaa is any amino acid
MRRTVNIIIHGHEPALSELLTVVVADPEILAYAKAAGANGITLAGICCTANEILMRHGVPVAGNFLQQELAIATGAVELMVIDVQCCMPSLPEIAKNYHTEIVSTSDIARTIGAVHKSIGHGSEPLNVARDIVRRAIDNFKKRDAAKISIPRQKEDLIAGFSVDAIKYILGGRFRASFRPLNDAIIQNRILGVVGIVGCNNTKCKTDEYTNVLTAELIKRNVLVLQTGCSAIASAKAGMLKPEVALSQAGPGLREVCEAVGIPPVLHLGSCVDNSRILEARTESILEGGLGEDMGGYPADCVPPEXMSEKAXXIACYFVASGFP

SEQ ID NO: 6649 - DNA, 435 bp, Unknown
  Obtained from environmental sample
  misc_feature (1)..(435): n is a, c, g, or t
ttgagtaataaaactgaattattatgtatcggcaactctattgtcgatgtgtttgttgatattgataacagtcttgcgttaaagtacggcattctcgatcctgttcagcatattggcggcgataaagctgaagcgctgctggcggagccttccattgattttgccaaatcggtaaaaagctcaggcgggggagcggcaaatgtcgcgaaaattgcctccatgcttggaatggacgcggcgttttgcggctgtatcggacaggatgaacttgcttcaatttttgaagaagagataaaagaagccggcgtttcttccatgcttgtaagatccaatgataaaacagggttatgctttgcgtgtaatattggcggcgagacgcgttttgccgcaagtccgcgtgcggcgcttgaactgaacgagtctcatatcagctga

SEQ ID NO: 6650 - protein, 144 aa, Unknown
  Obtained from environmental sample
  misc_feature (1)..(144): Xaa is any amino acid
MSNKTELLCIGNSIVDVFVDIDNSLALKYGILDPVQHIGGDKAEALLAEPSIDFAKSVKSSGGGAANVAKIASMLGMDAAFCGCIGQDELASIFEEEIKEAGVSSMLVRSNDKTGLCFACNIGGETRFAASPRAALELNESHIS

SEQ ID NO: 6651 - DNA, 669 bp, Unknown
  Obtained from environmental sample
  misc_feature (1)..(669): n is a, c, g, or t
ttgataatacttaggatactaatgcaaaacaaataccgcaaatggtttggcagccagcaatgcgctctggcgttaaaggtcttcagcgaaaaaggatggatcacccattacaccgaaacccgcgaagaagccaaaaaactgctgtttgatgccattgttccgaaaaatgtttccatcggacttgggggcagcgagaccctgacggctatggatatccttcccgtattgcgcggcggcgattacaagttgtttgaccgctataactgcgaggatcattttgaggtatgccgcgaaagccttttggcggattattttttgaccggcgcaaatgccttaaccatgaacggcgaaatggttaatctcgattgttccggcagccgtgtggcggctatggcctatggcccaaggcatattgttgtcgttgcaggcgcgaataaactctgcgtaaatatcgacgaagccgttaaacgtgccagagctattgcccccatgaactgcaaacgcaacaaccatgaaacgccctgcgttaaggacggcttatgcaatgaatgtaacattccggcaagaatgtgcaatcacctcttaatcacttttggcgcgcaaaaattcgccggagaatatactttaatattaattaatgcaggatttggggttttaggaaacaaatga

SEQ ID NO: 6652 - protein, 222 aa, Unknown
  Obtained from environmental sample
  DOMAIN (9)...(218): Protein of unknown function (DUF1121)
  misc_feature (1)..(222): Xaa is any amino acid
MIILRILMQNKYRKWFGSQQCALALKVFSEKGWITHYTETREEAKKLLFDAIVPKNVSIGLGGSETLTAMDILPVLRGGDYKLFDRYNCEDHFEVCRESLLADYFLTGANALTMNGEMVNLDCSGSRVAAMAYGPRHIVVVAGANKLCVNIDEAVKRARAIAPMNCKRNNHETPCVKDGLCNECNIPARMCNHLLITFGAQKFAGEYTLILINAGFGVLGNK

SEQ ID NO: 6653 - DNA, 438 bp, Unknown
  Obtained from environmental sample
  misc_feature (1)..(438): n is a, c, g, or t
atgggaaaattgtatataaaaatgcaacccagaaaatatcgtaaaatacggcagtcagcttattttctttttcctctactgcttctcttttcctgcgcaagccgggcgcctgtaaaagaaactgaactccctccccccataatagaaaaggaattaccgcctcccacaattgaaataccacagcctgaggataattatttaaccattatcgcggcaggagacaacctgtaccatgcgccaatgataaaatcaggggaagaaggcgattacgaaaccgcatacatagagattcgttccctggtgcaaacggctgacattgcctttatcaaccaggaaacaatccttggcggtaaagagttaggcttttcaggctatcctgaattcaattctccacaggcgcttgggctggctttgaaaaaaccggctttactgtggtaa

SEQ ID NO: 6654 - protein, 145 aa, Unknown
  Obtained from environmental sample
  misc_feature (1)..(145): Xaa is any amino acid
MGKLYIKMQPRKYRKIRQSAYFLFPLLLLFSCASRAPVKETELPPPIIEKELPPPTIEIPQPEDNYLTIIAAGDNLYHAPMIKSGEEGDYETAYIEIRSLVQTADIAFINQETILGGKELGFSGYPEFNSPQALGLALKKPALLW

SEQ ID NO: 6655 - DNA, 315 bp, Unknown
  Obtained from environmental sample
  misc_feature (1)..(315): n is a, c, g, or t
atgcttctctgcctgacccaggaagcctacgacaagtacggcaaggattttacccgagttctgattatggatgaaaggataaccatgaaatatccggagcctgaaaaagttttaagactccccatcctggacaccgccgctgaaaaaatgcgcaagcccatggttgccaacataattgccctcggcgcgattaacggttttctcaaccttgtcagcaaagattctcttttaaagtcagttatcgacagcgtacccagaggaacggaggagctgaacaaacaggcgcttgagtcaggatatggtctggttaagtag

SEQ ID NO: 6656 - protein, 104 aa, Unknown
  Obtained from environmental sample
  misc_feature (1)..(104): Xaa is any amino acid
MLLCLTQEAYDKYGKDFTRVLIMDERITMKYPEPEKVLRLPILDTAAEKMRKPMVANIIALGAINGFLNLVSKDSLLKSVIDSVPRGTEELNKQALESGYGLVK

SEQ ID NO: 6657 - DNA, 387 bp, Unknown
  Obtained from environmental sample
  misc_feature (1)..(387): n is a, c, g, or t
gtgcgcgagtntgaggaacgcagcgccggcatacaggcggaaattgacaagatgacaagggaaatccaggaattaagatcaaggcgaatcgatcttgtaaaccagggcgaccaggccggggcgctaaagctggaaaatgaaatttaccgcaaatccgaatacctgcgcgaatactattccgtaaaaaccgccgagcttgaggatcagcgcagaaaactcgcccagtccgacagtttccttgaacaggtgcatagcgaaatacggtccatcgccgaaagcgaaggctacaccgtggtattgcccattaaagaaataatctggtacagtccctcggtggacattaccgacaagattattcaaaatctttccaacagatcccgccgatga

SEQ ID NO: 6658 - protein, 128 aa, Unknown
  Obtained from environmental sample
  DOMAIN (1)...(123): Outer membrane protein (OmpH-like)
  misc_feature (1)..(128): Xaa is any amino acid
MREXEERSAGIQAEIDKMTREIQELRSRRIDLVNQGDQAGALKLENEIYRKSEYLREYYSVKTAELEDQRRKLAQSDSFLEQVHSEIRSIAESEGYTVVLPIKEIIWYSPSVDITDKIIQNLSNRSRR

SEQ ID NO: 6659 - DNA, 429 bp, Unknown
  Obtained from environmental sample
  misc_feature (1)..(429): n is a, c, g, or t
ttggtatattttttaggtatgatacaattgtattttttatcagttctgtgtaatggtttaagcggttatattcttttttccggagacgaaaacggcactgatgatagtcatgtaaattattttaataaccccacttttcaccttgtattggggattttaagcgccgttaccggtattttaaaacttctttcgccgtctataggcggtatcctgattctgggcgaccttatacctgcggctgcaggcgtaatcgccggttttatgctgattttcggcatttaccgcaaagatacttccatgaacatagaatctaccggaactatggatattctcggagccagtctgctgcggttcagaagatcaatagggctgggcctgcttgccgtttcactcatacattttctttttccgcaggcgctgtttctttaa

SEQ ID NO: 6660 - protein, 142 aa, Unknown
  Obtained from environmental sample
  misc_feature (1)..(142): Xaa is any amino acid
MVYFLGMIQLYFLSVLCNGLSGYILFSGDENGTDDSHVNYFNNPTFHLVLGILSAVTGILKLLSPSIGGILILGDLIPAAAGVIAGFMLIFGIYRKDTSMNIESTGTMDILGASLLRFRRSIGLGLLAVSLIHFLFPQALFL

SEQ ID NO: 6661 - DNA, 564 bp, Unknown
  Obtained from environmental sample
  misc_feature (1)..(564): n is a, c, g, or t
gtggaaagactgggacagtcaaaaggactttcttttgaggaaatgaaaggcgaggtagaagaaaaacataaagcctggacgctttcccacgggggaaagaagtcaagcctctccaatatttttaaaggttactacggaatcggcatggaagaaataacaagctggcggaaagaattgtttgaaccggcgctctttgtcaaagaggataaaaaactaaaagctgttttggaaaaactgtcggacagttttaccctgggcgttgttacaaataacccggtcttggttgcccgcaaaactctggcggcgttgggagttgaagcttgtttccccttcgtcatcgggcttgatacctgcatgattgccaagccccacaaaatgccttttgtgaaattttccgaatcctctctctgttcccccgaaacctgcgtttccattggcgaccgctacgacatagatttggaccttcccttgcagatgggcatgggagggatactcgttaatggcgttgaggatgtatactgtcttcctgagctttttgccaaaggaagtaatcatggcgtttga

SEQ ID NO: 6662 - protein, 187 aa, Unknown
  Obtained from environmental sample
  misc_feature (1)..(187): Xaa is any amino acid
MERLGQSKGLSFEEMKGEVEEKHKAWTLSHGGKKSSLSNIFKGYYGIGMEEITSWRKELFEPALFVKEDKKLKAVLEKLSDSFTLGVVTNNPVLVARKTLAALGVEACFPFVIGLDTCMIAKPHKMPFVKFSESSLCSPETCVSIGDRYDIDLDLPLQMGMGGILVNGVEDVYCLPELFAKGSNHGV

SEQ ID NO: 6663 - DNA, 699 bp, Unknown
  Obtained from environmental sample
  misc_feature (1)..(699): n is a, c, g, or t
ttgcgtaaaaatcacataacgcctgtatcgcttaaaaaaagcggcgatgaaaacaaagaaacatcgggtaaaggttcggggtttaacaaggaattttcaggcattagatcgaatgatgtttttaaaaaagtaaaatccatactgtcgcgtttttcgaaaagcgacgataaaacgtcggaaagatttaattcgggaagtttcggaacaatcgcgcatatttgcattgaggcgtatttggaaaaagaagagattgttataccgtcaaatatttcggggcttctgaatgaagatgaactggaaagtctgattgaaggcggaaaaaaaatagcccgccgttttttggtttctccgctggggaaaatagcgggaaacgcgaagttacgggagagcgagtttccgtttaggacgctgttaagaaacaaggaaggaaaagaaatatttataaacggcactgtagacttattttttgaggacaaggacgcgattcatattgtagattttaaaaccgacagcgccgaaaaaccctgcgagcatacggcgcagatggcttgttattatcaggctatttcaaatatttttgccgctcccgttaaaaaagaatgccgtatttggctttactatttaaaaacaggtcacgccgtggaaatgacggatagagtgaaagcgctgaatattgaacagagggcgtttgattactaa

SEQ ID NO: 6664 - protein, 232 aa, Unknown
  Obtained from environmental sample
  misc_feature (1)..(232): Xaa is any amino acid
MRKNHITPVSLKKSGDENKETSGKGSGFNKEFSGIRSNDVFKKVKSILSRFSKSDDKTSERFNSGSFGTIAHICIEAYLEKEEIVIPSNISGLLNEDELESLIEGGKKIARRFLVSPLGKIAGNAKLRESEFPFRTLLRNKEGKEIFINGTVDLFFEDKDAIHIVDFKTDSAEKPCEHTAQMACYYQAISNIFAAPVKKECRIWLYYLKTGHAVEMTDRVKALNIEQRAFDY

SEQ ID NO: 6665 - DNA, 840 bp, Unknown
  Obtained from environmental sample
  misc_feature (1)..(840): n is a, c, g, or t
ttgaataaatgcgttccgcccgcggaagatttggacgcgggaaaattattttttgtcggcgatgaaaaacagtcgatttatatgttcaggggggcggacgtttccgttttccgcaaattaaaagaagaaataaaaggcgacaacctccccttaacgataaattatcgttcgtccgccggtttaatcggcgcttttaacgctattttcggcggaatttatcccgattccggcggaaataaccagccgcaaaaatacaattccgttttcgctcagcctaaatccaagcccctgcccgcctttgaggctgaatacacgccgcttcaatcggttatttcggaaagcggaaaattgtcgctttttattttgaacaaaaaatccgaaacagaagaagaagatgatcagcttaccgccgatgaaaacgaggcgaggtttaccgccgaaaaaataaaacaactgttatctgaaaactatcatccggacgacatcgcaattcttttccgctcccgctcaactcaatatctgtatgaaaaacatttaagaacgctcggtatcccttacgcgtgcgaagatattaacgatttattttacggcggtcccgtaaacgacattttatcggttcttcggctgaccgcccacccgatggataaagccgcctacgcggaaatgcttcgctcgccttttgccggtctttcccttttgggaacagccgtgtgcctttctttccgctgcaacgaanataatatttcacagccgttcgacgataaaccgcttgcctctcttgaggacggcgacaaggaaaaatatctttgtcggaaaaatgtttatttgtcaatttgctag

SEQ ID NO: 6666 - protein, 279 aa, Unknown
  Obtained from environmental sample
  misc_feature (1)..(279): Xaa is any amino acid
MNKCVPPAEDLDAGKLFFVGDEKQSIYMFRGADVSVFRKLKEEIKGDNLPLTINYRSSAGLIGAFNAIFGGIYPDSGGNNQPQKYNSVFAQPKSKPLPAFEAEYTPLQSVISESGKLSLFILNKKSETEEEDDQLTADENEARFTAEKIKQLLSENYHPDDIAILFRSRSTQYLYEKHLRTLGIPYACEDINDLFYGGPVNDILSVLRLTAHPMDKAAYAEMLRSPFAGLSLLGTAVCLSFRCNEXNISQPFDDKPLASLEDGDKEKYLCRKNVYLSIC

SEQ ID NO: 6667 - DNA, 858 bp, Unknown
  Obtained from environmental sample
  misc_feature (1)..(858): n is a, c, g, or t
ttggccgagagacccatgcaccggctttggtcggacggccgctggctgaaagcatatctggcgcacggctgctattggcataactgcgcgttttgcgataccagtctggactatatccgctgttaccagccggttgacgttgacgcgttgtttcatcatttgctggcgcaggcggaagcgacaggcatacgcggcgtgcatttggtggacgaagcctgtccgcccgcctccctgctgcgcctcgccctgcttaaccgcgaggcgggactgcctttggtattttggggcaatatccgttttgaaaaagcctttacccccgatgtggcagcaattctcgcggcaggggggcttatgggagtttccgccggcattgaagtcgccaccgagaagggtcttcagcggatagggaaaggcgttgatgtgcagggtatagtcgatgtctgcgccgcttttaaggaagcgaagattctggttcatgcgtattgcatttatggctactgggatcaggatgaacaggagatagcggactccgccgaagtcctgcgccaatttttcgccgagggactgctggattcggctttttggcatcaatttacgctcaccaaacattcccgcgtttacgccgaaaaacaaaaaggcttacacccgcttctgaagcccaacggcgatccgctttgcggcaaaatggcaaaaagcaaaggcaaaattttcgcgttaaacgatctttcctttgccggcgaagaaaaattcgaccgttatgccgaaccgttacatcggttactcggcgaatggatgcggggcgatacctcatggccaaacaacaacgatttgctcaaaccaaaaattgccccccattaa

SEQ ID NO: 6668 - protein, 285 aa, Unknown
  Obtained from environmental sample
  DOMAIN (18)...(178): Radical SAM superfamily
  misc_feature (1)..(285): Xaa is any amino acid
MAERPMHRLWSDGRWLKAYLAHGCYWHNCAFCDTSLDYIRCYQPVDVDALFHHLLAQAEATGIRGVHLVDEACPPASLLRLALLNREAGLPLVFWGNIRFEKAFTPDVAAILAAGGLMGVSAGIEVATEKGLQRIGKGVDVQGIVDVCAAFKEAKILVHAYCIYGYWDQDEQEIADSAEVLRQFFAEGLLDSAFWHQFTLTKHSRVYAEKQKGLHPLLKPNGDPLCGKMAKSKGKIFALNDLSFAGEEKFDRYAEPLHRLLGEWMRGDTSWPNNNDLLKPKIAPH

SEQ ID NO: 6669 - DNA, 879 bp, Unknown
  Obtained from environmental sample
  misc_feature (1)..(879): n is a, c, g, or t
atggtttccatgcccctcgtcgcggacatccactttgattataaaattgccctgcgctgtcttgatttcccaatagcaaagatccgcataaatcccggcaatattggtagcagggataaggtagagcaggttgtgaacaaagcggcggcgtattcgcggcctatacgggtcggggtcaacgctgggagccttccggtagacttacggcagagcgtggattccggttcgcttgaaagcgccgaggccctggtactggcggcggaacgggaaattgccgttttttacgaattaggctttaatagcgttctggtctcaatgaaggcctcttcggttgccgatactataaaggcgaacaggatttttgcagaaaggagcgatgttccgttgcatgttggggtaaccgaagcggggccccttgttgccggggtagtgcgtaatactactgcccttgtagcccttttattggagggaattggcgatactgtccgggtctccctttctgataccatggaaaacgagttaattgccgcccgggagatacttcaaactgttcaggagatgaaggggaaagcgccgcgcgatggggtacgcatcgtttcctgtccccgctgtggtcgaagcggctttgacacccacgattttaccgcgcgctggctgaacaggctttattccatggacaagaatattaccgtggcaataatgggctgcgcggtaaacggtcctgaagaagcccggcacgcggatatcggcattaccggcgcagggaataaggtgcttattttttccaagggaaagatcatacgcacaataaacgccgtcgaagctgacgccgctttcgaggaagagctaaggaggcttggggcattggaggatgcatga

SEQ ID NO: 6670 - protein, 292 aa, Unknown
  Obtained from environmental sample
  DOMAIN (2)...(291): GcpE protein
  misc_feature (1)..(292): Xaa is any amino acid
MVSMPLVADIHFDYKIALRCLDFPIAKIRINPGNIGSRDKVEQVVNKAAAYSRPIRVGVNAGSLPVDLRQSVDSGSLESAEALVLAAEREIAVFYELGFNSVLVSMKASSVADTIKANRIFAERSDVPLHVGVTEAGPLVAGVVRNTTALVALLLEGIGDTVRVSLSDTMENELIAAREILQTVQEMKGKAPRDGVRIVSCPRCGRSGFDTHDFTARWLNRLYSMDKNITVAIMGCAVNGPEEARHADIGITGAGNKVLIFSKGKIIRTINAVEADAAFEEELRRLGALEDA

SEQ ID NO: 6671 - DNA, 879 bp, Unknown
  Obtained from environmental sample
  misc_feature (1)..(879): n is a, c, g, or t
atgttcagattttgggcgattctctcaggcggcttctcgtctatgaaggagtttgggcaggttttatattttgcgactccggttatcatgacagggctgtctgtcggttttgcgggtaggacggggctttttaacattggggccgcaggtcagttcattgtcggcgcatatacggcagtccttgtcggggtaaaatgcgattttctttccggtcatcttctatgggttaatgctttgctggcggcaatgttggcaggcgctctttggggagcaatccccggtttgtttaaagcgcttttcaacgtaaacgaagttatctcctgtataatgacaaattatatcggcacttatttggtaaatttcttgattacaaaaacaatttttgattctctaaggaatcagactatgcgcgtaactgcggcggcgaatcttcctaagatgggaatggattatattttcagggacggctttattacatcaagcgcaaactcaggtttttttatagcaattttgtttgcggtattgatatacattattctggaaaaaacttcctttggttatgagcttaaggcatgcggttttaaccgtgatgccgcgcattacgccggaatcaacgaaaagcgcagtattattgtttccatggttattgcaggcgcaatggcgggaattggcggagcgctgctgttccttgcgggttcgggcaaggggatcacagttgtggatacattagcgcaggaaggctttctgggcattcccgttgctctgcttgggcttaacaatcctataggaataattttttccggtttgttgatcgcttaccttagtgttggcggatttaacatgcagctttaccatttgctcctcggcgctcggctataa

SEQ ID NO: 6672 - protein, 292 aa, Unknown
  Obtained from environmental sample
  SIGNAL (1)...(19)
  DOMAIN (17)...(291): Branched-chain amino acid transport system / permease component
  misc_feature (1)..(292): Xaa is any amino acid
MFRFWAILSGGFSSMKEFGQVLYFATPVIMTGLSVGFAGRTGLFNIGAAGQFIVGAYTAVLVGVKCDFLSGHLLWVNALLAAMLAGALWGAIPGLFKALFNVNEVISCIMTNYIGTYLVNFLITKTIFDSLRNQTMRVTAAANLPKMGMDYIFRDGFITSSANSGFFIAILFAVLIYIILEKTSFGYELKACGFNRDAAHYAGINEKRSIIVSMVIAGAMAGIGGALLFLAGSGKGITVVDTLAQEGFLGIPVALLGLNNPIGIIFSGLLIAYLSVGGFNMQLYHLLLGARL

SEQ ID NO: 6673 - DNA, 861 bp, Unknown
  Obtained from environmental sample
  misc_feature (1)..(861): n is a, c, g, or t
atggttcatcagcattttaaacttgtgcataattttaccgttcttgaaaatataattctcggcgcagagacagtaaagtacggtgttttaaaatttgagaatgcgcgcaaccaggtgatagaattatcacgccgttataaactggatattgatcctgacgctcttatctccgatataacaatcggtatgcagcaaagggtcgaaatccttaaaatgctctaccgtgaaaacgaaatcttaatttttgatgaaccgacagcagtgcttactcctcaggaaattgaagaattaatgcacataatgaaaaatctggttgccgaaggcaagtcgattttatttattacgcacaaactggatgaaattaaagctgttgcggatcgctgtacggtactgcgcaagggcaagtatatcgggacagtggatgttgcggcggtttccaaagaagaactctctgaaatgatggttgggcgcaaggtgaatctgtcagtggaaaaagctgaacaacagcccggcgaaactgttttaaaaacagaaaaccttaccgtaaaaagcaaaactcacggtaaagctcttgttaacaatgtaagttttgaagtccgctcgggtgaaattgtctgtattgcgggaattgacgggaacggacagcaggagcttgtttacgcaattaccggaatgctgcagctggactcagggcgtgttttccttgaggggagaggaaatacacataacggtatacgttcgagaggtatatcacatatccccgaagacagacacaaacacggccttgtgctggatacaatcatgcgtataatcttgttctgcaaaatatttttcagctcgctttcggaaaatggtttttaa

SEQ ID NO: 6674 - protein, 286 aa, Unknown
  Obtained from environmental sample
  DOMAIN (13)...(134): ABC transporter
  misc_feature (1)..(286): Xaa is any amino acid
MVHQHFKLVHNFTVLENIILGAETVKYGVLKFENARNQVIELSRRYKLDIDPDALISDITIGMQQRVEILKMLYRENEILIFDEPTAVLTPQEIEELMHIMKNLVAEGKSILFITHKLDEIKAVADRCTVLRKGKYIGTVDVAAVSKEELSEMMVGRKVNLSVEKAEQQPGETVLKTENLTVKSKTHGKALVNNVSFEVRSGEIVCIAGIDGNGQQELVYAITGMLQLDSGRVFLEGRGNTHNGIRSRGISHIPEDRHKHGLVLDTIMRIILFCKIFFSSLSENGF

SEQ ID NO: 6675 - DNA, 468 bp, Unknown
  Obtained from environmental sample
  misc_feature (1)..(468): n is a, c, g, or t
ttgctgccggagaaaaccatgagcgcttacgtttcccgcctttgcgcgtgggcccccggaatagaaaattccggcgaatgggatgaatgggcgcagggtaaacgcgatatatcttccgacacgaaaggtcctgcgattgattttaccgactccatgttccgccgccgcctgagtcaaatttcaaaaatgacagtgcaggttgttcatgatttactgcccgtgggagaagacacgaaaatattttttgtctcattcatgggcgagctctcgcggccgtatcacattaacaagatgttgatagaagagaagtctctgatgcccgcggcttttacgctttcggttttaacacgcccgctgcgctggctaccatcgcactggggcttaaggcaggatactcggcgctttatccgggaaacattctttttccgcggcgctttacacggtctccgcgctccttgtatccggtaa

SEQ ID NO: 6676 - protein, 155 aa, Unknown
  Obtained from environmental sample
  misc_feature (1)..(155): Xaa is any amino acid
MLPEKTMSAYVSRLCAWAPGIENSGEWDEWAQGKRDISSDTKGPAIDFTDSMFRRRLSQISKMTVQVVHDLLPVGEDTKIFFVSFMGELSRPYHINKMLIEEKSLMPAAFTLSVLTRPLRWLPSHWGLRQDTRRFIRETFFFRGALHGLRAPCIR

SEQ ID NO: 6677 - DNA, 675 bp, Unknown
  Obtained from environmental sample
  misc_feature (1)..(675): n is a, c, g, or t
atgtttacggtaaatccgtgcgccgcaggctgcggaagatcggcaattacaggtaataatctttgctttatccatcaggcgaatcctgaacaggaatatgatcgcatttgcacgttaattcgggaaaataatacgataaaggatcttgtcatatcgggaatgagttttgagggagtcaatttttccaatcacgagtttttcggctgtaattttcaggatgcaactttttttcattgtgatttttccggcgttaaattaagaatggatttttttgattttgccgaatttataggctgtgatttttcaaattccgatattcaatttgtctcgtttgccggagcgggttttcagcaatgcagttttgagaattcggagcttgtgcacgttaattttgaaggaacgtccattaataacgtgtcgtttaataactcgaatttgtacaacagcaggtatataagcgccgaaattgttaaaacaacttttattaattgcaatttacagagggttcattttgcgagcgcaaagcanaaggacgtaatatttaaatcatctaacacggcggaagctttgtttgaaatggaagaagaatgcaattatattttcgctactggtcatacggagtcagcgactggtatattactggggcggaagtccgataaaagtcaccgggaatag

SEQ ID NO: 6678 - protein, 224 aa, Unknown
  Obtained from environmental sample
  misc_feature (1)..(224): Xaa is any amino acid
MFTVNPCAAGCGRSAITGNNLCFIHQANPEQEYDRICTLIRENNTIKDLVISGMSFEGVNFSNHEFFGCNFQDATFFHCDFSGVKLRMDFFDFAEFIGCDFSNSDIQFVSFAGAGFQQCSFENSELVHVNFEGTSINNVSFNNSNLYNSRYISAEIVKTTFINCNLQRVHFASAKXKDVIFKSSNTAEALFEMEEECNYIFATGHTESATGILLGRKSDKSHRE

SEQ ID NO: 6679 - DNA, 915 bp, Unknown
  Obtained from environmental sample
  misc_feature (1)..(915): n is a, c, g, or t
atgtccgccatcgcccgtgtcatgctgtccatggggtaccgggtttccggctcagaccttaaggaatccgccaatacaatccgcctcaaagaactcggcgcgacggtttatatcggacatgccgcgttgaatatgcgcgacgcacaggtgattgtctatacctcggcggttgattcgacaaatcccgaactgcaggaagccaaaaatctgcatttgccggtttttgaacgcgccaaagtgctcggctacctgatgtcgctttataccgaaagcatcgccgtcgccggcacgcacggcaagaccacaatctcgtcgatgctgtccgtcgtcctgtcccgtctgggtttagaccctacctatatgattggcggggaagtcctcaatctgcagagcaacggcggctgcggcagctctcaatatttcgtggcggaagcggacgagtcggacagctcaattaaatttctcgaccccaaaatcttggtcctgaataatatcgaaaaagaccatctcgaccacttcgcgggactggacgacattgtggaactcttcgccaactgtgtagaccagctcagccgccggccgcagcatttattggttatcaatcccgaacaatggggcaataaaattttgtgtgaaaaaatctccggccgcaaaaatctgaatattctgacttttggttttcaggacggtgtcaattatcaagcggccaatatccgttacaaaaatcacggctcgatttttacggtcctcaaaaacggggcgctgctcggcgaactggaactagccatccccggcgaacacaacgtcctcaatgccctggcggtcactgcggtgtgcctgcatctgggtttggattttctgaagatcaaagaaaccatcattactttcgcaggcgcccagcggcgttttacttag

SEQ ID NO: 6680 - protein, 304 aa, Unknown
  Obtained from environmental sample
  DOMAIN (1)...(89): Mur ligase family, catalytic domain
  misc_feature (1)..(304): Xaa is any amino acid
MSAIARVMLSMGYRVSGSDLKESANTIRLKELGATVYIGHAALNMRDAQVIVYTSAVDSTNPELQEAKNLHLPVFERAKVLGYLMSLYTESIAVAGTHGKTTISSMLSVVLSRLGLDPTYMIGGEVLNLQSNGGCGSSQYFVAEADESDSSIKFLDPKILVLNNIEKDHLDHFAGLDDIVELFANCVDQLSRRPQHLLVINPEQWGNKILCEKISGRKNLNILTFGFQDGVNYQAANIRYKNHGSIFTVLKNGALLGELELAIPGEHNVLNALAVTAVCLHLGLDFLKIKETIITFAGAQRRFT

SEQ ID NO: 6681 - DNA, 486 bp, Unknown
  Obtained from environmental sample
  misc_feature (1)..(486): n is a, c, g, or t
gtgttagaatatcctgaatatattaaaaaattagttttagttacacccgcattaaatggatataaatatccgcttaaattaataattgaaagtattaaaaattttagaaatgtacgtaagaatggaatagaaaaagcggttgaattgtttatgaataataaatattggagttattttgtcccaaaagaaaatagtttcaaggaagagttcaaaaatatatttatagaaaataaaaatttctataatggtaattattcaaagaaattaattgtaaagccagttgcaataaagagattaaccgaaatcaatataaatgtactattgataggaagtgaaaatgactcacaatttaataaagatgtggtaaaaatattatctgaaaatataaaaggaatacaagtatgtgaaataaaaaatagtggtcatttaccaaatatggaaaaaagagaagaaataaataaaataattgaggaatatataaaataa

SEQ ID NO: 6682 - protein, 161 aa, Unknown
  Obtained from environmental sample
  misc_feature (1)..(161): Xaa is any amino acid
MLEYPEYIKKLVLVTPALNGYKYPLKLIIESIKNFRNVRKNGIEKAVELFMNNKYWSYFVPKENSFKEEFKNIFIENKNFYNGNYSKKLIVKPVAIKRLTEININVLLIGSENDSQFNKDVVKILSENIKGIQVCEIKNSGHLPNMEKREEINKIIEEYIK

SEQ ID NO: 6683 - DNA, 711 bp, Unknown
  Obtained from environmental sample
  misc_feature (1)..(711): n is a, c, g, or t
gtgatnggaaatgaaaaagacctgttatttgacacggtatacggcatcggcagcctgcccgcggtcatcaaagaaataacggataaacctttatacgttgtgttgggacacggtcatcttgatcatgtcaacggcgcttatcaatttgaagaggcctggctgcacgaagctgattttaaattatgccgccttcatacgtcggaagaatatcgtttaacagccgttaaacaattaaaagaatacggcattgtcccgccccctgactttaatcctgatgaatatgtcaaagccggagccggcaatttgaaaaaattggagcatggtacaatatttgacctgggcggtctgcatatagaagtgattggcatgggaggacacaccgccggttccataggaatcctggttaaagaacacaaagtactgctgaccagcgattcggcgacaccccaggtgtggatgttcaaaatagaatccctgtctgtcaaagaatatatagctatgctggagcgggtcgttcagcttgattttgaaacttttataagcggacataccgatgaaatcacgccaaagtctgattttcataaatacatcaatgtcgcgcgtcatctttctgttgaaaaatccgtaccttttaagtatcaccctgagttgaaagggcttctttaccgggaagacggcgttgagattgtgtttagtgaatcaaaattatag

SEQ ID NO: 6684 - protein, 236 aa, Unknown
  Obtained from environmental sample
  DOMAIN (3)...(183): Metallo-beta-lactamase superfamily
  misc_feature (1)..(236): Xaa is any amino acid
MXGNEKDLLFDTVYGIGSLPAVIKEITDKPLYVVLGHGHLDHVNGAYQFEEAWLHEADFKLCRLHTSEEYRLTAVKQLKEYGIVPPPDFNPDEYVKAGAGNLKKLEHGTIFDLGGLHIEVIGMGGHTAGSIGILVKEHKVLLTSDSATPQVWMFKIESLSVKEYIAMLERVVQLDFETFISGHTDEITPKSDFHKYINVARHLSVEKSVPFKYHPELKGLLYREDGVEIVFSESKL

SEQ ID NO: 6685 - DNA, 702 bp, Unknown
  Obtained from environmental sample
  misc_feature (1)..(702): n is a, c, g, or t
gtggagagccgcgaacagattacctcaattgcccggtcggtcaaaaaagccggggccgcctttttacggggcggcgcgttcaagccccgtaccagcccctacagttttcaaggtatgggctgtgagggccttgatctgatgcttgaggcaagaaaggaaaccggtctgcccattgtcaccgagttaatggatctaagccagcttgaactgtttgaggaagtagacgtgattcaggtgggggcgcgcaatatgcagaacttcgccctgttgaaagaactgggccgcagccgcaaacccattctgctgaaacgggggcttgcctcaactttaactgaactgctgatggcggctgagtatatcatggcgggcggtaatgaaaagattgtcctctgcgagcggggcatacggggttttgacaactttgcccggaacaccctcgaccttgcccttattcccgccctgaaacggaaaagccatttgccggtgattgtagaccccagccacgcgacgggccttgcatggatggttccctccatgtcaaaagccgccatcgccgccggggccgacggattgattatcgaagtgcataacgatccggaacacgccctctgcgacggcgagcagtccattacgccggagatatttgcctcgctaatggaatcattgcgtacatacgccgcgctggagaggcagtcaatataa

SEQ ID NO: 6686 - protein, 233 aa, Unknown
  Obtained from environmental sample
  DOMAIN (10)...(230): NeuB family
  misc_feature (1)..(233): Xaa is any amino acid
MESREQITSIARSVKKAGAAFLRGGAFKPRTSPYSFQGMGCEGLDLMLEARKETGLPIVTELMDLSQLELFEEVDVIQVGARNMQNFALLKELGRSRKPILLKRGLASTLTELLMAAEYIMAGGNEKIVLCERGIRGFDNFARNTLDLALIPALKRKSHLPVIVDPSHATGLAWMVPSMSKAAIAAGADGLIIEVHNDPEHALCDGEQSITPEIFASLMESLRTYAALERQSI

SEQ ID NO: 6687 - DNA, 576 bp, Unknown
  Obtained from environmental sample
  misc_feature (1)..(576): n is a, c, g, or t
ttgtcctgcgctacgccgcaacggttccgcagcgccatagcgaccgcgccgcccatcaatcccatgcccacaatgccgatagtacattcttcgattagtttcatttatattgactgcctctccagcgcggcgtatgtacgcaatgattccattagcgaggcaaatatctccggcgtaatggactgctcgccgtcgcagagggcgtgttccggatcgttatgcacttcgataatcaatccgtcggccccggcggcgatggcggcttttgacatggagggaaccatccatgcaaggcccgtcgcgtggctggggtctacaatcaccggcaaatggcttttccgtttcagggcgggaataagggcaaggtcgagggtgttccgggcaaagttgtcaaaaccccgtatgccccgctcgcagaggacaatcttttcattaccgcccgccatgatatactcagccgccatcagcagttcagttaaagttgaggcaagcccccgtttcagcagaatgggtttgcggctgcggcccagttctttcaacagggcgaagttctgcatattgcgcgcccccacctga

SEQ ID NO: 6688 - protein, 191 aa, Unknown
  Obtained from environmental sample
  misc_feature (1)..(191): Xaa is any amino acid
MSCATPQRFRSAIATAPPINPMPTMPIVHSSISFIYIDCLSSAAYVRNDSISEANISGVMDCSPSQRACSGSLCTSIINPSAPAAMAAFDMEGTIHARPVAWLGSTITGKWLFRFRAGIRARSRVFRAKLSKPRMPRSQRTIFSLPPAMIYSAAISSSVKVEASPRFSRMGLRLRPSSFNRAKFCILRAPT

SEQ ID NO: 6689 - DNA, 540 bp, Unknown
  Obtained from environmental sample
  misc_feature (1)..(540): n is a, c, g, or t
atggcgtgttttgacattcagggcaattccctgcgctgccgcctgaacggggaaacgatactggttatcccctggggaaaaaattccgcccgtgtcgttgcctccctcatgaccgcgccggaattgccggactgggcgcttttgaaaccgccgccggatttaccgccgcatgttatcactgttaaagaaaacgccgcatccctgacaatggggaagttgcgcgtaacggtagagcgcaagggctggccggacaggctggaactttctttttaccgggccgggggtccccccgaaggacgcctgctttttaaggagcgcgattcgggcggcgcacttcgcctgggcgcgaggaaatttaccccgcttgcgggcggcggcttcaggctcagcgcgttttttgagccctccgaaaccggcgggcaggatgagcgtttgtacggcatgggccagtatcagcaggaattttttgatcttaaaaactgcaacctggaacttgcccaccggaatgcacaggcaagcctcggcctatctgatccatga

SEQ ID NO: 6690 - protein, 179 aa, Unknown
  Obtained from environmental sample
  misc_feature (1)..(179): Xaa is any amino acid
MACFDIQGNSLRCRLNGETILVIPWGKNSARVVASLMTAPELPDWALLKPPPDLPPHVITVKENAASLTMGKLRVTVERKGWPDRLELSFYRAGGPPEGRLLFKERDSGGALRLGARKFTPLAGGGFRLSAFFEPSETGGQDERLYGMGQYQQEFFDLKNCNLELAHRNAQASLGLSDP

SEQ ID NO: 6691 - DNA, 735 bp, Unknown
  Obtained from environmental sample
  misc_feature (1)..(735): n is a, c, g, or t
ttggcaaaagttaataaggtttcttcttctggcttaacgctcctaaatcttgagcaagttgaacgcaggaatcttttaatcaatcttccaaagaaaattgcaatacaattaaacgatacccaccctgcaatagcaattccagaactcatgcgcttgttggttgatatttacaaactttcttggtcagatgcttggagcataaccaccgaaatttttgcctacacaaaccacacccttatgccagaggctctggaaaaatggtcggttcacctatttgaagaattattgcctcgccatttgcagattatttacgagataaatgcgagattccttgaatctgtttgggcaaaatggcccggcgaaagcgaccgcgttactcgtatgtccataatccaagaaggcgatgaaaaaatggttcgcatgggttatctatctgtgataggctcgcacagcgttaatggagttgctgctcttcacagcgaacttctaaaaacaaacttgttcaaagacttttacgagttgtggcccgaacgctttaacaacaaaacaaatggcgtaactccgcgccgctgggttgcaaaggcaaatcctgcaatgacttttgctataagcaaaaaaataggagattcgtggattggcgatttaagcaagataaaaaaaatagaggaacatttaaacgatgctgaattccatgatagttttgtaaagccaaagaagaaaacaaaaagaaactga

SEQ ID NO: 6692 - protein, 244 aa, Unknown
  Obtained from environmental sample
  DOMAIN (1)...(243): Carbohydrate phosphorylase
  misc_feature (1)..(244): Xaa is any amino acid
MAKVNKVSSSGLTLLNLEQVERRNLLINLPKKIAIQLNDTHPAIAIPELMRLLVDIYKLSWSDAWSITTEIFAYTNHTLMPEALEKWSVHLFEELLPRHLQIIYEINARFLESVWAKWPGESDRVTRMSIIQEGDEKMVRMGYLSVIGSHSVNGVAALHSELLKTNLFKDFYELWPERFNNKTNGVTPRRWVAKANPAMTFAISKKIGDSWIGDLSKIKKIEEHLNDAEFHDSFVKPKKKTKRN

SEQ ID NO: 6693 - DNA, 690 bp, Unknown
  Obtained from environmental sample
  misc_feature (1)..(690): n is a, c, g, or t
atggagaaaaaagacctaacagcagcagatgtctgggcaatgttcgccgagaccagactcataatgcaggaaaccgaccgcaaaattgcggagggtcaccgtattttagatgaaaaaattgccgagaacaaccgtattttagacgagaaacttgccgagaaccaccgcattctcgccgagaaacttgcagaaaacgacagcactctcaccgagaaattcaaagagctaggcattacagtcaaagacataaattcaaatgtggttggcattggcaacagcaatggtgaatttgcggaagagtattttcacaattccttggaaaacaaaatggaatttgccggagtacattttgatttcattagctcaactttcaaacttacgagaaaagccccagatggcaggagaattaaagaccagtttgacatagtaatgctcaacggcgaagctgctgctataatagagattaaatacaaagcgagaaaagatgaccctaagcaaattgtgagccagaaagtttccaatttcaggtttttgttccccgaatacgctaaactcaaaatttatttgggcttggcagctttttcttttgaaaaaagtgcggaaaaagaagccaaagaactcggcataggactgcttaggcaaataggcgaaaccattgaatacgaaaccaaatgggtgagggcgtattag

SEQ ID NO: 6694 - protein, 229 aa, Unknown
  Obtained from environmental sample
  misc_feature (1)..(229): Xaa is any amino acid
MEKKDLTAADVWAMFAETRLIMQETDRKIAEGHRILDEKIAENNRILDEKLAENHRILAEKLAENDSTLTEKFKELGITVKDINSNVVGIGNSNGEFAEEYFHNSLENKMEFAGVHFDFISSTFKLTRKAPDGRRIKDQFDIVMLNGEAAAIIEIKYKARKDDPKQIVSQKVSNFRFLFPEYAKLKIYLGLAAFSFEKSAEKEAKELGIGLLRQIGETIEYETKWVRAY

SEQ ID NO: 6695 - DNA, 564 bp, Unknown
  Obtained from environmental sample
  misc_feature (1)..(564): n is a, c, g, or t
atgagcgcagaaaacagcgtaatggtatatgtacaacaacacgcaggaaaagccgccgaggtgagtctggaactcgtctccaaggcgcgcgaactcgcggacaagctgggggcggaggttagcgccgcgcttttcggagacaaggtgtcgggggaagccgcccgccttgcaagctacggggccgaccgcgtgtatgttatggaagacccccgcctcaaattttacacgcccattccctacagcaagctgatgatacaggtggtttccgagaaaaccccgcagatcgtactttacggcgcgaccactgaaggccgggatctagcgccgcgcgtggcgtcccacctgaaagtgggattgaccgcggactgtaccgatctgcagatcggggatcacaaacagcaggataccgaatacaaaaatatcctttaccagatacgccccgcttttggcggcaacataatcgccacaatcgtgtcgccagagaaaaagccccagatggcgacggttcgcgagggcgttatgcgaatggcagtgctcagtacttcgcgcaagccgaggtcgtga

SEQ ID NO: 6696 - protein, 187 aa, Unknown
  Obtained from environmental sample
  DOMAIN (6)...(187): Electron transfer flavoprotein domain
  misc_feature (1)..(187): Xaa is any amino acid
MSAENSVMVYVQQHAGKAAEVSLELVSKARELADKLGAEVSAALFGDKVSGEAARLASYGADRVYVMEDPRLKFYTPIPYSKLMIQVVSEKTPQIVLYGATTEGRDLAPRVASHLKVGLTADCTDLQIGDHKQQDTEYKNILYQIRPAFGGNIIATIVSPEKKPQMATVREGVMRMAVLSTSRKPRS

SEQ ID NO: 6697 - DNA, 954 bp, Unknown
  Obtained from environmental sample
  misc_feature (1)..(954): n is a, c, g, or t
atggacgaaattagcaagagatttcgcattgatgattatgcccacccggttccgacgaaaatctttgaacaggtgttttcattgctggaacctgaaggaaaagcgaccgccgagatgcgggtactggaatatgccgcgctgatgccgcctgattccgttgccctcccgtggatttttgctttggtaaaagaagagttccctgaaattgcgccaccccaaaaaagaccgattgatccctggaaaaaggttttacaaaaattggaacggtttcagttgctgcttccttctgttgaggaacctaagattggcactatgcaccgtttgattcaagacgcaatccggcaaagacatgattgcaaccggcaatactgtgaatgtttgattgagtacgcatattctagggctgtttttcttaatgagaatcttgagcgagggaatatcccgcttgaatgtctttggaaaataagactccagcctcttggcggaatgcttgagtgggtagactttactcaatgggcgcaaaaggtcaatatgtttgatggtgttttaggtaatttgttgataaaaaccggttctctgacagaggcgaaaaatcactacagggaatctcttgagatcacaaggcagcttgccgagaaagaccccagcaacgctgggtggcggcgggacatttccgtgtctttggacaatatcggctatgtactggaagcctgcgggaacatgcccggcgcgctgaaacagtatgaggagtcccttgagataaggcggcggcttgccgagaaagaccccagcaacgtggggtggcagagggacatttccgtgtctttaagcaaagtaggcgatgtactgcgagcctgcggggacatgcccggcgcgctgaaacagtatgaggagtccctgagatcatgcggcggcttaccgagaaagaccccaacaacgcgggctcggctataa

SEQ ID NO: 6698 - protein, 317 aa, Unknown
  Obtained from environmental sample
  misc_feature (1)..(317): Xaa is any amino acid
MDEISKRFRIDDYAHPVPTKIFEQVFSLLEPEGKATAEMRVLEYAALMPPDSVALPWIFALVKEEFPEIAPPQKRPIDPWKKVLQKLERFQLLLPSVEEPKIGTMHRLIQDAIRQRHDCNRQYCECLIEYAYSRAVFLNENLERGNIPLECLWKIRLQPLGGMLEWVDFTQWAQKVNMFDGVLGNLLIKTGSLTEAKNHYRESLEITRQLAEKDPSNAGWRRDISVSLDNIGYVLEACGNMPGALKQYEESLEIRRRLAEKDPSNVGWQRDISVSLSKVGDVLRACGDMPGALKQYEESLRSCGGLPRKTPTTRARL

SEQ ID NO: 6699 - DNA, 588 bp, Unknown
  Obtained from environmental sample
  misc_feature (1)..(588): n is a, c, g, or t
atggcaaaatacgtatgcagcggcgcaaagatgaagtgctcaatgggttctaaggaagccgattttacggtgatcccgaccggaaggtgcccagtgtatatcaaaggcaacctcgtcgggaccataatggactataagcccattataaacatcaaacccttcggccaatgccagtccctggccaaccccgtcgtagcggccgccaccgccgctgccaacggcaagctgcagaagatgccctgcgttcccaatatccaagcgccgtggatcggcggcaaaatgcgcgttacaataagcggggaaccgacgttgcttgaaaacagcgtgcaaacatgcatgtgggccggaatgatcgaacttacgaaacccggacagaattttgtggaggaagacgcccaatccctgagcgccgacaacagcaaagtggtatcggaggccaaagcgaagagcgtggcggacgacgccgaactggaagccaacggcaacatagatgattaccccgatagttttgagggtgagccggaacataagatgaatgtagcgaaactgcgggaggcgctgatactttttgtaactcggcctatctga

SEQ ID NO: 6700 - protein, 195 aa, Unknown
  Obtained from environmental sample
  misc_feature (1)..(195): Xaa is any amino acid
MAKYVCSGAKMKCSMGSKEADFTVIPTGRCPVYIKGNLVGTIMDYKPIINIKPFGQCQSLANPVVAAATAAANGKLQKMPCVPNIQAPWIGGKMRVTISGEPTLLENSVQTCMWAGMIELTKPGQNFVEEDAQSLSADNSKVVSEAKAKSVADDAELEANGNIDDYPDSFEGEPEHKMNVAKLREALILFVTRPI

SEQ ID NO: 6701 - DNA, 537 bp, Unknown
  Obtained from environmental sample
  misc_feature (1)..(537): n is a, c, g, or t
gtgaaaagccttgacgactaccgtatcgccccgtttcatattctcgccaccgaaggcaaaacctggaacactgaaaaccacatattccatatagagtccatcgcacaatacatgaccggctctgatcctgtttttatggcaacgaatcaccttctggttgacctgttggacgaacgcagcatagcggccggcgtcgcgtggtgggaagaactgaccgcgtcaggcggcgaaggtatggtagttaagccctttgacttcatagccgtgaaaggtacgcagcttttgcagcccgcagtcaaatgccgcggacgtgagtatctgcgtatcatctacgggcctgaatacgcgttagacggcaacattgaaaggctcaaaaaacggtcgcttaagaaaaagcgcgacctggcgcttaatgaatttgcccttgggatggaatcgctggaacgattcaccagaaaagaaccgctctaccgcgtccacgagtgtgtgtttggagtactggctttggaaagcgagccggtggatccacggttgtaa

SEQ ID NO: 6702 - protein, 178 aa, Unknown
  Obtained from environmental sample
  misc_feature (1)..(178): Xaa is any amino acid
MKSLDDYRIAPFHILATEGKTWNTENHIFHIESIAQYMTGSDPVFMATNHLLVDLLDERSIAAGVAWWEELTASGGEGMVVKPFDFIAVKGTQLLQPAVKCRGREYLRIIYGPEYALDGNIERLKKRSLKKKRDLALNEFALGMESLERFTRKEPLYRVHECVFGVLALESEPVDPRL

SEQ ID NO: 6703 - DNA, 690 bp, Unknown
  Obtained from environmental sample
  misc_feature (1)..(690): n is a, c, g, or t
ttgaagaattggctggtattgaaaataaccgggctttttatcgtggataactcactggcgcaggacaaagaatgggaaatggatctgttccgcgaaatgatacctcttaaaaagaagtggatcagccacaccatcgaagacgatccaaaagtgctggaactggcagcccgcgccggagcatggtatgtgtatcaggctatttatgacacatcggattacataaaagaacgtgttaagcgttaccacgaccacggcataggcgtagagggcacaattcttttgggattggataatcaaacagaagacgattgcaggcggcttatcgacttcctgctggaaattaatcttgatcttgcggagttcacggtaatgacacccttcccccacaccaaagcctgggacgaccttgcgcggcaggggcgtatttttgaccgcgactgggatcattttaacgctgggcaggtagtctttacaccgaagaatatgagcgccgagcgcctgcaggaactgtacgatgacgcatggaaaattttttataaggatgagactcaggaagaaaaaatgttccatctgctttcatcggttgtcagccgtgaaatggacgacggaacttaccgcccccgcaaccggcggctgattcataaatcatttggaaaagatgtcgtacggagcattggagcaggcagttaa

SEQ ID NO: 6704 - protein, 229 aa, Unknown
  Obtained from environmental sample
  misc_feature (1)..(229): Xaa is any amino acid
MKNWLVLKITGLFIVDNSLAQDKEWEMDLFREMIPLKKKWISHTIEDDPKVLELAARAGAWYVYQAIYDTSDYIKERVKRYHDHGIGVEGTILLGLDNQTEDDCRRLIDFLLEINLDLAEFTVMTPFPHTKAWDDLARQGRIFDRDWDHFNAGQVVFTPKNMSAERLQELYDDAWKIFYKDETQEEKMFHLLSSVVSREMDDGTYRPRNRRLIHKSFGKDVVRSIGAGS

SEQ ID NO: 6705 - DNA, 723 bp, Unknown
  Obtained from environmental sample
  misc_feature (1)..(723): n is a, c, g, or t
atgatctttatgcttatcgcggctttgaatttcaacctgtactatcgcatcatccataagaaattttctgattttgcgtataacaccgaaatcagggtgttctttctaattttttttgttgctgctttgctaatcagcctgagccttgtttcccaatacggctcatttgccgaagccctgcgctttggttcttttcaggcggcttccattttatctaccacaggaaacgccagaacggattatacggtttggcctagcctggcgcaggctgtccttttgtgcctgatgtttatcggcggttgttcaggttccactgcaggaggtgttaaggttatacgccatacggtgcttttcaaacaggcatggaatgaactcaagcgcattctttatccgcaaggggtgttcagcatccagctcaaccaaaaagtcggtcgcaaggatgttgtttatggcgtcgcgggttttgtctttctttattttttgattgtgggcattactgctcttattacgacgacagctggtttcgatattttatcatcatttagcgcagcgctttctgtcactggtaatataggcgttggttttggcgcggtaggcccatttaaaaactttagtatgtttcccgattatttaaagctgttttattcactggtgatgatcgctggtcgtctggaactatggactgttcttgtgctgtttacgcctgagtattggaaaggttag

SEQ ID NO: 6706 - protein, 240 aa, Unknown
  Obtained from environmental sample
  DOMAIN (1)...(238): Cation transport protein
  misc_feature (1)..(240): Xaa is any amino acid
MIFMLIAALNFNLYYRIIHKKFSDFAYNTEIRVFFLIFFVAALLISLSLVSQYGSFAEALRFGSFQAASILSTTGNARTDYTVWPSLAQAVLLCLMFIGGCSGSTAGGVKVIRHTVLFKQAWNELKRILYPQGVFSIQLNQKVGRKDVVYGVAGFVFLYFLIVGITALITTTAGFDILSSFSAALSVTGNIGVGFGAVGPFKNFSMFPDYLKLFYSLVMIAGRLELWTVLVLFTPEYWKG

SEQ ID NO: 6707 - DNA, 675 bp, Unknown
  Obtained from environmental sample
  misc_feature (1)..(675): n is a, c, g, or t
ttgataccgcctgacatttttcgcgccgcgcaggaagcgggaagaaccaagccctggggtaccggacacgccctgctatgcgcggcggagcaaattgacgcgcctttcactgtaataaacgccgatgacttttacggcagggaagcgtttgccgttatgggaaaacatcttcttggagcggacgctaatacggcttcaattgtgccttaccgtcttgataaaacactcagtcctcagggaaccgtggcgcgtggagtctgcggaattgaaaacggttaccttgtcagcgtggacgaattaaccgccatcgaacaaaagagcgggcgtatttttaataccgcgcccgatggttctgtccgcgatcttgcgccagatacccccgtatcaatgaatttttggggtttttcgccggatataattcccgaatataaaaaatattttgatgaatttttaaaaacattcgcggcggatgttaaaggacaaattaaaagcgaatgttttattcctaaagccgtggattattttattaaacatggcagtgtcaaagttaaagttctacaagcggattcaaactggtttggcgtaacatacaaggaagacaaagaggccgcgattaaaaagctgggagaattaatatcttccggcgtatatcctgaatctctttggggtaattaa

SEQ ID NO: 6708 - protein, 224 aa, Unknown
  Obtained from environmental sample
  misc_feature (1)..(224): Xaa is any amino acid
MIPPDIFRAAQEAGRTKPWGTGHALLCAAEQIDAPFTVINADDFYGREAFAVMGKHLLGADANTASIVPYRLDKTLSPQGTVARGVCGIENGYLVSVDELTAIEQKSGRIFNTAPDGSVRDLAPDTPVSMNFWGFSPDIIPEYKKYFDEFLKTFAADVKGQIKSECFIPKAVDYFIKHGSVKVKVLQADSNWFGVTYKEDKEAAIKKLGELISSGVYPESLWGN

SEQ ID NO: 6709 - DNA, 558 bp, Unknown
  Obtained from environmental sample
  misc_feature (1)..(558): n is a, c, g, or t
ttgggattatttttttctctttttccaaaccccttcacagtgctgttctgcgtcagcctcctcggtgtaacgctgggattcctggcctttaacgcgccggttccaagggcaaaaatatttatgggtgacggcggaagccagtttttagggttttcgctggcattgttgcccctgctggaagggaacaacagccgggccgccctgccgatactctatgccgcggccctgctggccattcccatttttgacaccatcgcggcggtctggcgccgtaagcgggagcacagaagaatcgacagtcccgataaataccacatgcaccacaagctgataaacctgggcctgagcgcgcggggcgttgacgccgtactgtatactttacagatcattttggggatactggtttttatttccattcgcctggacggcttgctttccgtgattttacttgccgccgcatatattgccgtcgcggcgttttttgtcgtaatccattttttgaaccgtgccgcaatgacgaaaaaaaataaagccgacggtgagcgcccaccggaatga

SEQ ID NO: 6710 - protein, 185 aa, Unknown
  Obtained from environmental sample
  SIGNAL (1)...(31)
  misc_feature (1)..(185): Xaa is any amino acid
MGLFFSLFPNPFTVLFCVSLLGVTLGFLAFNAPVPRAKIFMGDGGSQFLGFSLALLPLLEGNNSRAALPILYAAALLAIPIFDTIAAVWRRKREHRRIDSPDKYHMHHKLINLGLSARGVDAVLYTLQIILGILVFISIRLDGLLSVILLAAAYIAVAAFFVVIHFLNRAAMTKKNKADGERPPE

SEQ ID NO: 6711 - DNA, 534 bp, Unknown
  Obtained from environmental sample
  misc_feature (1)..(534): n is a, c, g, or t
gtgagtacatggctcctgaaaccgggcgagcttaccctgaaaggggaaaaccgcaaaagttttgaacatgtactgaagcgaaatttattgagaatgctcaatcccccgccgcaaagggataatgaacatggcggcgattccccttccggcggcatcagggccgaatttgaaatgacaagcggccgcttttatttacactgcgatgacaaagacagcgaaaaagtcgaaagtgttctctcccgccttataggcatcgcgggctgggcaaaggccaaaacatgtgagaaaaccgtggaagcggtgttgcgcctgtgcgttgaggaaggcaaaaaactgtccgagcggggcataaaaacttttaagatagaggcccggcggaccgacaagagttttccccttgattcatacggtttatgcagccgggcgggagatgctgtgttggacgcggctggccttgcagtcgatatccataaccctgacagcgttatctggatagagatccgcgaaaaagcctactgtgtactcagacgctaa

SEQ ID NO: 6712 - protein, 177 aa, Unknown
  Obtained from environmental sample
  DOMAIN (86)...(177): THUMP domain
  misc_feature (1)..(177): Xaa is any amino acid
MSTWLLKPGELTLKGENRKSFEHVLKRNLLRMLNPPPQRDNEHGGDSPSGGIRAEFEMTSGRFYLHCDDKDSEKVESVLSRLIGIAGWAKAKTCEKTVEAVLRLCVEEGKKLSERGIKTFKIEARRTDKSFPLDSYGLCSRAGDAVLDAAGLAVDIHNPDSVIWIEIREKAYCVLRR

SEQ ID NO: 6713 - DNA, 306 bp, Unknown
  Obtained from environmental sample
  misc_feature (1)..(306): n is a, c, g, or t
atggaccgctgcgttttcattccacgggaaaggaacgaaaatgatttttctccctatattttacaggccgctttcagaggtgtccccggcgaggtaatggcccgcgcccttgacgatataggttttgcggtttccaccggctctgcctgctcctcctcttctccggaacgcccggtacttgccgccatgggcattgaggaaagcctcagccttgaaggcatccgcatttcccagggctggacaacaacggacgaggaaatcgaccttcttcttgaggcaagcgcggaggttttgaaatacctgtga

SEQ ID NO: 6714 - protein, 101 aa, Unknown
  Obtained from environmental sample
  misc_feature (1)..(101): Xaa is any amino acid
MDRCVFIPRERNENDFSPYILQAAFRGVPGEVMARALDDIGFAVSTGSACSSSSPERPVLAAMGIEESLSLEGIRISQGWTTTDEEIDLLLEASAEVLKYL

SEQ ID NO: 6715 - DNA, 642 bp, Unknown
  Obtained from environmental sample
  misc_feature (1)..(642): n is a, c, g, or t
ttgacaacctccccggctgtcctttcgttccccgttgtgaaaaagcccagagtatctgtacgcaaagtttccctccccaaaaagaaattaacggcgcgaaagttcactgctattttccggcaggaggcaataatgcctgaaaccaccctactttcaatccgtaacctctcatgcgcatatatcagcaaaaagttcggtctttttgggaaaaaagaaataaaacccgtccttaaaaatataaatcttgaactgcgttcaggagaaatttttggtcttacgggcaagtccggttgcggtaaaactactttggcgcgttgtattttaaaacttattgattatgagggagaaattcttcttgacggacaggaacaggaaaaaccgccgccgattcagatggtttttcaagagaccggcgcgtcgttaaacccttgcaaaaacatcggctggcttatggaagagccattaattattcacaaaataggaaacaaagaagaacgcaggcataagatcgacagaatgttactgcgcgtcggtcttgatccgtcctataaaacgcgtcacgttcatgaactgagcggcggtcaaaaacagcgcgtctgcatcgcccgcgctttatttatcccctcggccatcttatcatga

SEQ ID NO: 6716 - protein, 213 aa, Unknown
  Obtained from environmental sample
  DOMAIN (87)...(213): ABC transporter
  misc_feature (1)..(213): Xaa is any amino acid
MTTSPAVLSFPVVKKPRVSVRKVSLPKKKLTARKFTAIFRQEAIMPETTLLSIRNLSCAYISKKFGLFGKKEIKPVLKNINLELRSGEIFGLTGKSGCGKTTLARCILKLIDYEGEILLDGQEQEKPPPIQMVFQETGASLNPCKNIGWLMEEPLIIHKIGNKEERRHKIDRMLLRVGLDPSYKTRHVHELSGGQKQRVCIARALFIPSAILS

SEQ ID NO: 6717 - DNA, 549 bp, Unknown
  Obtained from environmental sample
  misc_feature (1)..(549): n is a, c, g, or t
atgagaaacagattgggcgcttttaacggagatatcaccttaaccaatttaaaaaaccaccttatgagaactgttaccgcgccctaccctaccagccttgaacgagaattagcgcttttgtcccaaataggcgtaagttcaaacgcgtcaagaagtaccggatacaacccgtcgcagttaagaggttatcttgaaattgacgaaaaaacccttgacgcggctttagagactaaaatacccgcaattaaagaacttttcgccagcaatacatcaggcgacataatcgcggatacgggcatagcgtttaacgtagactctcttgcaaggccgtttgttgaaataggcggcataatttccctgaaaaacagtacgcttgattcccgtattaaccaggacgaaaaacgcatcgccacccttgatcgccagttagccgcgaaagaacaggacctgcgcgttcaatacgcgagaatggagtccgcttactcgcgaatggaacaaatgtcaaaatctctggacaattttagccagcaaaaccgaggcggtaggtaa

SEQ ID NO: 6718 - protein, 182 aa, Unknown
  Obtained from environmental sample
  DOMAIN (1)...(166): Flagellar hook-associated protein 2 C-terminus
  misc_feature (1)..(182): Xaa is any amino acid
MRNRLGAFNGDITLTNLKNHLMRTVTAPYPTSLERELALLSQIGVSSNASRSTGYNPSQLRGYLEIDEKTLDAALETKIPAIKELFASNTSGDIIADTGIAFNVDSLARPFVEIGGIISLKNSTLDSRINQDEKRIATLDRQLAAKEQDLRVQYARMESAYSRMEQMSKSLDNFSQQNRGGR

SEQ ID NO: 6719 - DNA, 660 bp, Unknown
  Obtained from environmental sample
  misc_feature (1)..(660): n is a, c, g, or t
atgtaccgtgaccccaatgtatacaacggctggatacggcctcgatatatgatacaggcgccttctttctgtaaacgcaacaatgtgtcggatatgcttttggtatacggcctgggcgatcacggaggcggcccgacaaggcttgaccttgaacgtcttacagacatgagatcatggcctctctttccaacaatcaaattcagcaagtatcatacttattttgatactatcaaaccgcttagaaacagttttcctgtcatagacagggaattgaatttcattttttctggctgctacactgcccagtcgcgcattaaagccgccaaccggctggccgaagccgcgctctatgagtcggaagctcttgccgcgcttttgccggaagggaagatcgcccctgaactgtttgaggaaccatggcgcgacgtgctgttcaaccagttccatgacatactcccgggatcaggcgttcccgatacgcgcgaacacgcccgagggctattccaggagacgcttgcccgcgcgaacacacagaagggcattgcctgttacgcgtttgccgacatggtggacacttcggcagttaacggcgggcgcggcatcaaggaagctgagtccgagggagggggcgtcggttacggcgtggaaaaagagctatag

SEQ ID NO: 6720 - protein, 219 aa, Unknown
  Obtained from environmental sample
  misc_feature (1)..(219): Xaa is any amino acid
MYRDPNVYNGWIRPRYMIQAPSFCKRNNVSDMLLVYGLGDHGGGPTRLDLERLTDMRSWPLFPTIKFSKYHTYFDTIKPLRNSFPVIDRELNFIFSGCYTAQSRIKAANRLAEAALYESEALAALLPEGKIAPELFEEPWRDVLFNQFHDILPGSGVPDTREHARGLFQETLARANTQKGIACYAFADMVDTSAVNGGRGIKEAESEGGGVGYGVEKEL

SEQ ID NO: 6721 - DNA, 753 bp, Unknown
  Obtained from environmental sample
  misc_feature (1)..(753): n is a, c, g, or t
gtgatacccaccaacgccattaccgccggcttctttaccggcgccgtacggttgaacataaccttgccgccgctgggatacacgagcctaaaactccaaaaccaccggaacagcatggacttgcgggaataccagaattaccagtacacgcgaaccgcgtccaaccgtataagatccggaaactgggaagctgtaattaaccgggaaagcggcgttattacttcacttaaaaacaccaacaccaataccgagttccttgggccggaaggaattgttcccctcattgttgacgatgaatcggacacctggacccatatcatcccctcgtacagaggggcaatccggaaaatgaacctggaatcctttaccatggtttcacaaggtgagatttccgccgaatacgaactggtttacaaattgctgaacagcatggtaatactgcgcgtcattctgaacggcgaattgggaaccctggatattaagacaagggtaatctggaatgagcagcaccggctcctaaaactgcggattaactccgcgtttaagaatgaaacctttgtatcggaaattccctacggcgcaatcagccgggcggcggacggcagggaatggcctgtccagcgctgggcctgtttaggcggcggtacttgcctgggcatcgtcaacgacgggatatattcggccagcgccgaagacgggagccttgacctgacattgctgcgaagccccatctacagccatcacgaaatctag

SEQ ID NO: 6722 - protein, 250 aa, Unknown
  Obtained from environmental sample
  misc_feature (1)..(250): Xaa is any amino acid
MIPTNAITAGFFTGAVRLNITLPPLGYTSLKLQNHRNSMDLREYQNYQYTRTASNRIRSGNWEAVINRESGVITSLKNTNTNTEFLGPEGIVPLIVDDESDTWTHIIPSYRGAIRKMNLESFTMVSQGEISAEYELVYKLLNSMVILRVILNGELGTLDIKTRVIWNEQHRLLKLRINSAFKNETFVSEIPYGAISRAADGREWPVQRWACLGGGTCLGIVNDGIYSASAEDGSLDLTLLRSPIYSHHEI

SEQ ID NO: 6723 - DNA, 348 bp, Unknown
  Obtained from environmental sample
  misc_feature (1)..(348): n is a, c, g, or t
atgccacaaatcacactaacactcccagacggctcggagaaatccgttgaggcgggaatcaccggattggaaatggcaaaaggcatttcggaaggtcttgcccgcaaagccattgccgtgaaactcggcgagaaaattttggacttgaaccgcccgcttacaacaagcggctcgtttcgcataataacaccgagcaatgaggatgccgatgcggtttttgtgctgcggcactcgtgcgcccacgtattagcagaggcaatctgcgtgctttgcccaggcacaagactggcttatggaccccccgttgagacggattttattacgacctcgcaactccgcagtcattga

SEQ ID NO: 6724 - protein, 115 aa, Unknown
  Obtained from environmental sample
  DOMAIN (4)...(63): TGS domain
  misc_feature (1)..(115): Xaa is any amino acid
MPQITLTLPDGSEKSVEAGITGLEMAKGISEGLARKAIAVKLGEKILDLNRPLTTSGSFRIITPSNEDADAVFVLRHSCAHVLAEAICVLCPGTRLAYGPPVETDFITTSQLRSH

SEQ ID NO: 6725 - DNA, 939 bp, Unknown
  Obtained from environmental sample
  misc_feature (1)..(939): n is a, c, g, or t
ttgtattcttccggcggggttattgccaaccggggacagtattcactgaggcttgccgacgggacaaaaatcggggaactggacgaggaatttgtctgggaacgccgcattggggatcgcttccattttggagggcgcggctggaggatcacctctatagaagcggagtccgtgcaagccgcgccgctggaaacctcgtcggactttatgccgttctggaaagcggacacggtttttcgcagtcccaggcttgttgaacgggtgctggcgattctggacgcttataacggggatacatcctcatccgcgcctgatgctcttgcagcttttctcgattcacagcgaaacgcgcagcatggtattcccttaagcggcagcaatcgtataacgatagaaatcatcgacagccctgaaaatcgcggggatttgtacgcggtggtaatgcacagtttccggggcggggcggtaaactatccgcttgtgctggcccttgcccaggaactggaagaaacgcttaagatcagggtggaatcgttttccaatgacgattcgcttcttttattaataccaagactgggtattgagggaaaggtaaaacagattgaaaatatttttcgtggcgccattacagaacttaacaaaagcggcggcggcggcctttgccggggagagaggctgttcagaaaccggctggaagcgtccggtgttttcggcgcgagcttccgcgaggccgcggagagaagcctccttctgcccaaagcgggttttggaaaacgaaccccgctgtggatcacaagacagcgttcaaggcggctttttgacgcggtgcgcggcgaagagggttttccggttaccgccgaggcgtggcggagctgcctggtcgattatttgatatggagggtttcgcgactgttaggcgcaattacgacagcacgttga

SEQ ID NO: 6726 - protein, 312 aa, Unknown
  Obtained from environmental sample
  DOMAIN (123)...(312): DEAD/H associated
  misc_feature (1)..(312): Xaa is any amino acid
MYSSGGVIANRGQYSLRLADGTKIGELDEEFVWERRIGDRFHFGGRGWRITSIEAESVQAAPLETSSDFMPFWKADTVFRSPRLVERVLAILDAYNGDTSSSAPDALAAFLDSQRNAQHGIPLSGSNRITIEIIDSPENRGDLYAVVMHSFRGGAVNYPLVLALAQELEETLKIRVESFSNDDSLLLLIPRLGIEGKVKQIENIFRGAITELNKSGGGGLCRGERLFRNRLEASGVFGASFREAAERSLLLPKAGFGKRTPLWITRQRSRRLFDAVRGEEGFPVTAEAWRSCLVDYLIWRVSRLLGAITTAR

SEQ ID NO: 6727 - DNA, 822 bp, Unknown
  Obtained from environmental sample
  misc_feature (1)..(822): n is a, c, g, or t
ttgccagacgtttgcctcattcacattttaacgcaaaagggcaagggttatgaactcgccaccacaaacccggcaaaatggcacggctcagacccgttccacatagaagacggctctataatcgtggaaaaacctcgccctaccctaacctctatttttggaaaaactttactgaccttagcaaaacaggataaaaaaattataggcatttccgccgctatgcttgacggttgcggattaaattttttaaaagaagacccagaaacagcggatagaatctttgatgttggcatagcagaagaacacgcggttacatttgctgccgggcttgcatgtgagggtttcactccagtggttgctatttactcaacatttttgcaaagagcttacgaccaaattatacacgatgtggctttgcaaaatctaccggtagtctttattttggacagagcaggcttggtaggctcagatggcccaacccaccacggcgcgctggatttgtcttatttgcgcacaattcccaatatggtgattatggctccatcagatgaaaacgaaatgcgcaatatgatttacacggcaacccaatataaaaacggccccatagctcttcgctacccacgggcaattacctatacaaacgatattcgcacggaattttcggagttgcccataggcaaattccgcattgttcgcaaaggcaaaaaggttttaatcataggcataggctttttgctcgcgaaatgccttgatgcagcgggtgttttggagaagaaaggctatgaacccacaataatagacgctcgcttgcaaagcctctga

SEQ ID NO: 6728 - protein, 273 aa, Unknown
  Obtained from environmental sample
  DOMAIN (47)...(213): Transketolase, pyridine binding domain
  misc_feature (1)..(273): Xaa is any amino acid
MPDVCLIHILTQKGKGYELATTNPAKWHGSDPFHIEDGSIIVEKPRPTLTSIFGKTLLTLAKQDKKIIGISAAMLDGCGLNFLKEDPETADRIFDVGIAEEHAVTFAAGLACEGFTPVVAIYSTFLQRAYDQIIHDVALQNLPVVFILDRAGLVGSDGPTHHGALDLSYLRTIPNMVIMAPSDENEMRNMIYTATQYKNGPIALRYPRAITYTNDIRTEFSELPIGKFRIVRKGKKVLIIGIGFLLAKCLDAAGVLEKKGYEPTIIDARLQSL

SEQ ID NO: 6729 - DNA, 450 bp, Unknown
  Obtained from environmental sample
  misc_feature (1)..(450): n is a, c, g, or t
gtgtttatcatgtggccgacattttcaaatatttacgacagggccttgcaacccctctccgccggggaaattaacgtggaaaccgcctaccgcgaggcggaggccccgttgcggctgtttatgtacagtcagatgaggagccgccctgaaaatatccggttgtttatggcaatgcggaacttggaccggcccgacacactggcggatgtccccacctatgtgctgattcccgcctttattttgagtgaactgacggtggcttttaagatagggatattgctgtttattccctttatcgtgattgacatggtagtcgccagcgcccttatgtcgatgggcatgattatgctgccaccggttatgatttcgatgcccttcaagctgatactgtttattctggttgacggatgggggctgttgacggaccagttggttcgttcatttgtgtag

SEQ ID NO: 6730 - protein, 149 aa, Unknown
  Obtained from environmental sample
  DOMAIN (1)...(145): FliP family
  misc_feature (1)..(149): Xaa is any amino acid
MFIMWPTFSNIYDRALQPLSAGEINVETAYREAEAPLRLFMYSQMRSRPENIRLFMAMRNLDRPDTLADVPTYVLIPAFILSELTVAFKIGILLFIPFIVIDMVVASALMSMGMIMLPPVMISMPFKLILFILVDGWGLLTDQLVRSFV

SEQ ID NO: 6731 - DNA, 546 bp, Unknown
  Obtained from environmental sample
  misc_feature (1)..(546): n is a, c, g, or t
atgcacaagggagaacggcggcggcaggcaaaaacgaagagcgaacttgcggacggaactctgcttgccaagagtgatcagcgctttgagtgtctcggcgccatcgacgagctttccgcgcagcttgcgctgctcgcgtgcgggttgacgcgcggggacgcggtctatgtagaggcggcgctggccgagctcgcggatctgtccggcgcgcttgccaaatgcgcagacgcggcgggggcgtcgtcatcgccgtcatcgtcgccgtcgctgtcatcgtcggcggcgcgccttgagcgcatccgcgccgaacgcgacaggctgtacggctatgcgcagcgcggctttatccgctttgcgtcatgccgcgcggctgccgaggccgatctcgcgcgggcgatctgccgccgcgccgagcgcgaactcgttcgcctgttggcggattccgatgatgagaccgcgaataataatctgttgtatctggattgccttgcggactggctctttctcttcgcctgcaagctcgcgggcgcggagccgccttgctga

SEQ ID NO: 6732 - protein, 181 aa, Unknown
  Obtained from environmental sample
  DOMAIN (12)...(176): Cobalamin adenosyltransferase
  misc_feature (1)..(181): Xaa is any amino acid
MHKGERRRQAKTKSELADGTLLAKSDQRFECLGAIDELSAQLALLACGLTRGDAVYVEAALAELADLSGALAKCADAAGASSSPSSSPSLSSSAARLERIRAERDRLYGYAQRGFIRFASCRAAAEADLARAICRRAERELVRLLADSDDETANNNLLYLDCLADWLFLFACKLAGAEPPC

SEQ ID NO: 6733 - DNA, 720 bp, Unknown
  Obtained from environmental sample
  misc_feature (1)..(720): n is a, c, g, or t
atgaaaacacgttttgcaccaagcccaaccggatatttgcacaaagggcatatttggagcgcgctctgcgttgccgctgttgcaaaatccaaaaacgcttctattcatttgaggattgaagaccacgataaattgcgttgttcaaagcatttttcggatattataaaaaaagatttggaatggcttggttttgagtggcaaagcgagagcattcaaagcgagcgatatgaaatttatgaaaagtattttgaaatgttgcagaaaaaaaatttgctatatgaattctacaaaaccgataaaccaaaaattatgctgaaaaatccagaaggcgaagattttgccattaaagatgctttggaacaatggacatatcaatttgccgttgttattgacgattttgaagagggcatagatttgattgtgcggggcgaagatctgaaagattccgttgataagcaaataacccttgcaaaaatcataggcagaacagagatgccgttattcattcaccactcccttatttacgattcaaacggaaaaaaactgagcaagagagacggctcagatggaatttacaaggagagagaaagcggagcgcaaccaaaaaaggttttgagcgaaatttgccgccttatgttgccggataaggatattccagaggagattgggtgggaagaggcggtgggggtgtctagctatccaactgacttgctgcgataa

SEQ ID NO: 6734 - protein, 239 aa, Unknown
  Obtained from environmental sample
  DOMAIN (2)...(239): tRNA synthetases class I (E and Q), catalytic domain
  misc_feature (1)..(239): Xaa is any amino acid
MKTRFAPSPTGYLHKGHIWSALCVAAVAKSKNASIHLRIEDHDKLRCSKHFSDIIKKDLEWLGFEWQSESIQSERYEIYEKYFEMLQKKNLLYEFYKTDKPKIMLKNPEGEDFAIKDALEQWTYQFAVVIDDFEEGIDLIVRGEDLKDSVDKQITLAKIIGRTEMPLFIHHSLIYDSNGKKLSKRDGSDGIYKERESGAQPKKVLSEICRLMLPDKDIPEEIGWEEAVGVSSYPTDLLR

SEQ ID NO: 6735 - DNA, 624 bp, Unknown
  Obtained from environmental sample
  misc_feature (1)..(624): n is a, c, g, or t
atgaggaaaaaacttatgttatgctcaaactgtaaagaaaaacttgaagactatatgaacttttgtccatattgcggaacaaaaacttcaaattctagcaatatttttaccgatcctagagacggcaatgtgtataaaacagtaaaaataggccatcaaatatggatagcaagaaatatggattatattgccgaagacagtaggtgttacgaaagaaaatacgggaggctttacaactgggtagcggcaaaagaagcttgccccgctggctggcacctgccaaccaatagagattggttggaccttatagattttgcaggcggcattgttgttgctggaaagaatctcaaaacgaaacacggttgggatgattttggaaacggcttagacatttttggctttgcagctatgcctgccggactaggcgattccgaaggctacttcgatgatgctggctattgcgcccgttggtggagtgcatcggaaagcggttctcacaaagcttatagttggggaatggacgatgatttcgatggagtacattggagtaacgacaatacatccaacttatttagcgttcgttgcttgcagagttatgaatgtttcttctcattattcacatag

SEQ ID NO: 6736 - protein, 207 aa, Unknown
  Obtained from environmental sample
  misc_feature (1)..(207): Xaa is any amino acid
MRKKLMLCSNCKEKLEDYMNFCPYCGTKTSNSSNIFTDPRDGNVYKTVKIGHQIWIARNMDYIAEDSRCYERKYGRLYNWVAAKEACPAGWHLPTNRDWLDLIDFAGGIVVAGKNLKTKHGWDDFGNGLDIFGFAAMPAGLGDSEGYFDDAGYCARWWSASESGSHKAYSWGMDDDFDGVHWSNDNTSNLFSVRCLQSYECFFSLFT

SEQ ID NO: 6737 - DNA, 723 bp, Unknown
  Obtained from environmental sample
  misc_feature (1)..(723): n is a, c, g, or t
ttgatcagatcggccgagccgggaaacggggtaatgaacgggaaaattacgatggcccctccgacaccagccgacattgcggaagtaaaggcgtactcgatccaaaacgcggtcagcgctgtttcgtcccattcccttaccaaagttctgccaaataattcgcaggttaaaaagcgcgtcgcgttgatggatttcggcgcgaaacgcggcatagccagagcgctggcggcgcggggctgcgaagtgtggttattcccccatgacaccggcgctcaggaaattctcaacatgaaaccggacgggatcatgctcagtaacggaccgggagatccggcggaaaaagccaacagcggaatcattgagacgctccgtaccttgcaaaaaggcaaagcgccggtctttggcatttgtctgggacatcaactgatggcgctggcaaacggctattcaacgaaaaaacttaaattcggccaccggggtgccaaccagccggttaaggaaatggcaaccgggcgcgtgtacattaccagtcaaaatcacgggtacgcggttgtagcggataacggatcatttgtaaatgtcaacgacggtacctgcgagggcatggattacggcaattcattctccgtgcaatttcaccccgaagcgtgcagcgggccgcttgatacggcttttttgtttgaccgctttatagcaaggatgaaggcacatatgccgggctaa

SEQ ID NO: 6738 - protein, 240 aa, Unknown
  Obtained from environmental sample
  DOMAIN (49)...(215): Peptidase C26
  misc_feature (1)..(240): Xaa is any amino acid
MIRSAEPGNGVMNGKITMAPPTPADIAEVKAYSIQNAVSAVSSHSLTKVLPNNSQVKKRVALMDFGAKRGIARALAARGCEVWLFPHDTGAQEILNMKPDGIMLSNGPGDPAEKANSGIIETLRTLQKGKAPVFGICLGHQLMALANGYSTKKLKFGHRGANQPVKEMATGRVYITSQNHGYAVVADNGSFVNVNDGTCEGMDYGNSFSVQFHPEACSGPLDTAFLFDRFIARMKAHMPG

SEQ ID NO: 6739 - DNA, 651 bp, Unknown
  Obtained from environmental sample
  misc_feature (1)..(651): n is a, c, g, or t
atgcacaaggaaggagccgctttccgaagcctccttaacagttttgcaatcactgtttctttaggactgcaatacggcgtaccgctggaagaatatgtcgacgctttcactttcagccgttttgagcctaacggtatggtacagggtcatgattatgtaaaaatggcgacaagcgttattgattatgtgttccgtgatcttgcaatcagttatctgaaacgcagtgatttaggtcaggtaaaacctgaagaccttgtcgctaccgcgacaaaaaacgaaatagatgtacctgaaggaaaacaacgcgcggagaaacaggaaaaacaagccgcaggattcaggcctaacgcgacagttgtcgcttctcccgcgcccgcccctcaggcaggcaggcagataaaaggcggcaatcagggcagcgtaacaaaggcggctgttttttcgtctcctgcatatgcggaacaaccgcagacacaaactgcggtacttgaagaatcttatcctgaggaaagcgaagttataaaaatagtacaagcgcgtatcaagggttacgaaggcgatccttgttcttcatgcgggtcatttactctggtcagaaacggaacctgcatgaaatgcgatacctgcggcggtactaccggctgttcataa

SEQ ID NO: 6740 - protein, 216 aa, Unknown
  Obtained from environmental sample
  misc_feature (1)..(216): Xaa is any amino acid
MHKEGAAFRSLLNSFAITVSLGLQYGVPLEEYVDAFTFSRFEPNGMVQGHDYVKMATSVIDYVFRDLAISYLKRSDLGQVKPEDLVATATKNEIDVPEGKQRAEKQEKQAAGFRPNATVVASPAPAPQAGRQIKGGNQGSVTKAAVFSSPAYAEQPQTQTAVLEESYPEESEVIKIVQARIKGYEGDPCSSCGSFTLVRNGTCMKCDTCGGTTGCS

SEQ ID NO: 6741 - DNA, 735 bp, Unknown
  Obtained from environmental sample
  misc_feature (1)..(735): n is a, c, g, or t
gtggattttatcaccaagccattttccgcgccggtgctcctgaaccgcattaaaacatacctgaatattgacgaaattatccatgagcggacggtgcagctccagcggctgcaaagcggcattgtgtccgttctggcggatattgtcgaaagccgcgacacggcaacgggcgggcatgttgaacgaatagtggcatacatcaggatactgctggaagccatgaaagaacgcggggtgtatgtcgatgaaataaatggctgggacctggaaacggttattttgtcggcgcgtctgcacgatatgggcaaaatcgttgtgtccgacgtggttttaaacaagcatgacaagctgaccggcgatgaattcggagtaataagaacccacgctgacgaaggcgtgcggattatcgataaaatggttgaacaaaccggtgaagcggatttcctgaagaacgcgaaattatttgccggttatcatcatgagcattgggacggcacaggctacccgcacggactgagagggacggatattccgctgcagggacgtatcatggcgatagttgacacctacgacgcgcttatttcccggcggccctataaagaggccatagctgtcgaagaagcggaacgtatcatcatggaaaacgcaggtaagcagtttgaccccgatattacgcgggtattttctgaggtgaaagaacatttaaaaaatgcggcggctaatattgagggataa

SEQ ID NO: 6742 - protein, 244 aa, Unknown
  Obtained from environmental sample
  DOMAIN (56)...(193): HD domain
  misc_feature (1)..(244): Xaa is any amino acid
MDFITKPFSAPVLLNRIKTYLNIDEIIHERTVQLQRLQSGIVSVLADIVESRDTATGGHVERIVAYIRILLEAMKERGVYVDEINGWDLETVILSARLHDMGKIVVSDVVLNKHDKLTGDEFGVIRTHADEGVRIIDKMVEQTGEADFLKNAKLFAGYHHEHWDGTGYPHGLRGTDIPLQGRIMAIVDTYDALISRRPYKEAIAVEEAERIIMENAGKQFDPDITRVFSEVKEHLKNAAANIEG

SEQ ID NO: 6743 - DNA, 606 bp, Unknown
  Obtained from environmental sample
  misc_feature (1)..(606): n is a, c, g, or t
ttggtgaacgggcagagagtgaaccccgactttgttataaggcatgtagaagattcggggcatttccttgtcggttacgccgggcttcttcttgaagcggggcctgaaggcgcttttacatgggaccgcgctgacgctgttacaagtttaagaggcggcgctgagaattactctgtcgctcctatagcgcatccttcaggatgggttgaagtaaatccggctcttttaaaagaccctacttctgtggctgcgggctttggatttaacggaagagaggctaatccgggtaacggagacgccgccgcggcgattgcttcaatcagaaacactcccgtgatggtaggaaggctcgctacttttgacgattatttcgccgacgcagtcggaagaatcgggcttttgggagaacaggcacaaacggcgcatgctacacaaaacgctttgatgaaagatttacttgaaagaagacagtcggtttccggcgttaacatggacgaagaactctcgaatatgattcgttatcagcacggttataatgccgccgctcgttttattacaactgtcaattccatgcttgacacattaattaaccgcatgggcgtctag

SEQ ID NO: 6744 - protein, 201 aa, Unknown
  Obtained from environmental sample
  DOMAIN (160)...(198): Domain of unknown function (DUF1078)
  misc_feature (1)..(201): Xaa is any amino acid
MVNGQRVNPDFVIRHVEDSGHFLVGYAGLLLEAGPEGAFTWDRADAVTSLRGGAENYSVAPIAHPSGWVEVNPALLKDPTSVAAGFGFNGREANPGNGDAAAAIASIRNTPVMVGRLATFDDYFADAVGRIGLLGEQAQTAHATQNALMKDLLERRQSVSGVNMDEELSNMIRYQHGYNAAARFITTVNSMLDTLINRMGV

SEQ ID NO: 6745 - DNA, 528 bp, Unknown
  Obtained from environmental sample
  misc_feature (1)..(528): n is a, c, g, or t
ttgaaacacgcattgtctttagatagcacgattagagcaggcgatactttgcgcttaaagctgcctaactttaataacccgcagcataaaaccatgcagggagcatggaattttttcacagggctattaaacgatagccttgcatacatcacggaactatataactcgcatcaaaccgccactacgcggcggcacgatggaatagatgttgcggggcgcaagggaacgcgaattttagcaccttttagcggaaccgcacggacaatggaagatgagcgcggcggtttgatgattgcaatagccagagaaaatgatttgcttgtttttatgcactgcgaacagcgattttacctgaatggccaggcagttatggaaggagatccagtagcttctgtgggaacctctgggcacacaacggggccacacgtacatatcaccaccggaaaaatagcaaaaaacggcgagcggagtattggtgaattgaggtataatgttttaaatccgtttgaatggtacaaggagatatga

SEQ ID NO: 6746 - protein, 175 aa, Unknown
  Obtained from environmental sample
  DOMAIN (63)...(168): Peptidase family M23
  misc_feature (1)..(175): Xaa is any amino acid
MKHALSLDSTIRAGDTLRLKLPNFNNPQHKTMQGAWNFFTGLLNDSLAYITELYNSHQTATTRRHDGIDVAGRKGTRILAPFSGTARTMEDERGGLMIAIARENDLLVFMHCEQRFYLNGQAVMEGDPVASVGTSGHTTGPHVHITTGKIAKNGERSIGELRYNVLNPFEWYKEI

SEQ ID NO: 6747 - DNA, 444 bp, Unknown
  Obtained from environmental sample
  misc_feature (1)..(444): n is a, c, g, or t
atggtacaaggagatatgaatatgcgaaaaaaagtttttgtgtttatgggcggaccaagttcagagcactcggtttctttggttagcggagctggaatgattcgtgctttggatgcgcataaatatgatgtgcatcctgtgctaattgctcataatggagaatggacttggggaagcaaggctctaacaccgtatcaggttcagaatttcagtgtgaatttttttgctggcgcagaaaatggaatgcaaacaaaaatgcgcccttcgcttgaagaactaaaacccatagatatagccttgctagctttgcacggtcgctttggcgaagacggtcatattcaagcaatgcttgaatatgcgggcattccatacacaggcagcggagtgctttctagcgcacttgctatggacaaaataagagcaaagagatttacaggccaatga

SEQ ID NO: 6748 - protein, 147 aa, Unknown
  Obtained from environmental sample
  DOMAIN (10)...(136): D-ala D-ala ligase N-terminus
  misc_feature (1)..(147): Xaa is any amino acid
MVQGDMNMRKKVFVFMGGPSSEHSVSLVSGAGMIRALDAHKYDVHPVLIAHNGEWTWGSKALTPYQVQNFSVNFFAGAENGMQTKMRPSLEELKPIDIALLALHGRFGEDGHIQAMLEYAGIPYTGSGVLSSALAMDKIRAKRFTGQ

SEQ ID NO: 6749 - DNA, 699 bp, Unknown
  Obtained from environmental sample
  misc_feature (1)..(699): n is a, c, g, or t
atggccgagttgtggcaggaatggataaaagcaaacatttttttcataattggagaggttccatcaagagaagttttaaacgaattgctaaaaaaatatgattactggaaaaatatttccagcatacaggctttgcacagccccgttgctttaatggaggatagggataattttgaatatttatatttgcgaactgacttggcagaactccttggaaaaaattttcagaaaaaaagaaatttggtaaatacctttataaaaacttattctcccgaaaatgtggaaaaaaaactcatcaatagcgaaactataaaagatgctttgctggttttggatgaatgggaaaaaggcaaaggtgtacacagtgattacgattctgcaaaagaggcgttggatttgcactgcgaacttggatttaccggacttgttttttatgttggcggaaaaccggttggctattgccaaggcgaaatacttgctaacgaaaaaagtttcgctgtgcattttgaaaaagcaatagaaagctacaagggtatttaccagtacataaatcaagaattcgcaaaaagcattcccaaaagcgtaatctgcataaacagagaacaagatttgggatacgaggggctacgccaagctaaaatcacttaccgccctgttgattttgttaggcttttttccagcaatgtttcgcttaactaa

SEQ ID NO: 6750 - protein, 232 aa, Unknown
  Obtained from environmental sample
  misc_feature (1)..(232): Xaa is any amino acid
MAELWQEWIKANIFFIIGEVPSREVLNELLKKYDYWKNISSIQALHSPVALMEDRDNFEYLYLRTDLAELLGKNFQKKRNLVNTFIKTYSPENVEKKLINSETIKDALLVLDEWEKGKGVHSDYDSAKEALDLHCELGFTGLVFYVGGKPVGYCQGEILANEKSFAVHFEKAIESYKGIYQYINQEFAKSIPKSVICINREQDLGYEGLRQAKITYRPVDFVRLFSSNVSLN

SEQ ID NO: 6751 - DNA, 576 bp, Unknown
  Obtained from environmental sample
  misc_feature (1)..(576): n is a, c, g, or t
atggaattcagacggaggattggcacatggtggcttaggatgttgggaattaaatccaatattctgggaaatttgcaactagcaggaatgcgagtcagcgttgttccctcaaaaacaagcgcggaagaggtttgggcaatgaaaccngatggcgtatttctctccaagggtcccggcgaccctgccgctgtgggctatgccattgagaatgtgcgaaaattgataggcaaggttccgattatgggaatttgtttggggcaccagattataggacttgcgcttggcggcaaaactcaaaaactcaaattcggtcaccacggctgcaatcatccggttatggacacttccagcaactgcattgaaatttcctctcaaaaccacaactatatgattatgccgcagggaattgaagacaaagcggagataacctacctaaacctaaacgatggcagtgttgaaggcttgaagctgaaaaacgaaaacgtattttccattcaattccaccccgaagccgccccaggtccccacgattctctgcatttgttcaagaagttcagggagaatttatctcgctaa

SEQ ID NO: 6752 - protein, 191 aa, Unknown
  Obtained from environmental sample
  DOMAIN (16)...(170): Peptidase C26
  misc_feature (1)..(191): Xaa is any amino acid
MEFRRRIGTWWLRMLGIKSNILGNLQLAGMRVSVVPSKTSAEEVWAMKPDGVFLSKGPGDPAAVGYAIENVRKLIGKVPIMGICLGHQIIGLALGGKTQKLKFGHHGCNHPVMDTSSNCIEISSQNHNYMIMPQGIEDKAEITYLNLNDGSVEGLKLKNENVFSIQFHPEAAPGPHDSLHLFKKFRENLSR

SEQ ID NO: 6753 - DNA, 843 bp, Unknown
  Obtained from environmental sample
  misc_feature (1)..(843): n is a, c, g, or t
gtgggacacggtgctatgcgcttggcaaagccaaaaggagaatctgtgacaagtcccctccttttgcgaaggctcgccattataccaacactgaagtgtaccctgcgctgcaagctgtgcagcaactacatgacgatgtacgacgacccgccccacgtgccggtagaggaggtcatacgcgacatagacaagatattcgccctgattgaccacacagagtggctgcagttcgtgggcggcgagctgttcctgcggcgcgacatgggcgaagtctatatgcactgcctgcgccacaggaaaaagttcgacaagctgattctgataatcaacgccaccgtgctgcccgacgaaaaagacattgaggcattgaagcgctacggtcagcactgccaggtgcagataagcgactatggggagtactcccgcaaactgccggaaatcttgggaatattcaaggcaaacgacatcccctatgtggccaagagatactatggcgagggccagcactgcggcggttgggttgacaacaaccactttgaagataagggcaagaccgaagaggagcttagagttcagttcgagaactgcgggcagatagccatgcagaacttccacatgttcaggggcaagctgcacggatgcgcccgctccctcatggcaaccacccttggcaaaatagtgcctgcgtcaagggactttgttgacctctacgatgacagccaatccaacgaagaaaagcgcgagacgatacgccatttcaacgactccccacgggtctcatgccgcagctgcgtcagcttcggcgacgatgtccctcgcttcccagctgcggagcagttgtga

SEQ ID NO: 6754 - protein, 280 aa, Unknown
  Obtained from environmental sample
  misc_feature (1)..(280): Xaa is any amino acid
MGHGAMRLAKPKGESVTSPLLLRRLAIIPTLKCTLRCKLCSNYMTMYDDPPHVPVEEVIRDIDKIFALIDHTEWLQFVGGELFLRRDMGEVYMHCLRHRKKFDKLILIINATVLPDEKDIEALKRYGQHCQVQISDYGEYSRKLPEILGIFKANDIPYVAKRYYGEGQHCGGWVDNNHFEDKGKTEEELRVQFENCGQIAMQNFHMFRGKLHGCARSLMATTLGKIVPASRDFVDLYDDSQSNEEKRETIRHFNDSPRVSCRSCVSFGDDVPRFPAAEQL

SEQ ID NO: 6755 - DNA, 522 bp, Unknown
  Obtained from environmental sample
  misc_feature (1)..(522): n is a, c, g, or t
atggcctccaagttccgaaacattcccaaagttctgttttttatagccgccgcgctttatccggcgttgattttttattttcttgtaatccgtaaaattccgttacggatgttttcactttttgttatagccttcgctcttattatttttatcaccgtaacatcgggaaaaaagggaaccaaaggaatttccttcttttggaattccgtaatgcttttaatattgggaagtttctgccttattctcaattcctccgtcatcttaaaactctaccccctgttaatgaatattatgttcctgataacttttggcgtcactctattttccccccccagcatgatcttccgttttgcgacaatgcaggacagatccattaaaggctccctgaatgaaaaaagagtcgccgaatactgtcataaagtaacgtatgtgtggtgcggattttttatctttaacgggagcgtcgcagcctttactattttttccggttccgatattttgtggtctgtatataacggctaa

SEQ ID NO: 6756 - protein, 173 aa, Unknown
  Obtained from environmental sample
  misc_feature (1)..(173): Xaa is any amino acid
MASKFRNIPKVLFFIAAALYPALIFYFLVIRKIPLRMFSLFVIAFALIIFITVTSGKKGTKGISFFWNSVMLLILGSFCLILNSSVILKLYPLLMNIMFLITFGVTLFSPPSMIFRFATMQDRSIKGSLNEKRVAEYCHKVTYVWCGFFIFNGSVAAFTIFSGSDILWSVYNG

SEQ ID NO: 6757 - DNA, 678 bp, Unknown
  Obtained from environmental sample
  misc_feature (1)..(678): n is a, c, g, or t
ttggctacaaaaaattcttctctggcaaaatcaatattgactaatctatatcttgatggacaaggtaaaacgatacaggaatttccgctaaagggtttacttggaactgataaaacagaacttattaacaaattacatgatattataaaagcaggatggcatgaatcggtaagactatttcccaatggagaaataaagccttatcaggcatcaaatgccggcggttacactttagaggcattatttggcattattcctaatggtattgctgaacctgattttaaaggatgggaactaaaaactttctctcgtactagaataacacttatgacaccggaacctgatcaagggttttaccatgaaaaaggagctaaagagtttgttctaaaatatgggcatgatgccccagatgtaataaaatattttactggtacacataaagttgatattcaaaatacaacatctcagatgaccttggtaataaaaggttttgatttcaaaaaaggaacaataagcgatatgtcaggtggactttacttacttgataacaataataccccaacggccatttggacttttaatgaattaataacctcttggagtagaaaacattctcccgcttgttatgtaacatataaatccgaagaaaggaaagggaaaccccggatacatctataa

SEQ ID NO: 6758 - protein, 225 aa, Unknown
  Obtained from environmental sample
  misc_feature (1)..(225): Xaa is any amino acid
MATKNSSLAKSILTNLYLDGQGKTIQEFPLKGLLGTDKTELINKLHDIIKAGWHESVRLFPNGEIKPYQASNAGGYTLEALFGIIPNGIAEPDFKGWELKTFSRTRITLMTPEPDQGFYHEKGAKEFVLKYGHDAPDVIKYFTGTHKVDIQNTTSQMTLVIKGFDFKKGTISDMSGGLYLLDNNNTPTAIWTFNELITSWSRKHSPACYVTYKSEERKGKPRIHL

SEQ ID NO: 6759 - DNA, 858 bp, Unknown
  Obtained from environmental sample
  misc_feature (1)..(858): n is a, c, g, or t
atgctctacatttccgctcttgcggatattttaaacgataaggaaacgagctttcagtacaagcggctgtatttttctcttaaaacaagaatcaatacattgatgtacaacgcagcggacggcttttactacgatatcaacaaaagtgaaaaacaaatccccattaaaacaatcgcagggtactggcctctccttgcggaaattcccaatggggaaaaagccgagcgcattatcgaaaaactttccgacccaaaatatttcggcacggctcacccgtttccttccctcgcgttatccgaaaaagaattcgacgagacagggcgcggattcagaggatcggtttttccttatctgacattcatggttataaaaggacttgaacgttatcaacgctgggatttggcgcgcgagtgcgcgataaggcatgtgtactttatgcttgattcaatgagtccggacgggaatcatcacaggggaaatttgtgggaagcgtatttgcccacaaaggaaggtcccgcaaaatggtcgggtaaacccactttcccgcgtccgcagtatttaacctacgacgctctttccactatctgtttgacaatcgaaaatattgtcgggctttcaatttcgcttccgcgaaaaacagtagattgggttattccaagtctggaaattatgggcgtggaaaatctttctctaaaaaataatatgattacaattctttccaacaaaagcggcagagggtgggagatacacatggaaagcgaanaactttattactttacaattaatattctgggtgtaaaagaaaaaacattacctattccctctggtagatgttncattcttattgataaactgtaa

SEQ ID NO: 6760 - protein, 285 aa, Unknown
  Obtained from environmental sample
  misc_feature (1)..(285): Xaa is any amino acid
MLYISALADILNDKETSFQYKRLYFSLKTRINTLMYNAADGFYYDINKSEKQIPIKTIAGYWPLLAEIPNGEKAERIIEKLSDPKYFGTAHPFPSLALSEKEFDETGRGFRGSVFPYLTFMVIKGLERYQRWDLARECAIRHVYFMLDSMSPDGNHHRGNLWEAYLPTKEGPAKWSGKPTFPRPQYLTYDALSTICLTIENIVGLSISLPRKTVDWVIPSLEIMGVENLSLKNNMITILSNKSGRGWEIHMESEXLYYFTINILGVKEKTLPIPSGRCXILIDKL

SEQ ID NO: 6761 - DNA, 888 bp, Unknown
  Obtained from environmental sample
  misc_feature (1)..(888): n is a, c, g, or t
atggcatcaggcgaatggatacgcgcgttctacatttttcaggaactgttaaaatctactcccgatgatcccgacgcgaataattttatcgccgtaagcgagaagaacgccaaagaaagcgcattttttactgaagagatggaattatcgcttggcgagaatttaaacggcgcggtattctctattcccggagcggacggcagggtagtgatgcgttttaacagtcttacaacaacagacgatgtcgcttatggcgccggatttgaatatatggaatttgactcgaatatgactcttaagactagcgttgtttcccaatacgcgaaacttacgccttttaaaatagacggaaaacagcaggtgtatgttttaactcacgcccttgatcgctttgacaaggataacgattttaagggcgaatggcttattggcagccctgttgcgggcggaatatttttaaatgtcagttttgaggagttattgattattaccgacgtaagaagaggccttgcaaacctgcggattaacgaactttttaccgcggcaaaaaaacttgataattacggatatataagtcagattttccaggctgaaattttaaaccggcttggctgtgttttgtattttttgccgatagcgatttttataattgttattgcctggcggtatcgcacaaaacaaaagccgcgttatctgtttgttcttttacttcctgttctgccgatagtttttcacggttttgttttcctgtaccgctcggcaattaatatattaggaatctggcttgttataagttttggttttaccgccgccttaattgtttttattgccgcattggctgtgatattatttgtctcgcttgtcacacttgccgcgcagcatagttag

SEQ ID NO: 6762 - protein, 295 aa, Unknown
  Obtained from environmental sample
  misc_feature (1)..(295): Xaa is any amino acid
MASGEWIRAFYIFQELLKSTPDDPDANNFIAVSEKNAKESAFFTEEMELSLGENLNGAVFSIPGADGRVVMRFNSLTTTDDVAYGAGFEYMEFDSNMTLKTSVVSQYAKLTPFKIDGKQQVYVLTHALDRFDKDNDFKGEWLIGSPVAGGIFLNVSFEELLIITDVRRGLANLRINELFTAAKKLDNYGYISQIFQAEILNRLGCVLYFLPIAIFIIVIAWRYRTKQKPRYLFVLLLPVLPIVFHGFVFLYRSAINILGIWLVISFGFTAALIVFIAALAVILFVSLVTLAAQHS

SEQ ID NO: 6763 - DNA, 372 bp, Unknown
  Obtained from environmental sample
  misc_feature (1)..(372): n is a, c, g, or t
ttgagactaactcgtgtactccaaaagaacccgagtattccaagaccaacccgagttattccaagaccaacccgagttactcaagaccaactcgagttactcaagaccaaggcgagttatgtcaagaccaacccgagttactttaagactaacccaagttatttcaaaactaacttgagttacttcaagactaacccaagttatttcaaaactaacttgagttacttcaagactaacccgagtttctttaaaactaacccaagttatttcaagaccaaggcgagttactcaaaaaggaataggtatcgggagggcgcagaaaattacgctaagcagttgcagccagttcttttcgaaccattgcggcaataa

SEQ ID NO: 6764 - protein, 123 aa, Unknown
  Obtained from environmental sample
  misc_feature (1)..(123): Xaa is any amino acid
MRLTRVLQKNPSIPRPTRVIPRPTRVTQDQLELLKTKASYVKTNPSYFKTNPSYFKTNLSYFKTNPSYFKTNLSYFKTNPSFFKTNPSYFKTKASYSKRNRYREGAENYAKQLQPVLFEPLRQ

SEQ ID NO: 6765 - DNA, 753 bp, Unknown
  Obtained from environmental sample
  misc_feature (1)..(753): n is a, c, g, or t
ttgagccttaaaagacttggaacggattatgttgatatttatcagttccatgtaattagttctgaaagcaagcgtgatgttatattttcacctaacggcgcaatggaaggaatggaagaagccattaaagcgggcaagatacggtttcctgcgttttccagccacagcataccaattgccatcgagttgatgaagacaggtaaattcgcatctgttcagcttccttttaattatattgattgtgctgccgcagatgaggctattccgctggcaaagaaactggacatgggttttattgccatgaaaccgatgggcggcggaattttggatgatgctgggctttctattaagtacctcatgacttacgacagtatagttccggaccctggaatagaaaaaatagaagagattcgcgaaatcgtcggcattgtagaaaagaatgaaacctttacggcagaagacagagaaagagttgaaaaacagcggaaagagtttggcccttcatggtgccaccgctgcgactactgccagccctgcccccagggtatacagataagttcggccttgtgtataaagagcgcgttcaaacgaatgccccatgagcgtgccctctcatttgtaggccctgccattgaaaaagccagaacctgccttaagtgccgtgaatgtgtaagccgctgtccttatcatcttgatattccgtcactattgaaagaacagataactttgtttgacgccaattattcaaagtga

SEQ ID NO: 6766 - protein, 250 aa, Unknown
  Obtained from environmental sample
  misc_feature (1)..(250): Xaa is any amino acid
MSLKRLGTDYVDIYQFHVISSESKRDVIFSPNGAMEGMEEAIKAGKIRFPAFSSHSIPIAIELMKTGKFASVQLPFNYIDCAAADEAIPLAKKLDMGFIAMKPMGGGILDDAGLSIKYLMTYDSIVPDPGIEKIEEIREIVGIVEKNETFTAEDRERVEKQRKEFGPSWCHRCDYCQPCPQGIQISSALCIKSAFKRMPHERALSFVGPAIEKARTCLKCRECVSRCPYHLDIPSLLKEQITLFDANYSK

SEQ ID NO: 6767 - DNA, 777 bp, Unknown
  Obtained from environmental sample
  misc_feature (1)..(777): n is a, c, g, or t
gtgtctaggccgttggaatccagacgcggatcgccgagggatttttccgccgtcctagcctttctgcaactgttgccttcagtcaaaattttaggattgaaactcgatggcgacttggcgcggcgatttcaagaaatggaactgttcgacgggctgtctgccgagctgtttatggcgctctccgaaaacatgcccgcgtttttcagggacggcggcgttatcaaaaagggctattccccggagctggacgccatgcatgacctggccagcggcgcgaagtcgatcatcgccgagctgcaaagcaaatacgccgccgaaaccggaatctcaaacgttaaaataaagttcaacaatatcatcggatattatgtcgaggtcgccgccaaaaacgccgaaaaaatcctgcgcccggacagcggattcattcaccgccagaccatgagcgacaatttgcgctttacgaccgtccgcctgtccgagctggacaacgaaatccgcagcgcctccgaaaaggccgccgcaatcgagggggcaatcgtcgaaaagctggtcgggctggtactggacaatgcggacaagattatcgaaaccgccgagctgttggccgaaaccgacctatattccgccctggccgaggttgctttggaatggaaatggacaaggccgaaaattgcaaaagaaccggttttttccatcaaaggcgggcgccacccggtggtcgaaaaataccttcgagacgggtcggatgtctttattaaaaagcganctctgagttga

SEQ ID NO: 6768 - protein, 258 aa, Unknown
  Obtained from environmental sample
  DOMAIN (77)...(171): MutS family domain IV
  misc_feature (1)..(258): Xaa is any amino acid
MSRPLESRRGSPRDFSAVLAFLQLLPSVKILGLKLDGDLARRFQEMELFDGLSAELFMALSENMPAFFRDGGVIKKGYSPELDAMHDLASGAKSIIAELQSKYAAETGISNVKIKFNNIIGYYVEVAAKNAEKILRPDSGFIHRQTMSDNLRFTTVRLSELDNEIRSASEKAAAIEGAIVEKLVGLVLDNADKIIETAELLAETDLYSALAEVALEWKWTRPKIAKEPVFSIKGGRHPVVEKYLRDGSDVFIKKRXLS

SEQ ID NO: 6769 - DNA, 969 bp, Unknown
  Obtained from environmental sample
  misc_feature (1)..(969): n is a, c, g, or t
gtgtccatttatcacggcagcaacgaccagtacaccttgaaaagcggcacctcgatggccgcgccgcatgtcacgggcttggtcggctacatgctcaccttcgcgccggacctcaagccagaccagatcaggacttacttggagaagaacgccgaccccataggcggacagaagggctttgacccacgcttcggctacggccgcatcaacacgtacaagaccataggcgcggtgatagccgacatgagtgccaacccgccgcgcacacccgcgtccaactatgcgatgacaccagtgaaggtaacagtgaacactggagccggtgcgccgttcaacacagcgctcgtatatctgcacaattgcagccaggacgggaccataaccagctacgccggcatcgcgcagacgggcacttcgtacgctggcacgagggacaatgcggcgacccctcccgaaaacggcgtggcctggttcaacatgctgaagccaggctactacaaggttacttccggttactcggtccaggacttggtgacgaaggatgtggtcacagcagccgccgaatcgccggtcttcgaggtcaaaagtggtcttggcgtggcccccataaccctaacgctggacagcgcgcctatgctgtacgtgcagacctacgaaagtatgggtacgcctgggtcgagcaaccctgattatccaggtgactggatagacacccaaatagccatctacgacgaagacggccttctcgatgaattcgatgagggtgggctggacacgttctcgttcggtcttaccacgcctggcacgtactggatacagatattcccttggtctatctgttatggcgagtacgcgaagtggctgggcatcagcatgcagcctgaaccagcccctggcaccttcgcaaccctggactcaacgcatcagggcagccaggctccagcaggacgatgcgcgctcatcagatag

SEQ ID NO: 6770 - protein, 322 aa, Unknown
  Obtained from environmental sample
  misc_feature (1)..(322): Xaa is any amino acid
MSIYHGSNDQYTLKSGTSMAAPHVTGLVGYMLTFAPDLKPDQIRTYLEKNADPIGGQKGFDPRFGYGRINTYKTIGAVIADMSANPPRTPASNYAMTPVKVTVNTGAGAPFNTALVYLHNCSQDGTITSYAGIAQTGTSYAGTRDNAATPPENGVAWFNMLKPGYYKVTSGYSVQDLVTKDVVTAAAESPVFEVKSGLGVAPITLTLDSAPMLYVQTYESMGTPGSSNPDYPGDWIDTQIAIYDEDGLLDEFDEGGLDTFSFGLTTPGTYWIQIFPWSICYGEYAKWLGISMQPEPAPGTFATLDSTHQGSQAPAGRCALIR

SEQ ID NO: 6771 - DNA, 966 bp, Unknown
  Obtained from environmental sample
  misc_feature (1)..(966): n is a, c, g, or t
ttggaaaatagaagtgaaactgaaaaaaagataatttataaaggcgacctttcattattggataaaattaatgaaaataacttgatgaatctttcaaatgaagagttgagaatactaaggaatacaatatttgcccaatatggctatatttttcaatcaaaagatttatccgaacattttaataaatttaaatggtataaaccacagtataataatgttgatggtaaattaacagaatatgataattatataatacaaacagttcgcgaaattgagaagaaacaaatcaatatgaatatacaaagtattcttgaagttttttataataattcaatagatatagataatacatattatcaattaatggctgaatgtaaaaacaaatattcattcccgttgcaaattaaaaaacaacgtttgttaaacgaaatatttcctgggctaattaatgttataaaatataacgaaaaatattataacgaatttgccttaaaattactgatggaacaatataaaaatatcatatttaaaatactggaggcagaaacaaatgatattattgaatatattgatttttattcacaaaataataaaattgaattgttaacaatggatgacttcaggggatataaatattattatgagacaatctccggcagttttattgattattatattaatcaaagcgtaatttcagataatatagaaaataatttatcaaatataattttgcgggacgatacatttccagatattcccgtaatttcgatagatgatgttttttttgacgcagttgtaataaatgaattgcaaaaaacaatggagatcgcctcatctcaattgataagaaacgttaaaaatatcctgatagaaggagttaactatcagacggaaatatattcagaaacattgatcaatacgttgagtgggtattatcatatcttacagactaaggcaaaaaaataa

SEQ ID NO: 6772 - protein, 321 aa, Unknown
  Obtained from environmental sample
  misc_feature (1)..(321): Xaa is any amino acid
MENRSETEKKIIYKGDLSLLDKINENNLMNLSNEELRILRNTIFAQYGYIFQSKDLSEHFNKFKWYKPQYNNVDGKLTEYDNYIIQTVREIEKKQINMNIQSILEVFYNNSIDIDNTYYQLMAECKNKYSFPLQIKKQRLLNEIFPGLINVIKYNEKYYNEFALKLLMEQYKNIIFKILEAETNDIIEYIDFYSQNNKIELLTMDDFRGYKYYYETISGSFIDYYINQSVISDNIENNLSNIILRDDTFPDIPVISIDDVFFDAVVINELQKTMEIASSQLIRNVKNILIEGVNYQTEIYSETLINTLSGYYHILQTKAKK

SEQ ID NO: 6773 - DNA, 330 bp, Unknown
  Obtained from environmental sample
  misc_feature (1)..(330): n is a, c, g, or t
atgatcagatggccgagaggtaacctgaccaataccggcaagtgggacgcagatgaggtggtgcaaatttatatttccaaagacgagatgggaccggacgatcccctgtattcgctgcggggcttccgccgggtttttgttccagcgggtaaaagcgcctgcgtggaattcgagctttgcgccgccgcctttgaaacaataaacgccgaaggggagtccgtgctgctgcccggctcgtacacggtgatcgcggcagatgccgccccaacactggtttctgtagaaaagggcgcgccggatccggcgcgggcaaagatcagggtaagttaa

SEQ ID NO: 6774 - protein, 109 aa, Unknown
  Obtained from environmental sample
  misc_feature (1)..(109): Xaa is any amino acid
MIRWPRGNLTNTGKWDADEVVQIYISKDEMGPDDPLYSLRGFRRVFVPAGKSACVEFELCAAAFETINAEGESVLLPGSYTVIAADAAPTLVSVEKGAPDPARAKIRVS

SEQ ID NO: 6775 - DNA, 477 bp, Unknown
  Obtained from environmental sample
  misc_feature (1)..(477): n is a, c, g, or t
gtgcgatatgcaatgatcctcttaaattatctttttgatagattaaatatcggcgatgtcttgtttgttgatgattattttaaagatttaattaattaccagcattatggcgtttatgttgtaaagggcaaagttgttcatttcgcgccgcacgaagggcaggaaataagcatggaaaatggtatcatacatgaaacaactttagaaagattccttaacagaagggctttacaaattgctcaagacattaatgttcagtattctgaagatgaaattattcaacgggcatattcaagaattggagaaaaaggatatgatttactgaaaaataattgtgaacattttgcgcggtggtgcgtaactggcgaacatatttcatatcaagttgttaattctcctgaaagaataataaatactgtttcaactttcaaagaaaaaatagatgtgttttctaagtttattgaaatgtttaattaa

SEQ ID NO: 6776 - protein, 158 aa, Unknown
  Obtained from environmental sample
  DOMAIN (55)...(132): NC domain
  misc_feature (1)..(158): Xaa is any amino acid
MRYAMILLNYLFDRLNIGDVLFVDDYFKDLINYQHYGVYVVKGKVVHFAPHEGQEISMENGIIHETTLERFLNRRALQIAQDINVQYSEDEIIQRAYSRIGEKGYDLLKNNCEHFARWCVTGEHISYQVVNSPERIINTVSTFKEKIDVFSKFIEMFN

SEQ ID NO: 6777 - DNA, 609 bp, Unknown
  Obtained from environmental sample
  misc_feature (1)..(609): n is a, c, g, or t
ttgcaggaaaaacttttgaattgggcaaaattctgccttaaaactttgcgaatagatttaagtgtaggcagtcaatataatttggcaaaggtggattggagccgcccagttattgcgattgcaaaccacaattcgtatgcagatattcccgttattttaacttctgcgcaaaggccgcttggatttttggcaaaagtagagttatcgcgaattccagttttgtcttattggatgagaaaaataggctgcatttttattaaaaggcagtcaaaaaaagcagggcaaaaatttatggataaaatgctcaattattccgccgaaaaaccaccgcaaattgttattttcccagagggaacgcggagcaaaaccggagaaatgggtgcttggaaaagcggtgcgtttagaatggcggtggagttgaaagccacgattttgcctattgcgataaaaggaacagctgcctcttttgaaaagaagaaaaattcaaaaaatgtttatgaggtatcatcgcaaattttggaaccttttgatgttgctcagtgggaaaaggagaatggaaaggagattgagtataaggatttgatggctaggctgagggaactttattaa

SEQ ID NO: 6778 - protein, 202 aa, Unknown
  Obtained from environmental sample
  DOMAIN (22)...(150): Acyltransferase
  misc_feature (1)..(202): Xaa is any amino acid
MQEKLLNWAKFCLKTLRIDLSVGSQYNLAKVDWSRPVIAIANHNSYADIPVILTSAQRPLGFLAKVELSRIPVLSYWMRKIGCIFIKRQSKKAGQKFMDKMLNYSAEKPPQIVIFPEGTRSKTGEMGAWKSGAFRMAVELKATILPIAIKGTAASFEKKKNSKNVYEVSSQILEPFDVAQWEKENGKEIEYKDLMARLRELY

SEQ ID NO: 6779 - DNA, 315 bp, Unknown
  Obtained from environmental sample
  misc_feature (1)..(315): n is a, c, g, or t
ttgctggtactcagcgatgatattaccttgcttgcgggcacaatgggaataaggccaaacggcagtgcaggcagacaaaacggcttaaagaacatagtggagcatatagggcaaaattttgcacgtgtccgcattgtagctagaaaagtcccagagcgttgggatctgataaactgggttctctctgccataagcaaagaagatgcagagctttgcaagcaggttctcggtaaaattcccgatttgtgcgagacgtatttaacgaaggggattgcggcggcacagaatgagtttaataaagttccctcagcctag

SEQ ID NO: 6780 - protein, 104 aa, Unknown
  Obtained from environmental sample
  misc_feature (1)..(104): Xaa is any amino acid
MLVLSDDITLLAGTMGIRPNGSAGRQNGLKNIVEHIGQNFARVRIVARKVPERWDLINWVLSAISKEDAELCKQVLGKIPDLCETYLTKGIAAAQNEFNKVPSA

SEQ ID NO: 6781 - DNA, 786 bp, Unknown
  Obtained from environmental sample
  misc_feature (1)..(786): n is a, c, g, or t
ttgaaaaagcggcaattaaggcaaaggcgcttgaggcaaggagttagtatgagagaaaaaaaagactcgctttcaagcaaggcgcgccttctactgcttctaagagaaaaacaggggacgcctgtcagcggaagcgttcttgcaaaagacttaggtttttcccgcgtcgcagtctggaaaaccgttcagtatcttcttgaagccggctattccatagagacaggggaagcgggttactctcttgaccccaaaaaagaaaaagattttctgtacccgtgggaattcggcgagaaagaaaatttatttttttattataaaaacacgggaagcacaatggacagggcgagagaatcggctgtccgcggcgcggaaagcgggagcgtatttaccgcggaaaaacaaagcgcgggcaggggaaggaacggcagaacgtgggtatcgcggcagggcgggcttttctttactgttttggaaaggccgcgccttacaatagcggactatactcaactctctcttatgatgcaaattgccgttgtacgcagtctatcgtcaatctgcggtaaaaaagcttttgttcgctggccaaacgacatctatatcgatcaccggaagattgcgggcattactaccgaagtttgcggcgagggcgatttaattacatggctgtcaggggggataggagttaatgtgaataaccctgtcccgtccggcagggcggcaagctgtactgagattacaaagcggcaggtttcccgccccgaagtggtaattaaaatccttgattga

SEQ ID NO: 6782 - protein, 261 aa, Unknown
  Obtained from environmental sample
  DOMAIN (26)...(80): HTH domain
  misc_feature (1)..(261): Xaa is any amino acid
MKKRQLRQRRLRQGVSMREKKDSLSSKARLLLLLREKQGTPVSGSVLAKDLGFSRVAVWKTVQYLLEAGYSIETGEAGYSLDPKKEKDFLYPWEFGEKENLFFYYKNTGSTMDRARESAVRGAESGSVFTAEKQSAGRGRNGRTWVSRQGGLFFTVLERPRLTIADYTQLSLMMQIAVVRSLSSICGKKAFVRWPNDIYIDHRKIAGITTEVCGEGDLITWLSGGIGVNVNNPVPSGRAASCTEITKRQVSRPEVVIKILD

SEQ ID NO: 6783 - DNA, 687 bp, Unknown
  Obtained from environmental sample
  misc_feature (1)..(687): n is a, c, g, or t
atgaaaaaaacctacgagagaaccggcgtttcatttgataaatactattttgaaagcgaaacctatacgcttggcaaggatgaagttttaaaagggcttgaaaaaggcatttttttccgtcaggaagacggttctgtcgcggtcgatctcagcgaagaaaaactcgataaaaaaatacttttgcgaagcgacggtacgtcgatctacattactcaggattttggaaccgcaattaaccgtcataaagactggccgtttgacaagatgatctatgtagtaggctccgaacaaaattatcattttaaagttctttttatcttacttgaaaaattaggctactcttgggcaaaaagccttcatcatctttcctacggcatggttaatcttcccgaaggaaaaatgaaaagccgcgagggaaccgtagttgacgctgacgatttaattgactcactgcgtgatatggctctgtcggaaatactcgaaaagggcagggaagaggaagtaggagacccgcaggaagtggcggaaaaaatcgcccttggcgcgctgcattattttttactccagccaagccccgttaaagatatgctttttgatccgaaagaatcgctttcttttacggggaacacaggtccttatttgcagtacaatgggggcgcgtatttcttcgatgttaccgaaaagtga

SEQ ID NO: 6784 - protein, 228 aa, Unknown
  Obtained from environmental sample
  DOMAIN (1)...(200): tRNA synthetases class I (R)
  misc_feature (1)..(228): Xaa is any amino acid
MKKTYERTGVSFDKYYFESETYTLGKDEVLKGLEKGIFFRQEDGSVAVDLSEEKLDKKILLRSDGTSIYITQDFGTAINRHKDWPFDKMIYVVGSEQNYHFKVLFILLEKLGYSWAKSLHHLSYGMVNLPEGKMKSREGTVVDADDLIDSLRDMALSEILEKGREEEVGDPQEVAEKIALGALHYFLLQPSPVKDMLFDPKESLSFTGNTGPYLQYNGGAYFFDVTEK

SEQ ID NO: 6785 - DNA, 630 bp, Unknown
  Obtained from environmental sample
  misc_feature (1)..(630): n is a, c, g, or t
gtggaaactgcgcaagatgaaaagccgctggggaacttgcgacaccaaaacaaaaaaaataacattcagcacggggttgataaaaaagccgctccgttgcatagaatatgtggttgcccacgaacttgcgcacctgattatagcagaccattcagcgaggttttacgcggttatagcaaagcatttcccatattggaaagagataagaaaggagttgaacggttgatggctatatgtttctcattcctctgctggttttccagcacagctctgatggcgatagccggttatttaattgcccgcgcagcggagcaaccggaaatggcggcactttcgctcggcgttgttggagtgcgtttttttgggctttcaaggggagcgtttcgctatgcagacaggttattttcacactcgctcgcattcaaggaactgaaaaaatttcgcttgcatctatataaaattttagaaccgctcgttccatacaaattggctggcgtttcggaggcggaaatgctctccagaatttccgcagacgctgaagaatacaaatcctggctgccaaaagccggagtcccgctttttgccggcatcgcttccctattcgtgagcgtaggcattctcgcgtattga

SEQ ID NO: 6786 - protein, 209 aa, Unknown
  Obtained from environmental sample
  misc_feature (1)..(209): Xaa is any amino acid
METAQDEKPLGNLRHQNKKNNIQHGVDKKAAPLHRICGCPRTCAPDYSRPFSEVLRGYSKAFPILERDKKGVERLMAICFSFLCWFSSTALMAIAGYLIARAAEQPEMAALSLGVVGVRFFGLSRGAFRYADRLFSHSLAFKELKKFRLHLYKILEPLVPYKLAGVSEAEMLSRISADAEEYKSWLPKAGVPLFAGIASLFVSVGILAY

SEQ ID NO: 6787 - DNA, 333 bp, Unknown
  Obtained from environmental sample
  misc_feature (1)..(333): n is a, c, g, or t
ttgcagaatttaccgcaaatttcaaaagaggaaatagagaggttaaaacatntgatatccagtatggttcccgtttgggagttcaggcttggagttaatgcaaaggagtggaaactgcgcaagatgaaaagccgctggggaacttgcgacaccaaaacaaaaaaaataacattcagcacggggttgataaaaaagccgctccgttgcatagaatatgtggttgcccacgaacttgcgcacctgattatagcagaccattcagcgaggttttacgcggttatagcaaagcatttcccatattggaaagagataagaaaggagttgaacggttga

SEQ ID NO: 6788 - protein, 110 aa, Unknown
  Obtained from environmental sample
  DOMAIN (1)...(110): Protein of unknown function DUF45
  misc_feature (1)..(110): Xaa is any amino acid
MQNLPQISKEEIERLKHXISSMVPVWEFRLGVNAKEWKLRKMKSRWGTCDTKTKKITFSTGLIKKPLRCIEYVVAHELAHLIIADHSARFYAVIAKHFPYWKEIRKELNG

SEQ ID NO: 6789 - DNA, 435 bp, Unknown
  Obtained from environmental sample
  misc_feature (1)..(435): n is a, c, g, or t
atgttaagactgcttacttccggcgaatcccacggacccggcctaacggccgtcttggacggtctgccggccggtgcgccggttacaaaaaaatttatcgatgcagaactggcgcgccgccagcagggttacggccgcggcggacggcaaaaaatcgaaaaagataaggtcaagattttatccggcgtgcgctacgggatgtcgctcggctcgccggtaaccttgttcgtggagaacaaagactatgcaaattgggcggagacaatgtccgccgagccggtcaaaaacaaaactgtggccgtgaccaggctgcgccccggtcacgcggactacgccggtgtggtgaaatacggctttgacgatctgcgcaatgtgctggaacgctccagcgcgcggatgaccgcggcgcaggtggcggccggtgcagtctgntaa

SEQ ID NO: 6790 - protein, 144 aa, Unknown
  Obtained from environmental sample
  DOMAIN (2)...(144): Chorismate synthase
  misc_feature (1)..(144): Xaa is any amino acid
MLRLLTSGESHGPGLTAVLDGLPAGAPVTKKFIDAELARRQQGYGRGGRQKIEKDKVKILSGVRYGMSLGSPVTLFVENKDYANWAETMSAEPVKNKTVAVTRLRPGHADYAGVVKYGFDDLRNVLERSSARMTAAQVAAGAVX

SEQ ID NO: 6791 - DNA, 306 bp, Unknown
  Obtained from environmental sample
  misc_feature (1)..(306): n is a, c, g, or t
ttgaaactcaaaggcgcggaaatagtcatagaaaccctgaaaaaagaaaatgtagaggttgtatttggttaccccggtagcgccgttatacctatattccattatctttttaatgctccgtttaaatttatacttccgaggcatgaacagggcgcggttcatgccgccgacggttatgcaagggcctccggaaaaccgggcgttgttatagccacatcaggacccggagcgacaaatcttgtcaccggtatagctacggcgaatatggattctattccgcttgttataattaccggtcagnngtag

SEQ ID NO: 6792 - protein, 101 aa, Unknown
  Obtained from environmental sample
  DOMAIN (3)...(101): Thiamine pyrophosphate enzyme, N-terminal TPP binding domain
  misc_feature (1)..(101): Xaa is any amino acid
MKLKGAEIVIETLKKENVEVVFGYPGSAVIPIFHYLFNAPFKFILPRHEQGAVHAADGYARASGKPGVVIATSGPGATNLVTGIATANMDSIPLVIITGQX

SEQ ID NO: 6793 - DNA, 795 bp, Unknown
  Obtained from environmental sample
  misc_feature (1)..(795): n is a, c, g, or t
gtgatcgaagcttgggagaagagcccgcccaatatcataaataagggtataggcacgcttaccgctcctgtcgcgtatgttcttaaccctattatgaaaaaggtcgcgccgctcttggagggcgtaatttccggagcgaataattatatcgcgtccgccgtagacggcttttccggcaaaacacccgaatttgagaatatggacgaaaatctgttttccaaatggtttacccaagctgacgtaagcgctaaaaattggaagaccgccggactcgccgcgatggccacggagggcggcgcgatgggagcgggcggactgcttctgatactcgccgatattccggcgtctttcggaatcattatggcttttgccaataaaatcgcgctctcttacggactgccgattaaaaccgaggagactcaaatcgcgatactcaaagcggtatccgccggttcggcaaacaacattaaggaaaaaacggccgcagcgttcgcgttgagagccacggaaaagacattgcaggaaaaaacgtggcggcaaatatataaactatcggttgacaacgttttaagcacggaaaagctgatcgtggtggcacgtgaaattttgaaaaaattgggtgttaccatcacagagaaaaaagcgtcgcagctgcttccggcgataggagcggccgtcggcgccggtataaacgccgcgtgggccgccgacgcgttggaggctgtcagacagtacgcgcgtcaatgggcggtggaaaattacgttaagcacaaaacgaggggaagcaaatgctga

SEQ ID NO: 6794 - protein, 264 aa, Unknown
  Obtained from environmental sample
  misc_feature (1)..(264): Xaa is any amino acid
MIEAWEKSPPNIINKGIGTLTAPVAYVLNPIMKKVAPLLEGVISGANNYIASAVDGFSGKTPEFENMDENLFSKWFTQADVSAKNWKTAGLAAMATEGGAMGAGGLLLILADIPASFGIIMAFANKIALSYGLPIKTEETQIAILKAVSAGSANNIKEKTAAAFALRATEKTLQEKTWRQIYKLSVDNVLSTEKLIVVAREILKKLGVTITEKKASQLLPAIGAAVGAGINAAWAADALEAVRQYARQWAVENYVKHKTRGSKC

SEQ ID NO: 6795 - DNA, 492 bp, Unknown
  Obtained from environmental sample
  misc_feature (1)..(492): n is a, c, g, or t
atggacgattttagaaagggcgcaataaaaatacttgctgcgacaagcgtcgtggaagtgggggtagacgtgccaaacgccgcgtgtatggttatcgaacacgccgagcgttttggtctgtccgcccttcatcaattacgcgggcgcgtgggcaggggaggggagcaatcgtattgttttcttgttttttcagacgaccttacagaagaaggcaaggcccgcttaaaagtgatgttggaaaacagtgacggttttgtaattgcggaagaagatttaaaattaagaggtccgggacaaatcgcgggaacggaacagtcgggttaccttgttcttggaatcgccaacccaatccgcgacatggagattcttgaaagagccagaagcgacgtgttttcaattttggagaacgatcccgatctgttactggaaaacaatcgcgtaattgcgagggtactggaacaggcgccgccgtttggtgaggttgcgttttaa

SEQ ID NO: 6796 - protein, 163 aa, Unknown
  Obtained from environmental sample
  DOMAIN (1)...(54): Helicase conserved C-terminal domain
  misc_feature (1)..(163): Xaa is any amino acid
MDDFRKGAIKILAATSVVEVGVDVPNAACMVIEHAERFGLSALHQLRGRVGRGGEQSYCFLVFSDDLTEEGKARLKVMLENSDGFVIAEEDLKLRGPGQIAGTEQSGYLVLGIANPIRDMEILERARSDVFSILENDPDLLLENNRVIARVLEQAPPFGEVAF

SEQ ID NO: 6797 - DNA, 831 bp, Unknown
  Obtained from environmental sample
  misc_feature (1)..(831): n is a, c, g, or t
atggatgtgctggaaattgtgggaaccggcggagatcggtcaaactcgttcaatatttccaccaccgcggccctggttatttccgcggcgggtattccggtggcaaaacacggcaaccgggcggcatccagcaaaagcgggtccgcggacgtgctggaaagcctgggggttgttatttctatccctcccgaacagagccttcatctcctaaaaaccatcaatctttgttttctttttgcccaaaactaccatatctcaatgaaatacgtggccccggtacgaaaggaactgggggtcaggacgatattcaacatactgggccctctggtaaacccggcgggggcgaatatggaacttctgggggtctatgacgcggacctcatcgagcccatggcacaggttctttgcaacctgggggtaaaaagcggcatggtggtgcacggccaggacgggctggatgaaatttccctcagttcgcctaccagcgtctgcgaattacgcaagggcgaactaaagacctatacgatagagccggaacagtttggtttttcccggtgtaaaaaagaggaattaagtggcggtacgcctctggaaaacgcccggataaccagggacattctttccggaacaaaaggccccaaacgggacgcggtactgctcaattcggcggcagcgattcacattgcccggcccgaaatctcgatgaaggaaggaatcagcattgccgccgacgcgatagattcanggcaggcattggcccagcttgagcaatttatcagcttgtcccangcaacggaaataccggccgaaccttggttcgcagcctcatga

SEQ ID NO: 6798 - protein, 276 aa, Unknown
  Obtained from environmental sample
  DOMAIN (1)...(252): Glycosyl transferase family, a/b domain
  misc_feature (1)..(276): Xaa is any amino acid
MDVLEIVGTGGDRSNSFNISTTAALVISAAGIPVAKHGNRAASSKSGSADVLESLGVVISIPPEQSLHLLKTINLCFLFAQNYHISMKYVAPVRKELGVRTIFNILGPLVNPAGANMELLGVYDADLIEPMAQVLCNLGVKSGMVVHGQDGLDEISLSSPTSVCELRKGELKTYTIEPEQFGFSRCKKEELSGGTPLENARITRDILSGTKGPKRDAVLLNSAAAIHIARPEISMKEGISIAADAIDSXQALAQLEQFISLSXATEIPAEPWFAAS

SEQ ID NO: 6799 - DNA, 576 bp, Unknown
  Obtained from environmental sample
  misc_feature (1)..(576): n is a, c, g, or t
atgacaatgttttttgtattagtcggcgcaattttaattaacaattatgttcttgttcaattcctgggaatgtgtcctttcttcggcgtttccaaaaaaatcgaaaccgccgttggtatgggaatatccgttatatttgtaatgactattgcgtccgccattacttataccttttataaatttgttttggttccctttaatattacatatcttcttacagtcgcttttattttgataatcgcctctattgtgcaatttgtcgaagtttttatgaaaaaaatgtttaagactctttatacgatgttgggcgtgtatcttccgctgattacgacaaactgcgcgatattcggcgtaacgcttattaatattaaaaatgaatttacgtttgtcgggtctatcgtaaacagcattggagcgggtttgggttttactcttgccatagtggtgcttgccagtatccgtgaaaagtatgaggcagacccggatattcccgaaatattcagagggtttccgttggcgttattttccgccggacttatgagcattgctttcatgggttttataggattgatataa

SEQ ID NO: 6800 - protein, 191 aa, Unknown
  Obtained from environmental sample
  DOMAIN (1)...(191): Rnf-Nqr subunit, membrane protein
  misc_feature (1)..(191): Xaa is any amino acid
MTMFFVLVGAILINNYVLVQFLGMCPFFGVSKKIETAVGMGISVIFVMTIASAITYTFYKFVLVPFNITYLLTVAFILIIASIVQFVEVFMKKMFKTLYTMLGVYLPLITTNCAIFGVTLINIKNEFTFVGSIVNSIGAGLGFTLAIVVLASIREKYEADPDIPEIFRGFPLALFSAGLMSIAFMGFIGLI

SEQ ID NO: 6801 - DNA, 366 bp, Unknown
  Obtained from environmental sample
  misc_feature (1)..(366): n is a, c, g, or t
atgttaattagccttttaattcctattatcagcgtcggcggtttagcgcttctcttcggaataattcttggcttttccgcgaaaaaattcgccgttgaaaccgatccaaaagtggatcgtataataaatatactgcctggcgcaaattgcggcggctgtggattccccggctgtagcatatttgcggaacgtgttgttacaggcgaagccagttacagcggctgttcgcctggaggtcagtctgccgccgcaaaaatcgccaatgaaatgggaattgaagcggctgtggttaccgncaaacggcgtttnataaatgcgatggatcagatgataataccngaagaaattataatacgacggccctaa

SEQ ID NO: 6802 - protein, 121 aa, Unknown
  Obtained from environmental sample
  SIGNAL (1)...(27)
  DOMAIN (44)...(78): Putative Fe-S cluster
  misc_feature (1)..(121): Xaa is any amino acid
MLISLLIPIISVGGLALLFGIILGFSAKKFAVETDPKVDRIINILPGANCGGCGFPGCSIFAERVVTGEASYSGCSPGGQSAAAKIANEMGIEAAVVTXKRRXINAMDQMIIPEEIIIRRP

SEQ ID NO: 6803 - DNA, 732 bp, Unknown
  Obtained from environmental sample
  misc_feature (1)..(732): n is a, c, g, or t
atgacgcttctttcggacagcatacgcgagtttggcgtccgcgaaccgggattagcccgaccgcgagccgatggcggttttgaactgctctgcggaaaccgccgcaaacgcgcttgcgagatagtcgggctggcgaccatgcccgtcatcatacgcgagcttgacgacgacagcgcggcaatcgcgttagttgacagcaatctgcaacagcgcgaaaagctgctgtacagcgaaaaagcgtgggcgtacaaaatgaggctcgacgcgctgaaacacaagggaatcaagtcggattgccactcggcggacgaaatcgccacgcagacgggcgacaacaagtgcaaggtattccgcataatccgcttgacggaacttgttgaacctctgcttgataaagtggatgcccgcgaactcgcgttcaacaccgctgtcgagttgacttatctcgaatataaagaacagttcgccgttatcgacgctatggcgaagcacggcgtaaagccgtcgctctcgcaggcggtacggttcaagaaaatgaaacaggcggggacactgacggaagcggtgattgacgaggtgctgtccgaacccaaagaagcggcggtttccgaaacgaaaatcacgctccactaccgcaaatttttcccgcccgaatactcgccgaagcagatagaggctgtcatcattgagcttctgcggtcgtggcgcgaaacgcaattcgcaaacacttaa

SEQ ID NO: 6804 - protein, 243 aa, Unknown
  Obtained from environmental sample
  misc_feature (1)..(243): Xaa is any amino acid
MTLLSDSIREFGVREPGLARPRADGGFELLCGNRRKRACEIVGLATMPVIIRELDDDSAAIALVDSNLQQREKLLYSEKAWAYKMRLDALKHKGIKSDCHSADEIATQTGDNKCKVFRIIRLTELVEPLLDKVDARELAFNTAVELTYLEYKEQFAVIDAMAKHGVKPSLSQAVRFKKMKQAGTLTEAVIDEVLSEPKEAAVSETKITLHYRKFFPPEYSPKQIEAVIIELLRSWRETQFANT

SEQ ID NO: 6805 - DNA, 690 bp, Unknown
  Obtained from environmental sample
  misc_feature (1)..(690): n is a, c, g, or t
atgtgtataatactgctgcgtttagccatagcaaaggcgcaagccgtagaaaaatccatcagccttgaacacgctctgataaaaacaatggcggaactggtagaatgcagagattgcataacaggcggacacatagacagaacacagcgcggaatgaaaatactgttagacgcaatccgaaagaaaggcgtttatagggaaaaaacaaaagactgggacatagacctgataatccaatccagccagttacacgacataggaaaaatctccattgaagacaggatattaaagaaacccggcaggcttgatgaagatgaatttaacgaaatgaaaaagcacgctatattcggagagcaaataataataaaaattgaatccatgacaaaagaaagcgaatttttggaatacgcgagaattctcgccgtaagccaccatgaaaaatgggacggcacaggttacccgcacgggttaaaggaagatgaaatcccattattgggacgcatcatggcgatagccgatgtatacgacgcgcttgtttccgcaagatcatacaaaaagccgtttacgcacgaagaagccgtaaaaataatgacggacagcaaaggaaagcaatttgacccctgccttattgatatgtttctggaagtttctgataattttaaaaaaactattcccggcgaacagccctaa

SEQ ID NO: 6806 - protein, 229 aa, Unknown
  Obtained from environmental sample
  DOMAIN (41)...(178): HD domain
  misc_feature (1)..(229): Xaa is any amino acid
MCIILLRLAIAKAQAVEKSISLEHALIKTMAELVECRDCITGGHIDRTQRGMKILLDAIRKKGVYREKTKDWDIDLIIQSSQLHDIGKISIEDRILKKPGRLDEDEFNEMKKHAIFGEQIIIKIESMTKESEFLEYARILAVSHHEKWDGTGYPHGLKEDEIPLLGRIMAIADVYDALVSARSYKKPFTHEEAVKIMTDSKGKQFDPCLIDMFLEVSDNFKKTIPGEQP

SEQ ID NO: 6807 - DNA, 444 bp, Unknown
  Obtained from environmental sample
  misc_feature (1)..(444): n is a, c, g, or t
gtggacgggagaaacgggcgcttgtatttctatcagaacgagacgccttatgatccgccaacccaggaggcttacatgagccacaacggaaccgttaagggttggacttcgtacaaggtcgccaacacggtgaacaaccactttgcggtgggcgtgggggtttactcggtatttatcaactcagggcctggccgtgacgggaacttaccgatcactttgcagaacgcgattgaagttcccaacaagcccggtgtaacgataagacacgccgtgtcggtggcaatatcgaccagcgataggtccggcattcaaagcattgtaaacggaacaggaccatccgtttggggacgttacgagctaaaaacactgaagcaatataataactcaggcggccagcagcctgcggatgaagaatttaatataccgtcacccagcccgtggtag

SEQ ID NO: 6808 - protein, 147 aa, Unknown
  Obtained from environmental sample
  misc_feature (1)..(147): Xaa is any amino acid
MDGRNGRLYFYQNETPYDPPTQEAYMSHNGTVKGWTSYKVANTVNNHFAVGVGVYSVFINSGPGRDGNLPITLQNAIEVPNKPGVTIRHAVSVAISTSDRSGIQSIVNGTGPSVWGRYELKTLKQYNNSGGQQPADEEFNIPSPSPW

SEQ ID NO: 6809 - DNA, 906 bp, Unknown
  Obtained from environmental sample
  misc_feature (1)..(906): n is a, c, g, or t
ttggaacatttggattttatcgggaataatatagagaacgggatgctttcaatagatgatattccgttaatctttatcagagtcagaaatgtaaatcaattccgtgaatttatccgtaaaataacatcagaacaagcaaatattttatcaggttttgttttcccgaaatttgacagttacagcgcgggtgattatcttaaaatacttgaacatctttgtttgcggcataatgctgttttatacggaatgcccatccttgagggaagaaccatcgcatataaggaaacaagaaacgaagagcttcttattttaaaaagaatactggaaccatataaacagctaatcctgaatataagagtgggcggaactgacttctcatcaatttggggagtacgcaggggaattaactattcaatttatgacatactaacggtaagggattgtttatccgacattttgaatttttttaaccgcgcggatgataattatttggtatcagcgcctgtgtgggaatattttctcgcgtataaaaaagataatataaatgatttattaaaacagaacttacatcactccttaatgaacagagtccctattgtaaatgaggctattgacggtttgctgcgtgaagtaatcctggacaaagctaacggatttgtaggaaaaacaataattcatccttcccatgcaagatttgtgaatgccatgcaggcggtaacaaaagaggaacatgatgacgcgtttcagattatgaacaccaaagggggagtaattaagagcgcanataccaataaaatgaatgaaattaacccgcatagaagctgggcggataaaattattaattgcgcgaaggcgtttggtgtcgttgaaaacgagacatcgtatttagagttaatatcgcagtaa

SEQ ID NO: 6810 - protein, 301 aa, Unknown
  Obtained from environmental sample
  misc_feature (1)..(301): Xaa is any amino acid
MEHLDFIGNNIENGMLSIDDIPLIFIRVRNVNQFREFIRKITSEQANILSGFVFPKFDSYSAGDYLKILEHLCLRHNAVLYGMPILEGRTIAYKETRNEELLILKRILEPYKQLILNIRVGGTDFSSIWGVRRGINYSIYDILTVRDCLSDILNFFNRADDNYLVSAPVWEYFLAYKKDNINDLLKQNLHHSLMNRVPIVNEAIDGLLREVILDKANGFVGKTIIHPSHARFVNAMQAVTKEEHDDAFQIMNTKGGVIKSAXTNKMNEINPHRSWADKIINCAKAFGVVENETSYLELISQ

SEQ ID NO: 6811 - DNA, 777 bp, Unknown
  Obtained from environmental sample
  misc_feature (1)..(777): n is a, c, g, or t
ttgtcagagattttttacataaattcaagttatgtaaatggcaactttgatttgatttgctctactttggttcatgaatttcagcacatgattaatttcaatgagaaacgtgtgaagcggggagtaaattcgagcacttggtataacgaaatgctttccttgatggcccaagacgtaatcgaaggcttaataggtattaacccgtcacatccggatcatataaccatgaacaaaattccaatatttttatctttatataaggggttaagctttaccatatggtatattaatgacccttttaccattaactacggtaaaggttatgcttttggagcataccttttacgcaactatggcggagcgagcctattaaaaagcatccttgccaacaatacagccgatattgcatcaataacagaggcgctgaatacggttgcgggcagcggactaagttttgaagaagccctcaggcgcttcggcgaagccatgattttcagcggttctaaaataccagcaggtgtcatgacttttgacaaaactgtttcagataccataaacggttttacctataccgcttacgggtttgatgtatggaatattcctcaattcatttttggttatgggccttctgtgaatgatctgagccaggctgaaatgcgtagccattcaatatccatacatcaagttcctgaatggaaaaataaaacaggtgatttttctattacattggagaagcctgccaattcaggtatagaattctacttgatgatgagatag

SEQ ID NO: 6812 - protein, 258 aa, Unknown
  Obtained from environmental sample
  misc_feature (1)..(258): Xaa is any amino acid
MSEIFYINSSYVNGNFDLICSTLVHEFQHMINFNEKRVKRGVNSSTWYNEMLSLMAQDVIEGLIGINPSHPDHITMNKIPIFLSLYKGLSFTIWYINDPFTINYGKGYAFGAYLLRNYGGASLLKSILANNTADIASITEALNTVAGSGLSFEEALRRFGEAMIFSGSKIPAGVMTFDKTVSDTINGFTYTAYGFDVWNIPQFIFGYGPSVNDLSQAEMRSHSISIHQVPEWKNKTGDFSITLEKPANSGIEFYLMMR

SEQ ID NO: 6813 - DNA, 336 bp, Unknown
  Obtained from environmental sample
  misc_feature (1)..(336): n is a, c, g, or t
atgtcggaaggaaacgaaaatgtaattttgtgcgaaagaggaatacgcacatttgagacatacacgcgaaacacactcgacttgtccgcagtgcctgtgctgaaagagctaacccatctgccggtgattattgacccaagccacgcggttggcgtatcccgctatgtgaaaccgatggcgctggcggctgtggcatccggcgctgacggcctgatcatcgaggtgcacaacgatccgccgaacgcggcctgcgacggagcgcagtccctcacgcctgaacagttcgccgatctcgcggtaaggatccaacgggttcgcgaagctattgcgccgtaa

SEQ ID NO: 6814 - protein, 111 aa, Unknown
  Obtained from environmental sample
  DOMAIN (1)...(108): DAHP synthetase I family
  misc_feature (1)..(111): Xaa is any amino acid
MSEGNENVILCERGIRTFETYTRNTLDLSAVPVLKELTHLPVIIDPSHAVGVSRYVKPMALAAVASGADGLIIEVHNDPPNAACDGAQSLTPEQFADLAVRIQRVREAIAP

SEQ ID NO: 6815 - DNA, 435 bp, Unknown
  Obtained from environmental sample
  misc_feature (1)..(435): n is a, c, g, or t
gtgcataaggctccggaaggggcttccgagattgaataccggctgataattaacggtctttggacaaccgatcctgccaaccccaacacgcggagggacatcaattcaggtcttacctggtcaacacttgcgcttccgccccgagaaccggatcttaacccgcttaaagggccgcctggcagcttaagctttgttttcaaggggccgccgggcgaaacagtctcggtagcgggtaattttaacggctgggatccttttatgtatgagctaaaggaagatcccgcgggaaactataccattaatattcctctgccgcccggcagataccagtatgtcttcttccatcgcggccagcgctaccttgaccccaacaacgcaagccgcgtttattccaaagacggaagggccgcctctgaaatagtaattagtaattag

SEQ ID NO: 6816 - protein, 144 aa, Unknown
  Obtained from environmental sample
  misc_feature (1)..(144): Xaa is any amino acid
MHKAPEGASEIEYRLIINGLWTTDPANPNTRRDINSGLTWSTLALPPREPDLNPLKGPPGSLSFVFKGPPGETVSVAGNFNGWDPFMYELKEDPAGNYTINIPLPPGRYQYVFFHRGQRYLDPNNASRVYSKDGRAASEIVISN

SEQ ID NO: 6817 - DNA, 936 bp, Unknown
  Obtained from environmental sample
  misc_feature (1)..(936): n is a, c, g, or t
atggacaatatcggacgagtgtacggttgcagcgggttctcgggcaggtcagatcagcaaatccatgtccggcgttcggtgtcaccggttgcagcaggttcttcgggcaggtcaagatcagcaaaatccatgtccggcgtttcggtgtcaccggttgcagcaggttcttcgggcaggccgagatcgtcgaaatcatcaagattacccagatccgtgtcaggcgtttctgcagtttcaactgccgcgggttcttcgggaagacccagatcgacgaaatcagcaggattacccagatccgtgtcaggcgtttctacagcttcagctgccacaggttcttcgggaagaccaaggtcgtctaaatccatgtccggcatttcagtgccactggctgctgcgggttcttcacgaagacctagaccgtcaaaatccatgtccggcgtttcaacgtcaccggctgcagcgggttcttcgggcaggccgagatcgccgaaatcatcaagattacccagatccgtgtcaggcgtttctacagcttcaactgccgcaagctcttcggtaagacccagatcgccaaaatcatcaagattacccagatccgtgtcaggcgtttctacagcttcagctgccgcaggctcttcgggaagacccagatcgccgaaatcatcaatagcacccacatccgtgtcaggcgtttctacaactacatctgccacaagctcttcaggaagaccccgatcgtccaaatcatcaagagcacccagatccgtgtcagacgcttccaaagcctccactgacccgggttcttcaggaagacccagatcgccaaaatcattaaaatcgccggaaacgcccgctctctggaaccggtcaaatccccgacaccccccaaaatcatcaacaaccctaaaattcaatgcccccgctgcttcttcttga

SEQ ID NO: 6818 - protein, 311 aa, Unknown
  Obtained from environmental sample
  misc_feature (1)..(311): Xaa is any amino acid
MDNIGRVYGCSGFSGRSDQQIHVRRSVSPVAAGSSGRSRSAKSMSGVSVSPVAAGSSGRPRSSKSSRLPRSVSGVSAVSTAAGSSGRPRSTKSAGLPRSVSGVSTASAATGSSGRPRSSKSMSGISVPLAAAGSSRRPRPSKSMSGVSTSPAAAGSSGRPRSPKSSRLPRSVSGVSTASTAASSSVRPRSPKSSRLPRSVSGVSTASAAAGSSGRPRSPKSSIAPTSVSGVSTTTSATSSSGRPRSSKSSRAPRSVSDASKASTDPGSSGRPRSPKSLKSPETPALWNRSNPRHPPKSSTTLKFNAPAASS

SEQ ID NO: 6819 - DNA, 861 bp, Unknown
  Obtained from environmental sample
  misc_feature (1)..(861): n is a, c, g, or t
ttgaattttagggttgttgatgattttggggggtgtcggggatttgaccggttccagagagcgggcgtttccggcgattttaatgattttggcgatctgggtcttcctgaagaacccgggtcagtggaggctttggaagcgtctgacacggatctgggtgctcttgatgatttggacgatcggggtcttcctgaagagcttgtggcagatgtagttgtagaaacgcctgacacggatgtgggtgctattgatgatttcggcgatctgggtcttcccgaagagcctgcggcagctgaagctgtagaaacgcctgacacggatctgggtaatcttgatgattttggcgatctgggtcttaccgaagagcttgcggcagttgaagctgtagaaacgcctgacacggatctgggtaatcttgatgatttcggcgatctcggcctgcccgaagaacccgctgcagccggtgacgttgaaacgccggacatggattttgacggtctaggtcttcgtgaagaacccgcagcagccagtggcactgaaatgccggacatggatttagacgaccttggtcttcccgaagaacctgtggcagctgaagctgtagaaacgcctgacacggatctgggtaatcctgctgatttcgtcgatctgggtcttcccgaagaacccgcggcagttgaaactgcagaaacgcctgacacggatctgggtaatcttgatgatttcgacgatctcggcctgcccgaagaacctgctgcaaccggtgacaccgaaacgccggacatggattttgctgatcttgacctgcccgaagaacctgctgcaaccggtgacaccgaacgccggacatggatttgctga

SEQ ID NO: 6820 - protein, 286 aa, Unknown
  Obtained from environmental sample
  misc_feature (1)..(286): Xaa is any amino acid
MNFRVVDDFGGCRGFDRFQRAGVSGDFNDFGDLGLPEEPGSVEALEASDTDLGALDDLDDRGLPEELVADVVVETPDTDVGAIDDFGDLGLPEEPAAAEAVETPDTDLGNLDDFGDLGLTEELAAVEAVETPDTDLGNLDDFGDLGLPEEPAAAGDVETPDMDFDGLGLREEPAAASGTEMPDMDLDDLGLPEEPVAAEAVETPDTDLGNPADFVDLGLPEEPAAVETAETPDTDLGNLDDFDDLGLPEEPAATGDTETPDMDFADLDLPEEPAATGDTERRTWIC

SEQ ID NO: 6821 - DNA, 312 bp, Unknown
  Obtained from environmental sample
  misc_feature (1)..(312): n is a, c, g, or t
ttggcgacacccgcagactttggaattttacgcatcattgccgataagaccgaaaaggcagttgaaactttgacacaggcgggatttaccacgcggcagaccgacgtggtagcggtggaaattgaagacgtgccgggcagccttgccaaactgatggaactgttccagcagtcgctggtaaatatcgagtatctttatgcttcgcttgaagggcaggttggaaaggcagtagtcattttcaagttgaaggatcatgaaaaaggacagcaaatactgagcgcaaaaggctttaaattagcggataacttctaa

SEQ ID NO: 6822 - protein, 103 aa, Unknown
  Obtained from environmental sample
  misc_feature (1)..(103): Xaa is any amino acid
MATPADFGILRIIADKTEKAVETLTQAGFTTRQTDVVAVEIEDVPGSLAKLMELFQQSLVNIEYLYASLEGQVGKAVVIFKLKDHEKGQQILSAKGFKLADNF

SEQ ID NO: 6823 - DNA, 459 bp, Unknown
  Obtained from environmental sample
  misc_feature (1)..(459): n is a, c, g, or t
atgaccctgctcggctattcggatggcaatgtaganaattctatttggcttgaaattgcagaatttataatcaagcgaggtataaatgttaatgctgatntgaaagaactgtggcagcggcttgtttttagcattgcagtttccaacagcgattgtcatttgcgaaaccacgcttttattttggacaaaaacaagggctggaatttgtcgcccgcttacgacataaacccagatcctttcgcaataggtttagcacttaatgtgagcgaaaacgacaattcgctggattttggtttggcacaagatgtggctccttattttcgcataaattccaaagcagcaaaagaatatttacaatttgtgaaaagaaatatcgcaaaatgggaacaaattgccgttgagtttaaaattcctaaaaaagagatgcataaaatgtcacgagcttttgtgcgtaactaa

SEQ ID NO: 6824 - protein, 152 aa, Unknown
  Obtained from environmental sample
  DOMAIN (1)...(74): HipA-like C-terminal domain
  misc_feature (1)..(152): Xaa is any amino acid
MTLLGYSDGNVXNSIWLEIAEFIIKRGINVNADXKELWQRLVFSIAVSNSDCHLRNHAFILDKNKGWNLSPAYDINPDPFAIGLALNVSENDNSLDFGLAQDVAPYFRINSKAAKEYLQFVKRNIAKWEQIAVEFKIPKKEMHKMSRAFVRN

SEQ ID NO: 6825 - DNA, 333 bp, Unknown
  Obtained from environmental sample
  misc_feature (1)..(333): n is a, c, g, or t
atgttatttatgccaagattgagtaaaataattttattgccaaaacaggaaatgcttttgcgtactatgggcgaacagataaaactagctcgcttgcggagaaacttacctgtggaactgcttgcgcaacgagctggcattgcccgcacaacgcttataaggctggagcatggggatggcggagctgccatttctacacttgctaaaacgctttttgcgcttgggttagagcaagacattttgttgattgcaaaagatgatttgatgggctaccgtatgcaagatgcagggcttttggtaaaaaaacgtgcgaggagcaaaaatgcaaaatag

SEQ ID NO: 6826 - protein, 110 aa, Unknown
  Obtained from environmental sample
  DOMAIN (27)...(81): Helix-turn-helix
  misc_feature (1)..(110): Xaa is any amino acid
MLFMPRLSKIILLPKQEMLLRTMGEQIKLARLRRNLPVELLAQRAGIARTTLIRLEHGDGGAAISTLAKTLFALGLEQDILLIAKDDLMGYRMQDAGLLVKKRARSKNAK

SEQ ID NO: 6827 - DNA, 807 bp, Unknown
  Obtained from environmental sample
  misc_feature (1)..(807): n is a, c, g, or t
ttgaaagaaatccctgtaaagaaacagcaggcaaaacggcattttggcgttcatggatattttacaaggcaaacatggaatgttgtaagtacgtatgttaaaaatttttcaaaacccggcgatgtaatacttgatcccttcggtggcagtggcattacagcagttgaagctcttataacaaaaaggaaagctataaacattgatataaatccattggccatcttcattgtaaaatctttaattgcacctgtaaagattagtgaattgtcagaagcatttgatagaattaaaaaagaatatataaaaaaagaacctaaaaacaaagaagacattaagaaaatattaaaagaatatcccggtccagccaatttgaagttacctaaaggttctgatgtagaaactgtaccggaattgtttacttctaaacaattagcccaattgtctttactgaaagggattatcaagaatgaaaaagataaaaacattcgggatacgttattgctgatgttttccggcttgcttacaaaaaagaatttaacatatcatactactccaaatagaacaaaagacgggcaaggggacgcaagcgcgatgcgttattaccgttatagaatagccccaaaccctgtagatgtagatactttgacttatcttaatttgcgatataagaaagtaatagcggcaaaaaaagaaatagaagaacattgcttgcttaatcaaaaaactgttgaagatatggtgtcagacgctcaaattataaaaggttcggcaacagacctttcattcctgccaagagaaagcngttga

SEQ ID NO: 6828 - protein, 268 aa, Unknown
  Obtained from environmental sample
  misc_feature (1)..(268): Xaa is any amino acid
MKEIPVKKQQAKRHFGVHGYFTRQTWNVVSTYVKNFSKPGDVILDPFGGSGITAVEALITKRKAINIDINPLAIFIVKSLIAPVKISELSEAFDRIKKEYIKKEPKNKEDIKKILKEYPGPANLKLPKGSDVETVPELFTSKQLAQLSLLKGIIKNEKDKNIRDTLLLMFSGLLTKKNLTYHTTPNRTKDGQGDASAMRYYRYRIAPNPVDVDTLTYLNLRYKKVIAAKKEIEEHCLLNQKTVEDMVSDAQIIKGSATDLSFLPRESX

SEQ ID NO: 6829 - DNA, 864 bp, Unknown
  Obtained from environmental sample
  misc_feature (1)..(864): n is a, c, g, or t
ttgatgaaagccgaataccgtgaagtttcacgggaagctgtgcggaaatcggcggtactgctgaaaaatgaaggcaatatgctgccgcttcgccccgataaagtaaaaggctcaattgcggtaataggaccgttagccgatacgctgcatcttgactggtactcaggcaatccaacttaccttcgcactccgcttgaagggctgcgggatttattcggtaaaaacaaaatcgttcataccgattaccgcgacattgtgtcatttacagcggaagacggacgcccccttgtgctggctgacaccggcaatgaaaagggaaaattgctctctgtcggcaggttgaatcaagcgcctgcccgtttttacatggaagactggggctggggcgctcagacatttgtagatacagaaagcggtctttatttggaatctcctttttggcgcaaagagccgggcggctccgctgagaatgaacagtgtattgttgcggccagcggaaaaagcacgctttcatggtttggttattcaacatttaaccttgtgcctcaggagaacggtcttgttttgatacggacatttgataacaggcgtattgcagcgccggccgaagcagggcaggtattgttacacgacgatccggctccctgtgcgggagaattattcagaatgaaatttgaacgggacggaattgccgaagctgtttccgccgtggaaaaggcggatcaggtaataattatcgcggggaacaatccaatgataaacggacgtgaatgtacagaccgtccaagccttaatctggctccttgtcaggaagaactgataaacaaagcctttgcccgtaatccaagaactgcgctggtctaa

SEQ ID NO: 6830 - protein, 287 aa, Unknown
  Obtained from environmental sample
  DOMAIN (18)...(285): Glycosyl hydrolase family 3 C terminal domain
  misc_feature (1)..(287): Xaa is any amino acid
MMKAEYREVSREAVRKSAVLLKNEGNMLPLRPDKVKGSIAVIGPLADTLHLDWYSGNPTYLRTPLEGLRDLFGKNKIVHTDYRDIVSFTAEDGRPLVLADTGNEKGKLLSVGRLNQAPARFYMEDWGWGAQTFVDTESGLYLESPFWRKEPGGSAENEQCIVAASGKSTLSWFGYSTFNLVPQENGLVLIRTFDNRRIAAPAEAGQVLLHDDPAPCAGELFRMKFERDGIAEAVSAVEKADQVIIIAGNNPMINGRECTDRPSLNLAPCQEELINKAFARNPRTALV

SEQ ID NO: 6831 - DNA, 861 bp, Unknown
  Obtained from environmental sample
  misc_feature (1)..(861): n is a, c, g, or t
atggtcggtcttattacctatatgcgcacggacagcgtccgtatatcgcagactgcgcttgaagacgtgcgcgcatggcttggaaaaaattatcccgccgaattgcctgagaaagctgttgaatacacagtaggcaaaaacgcgcaggatgcgcatgaagcgataaggcctacatatacggaatatacgcctgattatgtaaaagattatcttacaaaagatcaactcagactttatacaatcatctgggaacgttttgtctcaagtcagatgaacaatgcaaaaagccggactgtaagcgtcgatattaaggtagtttcaggtaatgacgaagggcttttccgagtaagcggaaccaaactgacagaaaagagtttttacaaggttattaaacttttatcttctaaagaagaaaatttaaatacatatccgtcattaaaaaccggaaataccgttaaaatagaaaaattcagaagcgaacagcatttcacgcagggacctgcccgttactctgacgcttccattgtgcgcactcttgaagaaaaaggcatcggacggccttcaacctatgcttcaattatttcggttcttcttgaccgttattatgttacgcgctctaacaaacagcttgtcccgaccgttctcggcaaattgattaatgacgtgttagttgagcatttttatgcgtatattgacgctgattttaccgcctctatggaaacaaaactggatgaggtagaggataataaaatcagctggcctcaaatgataagcgagttttggaatccttttaaaaatacagttgatgaagtaacaaaaaaaattgagtctacaaagaactcggccgctcggccgatctga

SEQ ID NO: 6832 - protein, 286 aa, Unknown
  Obtained from environmental sample
  DOMAIN (1)...(246): DNA topoisomerase
  misc_feature (1)..(286): Xaa is any amino acid
MVGLITYMRTDSVRISQTALEDVRAWLGKNYPAELPEKAVEYTVGKNAQDAHEAIRPTYTEYTPDYVKDYLTKDQLRLYTIIWERFVSSQMNNAKSRTVSVDIKVVSGNDEGLFRVSGTKLTEKSFYKVIKLLSSKEENLNTYPSLKTGNTVKIEKFRSEQHFTQGPARYSDASIVRTLEEKGIGRPSTYASIISVLLDRYYVTRSNKQLVPTVLGKLINDVLVEHFYAYIDADFTASMETKLDEVEDNKISWPQMISEFWNPFKNTVDEVTKKIESTKNSAARPI

SEQ ID NO: 6833 - DNA, 681 bp, Unknown
  Obtained from environmental sample
  misc_feature (1)..(681): n is a, c, g, or t
ttgaggaaacaggaggatacaatggttaaaaaaacacaaaaagtaaatgataatttaattgaatcatattataagcagataaaggcatttccacttttatcttttgaagaagaattggaattgtcaaaacagatacaggaaggaaataccgcggctcttcacactcttgtcaattcaaacctgcgtttagtggtaaagatagccggaatgtataatattcccggcatttcaaaaatggatatgattcaagaggggaatatcgggcttttaaacgcggcgaaaaaatatgatttccgcaagaatgtgcgtttttccacgtattcaagctggtggataaaacagtttattagccgttacatttccagcaggcggtatttcgtccgtttgccacagcgtaaagaagaaacattacgaaggattcaaaccacatacagcgttctctgtcanagtttaatgcatcagccgaaaaattcagaaattgcgaaagagcttggcatttcagttcgggttgttgattcttttgcaggtttcacggccgaatcgatgtcttttgatcagagcataagcgacgatgacgccatcagcgcagtagatattcacgaagaatatacttacacccccgagcgtgatctgatgaaaaaagcctctcgtgacagcgcgcttcgtattttagccaattaa

SEQ ID NO: 6834 - protein, 226 aa, Unknown
  Obtained from environmental sample
  DOMAIN (130)...(211): Sigma-70 region 3
  misc_feature (1)..(226): Xaa is any amino acid
MRKQEDTMVKKTQKVNDNLIESYYKQIKAFPLLSFEEELELSKQIQEGNTAALHTLVNSNLRLVVKIAGMYNIPGISKMDMIQEGNIGLLNAAKKYDFRKNVRFSTYSSWWIKQFISRYISSRRYFVRLPQRKEETLRRIQTTYSVLCXSLMHQPKNSEIAKELGISVRVVDSFAGFTAESMSFDQSISDDDAISAVDIHEEYTYTPERDLMKKASRDSALRILAN

SEQ ID NO: 6835 - DNA, 804 bp, Unknown
  Obtained from environmental sample
  misc_feature (1)..(804): n is a, c, g, or t
atgtcaacacagataatacaggggccaaagggtactagggacttctacccggaggatatgtccttcctgcagcatatctttgactgttggcaccgctcatgccggctctacgggttcgagcagtacgaagggcctatgttcgagcaccttgacctgtacactcagaagtccggcgcagagattgagaagcagctctattcgtttgaggacaagggagggcggcagatcgctttgcggcccgaactcacccctactttggctcggatggtcgcggcgcaggggaccaaccttaagcggccggtgcggtggtactccatatcgcggctgtttaggtacgagaggatgcagaagggacggctaagggagttcatacagttgaatatggacatcctcgggattgaggacgtgagcgccgacgcggagcttatcgcggcggctgtggatatgatgaggcagttcgggtttgacgagagcgacttcaaggcgcgggtgtcgagccgtacattgctggaagagatgtttttggtttgcggattagaacaagagaagctgccgacgctctacgctttactcgacaagaagggcaagatagcgccggaggagtttgaacgcgaactcgcggaagcggcggggggcggggaggtttgcggcaaggtcaaggcgctttttaactgcgcggngcttgacgatgtcgaaaaattcgccggatcgcttgnggttaatataggctctatcgcccaactaaaaaagctattctcgctgatcgacgcctacgggctaaagactatgtcgttttcgatatag

SEQ ID NO: 6836 - protein, 267 aa, Unknown
  Obtained from environmental sample
  DOMAIN (22)...(187): tRNA synthetase class II core domain (G, H, P, S and T)
  misc_feature (1)..(267): Xaa is any amino acid
MSTQIIQGPKGTRDFYPEDMSFLQHIFDCWHRSCRLYGFEQYEGPMFEHLDLYTQKSGAEIEKQLYSFEDKGGRQIALRPELTPTLARMVAAQGTNLKRPVRWYSISRLFRYERMQKGRLREFIQLNMDILGIEDVSADAELIAAAVDMMRQFGFDESDFKARVSSRTLLEEMFLVCGLEQEKLPTLYALLDKKGKIAPEEFERELAEAAGGGEVCGKVKALFNCAXLDDVEKFAGSLXVNIGSIAQLKKLFSLIDAYGLKTMSFSI

SEQ ID NO: 6837 - DNA, 498 bp, Unknown
  Obtained from environmental sample
  misc_feature (1)..(498): n is a, c, g, or t
atgaaacaaaagtacttaccccgcatagcggataaagtcttaacgacagcgctggatgcctccggggcggtacttatcgaagggccaaaatggtgcggaaaaacaagaactgccgaagaaaaagccgccagcgttctttatatgcaagaccccgatcacaccgcttcctacctgcaagcagctgatataaagccatccttgttattaaaaggagataccccgcgcctcattgacgaatggcaaatggcgccggttctttgggatgcggttcggtttgcggttgatcaacgtggagaaaccagtcaatttatcctgaccggctctgccgtacccaaagataatgccgttcagcatacaggaaccggccgaatttcgcggatgataatgcgtcccatgtcattgtttgaatcgaatgaatcgaatggtgcggttttcataaaacccctttttgacggtactgccggcgagataagcggccattcttccctgancatttag

SEQ ID NO: 6838 - protein, 165 aa, Unknown
  Obtained from environmental sample
  misc_feature (1)..(165): Xaa is any amino acid
MKQKYLPRIADKVLTTALDASGAVLIEGPKWCGKTRTAEEKAASVLYMQDPDHTASYLQAADIKPSLLLKGDTPRLIDEWQMAPVLWDAVRFAVDQRGETSQFILTGSAVPKDNAVQHTGTGRISRMIMRPMSLFESNESNGAVFIKPLFDGTAGEISGHSSLXI

SEQ ID NO: 6839 - DNA, 450 bp, Unknown
  Obtained from environmental sample
  misc_feature (1)..(450): n is a, c, g, or t
gtgggaattgatccaaaaagcaagatgcaactggaaactctggtagttaaaaaagcggaaatggaaaaacagctcgaagaagttcagttgaatatccaaacccttatcaacattaaaaagcagagaaaaacactgcctgaagataaagaagtctatatgggcgaattgatggataaacgccaggcgcttaccgctgatttgtacaggaatagagaggaaaccacaaaaatagaggagttccttaatactatcaaaaccagaggcagggtttcagcttcggccaaggtttatcccggggtaaagataatcatcaaagatgcgatgaacgatatccgcaccgagtacaaggcggttacattcattttggaaaacaaccttgttcgtgttaccaagtatgaggaacctgatgaggaagtaaagaaggcgccagatggctatacagccgattga

SEQ ID NO: 6840 - protein, 149 aa, Unknown
  Obtained from environmental sample
  misc_feature (1)..(149): Xaa is any amino acid
MGIDPKSKMQLETLVVKKAEMEKQLEEVQLNIQTLINIKKQRKTLPEDKEVYMGELMDKRQALTADLYRNREETTKIEEFLNTIKTRGRVSASAKVYPGVKIIIKDAMNDIRTEYKAVTFILENNLVRVTKYEEPDEEVKKAPDGYTAD

SEQ ID NO: 6841 - DNA, 339 bp, Unknown
  Obtained from environmental sample
  misc_feature (1)..(339): n is a, c, g, or t
atggctatacagccgattgatcttcaggccctcttttcccaactggataaagttgcgaagagccagactgtgatgcgggaggggcagcaaatccaggcgtcaatacagcagttacaaatccagcgtagaaacgaagaaaacatccagtctgtgaatcaggctcaggacatgggcgaagaggccggtgtaattaaagatgaaaaaaggcagggcgggcacgagaataacgccggagccagggaaaggcagcagcaagacgaggattcaggcgaggcggaagaaaaactggatttaatcagggacccggcattgggccgtaatgttgatatttccgggtag

SEQ ID NO: 6842 - protein, 112 aa, Unknown
  Obtained from environmental sample
  misc_feature (1)..(112): Xaa is any amino acid
MAIQPIDLQALFSQLDKVAKSQTVMREGQQIQASIQQLQIQRRNEENIQSVNQAQDMGEEAGVIKDEKRQGGHENNAGARERQQQDEDSGEAEEKLDLIRDPALGRNVDISG

SEQ ID NO: 6843 - DNA, 822 bp, Unknown
  Obtained from environmental sample
  misc_feature (1)..(822): n is a, c, g, or t
gtgtgggattttcgcntgccncgcgcattagcggcaactcttgccggagcatcgctctctttgagcgggcttttattgcagagcatttttagaaatccgttagcaggtccttttgtgcttggcattagttctggcgcatcgcttggagttgcgttttttttgctcgcgggttttggtctaggctcgctgggcttgctctctgcggcagctttgggagctatggcagttctcgcctttatagcaaccttctcaaaatttatccccggcaaaacaagtcttttggtgcttggtttaatggcaggttattttgcagatgccattgtttcaattttaatacacggcacacattcggaagccttgcgaggttttatatcttggggctttggctcttttggcaggttgcgttgggaagagttgccgtatttcgcaggctgcgttttgcttgggcttgcgttgtctgttttttgcgtgaagtatttgaacgcgatagctcttggcgatgacggcgcaaagagtttagggataaatgttaaacaaaagcgactgctttcgcttttggcggcagcggttttggcagcaaccgccacttcgttttgcggaccgataggttttataggaatggcaactccgcatttggcgaggggatttttcaatagcgataatcagaggattttaattcccgcttcgcttttgacaggtgctttgctcgcgcttgcggcagggcttttgtcgcaggggttgtgggggattccgccgctgccgttaaatgcggtggctagtttgatgggcgcgcctgtggtgatttgggtgttggtgaggtaa

SEQ ID NO: 6844 - protein, 273 aa, Unknown
  Obtained from environmental sample
  SIGNAL (1)...(27)
  DOMAIN (1)...(273): FecCD transport family
  misc_feature (1)..(273): Xaa is any amino acid
MWDFRXPRALAATLAGASLSLSGLLLQSIFRNPLAGPFVLGISSGASLGVAFFLLAGFGLGSLGLLSAAALGAMAVLAFIATFSKFIPGKTSLLVLGLMAGYFADAIVSILIHGTHSEALRGFISWGFGSFGRLRWEELPYFAGCVLLGLALSVFCVKYLNAIALGDDGAKSLGINVKQKRLLSLLAAAVLAATATSFCGPIGFIGMATPHLARGFFNSDNQRILIPASLLTGALLALAAGLLSQGLWGIPPLPLNAVASLMGAPVVIWVLVR

SEQ ID NO: 6845 - DNA, 873 bp, Unknown
  Obtained from environmental sample
  misc_feature (1)..(873): n is a, c, g, or t
atggaagtagaagtagaaaaaaccgggaacgcancccggaaacatcccgaaaaagttcataaaaaacccaaaccttttaaggagtcggatccgcttgccttgtatttcaagcagatttcaatgtttccccttttaacactgcaggaagagcagaatatcggcgagaaaattatcagccttagaaccaaaataaaaacgctggaaaatgaaaaaaagaagaaggaaattgataacagcgaagaaacagccgcgcttgaacgcgcccttcttttctataaaaataaaatgataaattccaatctgcgccttgttgttagtatcgcgaaaaattaccagcaccgcgggctttctcttctggacttgatcgacgaggggaacatagggcttatcgaggcggtagaacgctttgactacacaagaggctgccgcttctcaacttacggcacttggtggataagacaggcgattattaaaagcatcgcggacaaggggcgcgttatacgcatacctattcacatgcttaacacaattaaaaaatgttactatgtcgccaaacagcttacgcaggatttaggacgcgaccccaacgaacaggaattgtccgaatacctgggcgttccggtttccaaggttaaggaaatagtaaaactttcgcaggagacgacgagccttgacacaatcgtagacgacggaaacatgacccgccttgcggaactgataaaagacgacgtaagggccgaaccttttgaaatggtgttttccatgaccttacaggagacaatgaccgatatactttcgcaattatctgaaagggaaatgaaaatcatccagctacgctacggtttaaccggagaaaacnccgcttacccttga

SEQ ID NO: 6846 - protein, 290 aa, Unknown
  Obtained from environmental sample
  DOMAIN (29)...(65): Sigma-70 factor, region 1.2
  misc_feature (1)..(290): Xaa is any amino acid
MEVEVEKTGNAXRKHPEKVHKKPKPFKESDPLALYFKQISMFPLLTLQEEQNIGEKIISLRTKIKTLENEKKKKEIDNSEETAALERALLFYKNKMINSNLRLVVSIAKNYQHRGLSLLDLIDEGNIGLIEAVERFDYTRGCRFSTYGTWWIRQAIIKSIADKGRVIRIPIHMLNTIKKCYYVAKQLTQDLGRDPNEQELSEYLGVPVSKVKEIVKLSQETTSLDTIVDDGNMTRLAELIKDDVRAEPFEMVFSMTLQETMTDILSQLSEREMKIIQLRYGLTGENXAYP

SEQ ID NO: 6847 - DNA, 498 bp, Unknown
  Obtained from environmental sample
  misc_feature (1)..(498): n is a, c, g, or t
atggcaaagagcgatcttcttatagatattttagaaacaaattttactatatccgccgaagagacgccagagtatcttaatatgctcctcagcaagtatcggcggacaattgaaagcgtacagcaaacaacaggcctgaaagaccctctgaaaatcgcggtcctgacaggttttttgctctgcgacgatcttcagaaagcgggaagcgcaccaggcgcggcaaaaaacgaagagcagggagaggcggagcggcttacccagagcatgatctcaaggcttaacgaaataatatcaaaagcccaggaagacgatatttattcgcagatactcgccgcanatactcctgttcttaaacttaaaaacagcgttaagaattatcactggggttccgcggactggattccggaagctttgggacaggaaaacacagaccgtattcctcaggcggaactctggatgggcgttaacccctcgctcctttccatgcggaactcctga

SEQ ID NO: 6848 - protein, 165 aa, Unknown
  Obtained from environmental sample
  misc_feature (1)..(165): Xaa is any amino acid
MAKSDLLIDILETNFTISAEETPEYLNMLLSKYRRTIESVQQTTGLKDPLKIAVLTGFLLCDDLQKAGSAPGAAKNEEQGEAERLTQSMISRLNEIISKAQEDDIYSQILAAXTPVLKLKNSVKNYHWGSADWIPEALGQENTDRIPQAELWMGVNPSLLSMRNS

SEQ ID NO: 6849 - DNA, 495 bp, Unknown
  Obtained from environmental sample
  misc_feature (1)..(495): n is a, c, g, or t
atgcaaattcttgtagacgcggattcatgtccccgctcagcccgggaaatgatactgcgtttttcatccaggcttggtattaaaagcgtcttcgccgccaaccatcctattcccggacttccgaagcctgatgaaagccaaaagcagaaggcgcttgaaaccgcgttttttgagctttgcccgcctggcgaaggggaggcggacaggcgcattctggcgctggccaaaagcggagaccttgttattacgcgggacctgcccctggccgaaaagcttgtcgacgcgggcataacggttttggacgacaggggcagggtttttacaaaagagaacattcgcgaagcccgttcaataagagactttacagtcggccttgcaaataacggccttgattttgacagaatcccgtcttacggaaaaaaagaactttcttcgcttgcaaacagcctggatcgggagctttccagattaagcagggccgccgtcgggatataa

SEQ ID NO: 6850 - protein, 164 aa, Unknown
  Obtained from environmental sample
  DOMAIN (1)...(156): Uncharacterized BCR, YaiI/YqxD family COG1671
  misc_feature (1)..(164): Xaa is any amino acid
MQILVDADSCPRSAREMILRFSSRLGIKSVFAANHPIPGLPKPDESQKQKALETAFFELCPPGEGEADRRILALAKSGDLVITRDLPLAEKLVDAGITVLDDRGRVFTKENIREARSIRDFTVGLANNGLDFDRIPSYGKKELSSLANSLDRELSRLSRAAVGI

SEQ ID NO: 6851 - DNA, 378 bp, Unknown
  Obtained from environmental sample
  misc_feature (1)..(378): n is a, c, g, or t
ttggccgaggcagaaaagaccgtcagatgcagttcaccactgccggcgtacataaagacgacnctgcttttgcagatgaacggcgcgccaataaaaaaatcaggctcgcagggacaacaaaaaacattcctcgtttcactgaaactcgccaacttcaatttcatcagccagcattgcaacatcatgccgatactgcttttggatgatattttcgataaattcgacgctctgcgtgttggcaatatcatccgtatagtgtccgacagccgcttcggacaaatctttatcaccgacacaggacgcgaacacatcgaaggaatactgaaacaaacggactgtatatacaaattgtataaccttccgctgggagtggaataa

SEQ ID NO: 6852 - protein, 125 aa, Unknown
  Obtained from environmental sample
  misc_feature (1)..(125): Xaa is any amino acid
MAEAEKTVRCSSPLPAYIKTTLLLQMNGAPIKKSGSQGQQKTFLVSLKLANFNFISQHCNIMPILLLDDIFDKFDALRVGNIIRIVSDSRFGQIFITDTGREHIEGILKQTDCIYKLYNLPLGVE

SEQ ID NO: 6853 - DNA, 468 bp, Unknown
  Obtained from environmental sample
  misc_feature (1)..(468): n is a, c, g, or t
gtggaaagcagttatgggaaatattcttcccattttaaaagcggcgacaattatcctgttgaacaggtaagttggaatgatgctcaggaatttatcaaaagattaaatgctcttacaggcaaacaatatcgtttacctgcggagagagaatggtattatgccgcaagcggtggcgacaaaagcaaaggatgtgaatacagcggcagcgccaatgttgacgatgtagcttggtataaagataacagtggtggcgagccacatcctgtcggtacaaaatcgccaaatgaacttggtatttacgatatgagcggtaatgtttgggaatggtgtcaggacgccgaaggctttaaccgcgtgctgcgtggcggcagctgggactacggcgcatcatactgccatattgcgagccgcaactaccactaccctgccagcggcgatagcagtattggcttccgtgtggttttataa

SEQ ID NO: 6854 - protein, 155 aa, Unknown
  Obtained from environmental sample
  DOMAIN (1)...(155): Domain of unknown function (DUF323)
  misc_feature (1)..(155): Xaa is any amino acid
MESSYGKYSSHFKSGDNYPVEQVSWNDAQEFIKRLNALTGKQYRLPAEREWYYAASGGDKSKGCEYSGSANVDDVAWYKDNSGGEPHPVGTKSPNELGIYDMSGNVWEWCQDAEGFNRVLRGGSWDYGASYCHIASRNYHYPASGDSSIGFRVVL

SEQ ID NO: 6855 - DNA, 810 bp, Unknown
  Obtained from environmental sample
  misc_feature (1)..(810): n is a, c, g, or t
atgaaactgcaattcagacaccaacccttccaagcggacgcggccggcgcggtgcgcgatgtgtntgcgggtcagccgttccgtatcccgacatacatgatagatcctggcgaggggcaagtatccacgactcaaaaagtggatttcacgggttttaacaacgcgcctatcattatcggcgacgacgcggtgttggagaatattaaacgcatccagcggcaaggaaatataaagccgtccgactcgctcgatggccggttcaacctgactatagagatggaaaccggcgtaggtaagacctacacttatatcaaaacaatgtacgagctcaacaaacggtacgggtggagtaagttcattattgtcgtgccgagtgtggccatacgtgagggtgtgtataagtcgttccaaatgaccgaagagcattttatggaggactatggcaaaaaaatccgcttttttatctatgattcgacgcagttaaatgagatagatcgctttgcttcggatagctctgtgaatgcaatgataattaacagccaagcgtttaacgctcgtggcaaggatgcgcggcgtatatacatgaaattagatgaattccgttcccgccgcccgattgacattatagctaagacaaacccgatccttataatcgacgaaccgcagtctgttgagggcgcggctacaaagggccgcctcaaagagttttcccctctcatgacgcttcgatactccgctacccacaaaaccgatagcgtatacaatatgatctaccgcttagacgctttggatgcctacaacaagcgctag

SEQ ID NO: 6856 - protein, 269 aa, Unknown
  Obtained from environmental sample
  DOMAIN (57)...(250): Type III restriction enzyme, res subunit
  misc_feature (1)..(269): Xaa is any amino acid
MKLQFRHQPFQADAAGAVRDVXAGQPFRIPTYMIDPGEGQVSTTQKVDFTGFNNAPIIIGDDAVLENIKRIQRQGNIKPSDSLDGRFNLTIEMETGVGKTYTYIKTMYELNKRYGWSKFIIVVPSVAIREGVYKSFQMTEEHFMEDYGKKIRFFIYDSTQLNEIDRFASDSSVNAMIINSQAFNARGKDARRIYMKLDEFRSRRPIDIIAKTNPILIIDEPQSVEGAATKGRLKEFSPLMTLRYSATHKTDSVYNMIYRLDALDAYNKR

SEQ ID NO: 6857 - DNA, 519 bp, Unknown
  Obtained from environmental sample
  misc_feature (1)..(519): n is a, c, g, or t
ttggtacgcttctgccgccgccttgaagaggaaggggtagagcttattacccttcacccacggctggttacggaaaagttcaaacgccttgcccgctgggagtttgtcgggcggctaaagcgagagttgaaaatcccggtagccggaaacggggacatatccacccccgaggagcttgtccgacgggcggcggatggctcatgcgacgcggtcatggttggacgggcggcggtgcgtcagccgtggatttttgcccaagcgcggaaaattgaaggcgcggattcaaattcacaaaaaattgattttgacccgaatatcgaagaaatcggacttcgttttttagaacttttaacccaacaccagccccccgattttcacctttcccgagccatgcgcttttttaactttttctgcgacaacctaaaatggggtaattatttgaagacacaactgaaccgcgaaaaaactctgtcaggcattgaaatggtttggaaagaatattttataaataataaataa

SEQ ID NO: 6858 - protein, 172 aa, Unknown
  Obtained from environmental sample
  misc_feature (1)..(172): Xaa is any amino acid
MVRFCRRLEEEGVELITLHPRLVTEKFKRLARWEFVGRLKRELKIPVAGNGDISTPEELVRRAADGSCDAVMVGRAAVRQPWIFAQARKIEGADSNSQKIDFDPNIEEIGLRFLELLTQHQPPDFHLSRAMRFFNFFCDNLKWGNYLKTQLNREKTLSGIEMVWKEYFINNK

SEQ ID NO: 6859 - DNA, 315 bp, Unknown
  Obtained from environmental sample
  misc_feature (1)..(315): n is a, c, g, or t
atggttctgtttaaggattataatgatttatatcttacaaagttagttccatttaccggtaatttttcggtttttcagcgggacttaaacgacattaaagtacagggcggcggcgatattcccgaagcggtatacgaagcgttacacgacggagcgacaaaatttgactggtcggcgcaatccagaataatgatattgataggggacgctcctccgcacccgaaaccgagaggaaggattacaaaagaaattgctgaaaaagccgcagccgagaaaaatattaaagttcatgctatgatattaccatcaaaataa

SEQ ID NO: 6860 - protein, 104 aa, Unknown
  Obtained from environmental sample
  misc_feature (1)..(104): Xaa is any amino acid
MVLFKDYNDLYLTKLVPFTGNFSVFQRDLNDIKVQGGGDIPEAVYEALHDGATKFDWSAQSRIMILIGDAPPHPKPRGRITKEIAEKAAAEKNIKVHAMILPSK

SEQ ID NO: 6861 - DNA, 573 bp, Unknown
  Obtained from environmental sample
  misc_feature (1)..(573): n is a, c, g, or t
atgaatattattaacgcaataatactgggtattgttcagggactgacggaattcttgcctgtcagcagttcgggtcatcttgtacttttacaaaaaatatttaagatagaagagccttctttattttttgacactatgcttcatgtgggaactttgctcgctgttgtaactgtcttatggaaagacatttttgaaatcttaaaaaagccgatccaaaaactgacgggcttccttattttggcgactattcctgccgttattgcggctcttctttttaaggacgctatcgaagaagtttttactacggggaaattgttaggcgtttgtttcataattaccgccgctctcttggttaccgctgaattgctttcaaggcgtaataaaaactcaaactccgccgctgtacaaccggacgagaatggcgcaaagatgacttggcttcacgcattatttatcgggataatgcaggcgcttgccattcccgcgggtatttcaagatcgggggcgacgatcagcggttctcttttttgcaaacttgaccgcaattttcgccgctcgttttttcttttttaa

SEQ ID NO: 6862 - protein, 190 aa, Unknown
  Obtained from environmental sample
  DOMAIN (5)...(190): Bacitracin resistance protein BacA
  misc_feature (1)..(190): Xaa is any amino acid
MNIINAIILGIVQGLTEFLPVSSSGHLVLLQKIFKIEEPSLFFDTMLHVGTLLAVVTVLWKDIFEILKKPIQKLTGFLILATIPAVIAALLFKDAIEEVFTTGKLLGVCFIITAALLVTAELLSRRNKNSNSAAVQPDENGAKMTWLHALFIGIMQALAIPAGISRSGATISGSLFCKLDRNFRRSFFLF

SEQ ID NO: 6863 - DNA, 891 bp, Unknown
  Obtained from environmental sample
  misc_feature (1)..(891): n is a, c, g, or t
ttgtttttcgttataggtcttgccagaggttcgggcattgtgncggcgaggaattacggctcaggcgatcatgacctgtttaagcgtacagtagcgggagcgattatagttggtatcctattgacgctttttatctcggtaaccgcaagtatttttatgatgccgttactaaaattgattaacatacccgaatccataatagatacggcatattcgtatatatctatattaactgcctttttaattataacttttacctacaatatctgcgctgggcttctatacgccataggcgacagtacaatgccgcttttatttctggttatttcatcagtactgaacatagtgtttgatattattttcattacaagttttaatatgggcgtccgaggcgcagcgtcggctaccgtagtcgctcaaagcatatcgacggcgctttgtctgttttatatttttacaagatgccggatacttattcctcacaaagaacattttcattatgacgcctctttgttcaaagaccttgcgacgcaaggtttttctatgggatttatgctgtcgattataactttaggcactgtcatacttcaaagcgccataaacggacttggttatcttgtaatagcagggcacataacggctcgcagaataaacagtttctgcatgatgccgatgaatacaatagccattgcgctctccacatttgtttcgcagaacaagggagcgaaccaacttagccgcatacgaaaggctgtgcgttacggtaattttattgtggtatcatgggcggtttttattacgattatccttttctttttctcaaaaacattgattagactgctctcaggctctaatgaaagtattattattgaaaacggcgcgcggatctaa

SEQ ID NO: 6864 - protein, 296 aa, Unknown
  Obtained from environmental sample
  misc_feature (1)..(296): Xaa is any amino acid
MFFVIGLARGSGIVXARNYGSGDHDLFKRTVAGAIIVGILLTLFISVTASIFMMPLLKLINIPESIIDTAYSYISILTAFLIITFTYNICAGLLYAIGDSTMPLLFLVISSVLNIVFDIIFITSFNMGVRGAASATVVAQSISTALCLFYIFTRCRILIPHKEHFHYDASLFKDLATQGFSMGFMLSIITLGTVILQSAINGLGYLVIAGHITARRINSFCMMPMNTIAIALSTFVSQNKGANQLSRIRKAVRYGNFIVVSWAVFITIILFFFSKTLIRLLSGSNESIIIENGARI

SEQ ID NO: 6865 - DNA, 807 bp, Unknown
  Obtained from environmental sample
  misc_feature (1)..(807): n is a, c, g, or t
ttgcgcggctgccgtccggactatattactggagagggattcgtggcagttgaaacaaaaatagaaaggcagactgtaaaactattaaatgtccctattgatattattgctccggagcagcttggcgatatagtatacgggtttttaaatgataaaaaagaacacaatattgtgcttctttccctgtgggatttactgcgcgcgagaaggaacagcgaataccgttattttatacaaagagcttctcttgttattccgatttcaaaaagccttgtaagcggaattaagtttcttaagggtgtaaaagcgtatcgttatatgccttttgacttcattgtcaacctgcttacaattctggaagcgcgtgaattttcctgttatctgcttggcggcaaaaccaagattattcttaaaacggagaaaaacatccgccagacttttcctaaacttcgtattgtcggccgtttcccgggttatttcagaaagcacgacgaagccacgataatcaaagcgataaaaaaagcgtcgccttcccttttattagcgggcaaaggcgtccgcggcggagagaaatggattgccagaaacaaccttgctctgggagacagcggcatgcgcttatggtgcagcgacatcttcgatgttttcgccgaaaagaaaaagcacccctcccgttccgtcttcgatcacggcctcgaatgggtaggctacaccttccagaagccgtacaagtttttcaggttattcccgtacatatattacaagattttattgataatttataaactctttaaaaaagacagctga

SEQ ID NO: 6866 - protein, 268 aa, Unknown
  Obtained from environmental sample
  DOMAIN (76)...(248): Glycosyl transferase WecB/TagA/CpsF family
  misc_feature (1)..(268): Xaa is any amino acid
MRGCRPDYITGEGFVAVETKIERQTVKLLNVPIDIIAPEQLGDIVYGFLNDKKEHNIVLLSLWDLLRARRNSEYRYFIQRASLVIPISKSLVSGIKFLKGVKAYRYMPFDFIVNLLTILEAREFSCYLLGGKTKIILKTEKNIRQTFPKLRIVGRFPGYFRKHDEATIIKAIKKASPSLLLAGKGVRGGEKWIARNNLALGDSGMRLWCSDIFDVFAEKKKHPSRSVFDHGLEWVGYTFQKPYKFFRLFPYIYYKILLIIYKLFKKDS

SEQ ID NO: 6867 - DNA, 369 bp, Unknown
  Obtained from environmental sample
  misc_feature (1)..(369): n is a, c, g, or t
atgtcgtcggtggaagaaaacttcgcgcaggaagggcgattcgagtctgccggatcgtggcgcggcggcaacaagcggtgggcagatttggctgaaagcacgaaggaggctagggcaagaaaaggcaagtggccggggaagaagttgcagatgtcgcagggcggtctggcggcgtcaatcagcaagaatgtgtccggcaatgaagtgtcggtcggcaccaacaaagcatacggcgcgatacaccagttcggcgggatggcggggcgcggtcgcagtgtatcaattctggcgcggccgtttttagtcgttcaagatgaagatgttgaggatatgatggatgtgttggacaagcacatctcgaaacaataa

SEQ ID NO: 6868 - protein, 122 aa, Unknown
  Obtained from environmental sample
  DOMAIN (1)...(120): Phage virion morphogenesis family
  misc_feature (1)..(122): Xaa is any amino acid
MSSVEENFAQEGRFESAGSWRGGNKRWADLAESTKEARARKGKWPGKKLQMSQGGLAASISKNVSGNEVSVGTNKAYGAIHQFGGMAGRGRSVSILARPFLVVQDEDVEDMMDVLDKHISKQ

SEQ ID NO: 6869 - DNA, 444 bp, Unknown
  Obtained from environmental sample
  misc_feature (1)..(444): n is a, c, g, or t
atgatgaatagggggcttgccatcggcatggcttcggccctgatgcttacaatgatccgcattcttttgcaaatcccgataatgtggattctgatcccaggttatgtttttgcgcttgctctgactttttttgtaccgaggatttttaccggcattgcctttgactccggcggcgtctgctccggcccaatgagctcaacattccttctccctttcgcgatgggagcctgcaatggcgccaagggtgatattttggtagacgctttcggtattgtggctatggtcgccatgactcccttaatcgtgatccagatgatgggcctaatctaccagtacagaaacaggcaagctgcggcaatggcccaggctcaggcagccgccatcggcattaccgacaggaagatcaactggggtggcattaccgtttttggagaagagggatag

SEQ ID NO: 6870 - protein, 147 aa, Unknown
  Obtained from environmental sample
  SIGNAL (1)...(23)
  DOMAIN (1)...(111): Protein of unknown function (DUF1538)
  misc_feature (1)..(147): Xaa is any amino acid
MMNRGLAIGMASALMLTMIRILLQIPIMWILIPGYVFALALTFFVPRIFTGIAFDSGGVCSGPMSSTFLLPFAMGACNGAKGDILVDAFGIVAMVAMTPLIVIQMMGLIYQYRNRQAAAMAQAQAAAIGITDRKINWGGITVFGEEG

SEQ ID NO: 6871 - DNA, 336 bp, Unknown
  Obtained from environmental sample
  misc_feature (1)..(336): n is a, c, g, or t
gtgcatgtccgggacgcggcccgggccttcgccctggccttggccgccgacccggcggccgtctccggccaggtcttcaacatcggctccaaccaccagaacatccagttcaaggatttggccgggctcctccagcgggtcctgccccaggcccgagtggaaaccgtgccccagccgccggatttacgggactatcatgtggcctttgacaaggtggcccgggttttgggtttccggccggaattcgagcccgaggatggtttgcgggaaatcgccgccggcctggccgccgggacctggggcgacccagacgccccccggcaccgcaactcttga

SEQ ID NO: 6872 - protein, 111 aa, Unknown
  Obtained from environmental sample
  SIGNAL (1)...(23)
  misc_feature (1)..(111): Xaa is any amino acid
MHVRDAARAFALALAADPAAVSGQVFNIGSNHQNIQFKDLAGLLQRVLPQARVETVPQPPDLRDYHVAFDKVARVLGFRPEFEPEDGLREIAAGLAAGTWGDPDAPRHRNS

SEQ ID NO: 6873 - DNA, 597 bp, Unknown
  Obtained from environmental sample
  misc_feature (1)..(597): n is a, c, g, or t
ttgttnnnnnngggatatcgcgagctgtgcttttcgtacgaaatacgcgttcaaaaactttccgagagtaaaaaaattctggtcacggggcagggagcaaacgatataggaatgcaatgtggcggatggacaataacatggcagggttcgcacggcaatataacaaaaggaacaacaatactggaaggaataaaagaggcaactaaagacaaagcatcaattacttatgccgaagacgggaacgcggccggttctttcgacgcggtaatcgccgtaataggagagaacccttacgcggaaaccgaaggcgaccgttcaggcaatatcagtattcgggacagagatatggaaactctgcgaaaaagctatggatatcactgtcctgtaatcgttattatgctgtcaggccgcccgatgaatatcggcgatgagtataagaaatgggacgcttttatcgccgcgtggctgcctggtactgaaggcaacggaattgcggatgttcttttcgggaataaaagttttgcgggacggactccatacacatggcgaaaaaccttaaatggagaggtaatatatcccttgggatttgggctgtag

SEQ ID NO: 6874 - protein, 198 aa, Unknown
  Obtained from environmental sample
  DOMAIN (18)...(198): Glycosyl hydrolase family 3 C terminal domain
  misc_feature (1)..(198): Xaa is any amino acid
MXXXGYRELCFSYEIRVQKLSESKKILVTGQGANDIGMQCGGWTITWQGSHGNITKGTTILEGIKEATKDKASITYAEDGNAAGSFDAVIAVIGENPYAETEGDRSGNISIRDRDMETLRKSYGYHCPVIVIMLSGRPMNIGDEYKKWDAFIAAWLPGTEGNGIADVLFGNKSFAGRTPYTWRKTLNGEVIYPLGFGL

SEQ ID NO: 6875 - DNA, 408 bp, Unknown
  Obtained from environmental sample
  misc_feature (1)..(408): n is a, c, g, or t
atgaattactctatagcggancatttggctggtatagcgcaagaaaattcatttattattgatacatgcgccgaagatattgacttatcaaagtatggaataacgcatgcaaaatgtattgatgataatcttataaaacgaataataggatatccaattgatataaagaaagataaaacgcagaggctggaatgtggctgtgttgcaagtattgatattggcgcgtataatacttgccctcacggctgcctgtattgttatgcaaatgataaccattctgttgtagccaggaatattcagaagcataataaaaattctccgctattgattggtgaatatctggaagaagacagatatactgaaagagaggcaagaagcaatataattgcccaacaaaatttattttaa

SEQ ID NO: 6876 - protein, 135 aa, Unknown
  Obtained from environmental sample
  misc_feature (1)..(135): Xaa is any amino acid
MNYSIAXHLAGIAQENSFIIDTCAEDIDLSKYGITHAKCIDDNLIKRIIGYPIDIKKDKTQRLECGCVASIDIGAYNTCPHGCLYCYANDNHSVVARNIQKHNKNSPLLIGEYLEEDRYTEREARSNIIAQQNLF

SEQ ID NO: 6877 - DNA, 849 bp, Unknown
  Obtained from environmental sample
  misc_feature (1)..(849): n is a, c, g, or t
atgatcattccccctatagaaaaccaccgacggcgagaaaaaggcgtactggtgtaccccgtgtattcgcggcgttccggcggtctttcggtgggaataaacctctttcccgataaaaaacattgcccttttgactgcccttattgcgaggtttttcctttctcctctaacgtggtgttttcctgtgaacaaatggaaactgacttacgcgccgccattgccgccgcattggaacaaaacgtgccggttaaggatatttgcttttccggcaacggtgagccgtcgttatcttccgattttcccaatgcgttgaaacaggcggattgtatccgccgcgaaatggttccctccgcggaactggtgcttattaccaacggcgcgggacttttacaaccgaatattttttccctgctgaaagatgccaccaagggtgcccccgcactgaatatttggctgaaactggacgcgggcagttcccagtggtatcaaaagataaatcgcgcggcaattccttttgaacaacttgttgcgaagatgaaagaatttgccgtatccgctccggtgacgattcaaaccctgctctgcgcggtagacggcaaaagcccgcctgatgaggaagcgcaggcatgggaaacattaacgcttgaattagctgcaaccgcggcggcagttggcggtattcgtaaagtgcaaatatacggcaaagcccgccctgcgccggaagaccccaagtcacaggcgctgccggtggagtatcttgaaaaacgagccgcatctctgcgccaagtgcttgcggcggcaaataaccgcgcacaaattccagtgccgccggtggaagtttttccctga

SEQ ID NO: 6878 - protein, 282 aa, Unknown
  Obtained from environmental sample
  misc_feature (1)..(282): Xaa is any amino acid
MIIPPIENHRRREKGVLVYPVYSRRSGGLSVGINLFPDKKHCPFDCPYCEVFPFSSNVVFSCEQMETDLRAAIAAALEQNVPVKDICFSGNGEPSLSSDFPNALKQADCIRREMVPSAELVLITNGAGLLQPNIFSLLKDATKGAPALNIWLKLDAGSSQWYQKINRAAIPFEQLVAKMKEFAVSAPVTIQTLLCAVDGKSPPDEEAQAWETLTLELAATAAAVGGIRKVQIYGKARPAPEDPKSQALPVEYLEKRAASLRQVLAAANNRAQIPVPPVEVFP

SEQ ID NO: 6879 - DNA, 663 bp, Unknown
  Obtained from environmental sample
  misc_feature (1)..(663): n is a, c, g, or t
ttggaatacccagaaaaagagcataaatacgatatgctaaaactctccaatacttttgaaaaagcacctaacaagccagaatatgttaaattaatttttgaaaacggggttccggttgccttaaacaacagaagaatggatgctgtgtctctgcttgccaagctcaatataataggcggcaaacacgcctgcggtttgctagacattgttgaaaacaggctagttggtttaaagagcaggggagtttacgaaacaccgggcggtaccattttatacaaggctcatgagcttttagaatcccttgttcttgacaaagcaacgcttgcagaaaaacaaaaactctcccaaacttatgcctttttggtttacaacggcgaatggttcacacctcttcgtcaggcattggatgcttttgttaaagaaactcaaaaaacagtttctggtgttgtaaccttaaagctttacaagggaaacataattccggcagggatagaaagcccctttagcctttacgacccaaacttgggcggttttagtgacgttgatttttacgaccaaaaagatgccacaggctttattcgttgttttggacttccgcttaaaactaggggaatgttgcttggcaaaaaaagtccggttaaatttgggaaaacattagtgtaa

SEQ ID NO: 6880 - protein, 220 aa, Unknown
  Obtained from environmental sample
  DOMAIN (7)...(206): Arginosuccinate synthase
  misc_feature (1)..(220): Xaa is any amino acid
MEYPEKEHKYDMLKLSNTFEKAPNKPEYVKLIFENGVPVALNNRRMDAVSLLAKLNIIGGKHACGLLDIVENRLVGLKSRGVYETPGGTILYKAHELLESLVLDKATLAEKQKLSQTYAFLVYNGEWFTPLRQALDAFVKETQKTVSGVVTLKLYKGNIIPAGIESPFSLYDPNLGGFSDVDFYDQKDATGFIRCFGLPLKTRGMLLGKKSPVKFGKTLV

SEQ ID NO: 6881 - DNA, 483 bp, Unknown
  Obtained from environmental sample
  misc_feature (1)..(483): n is a, c, g, or t
ttgatcgcggccggaaggaaggatccccatttgggcggttccggcgtcggcggcggcgccattctcggactggccaaaaaactcctttccctttcaaacttttcggacatcatggaactggctaaactgggaaacctcgatccggtggatcttctccttgaagacatcatggtgaccgatatcagttttctcaataaaaaatccacagcttccaacttcgggaaaatgctcgacactgcccgaaacgaagatattgctctgggaatcatcaacatggtctaccaggtgatcggaatgatcgcggtctttgccgcaaggagccggaacatcgaacgggtgatcgttaccggttcgggcagccgcaatcctctgggccaaagcatactggcggaaataacgcgcatgcattccgttgtctttgaataccctgatgacgcggagtataccaccgctattggcgccggcctctgcggaataaaataa

SEQ ID NO: 6882 - protein, 160 aa, Unknown
  Obtained from environmental sample
  misc_feature (1)..(160): Xaa is any amino acid
MIAAGRKDPHLGGSGVGGGAILGLAKKLLSLSNFSDIMELAKLGNLDPVDLLLEDIMVTDISFLNKKSTASNFGKMLDTARNEDIALGIINMVYQVIGMIAVFAARSRNIERVIVTGSGSRNPLGQSILAEITRMHSVVFEYPDDAEYTTAIGAGLCGIK

SEQ ID NO: 6883 - DNA, 504 bp, Unknown
  Obtained from environmental sample
  misc_feature (1)..(504): n is a, c, g, or t
atgacaaaagtcaaacttggcagaaccaatctggaagtaagcaaggacgccttcggcgccctgccgttacagcgggcctcaatggaagatgctgtaaaaattctgcggaaaacattggacgggggcatcaatttttttgacagcgcccggagttattcggacagcgaagaaaaaatcggtgctgccctttcgcagcgccggggagagtttttcattgccaccaaaagtcattccaaaaccggcgcggatctgctgaaagatctgaataccagccttgaaaaactgaagaccgatcatatcgacgtttatcagtttcacaaccccggttttgttccccggcccggcgacgaaaacggcctctacgacgcggctctgagggcagggccgaaaagtaaatccgcttcatcggcatctccaatcacaggctcagcctggcaaaagaggcgtgggaagcggccctttcgacactctccaggttccctttcagtatctttccaccgatga

SEQ ID NO: 6884 - protein, 167 aa, Unknown
  Obtained from environmental sample
  misc_feature (1)..(167): Xaa is any amino acid
MTKVKLGRTNLEVSKDAFGALPLQRASMEDAVKILRKTLDGGINFFDSARSYSDSEEKIGAALSQRRGEFFIATKSHSKTGADLLKDLNTSLEKLKTDHIDVYQFHNPGFVPRPGDENGLYDAALRAGPKSKSASSASPITGSAWQKRRGKRPFRHSPGSLSVSFHR

SEQ ID NO: 6885 - DNA, 354 bp, Unknown
  Obtained from environmental sample
  misc_feature (1)..(354): n is a, c, g, or t
ttgcctattgctgattatttcggcaataaggaaggatattcaaaagataaaatgaatgttgatgtagaaattgaaaaggggcatgttctcgatgttccggttttaacaaaaagcccgtggatttttgaattagaggttaatagaacaataactttaaaaaatagcaacatttttttatgtaatatcaggaatgtcttagctgaagaatatttgtgtgatgaaacattaagcgttgaaaaatgtataaaaacaattctacctgtgcataccgtaagtcaaaaatattattcatggaatggaaatgaagtttgtaattggggagaggcaatgaaggaaataacaaatgatagttaa

SEQ ID NO: 6886 - protein, 117 aa, Unknown
  Obtained from environmental sample
  misc_feature (1)..(117): Xaa is any amino acid
MPIADYFGNKEGYSKDKMNVDVEIEKGHVLDVPVLTKSPWIFELEVNRTITLKNSNIFLCNIRNVLAEEYLCDETLSVEKCIKTILPVHTVSQKYYSWNGNEVCNWGEAMKEITNDS

SEQ ID NO: 6887 - DNA, 618 bp, Unknown
  Obtained from environmental sample
  misc_feature (1)..(618): n is a, c, g, or t
ttgcgctgcttcaaccgtatgcacgacctctaccccaacaaccgctacgagggcgagatactcatgaacgagcgcaacatcctggaccgctcggtcgatcttatccagctccgcagttccctgggcatggtctttcagcggcccacccccttccccatgagcattttcgacaatatcgcctacggcctgcgcttgaaaaaaatccggaatataaatattctgagggagcgggtggaaaaggccctgcggcaggccgccctctgggacgaagtcaaggaccgccttaaggacaacgcggcgggactttccgggggccagcagcagcggctggtcatagcccggaccctggccgtggagccggaagtcatcctcttcgatgaggccaccagcgccctggatcccatttccacccagaagatagaagacctcatgatggagctgaaaaaggaattcaccctcgtcgccgtgacccacaacatgcagcaggccgcccgcatttccgactacacggccctcatgtatctgggcaaactggtggagttcggcgacacggacaccatcttcacccgcccccgccacaagatgaccgaagaatatgtcaccggacgtttcggttga

SEQ ID NO: 6888 - protein, 205 aa, Unknown
  Obtained from environmental sample
  DOMAIN (1)...(176): ABC transporter
  misc_feature (1)..(205): Xaa is any amino acid
MRCFNRMHDLYPNNRYEGEILMNERNILDRSVDLIQLRSSLGMVFQRPTPFPMSIFDNIAYGLRLKKIRNINILRERVEKALRQAALWDEVKDRLKDNAAGLSGGQQQRLVIARTLAVEPEVILFDEATSALDPISTQKIEDLMMELKKEFTLVAVTHNMQQAARISDYTALMYLGKLVEFGDTDTIFTRPRHKMTEEYVTGRFG

SEQ ID NO: 6889 - DNA, 318 bp, Unknown
  Obtained from environmental sample
  misc_feature (1)..(318): n is a, c, g, or t
atgcgggcggcctgctgcatgttgtgggtcacggcgacgagggtgaattcctttttcagctccatcatgaggtcttctatcttctgggtggaaatgggatccagggcgctggtggcctcatcgaagaggatgacttccggctccacggccagggtccgggctatgaccagccgctgctgctggcccccggaaagtcccgccgcgttgtccttaaggcggtccttgacttcgtcccagagggcggcctgccgcagggccttttccacccgctccctcagaatatttatattccggatttttttcaagcgcaggccgtag

SEQ ID NO: 6890 - protein, 105 aa, Unknown
  Obtained from environmental sample
  misc_feature (1)..(105): Xaa is any amino acid
MRAACCMLWVTATRVNSFFSSIMRSSIFWVEMGSRALVASSKRMTSGSTARVRAMTSRCCWPPESPAALSLRRSLTSSQRAACRRAFSTRSLRIFIFRIFFKRRP

SEQ ID NO: 6891 - DNA, 882 bp, Unknown
  Obtained from environmental sample
  misc_feature (1)..(882): n is a, c, g, or t
gtggagggggattttgttatggatgaaagcgaaaatcatacgccgcgccagctaaggcgcaaaagacaccccaaaaaacctgcttttggggcggaaatggcgtttgccccggcgtttttcggatgcctgatttccctgttctttaccgcgccgctagtcgggcggctggtcggcagcagggaggccgaaagcctggaaatacagttcatagccgccgaagggcgggccgccgaagaacagaccaccgaggccgaaaaggctcgggttttctcccacaaggagtcggcccgcggggatttaatccaggaactgtaccggcagccggaaagccgggagcgcgtggtggactttttcgccgaaatttgcccctcccgcgagattgccgaggctatcctggccagcgccgacgcatacggcatttcccccgcccttgcccttgccttaggctgggaggaaagccgcttgaacccccgggcagtcagcgccaaaaaccgcgacgaaagcatagaccgggggctttttcagctcaacaaccggtctttcccccgccttgagatacctttgtttttcaaccccgaaatgaacgcccggtacggcatgggccatttgcgccactgcctggacaccggcggcacggaaatcgccgccctggcgatgtacaacgccgggacggtgcgggtgcggaattccggcgcgcccaaagccaccctggattacgtcagccgcattctggagaaccgttcaacgattgagaacctgttccaggagcgtgaaaaccagttccgccagcaggttgatcccccccttcccgacattgccgaagcgaaacccgtccgtcgtcggctggcgcctttgacccccctggcggggcgcgcccggtaa

SEQ ID NO: 6892 - protein, 293 aa, Unknown
  Obtained from environmental sample
  DOMAIN (129)...(243): Transglycosylase SLT domain
  misc_feature (1)..(293): Xaa is any amino acid
MEGDFVMDESENHTPRQLRRKRHPKKPAFGAEMAFAPAFFGCLISLFFTAPLVGRLVGSREAESLEIQFIAAEGRAAEEQTTEAEKARVFSHKESARGDLIQELYRQPESRERVVDFFAEICPSREIAEAILASADAYGISPALALALGWEESRLNPRAVSAKNRDESIDRGLFQLNNRSFPRLEIPLFFNPEMNARYGMGHLRHCLDTGGTEIAALAMYNAGTVRVRNSGAPKATLDYVSRILENRSTIENLFQERENQFRQQVDPPLPDIAEAKPVRRRLAPLTPLAGRAR

SEQ ID NO: 6893 - DNA, 432 bp, Unknown
  Obtained from environmental sample
  misc_feature (1)..(432): n is a, c, g, or t
atgcctgatttccctgttctttaccgcgccgctagtcgggcggctggtcggcagcagggaggccgaaagcctggaaatacagttcatagccgccgaagggcgggccgccgaagaacagaccaccgaggccgaaaaggctcgggttttctcccacaaggagtcggcccgcggggatttaatccaggaactgtaccggcagccggaaagccgggagcgcgtggtggactttttcgccgaaatttgcccctcccgcgagattgccgaggctatcctggccagcgccgacgcatacggcatttcccccgcccttgcccttgccttaggctgggaggaaagccgcttgaacccccgggcagtcagcgccaaaaaccgcgacgaaagcatagaccgggggctttttcagctcaacaaccggtctttcccccgccttga

SEQ ID NO: 6894 - protein, 143 aa, Unknown
  Obtained from environmental sample
  misc_feature (1)..(143): Xaa is any amino acid
MPDFPVLYRAASRAAGRQQGGRKPGNTVHSRRRAGRRRTDHRGRKGSGFLPQGVGPRGFNPGTVPAAGKPGARGGLFRRNLPLPRDCRGYPGQRRRIRHFPRPCPCLRLGGKPLEPPGSQRQKPRRKHRPGAFSAQQPVFPPP

SEQ ID NO: 6895 - DNA, 639 bp, Unknown
  Obtained from environmental sample
  misc_feature (1)..(639): n is a, c, g, or t
atgggcggatattcccacacgagtaccgccacaggcggcagcataccccttattgccgacatctcaagctgcgccctttccgaaccgctggacgtgagcaaattcggcctgctgtacgcgggggcgcagaaaaacctcggcccggcaggcgttaccgtcgttatcatccgggaggatttaatcggccacgcgcccccttccacaccggcaatgctccgctatgacatccacgcggaagaaaattcactgtacaacacgccgccgtgctacggaatatacgtcatcggcctggtgcttgaatggctgaaaaacctcggcggcattcccgccattgccgagattaaccgcgaaaaggccggaatgttgtaccagtacctggacagctcaaagctgttttattcgccggttgaaaagcccttccgcagcctgatgaacatcccctttgtcgcccgcgttcaaaaccctgatgaacgggtaaaactggaaagccgtttcgtcaaagaagcggcggaaacgggcctgataaacctggccgggcaccgcctggtcggcggcatgagggcgagcatttacaacgccatgcccgttgacggcgtgcgggccttgcttcagtttatggaaaagtttgaaaggagttaa

SEQ ID NO: 6896 - protein, 212 aa, Unknown
  Obtained from environmental sample
  DOMAIN (1)...(202): Aminotransferase class-V
  misc_feature (1)..(212): Xaa is any amino acid
MGGYSHTSTATGGSIPLIADISSCALSEPLDVSKFGLLYAGAQKNLGPAGVTVVIIREDLIGHAPPSTPAMLRYDIHAEENSLYNTPPCYGIYVIGLVLEWLKNLGGIPAIAEINREKAGMLYQYLDSSKLFYSPVEKPFRSLMNIPFVARVQNPDERVKLESRFVKEAAETGLINLAGHRLVGGMRASIYNAMPVDGVRALLQFMEKFERS

SEQ ID NO: 6897 - DNA, 822 bp, Unknown
  Obtained from environmental sample
  misc_feature (1)..(822): n is a, c, g, or t
atggaatccggcgtgcgcgggcttgagcgggaaatagcccgctgcataagacgcgtcgcgcgtcaggctgtctccggcggttacggcgcgcctgttccaggcggcgaggaaaaatttgtcaatgcttttaggaaaaccattaaaagcgacggcctggaaaaactgctgggccggcggaaatacaaaaacgacgttatgttccgcgaggcaaggataggggtaagctgcgggcttgcctggacggaaacaggcggcgcgacgcttccggtggaaagcgcccgctttgaaggaagcggagaagtgcttatgaccggtaacctgggcgacgtaatgaaggagagcgcccgcatcgccctttcctacctgcgcagcgtccagcacagctataaatatgtagtcaagaacattggcaagaccgattttcacatccacgtccccgaaggggcaattcccaaggacggcccctcggcgggcctcgcaatcgcgacttccctgctttcaacgctctgccaaaaagcgcctcggcccggaatcgccatgacaggcgagcttaccctgacggggcgggtgctgcccataggcggtctcaaggaaaaactgttagccgcaatccgcaacggtattgaaaaagtactcctccccgccgacaaccgcggcgaatgggacgaacttgacaaggacattacaactgcgattaacgttgaattcgtcgagaatgccttggacgcgtttgcgattctgtttgataagggaataaaaatggggttcggggttcggggttcggggaccagggtaaagagcaggcagcaatcaaaaaagtga

SEQ ID NO: 6898 - protein, 273 aa, Unknown
  Obtained from environmental sample
  DOMAIN (46)...(250): Lon protease (S16) C-terminal proteolytic domain
  misc_feature (1)..(273): Xaa is any amino acid
MESGVRGLEREIARCIRRVARQAVSGGYGAPVPGGEEKFVNAFRKTIKSDGLEKLLGRRKYKNDVMFREARIGVSCGLAWTETGGATLPVESARFEGSGEVLMTGNLGDVMKESARIALSYLRSVQHSYKYVVKNIGKTDFHIHVPEGAIPKDGPSAGLAIATSLLSTLCQKAPRPGIAMTGELTLTGRVLPIGGLKEKLLAAIRNGIEKVLLPADNRGEWDELDKDITTAINVEFVENALDAFAILFDKGIKMGFGVRGSGTRVKSRQQSKK

SEQ ID NO: 6899 - DNA, 816 bp, Unknown
  Obtained from environmental sample
  misc_feature (1)..(816): n is a, c, g, or t
atgttgaaacggccggagcagggggcgaacgcgctcgacaaattaaaacgtaacacttttttcggacgagagaaagaaaacctgatttacccgattacccttgcaaatatgtttctgcacggaattgagcaaccgtccgtttggcacggcaacacgctcaccggcaacgaagtcttcggcggactgttcagcggcacatcgggacgctttgacgtggtacttaccaatcctccattcggcggcaaagagggaaaagaggcgcagaccgcctttgcctataagaccggatcgacgcaggttttattcctacagcacgtcatagacagcctaaaaaagggagggcgttgcggtatcgttttagacgagggtgtcctattccgcacaaacgaaattgctttcgtgcaaaccaagcgaaaactgctcgacgattgcaacgtctacgcgattatcagcctacccggtggcgtattctccgcagccggcgcgggcgttaagacaaacatactgctgttcgaaaaaggcaagcggacggaacgtatttggtactacgacctatcagacataaaagtaggcaagcgtaccccgttcaccatagacaaattcgacgatttcttccgcctactacccgaccgcgccgacagcgagcgcagttggtcggtggacaggcaaaccatcgaaaaaaacggcttcgatatcaaggcggtaaaccccaaccgcaaggtcgaacacgacacccggactccccaggagcttattgcgctgatagaggaaaaacagggagagattatgacggcaatagcggagttgaagcggtag

SEQ ID NO: 6900 - protein, 271 aa, Unknown
  Obtained from environmental sample
  DOMAIN (1)...(244): N-6 DNA Methylase
  misc_feature (1)..(271): Xaa is any amino acid
MLKRPEQGANALDKLKRNTFFGREKENLIYPITLANMFLHGIEQPSVWHGNTLTGNEVFGGLFSGTSGRFDVVLTNPPFGGKEGKEAQTAFAYKTGSTQVLFLQHVIDSLKKGGRCGIVLDEGVLFRTNEIAFVQTKRKLLDDCNVYAIISLPGGVFSAAGAGVKTNILLFEKGKRTERIWYYDLSDIKVGKRTPFTIDKFDDFFRLLPDRADSERSWSVDRQTIEKNGFDIKAVNPNRKVEHDTRTPQELIALIEEKQGEIMTAIAELKR

SEQ ID NO: 6901 - DNA, 972 bp, Unknown
  Obtained from environmental sample
  misc_feature (1)..(972): n is a, c, g, or t
atgtattccggcgttgttttgcaaattgaaagagcaaatgaaaatcaacacgacccctttgaggtgataattgaggaggctcgcaacaaaagaggcgtaaagcacgataaccagcttccagaagaggatttgaaatctataattgagaaattcaaaaaacttgttttggaaaaaacgggaaaaccttttccgagcgacccttacaagcagcttgagggcgcaataggagccgtgtttgcaagctggatgaacgagcgcgcaattctctatcgccgcaaatacaaaattcccgaagaatggggaaccgcagttaatgttcagtctatggtatttggcaatatgggcgatagctccggcacaggagtagcctttacccgcaaccctgccactggagaaaacgagttttacggagaatttttggtgaatgcccaaggcgaagatgtggtggctggaattcgcacgccgcttaaaatttctgcaatggcaaccactccacatttggagcattgttacaaagaactctgcgatgttcgcaaacatcttgaaaaagaattcggagatatgcaagattttgaatttacaatagaaaacgctaaactttatatgcttcaaacacgcaacggcaaacgcacggcaagggcttatgtgaaaattgcacgtgatatggtgaaccaaaaacttatgacacccgaacacgcaatagaaagcgcagacccagaagctttagaacagttgcttgcacccgtgtttcataaagagtcttaccaaagagcgattaacgcanaccttttgctgacaaaaggcttgccagctggcccaggagctgctaccggacccttgcctttacagcagaaaaagcggaacgctggtcaactcacgggcctgtggtttttgcacgtgtggaaaccanccccgaagattgcgcgggatgattgctgcaaaagtatagtaacgcaaaaggcgtgtgtctag

SEQ ID NO: 6902 - protein, 323 aa, Unknown
  Obtained from environmental sample
  DOMAIN (1)...(235): Pyruvate phosphate dikinase, PEP/pyruvate binding domain
  misc_feature (1)..(323): Xaa is any amino acid
MYSGVVLQIERANENQHDPFEVIIEEARNKRGVKHDNQLPEEDLKSIIEKFKKLVLEKTGKPFPSDPYKQLEGAIGAVFASWMNERAILYRRKYKIPEEWGTAVNVQSMVFGNMGDSSGTGVAFTRNPATGENEFYGEFLVNAQGEDVVAGIRTPLKISAMATTPHLEHCYKELCDVRKHLEKEFGDMQDFEFTIENAKLYMLQTRNGKRTARAYVKIARDMVNQKLMTPEHAIESADPEALEQLLAPVFHKESYQRAINAXLLLTKGLPAGPGAATGPLPLQQKKRNAGQLTGLWFLHVWKPXPKIARDDCCKSIVTQKACV

SEQ ID NO: 6903 - DNA, 945 bp, Unknown
  Obtained from environmental sample
  misc_feature (1)..(945): n is a, c, g, or t
ttgatggccgagcatcaaagccnggatggagaaccaataccatgcgaaatgacgcttatccggactaaatataaaaaagattttactatcatggcgtatgtgcgggatttacgcgagcaaaagagaataatgaaaatgatggaatggcgcacccacctgctggatatggttaacagcgccgcgactatccttttatcaagcaataacgccgattcctttgaatcctcgatgatgagaagttttgagcttgtgggacattgtttggacgttgaccgcgttcagatttggcgcaatgaaatgtttgaaaacgagatgcactatgttctcagatatgaatggctcagcgaatacggcaaaaattgcaagaaagttcccatggggcttcatttcccctacagcatgaaaaaagaatgggaagatctgtttttatacggcgatcatataaatatgccgcttaaggatatgtcgcctgaagatcaggctttccttggatattacgaaatgaaatccatcgttatgatccccatgtttttggaaaacgaattttggggcttcttcagtattgacgactgccgcaacgagcgcgtgttttcaagcgaggaaatcagcatattgtcttccgcaggattaatgatgagcagcgccgtaaaccgcaatatacaaatgaataaaatgcgcgaagccgacgagcgcatgcatataatgatcgacgcggccccgctttgcgcgattttctgggataaagatcttaaccctatcgattgtaatcaggaaactataaaaatgtttgaactgtcaagcaagcaggaatttatcaataaattcgggttattatcgcctgagtatcagctggacggaaaacattcaagggagaaaggcgccgaacttgttaaaaaagcgctggaagaaggattttccaattttgagtggatgcatcaaaaatga

SEQ ID NO: 6904 - protein, 314 aa, Unknown
  Obtained from environmental sample
  DOMAIN (72)...(216): GAF domain
  misc_feature (1)..(314): Xaa is any amino acid
MMAEHQSXDGEPIPCEMTLIRTKYKKDFTIMAYVRDLREQKRIMKMMEWRTHLLDMVNSAATILLSSNNADSFESSMMRSFELVGHCLDVDRVQIWRNEMFENEMHYVLRYEWLSEYGKNCKKVPMGLHFPYSMKKEWEDLFLYGDHINMPLKDMSPEDQAFLGYYEMKSIVMIPMFLENEFWGFFSIDDCRNERVFSSEEISILSSAGLMMSSAVNRNIQMNKMREADERMHIMIDAAPLCAIFWDKDLNPIDCNQETIKMFELSSKQEFINKFGLLSPEYQLDGKHSREKGAELVKKALEEGFSNFEWMHQK

SEQ ID NO: 6905 - DNA, 522 bp, Unknown
  Obtained from environmental sample
  misc_feature (1)..(522): n is a, c, g, or t
atggtagagaacaatacggcggcaatgaaacgggaatgttcccgccttatcggtttcttgcaaggctctatgcccaaaaacaagcaggttttgccggaagacattgaaaaatggctttcgcataacagggaggaatcgccgtttacgcttttttcccgcatcgcggcgggcgatatttccaaagcgcttgaatcgctggctgtcatgacaggcgcgaaggaaagcgctcagggcattttagcgggtctcgcgtggcagttcagaaagcttgcctcttatttaactttggctgcaagaggagaaacaaataactacgttgagttaaaaaaactcgggctgtccgcgcccaaggttaaagaagattttgccgccgccgcctgccgctacaattcggacgctgtcgaggcttgcctcgcgcttaccgcaaaatatgacacattactgcgctctacagccgccgcctttgaaaacattttaatggacaggtatataatagcaattgttaattgcggcgattcgtaa

SEQ ID NO: 6906 - protein, 173 aa, Unknown
  Obtained from environmental sample
  misc_feature (1)..(173): Xaa is any amino acid
MVENNTAAMKRECSRLIGFLQGSMPKNKQVLPEDIEKWLSHNREESPFTLFSRIAAGDISKALESLAVMTGAKESAQGILAGLAWQFRKLASYLTLAARGETNNYVELKKLGLSAPKVKEDFAAAACRYNSDAVEACLALTAKYDTLLRSTAAAFENILMDRYIIAIVNCGDS

SEQ ID NO: 6907 - DNA, 366 bp, Unknown
  Obtained from environmental sample
  misc_feature (1)..(366): n is a, c, g, or t
gtgatattgcgctgccgcctgaattgtgccatgcttataaacatggacgaagcaatccgggcggaactggataaactcaagaaaatcatcataactgccattcctgttgaacaaatatacctcttcggctcatacgcctacggaaaaccgcataaggattccgaccttgacctgtacgtggtattaaaagacggccttcccatgcgggacctcaacgcgggtctgcaaatccgtatggccgttgtccgtgaaacgtccatgtccattgatattgtggcaaaaaagaaaagggattttgacagccgcccggacggtataactctggagcggaaagtaaaccgggacgggataagaatctatggctaa

SEQ ID NO: 6908 - protein, 121 aa, Unknown
  Obtained from environmental sample
  DOMAIN (19)...(113): Nucleotidyltransferase domain
  misc_feature (1)..(121): Xaa is any amino acid
MILRCRLNCAMLINMDEAIRAELDKLKKIIITAIPVEQIYLFGSYAYGKPHKDSDLDLYVVLKDGLPMRDLNAGLQIRMAVVRETSMSIDIVAKKKRDFDSRPDGITLERKVNRDGIRIYG

SEQ ID NO: 6909 - DNA, 660 bp, Unknown
  Obtained from environmental sample
  misc_feature (1)..(660): n is a, c, g, or t
ttgatggccgagcanttgcaatatttggagggcatttattcaagcgttgttctaaaagacattgttaagcgactggcggttacggatgttgcaacgcttgaactcataataagatatctatatgcagaaatagggaattttcaaaatatcaataaaatttccaacaccttgactagttatggaaataaaatcagcgataaaacggtagcccgttatataaatggcattgaaaacagcttgcttgtttatagagcagagcgttacaatgtgaaagggaaaaaagtatttgcaaataacgcaaaatactatgctgtggataacggtttgaggaggttgatagctggcgacagaagcgaagattacggtcatattttggaaaatattgtttatttggaacttttgagacgtggctatcaggtttttgtaggtgttgtggataatttggaagtggattttttggctaaaaaatcaaacggcgagcaattatatgttcaagtttcatacaacacggaaaaagagggtattttgaaaagagaactttgcccgttggaagcgataaaagaccagcatccaaaattgcttttgacaatggatgaaattctaccggagcagaatataaatgggattgtcaagacaagtgttttgaaatggttgctgtga

SEQ ID NO: 6910 - protein, 219 aa, Unknown
  Obtained from environmental sample
  misc_feature (1)..(219): Xaa is any amino acid
MMAEXLQYLEGIYSSVVLKDIVKRLAVTDVATLELIIRYLYAEIGNFQNINKISNTLTSYGNKISDKTVARYINGIENSLLVYRAERYNVKGKKVFANNAKYYAVDNGLRRLIAGDRSEDYGHILENIVYLELLRRGYQVFVGVVDNLEVDFLAKKSNGEQLYVQVSYNTEKEGILKRELCPLEAIKDQHPKLLLTMDEILPEQNINGIVKTSVLKWLL

SEQ ID NO: 6911 - DNA, 318 bp, Unknown
  Obtained from environmental sample
  misc_feature (1)..(318): n is a, c, g, or t
ttgtttgatgctatgtctcgaagagaaggtcataatgcgttggactccatactcaaagagcttacagattacacagaattccatttcgtncacgaagaagaagctctggaaaaatataactatccggggtttgccgcacataagaaagagcacgaaagttttgtaagcaaaatagaggatactaaaaagaaatatgaagaaggtgccataatgctaactatacccttagttgattttttaacatcctggataaaagaacatattttgaaatcggatatgggttattcaccatttttggtcaaagctggtatgaagtaa

SEQ ID NO: 6912 - protein, 105 aa, Unknown
  Obtained from environmental sample
  DOMAIN (43)...(98): Hemerythrin HHE cation binding domain
  misc_feature (1)..(105): Xaa is any amino acid
MFDAMSRREGHNALDSILKELTDYTEFHFVHEEEALEKYNYPGFAAHKKEHESFVSKIEDTKKKYEEGAIMLTIPLVDFLTSWIKEHILKSDMGYSPFLVKAGMK

SEQ ID NO: 6913 - DNA, 585 bp, Unknown
  Obtained from environmental sample
  misc_feature (1)..(585): n is a, c, g, or t
atgggtaaaacctatgtgtttgtaaaccagaaaggaggggtcggcaagacaacttccgccctgaatatcggggcgtatatggccgaggaaggcaaaagcgtgctgcttgtggattttgacgcgcaggcgaacctttccagcggagtaggggcaaatccgcccaaaccaggaatatatgaacttttatccggcatggcaaccatcgaacaggccgtaaaaaaaaccgccgtgccccgcctcgacgttattcccgccagcattgacctttccggcgccgcggtagagcttatcgaacaggaagacagaaacatgtttctgaaaaaaaccctcgtgcccctaaaagacagctatgattttattttgatcgactgcccgcccagcctgggcatacttacccttaacggcatggccgccgccgatgccgtgctaattccaatgcaatgtgaatacttcgcgatggaaggccttagcctccttttgcaaaccatacagcgaattcagcggggcattaaccgttccctgggtataggcggaattttctttaccatgtacgaccccagaaccaggcttgcccaggatgtgtaa

SEQ ID NO: 6914 - protein, 194 aa, Unknown
  Obtained from environmental sample
  DOMAIN (5)...(192): CobQ/CobB/MinD/ParA nucleotide binding domain
  misc_feature (1)..(194): Xaa is any amino acid
MGKTYVFVNQKGGVGKTTSALNIGAYMAEEGKSVLLVDFDAQANLSSGVGANPPKPGIYELLSGMATIEQAVKKTAVPRLDVIPASIDLSGAAVELIEQEDRNMFLKKTLVPLKDSYDFILIDCPPSLGILTLNGMAAADAVLIPMQCEYFAMEGLSLLLQTIQRIQRGINRSLGIGGIFFTMYDPRTRLAQDV

SEQ ID NO: 6915 - DNA, 843 bp, Unknown
  Obtained from environmental sample
  misc_feature (1)..(843): n is a, c, g, or t
ttgnnnnnnggtttgatggccgaggggaggccgcgaaaatcccacaggccagtggacagcgccgagcgcatctttgagggcgaagcctttaaggtagaaaacctctgggtagatatgcctggcgaaaccgtgcgggatatctcattcacagtaaagaaaggcgaaattttcggcatagggggccttgcagggcagggcaagctgggcattcccaacggcatcatgggccttttcgcagcgggcggaaaagcctggatagatggcgaaagccttgagttggggtaccccaggaagatacttgacgccggcgccgcctttgtttccgaagaccgccggggcgttggccttttgatggacgaaagccttgagtggaacattgcctttggggttatgcagatcaagggcgggaacttgaaaaaattcctgggcgggcttttcagcttacgggacgaaaaggccatgcgccatcttgccgaggaatatattaaaaaactggaaataaaatgtacgggctcaaagcaggccgccaaagagctttcaggcggcaaccagcagaagatctgcctttccaaggcctttgctctggaacccaagctgctctttgtttccgagcccacccgtggcatagatgtgggagccaaaaaaatcgttttggatacccttcgcttctacaatcagagcaaaggaaccacaattgtgatgatttccagcgagcttgaggagcttcgctcgatctgcgacagaatcgccattgtcgacgaagggaagatcgccgggatcctgtccccccagtcgcccgccgcagaatttgggttgttgatgtcaggagagaaaatagcatga

SEQ ID NO: 6916 - protein, 280 aa, Unknown
  Obtained from environmental sample
  DOMAIN (54)...(255): ABC transporter
  misc_feature (1)..(280): Xaa is any amino acid
MXXGLMAEGRPRKSHRPVDSAERIFEGEAFKVENLWVDMPGETVRDISFTVKKGEIFGIGGLAGQGKLGIPNGIMGLFAAGGKAWIDGESLELGYPRKILDAGAAFVSEDRRGVGLLMDESLEWNIAFGVMQIKGGNLKKFLGGLFSLRDEKAMRHLAEEYIKKLEIKCTGSKQAAKELSGGNQQKICLSKAFALEPKLLFVSEPTRGIDVGAKKIVLDTLRFYNQSKGTTIVMISSELEELRSICDRIAIVDEGKIAGILSPQSPAAEFGLLMSGEKIA

SEQ ID NO: 6917 - DNA, 330 bp, Unknown
  Obtained from environmental sample
  misc_feature (1)..(330): n is a, c, g, or t
atggacgagacactggcaagcgccgccgtggatctgtccgggcgcccgtttctttttatcgacgtgaagctttccggaacgccgcttatcgccgcctcaaacggcgaagggggagaagcttttcattttcagaccgacacggtagaagatttttggcagggttttgccaacgccgcgctttgtaatttgcatctggaaattatccgcgggcgcagcgatcatcacaaaatagaagccatgtttaaggcagccgcccgcgcccttcgcgccgcctgtgaaatcgacgagcggagccgcgatacagttccctcgacaaagggaagtctttaa

SEQ ID NO: 6918 - protein, 109 aa, Unknown
  Obtained from environmental sample
  DOMAIN (1)...(89): Imidazoleglycerol-phosphate dehydratase
  misc_feature (1)..(109): Xaa is any amino acid
MDETLASAAVDLSGRPFLFIDVKLSGTPLIAASNGEGGEAFHFQTDTVEDFWQGFANAALCNLHLEIIRGRSDHHKIEAMFKAAARALRAACEIDERSRDTVPSTKGSL

SEQ ID NO: 6919 - DNA, 948 bp, Unknown
  Obtained from environmental sample
  misc_feature (1)..(948): n is a, c, g, or t
atgatttggcaaagccattccgagggcttaggtgaagctctngggccaatcgggatgggtttcacagctctcgatgtgtttatggaggctagaaaaatttatattatatttacnagattaaatactacgctggatatggattttgcaaacaagctggttcatgatatatacttgtctattgctaaaatagtgaaaacaggggtatgtacggctgtagaaccattgggtttgatagactttggggcttctgtntgcattatgacgtacggagcagcatcggatatgatagttgatgctaaaaatttctataaaaaggctgaatacgatcaacaaccaggtgccttaaaaccaggtacttggaggtatgaggccgaatggaagctgtatgccaatgatatgtcaatgaccgacattcttgagttacgtagtcatgtatatgattggatgaagaaaggtgcaagtgaagaatggcttacaaacataggacttatcaaaaaagatgactacaccgttaattacgacacagacgggggtacaccatggacgatcccctcgaaaacggtcaaatggaatgatagcgtgtctccggggatatctgtcaccaaaaaggactacaagttaagcggctggagcgtgatctctggcggtcccaccggaaaagcagcgggtggcttatattacagtacgtataatgagctggcattcgattacacagtcaaatctatcacgataaaggcccagtggattaaggattatgtctacaccgtaaccttccacaataactccggaaccaccgaggcaaacccgaggacaaagattgttaaatccccggaaacaaagatcaacactttgcccactcccccgacgaagacaggctataattttgaaggttggtctactattcaaaacggaccccttcattgcttttacagaaacaacacccgttga

SEQ ID NO: 6920 - protein, 315 aa, Unknown
  Obtained from environmental sample
  misc_feature (1)..(315): Xaa is any amino acid
MIWQSHSEGLGEALGPIGMGFTALDVFMEARKIYIIFTRLNTTLDMDFANKLVHDIYLSIAKIVKTGVCTAVEPLGLIDFGASVCIMTYGAASDMIVDAKNFYKKAEYDQQPGALKPGTWRYEAEWKLYANDMSMTDILELRSHVYDWMKKGASEEWLTNIGLIKKDDYTVNYDTDGGTPWTIPSKTVKWNDSVSPGISVTKKDYKLSGWSVISGGPTGKAAGGLYYSTYNELAFDYTVKSITIKAQWIKDYVYTVTFHNNSGTTEANPRTKIVKSPETKINTLPTPPTKTGYNFEGWSTIQNGPLHCFYRNNTR

SEQ ID NO: 6921 - DNA, 849 bp, Unknown
  Obtained from environmental sample
  misc_feature (1)..(849): n is a, c, g, or t
ttgggaagcaaggaagttgaacctgaaaacaaagctgtaatttcatctgtacaaaatgttatacaacaaacaaacgttcaaccgtcaagagcggaacaggtaatgaaagcttttgctagtgcatatcctcatcaaatagaaagaattgaattccgtaataacgattgggctgttatgcttcgaggtacatggtattattatgccgaaggaaagcttttgccgcaaaatttgttatcaaattcggcaaactacagttcgcagcctttttataattatatggaggaattgccggcatggaaagctcccagcgccgaagaagcatcgcgttatcgcagtatggccggtaacagaacccaaaacccgccccgccgctcgccgcaattttttgatgatctatggcgggcgcataaccgcaatgaagcttacgacagggtaaaaacgattcgttttcttggaaaatccgcaagcgtccattatttaattttggaaaatctctcgcttgtagaggaacaaatccttgcagccgcaaaagttaacccgcaggttcaaagctggataaacagcatcgattcacttgaagggtggagttggcggaatatagcagaaacccaatcacgctcctatcattcatacggattggcagttgatattatgccaaagtcatacggcggaaaggaaacatactggctttgggcatccaacagaagatccgactggtggaatatttcgtataatgaacgttatcacccgcctgcggcagttataaaagcatttgaaacttacggctttatctggggcggtaagtggctttattttgatancgatgcanctttgagtanccgtccctga

SEQ ID NO: 6922 - protein, 282 aa, Unknown
  Obtained from environmental sample
  misc_feature (1)..(282): Xaa is any amino acid
MGSKEVEPENKAVISSVQNVIQQTNVQPSRAEQVMKAFASAYPHQIERIEFRNNDWAVMLRGTWYYYAEGKLLPQNLLSNSANYSSQPFYNYMEELPAWKAPSAEEASRYRSMAGNRTQNPPRRSPQFFDDLWRAHNRNEAYDRVKTIRFLGKSASVHYLILENLSLVEEQILAAAKVNPQVQSWINSIDSLEGWSWRNIAETQSRSYHSYGLAVDIMPKSYGGKETYWLWASNRRSDWWNISYNERYHPPAAVIKAFETYGFIWGGKWLYFDXDAXLSXRP

SEQ ID NO: 6923 - DNA, 645 bp, Unknown
  Obtained from environmental sample
  misc_feature (1)..(645): n is a, c, g, or t
gtgaatcttaccatgattgccaacgacgcgtacaaacagaaactggccgtggccctggcctcgggaaaggcgccggattgtttcttctcctggggaggcggccctatgcaggaatttattaaaaacagacagatcgcggatcttacaccctatatgaacgccaacaactacaaggcgaaatttctggacggcgcgattacccaggccacttatcagggaaaaatctggggcgttcccatgcagaacgtcgcggttggcgtaatattttataataaagaaatttttaacaaatacaggctgaccgtacccgccacgataagggaactggaaacggtctgcgacaccctcaagaaaaacaatattttcccttttgctttgggaaataaaacccagtggacaggctcaatgtactatatggccctggctacccgccggggcggaatccagccctttatcaaggcggttgacggttccggcactttcctggaccccgcttttatttatgccggtgaaaaaattcaggaatgggtcaggaaaggctattttattaccggctttaacggtctggactgggattcgggccaggcgcgctcgccaatctaccgcgggggaagccgccatggtttttatgggaagctggtttaa

SEQ ID NO: 6924 - protein, 214 aa, Unknown
  Obtained from environmental sample
  misc_feature (1)..(214): Xaa is any amino acid
MNLTMIANDAYKQKLAVALASGKAPDCFFSWGGGPMQEFIKNRQIADLTPYMNANNYKAKFLDGAITQATYQGKIWGVPMQNVAVGVIFYNKEIFNKYRLTVPATIRELETVCDTLKKNNIFPFALGNKTQWTGSMYYMALATRRGGIQPFIKAVDGSGTFLDPAFIYAGEKIQEWVRKGYFITGFNGLDWDSGQARSPIYRGGSRHGFYGKLV

SEQ ID NO: 6925 - DNA, 738 bp, Unknown
  Obtained from environmental sample
  misc_feature (1)..(738): n is a, c, g, or t
gtggtcgctatttactcaactttcatgcagcgcgctgtcgatcaggtgattcacgacgttgctcttcaaaagcttccggtcgttttcgcgcttgacagatcaggctttgtcgccgcggacggtgaaactcatcaggggttgtttgacatctctcttttcaggagcgcgccgaatatgtcaatcctctgccccgctggcgaaacagagcttcagcttatgcttgactgggcgctggaacaaagctcaggccctgccgttattcgctatcccaaagcgtattgtccgcgtgagaacgccgccttttcagcgcccgttgaaacagggcggggcgtcttgttgtcaaaaagcggcggggatatttgtctcttttttacaggcagcctttacagggaagttcaggaagccgcgtcaattttgaaagaacaggggctttgcgccgatctttataatctcaggtttgtaagaccggttgacgaaggttatcttgtcggtctgattaatgaatataaacttgccgtcttcattgaggaaggcgttaaagaaggcgggttcggcgaatacgcgtccgctttggcgcggcagtacgattgcggggcaaggacaatagcgctttgcgcaaaaagcggtttcattgaaaacgatcaggctctggggacaagagaagagcttttggctgctaacgggcttgacggaaagggtatcgcggaacaggtttccggtattttattaagaaagtaa

SEQ ID NO: 6926 - protein, 245 aa, Unknown
  Obtained from environmental sample
  DOMAIN (1)...(96): Transketolase, pyridine binding domain
  misc_feature (1)..(245): Xaa is any amino acid
MVAIYSTFMQRAVDQVIHDVALQKLPVVFALDRSGFVAADGETHQGLFDISLFRSAPNMSILCPAGETELQLMLDWALEQSSGPAVIRYPKAYCPRENAAFSAPVETGRGVLLSKSGGDICLFFTGSLYREVQEAASILKEQGLCADLYNLRFVRPVDEGYLVGLINEYKLAVFIEEGVKEGGFGEYASALARQYDCGARTIALCAKSGFIENDQALGTREELLAANGLDGKGIAEQVSGILLRK

SEQ ID NO: 6927 - DNA, 468 bp, Unknown
  Obtained from environmental sample
  misc_feature (1)..(468): n is a, c, g, or t
atggcaaagaagcgactacaaggcatcccatggatgccagaagacttcaaagattttatacaatcactaaacttaaatgaggttcgatatctgcttattggcggatgggccgtggggttatatgggaaccccagagcaacgaaagatatagattttttggtttcaacagacagcgaaaatttggaaaaactgcaaaaagcgttgcttgcctttggtgcgcccgccattgacattgagcatttcaaagaagaaggcaatgtaataagaatgggaagttcccctattcaaatagacattataaacaaagcagatggtattgatattgacgattgctattcgagaaaaacaacgatcaatgctgaggaaataaaaatttccgtcatttcaagggaagatttgattataaataaaagagcaagcggtagaagcatggatattgccgatgcagaaaaacttgaaaaccagtag

SEQ ID NO: 6928 - protein, 155 aa, Unknown
  Obtained from environmental sample
  misc_feature (1)..(155): Xaa is any amino acid
MAKKRLQGIPWMPEDFKDFIQSLNLNEVRYLLIGGWAVGLYGNPRATKDIDFLVSTDSENLEKLQKALLAFGAPAIDIEHFKEEGNVIRMGSSPIQIDIINKADGIDIDDCYSRKTTINAEEIKISVISREDLIINKRASGRSMDIADAEKLENQ

SEQ ID NO: 6929 - DNA, 432 bp, Unknown
  Obtained from environmental sample
  misc_feature (1)..(432): n is a, c, g, or t
ttggcggaatatacnntgatcttaggcgaaaaaaaagataaaagtttatggaaagtaggcgttcaagacccgtacggaagcagaggttcatacatcgggatattgcagataacggaaaaaactgtggtaacatccggcgtttatgagcgtttctttgaggaagaaggaataatgtatcatcatattttttcaccttctaacgggtttccggttaataacggctttttatctgttatcattattacaaataactcaatgaatgcggacgctctctcaactgcggtctttgtccttggctatgaaaaaggaaggaaacttgttgaatcgcttcctgaaacagaggcaatttttatttttgaagacagaagtatacgcaaaactgccggaacggattttaccctcactgataattcttttcgtcttgtagattaa

SEQ ID NO: 6930 - protein, 143 aa, Unknown
  Obtained from environmental sample
  misc_feature (1)..(143): Xaa is any amino acid
MAEYTXILGEKKDKSLWKVGVQDPYGSRGSYIGILQITEKTVVTSGVYERFFEEEGIMYHHIFSPSNGFPVNNGFLSVIIITNNSMNADALSTAVFVLGYEKGRKLVESLPETEAIFIFEDRSIRKTAGTDFTLTDNSFRLVD

SEQ ID NO: 6931 - DNA, 549 bp, Unknown
  Obtained from environmental sample
  misc_feature (1)..(549): n is a, c, g, or t
gtgcctgtcggcaaagatcaggtacagcatatcgagatggcgcaggatatagcgcagtcggtaaacgccaactacggacagcaggtactgaaaatccctcaggcggctgttcaggaaaacgccgcaatagtgccgggtcttgacggacggaagatgagcaagagctacggtaatgttatccctcttttcgctcccgaaaaagctctgcgcaaaactatcatgaggataaccacaaattcccaaaccgttgaagaaccgaaaaatcccgatgaaagccagattttccaactctataaattatttgcggactcttcagagcaaaccgctcttgccgaccgataccgcgctggaggcatgggctggggagacgcaaaagaagaattgttccgtgtagtaaaccgctgtctttcacccataagggaacgctatgacgcaataatggcggacattccttcgctcgataaaattttggcgcagggagcggagaaagcgcgtcctatcgccgccgctaccgttaaacgtttcagaaaagcggcaggagtagattga

SEQ ID NO: 6932 - protein, 182 aa, Unknown
  Obtained from environmental sample
  misc_feature (1)..(182): Xaa is any amino acid
MPVGKDQVQHIEMAQDIAQSVNANYGQQVLKIPQAAVQENAAIVPGLDGRKMSKSYGNVIPLFAPEKALRKTIMRITTNSQTVEEPKNPDESQIFQLYKLFADSSEQTALADRYRAGGMGWGDAKEELFRVVNRCLSPIRERYDAIMADIPSLDKILAQGAEKARPIAAATVKRFRKAAGVD

SEQ ID NO: 6933 - DNA, 702 bp, Unknown
  Obtained from environmental sample
  misc_feature (1)..(702): n is a, c, g, or t
atggaattgggtattttataccccccttttatttcacacttgtactcatcaaattcacaactggaggaaagtatggtgtacggttacatcagggtcagcacggacaagcaaacggtcgataaccagcgttttgaaatagagaggttttgtttaagaaacagcctaaccattgaccactggattgaggaaacaatcagcgggaccaaactgccggaaaaacgcctgttggggtcgctgcttgccgaggctaaaataggcgatctcatcgtttgttccgaattgtcccgattggggaggaatatgttcatgatcatgtcgatattgaaccatttaatgataaacggcgtgaaaatttggactattaaggacaattatcggcttggagacgatattcaggctaaagttctggcgtttgccttcggtttatcggctgaaatagagcgaaacctcatctcccaaaggacaaaagaagcccttgcccgcaagcggtcagagggtgttagattgggcaggccgccggggagaaagtccgacaggctcaaactttcggggcatgaggcggaaattctgtcgctgacaggagaaaacgtctcaaaaagcgccattgcccgcaaattcggcgtttgccggaagacggttatctcgtttttgaaaagacagcaaaaaccgccaaattccggcataagggcttgtaacgattag

SEQ ID NO: 6934 - protein, 233 aa, Unknown
  Obtained from environmental sample
  DOMAIN (26)...(168): Resolvase, N terminal domain
  misc_feature (1)..(233): Xaa is any amino acid
MELGILYPPFISHLYSSNSQLEESMVYGYIRVSTDKQTVDNQRFEIERFCLRNSLTIDHWIEETISGTKLPEKRLLGSLLAEAKIGDLIVCSELSRLGRNMFMIMSILNHLMINGVKIWTIKDNYRLGDDIQAKVLAFAFGLSAEIERNLISQRTKEALARKRSEGVRLGRPPGRKSDRLKLSGHEAEILSLTGENVSKSAIARKFGVCRKTVISFLKRQQKPPNSGIRACND

SEQ ID NO: 6935 - DNA, 321 bp, Unknown
  Obtained from environmental sample
  misc_feature (1)..(321): n is a, c, g, or t
atgccacttcatataaatgccacagatttggataccataatccaaattttttaccgtgaattgccagatgcaaaggtttatgcctttggttcccgcgtttcagatgccgagcctagcaacgaggctgatttggatttagccattatgacagggaaaataatttcttctgagcgcatgattgccattgaacgctctatggctgaagcaggactcccatttacagtggacgtttttgactatgcaaaattgacaagcaagctgagaaatttagttgaagaaaaacacatagccataagaggcgcaggcagagttgagggttaa

SEQ ID NO: 6936 - protein, 106 aa, Unknown
  Obtained from environmental sample
  misc_feature (1)..(106): Xaa is any amino acid
MPLHINATDLDTIIQIFYRELPDAKVYAFGSRVSDAEPSNEADLDLAIMTGKIISSERMIAIERSMAEAGLPFTVDVFDYAKLTSKLRNLVEEKHIAIRGAGRVEG

SEQ ID NO: 6937 - DNA, 705 bp, Unknown
  Obtained from environmental sample
  misc_feature (1)..(705): n is a, c, g, or t
atgctgaaagaaaagcatggagtgggggaaacgacaatccgcgacattgtggaagaattgcaaagaccgggccgcgatccgagggaaagctgctccatgcccattatgcgcaaagggatagtcaactttgaagacctccgcgaggggatgatgatcatcggcaaaatcaaaaatgtcgttgactttggcgcgtttgtggacctggggataaaggaagccgcgctgcttcacgtttccgagatgagcgattcgtttgtcaaagatccgttggaattggtgaaagtgggggatacaaaggaattcagaatcgtcagcctggatcaggatcggcggcgcatagggctttcgctgagaagcgggaaaagagaggatgccccgcaccataaagccgggcatggtcctgcaaaggcggtaattgtaaagacggcatcagccgcaaagccggggaaagagaccgaaaaggccggggcaaggcccgcccctgtaaagtccgcttcccacaagccggcccctcgccatgaagaaagtcattctgccaaaatgcgccctgaatcccgtccggacgaaaaacgccatgatgaaaaatatcaggaagtaaaacatcagggcgtaaaacgaccagaagcgccggaggctgtgcatcatgacgacggaaccatgtacaatccctttgccgaggctttcaaaaagatggggctgaagtag

SEQ ID NO: 6938 - protein, 234 aa, Unknown
  Obtained from environmental sample
  DOMAIN (45)...(118): S1 RNA binding domain
  misc_feature (1)..(234): Xaa is any amino acid
MLKEKHGVGETTIRDIVEELQRPGRDPRESCSMPIMRKGIVNFEDLREGMMIIGKIKNVVDFGAFVDLGIKEAALLHVSEMSDSFVKDPLELVKVGDTKEFRIVSLDQDRRRIGLSLRSGKREDAPHHKAGHGPAKAVIVKTASAAKPGKETEKAGARPAPVKSASHKPAPRHEESHSAKMRPESRPDEKRHDEKYQEVKHQGVKRPEAPEAVHHDDGTMYNPFAEAFKKMGLK

SEQ ID NO: 6939 - DNA, 615 bp, Unknown
  Obtained from environmental sample
  misc_feature (1)..(615): n is a, c, g, or t
atggagcaagagacagcagagcttcgagcgagcattgccgagcagggaaagcgtatagatgagcaaggaaagcgtatggaagagcagggaaaacgcttagatgcagtgtgcgaaaggttagacgaccaaggtaagcgtatggataaagtgcttgatgagttgcgtgtgaataatcatagagttggagagcttactaataaagttgggcgtatagtggagaaagttgttgttcctaatatagttgataaatttaatgagaaagggtttaagtttgatgctgtttctactaatgttgagtttttgaatgaaaagaaaagcggaaatcttacggagatagatgctttgcttgaaaatgggaagtttgtgatagctgttgaaactaaaatggatttgagtgtgagcgatgttaatgcacatataaaacgcttgcaagcacttcgcaaagttccaaggttcaagggtaaaaagatatatggggcggtttctactgcgatagcaagggaaaagcctgttaattatgctttgtcgaaaggtttttatgttttgcagcagcccgatgttatggcggttaggattatagatttcccaaagggtcattctgctaaggcttggtag

SEQ ID NO: 6940 - protein, 204 aa, Unknown
  Obtained from environmental sample
  misc_feature (1)..(204): Xaa is any amino acid
MEQETAELRASIAEQGKRIDEQGKRMEEQGKRLDAVCERLDDQGKRMDKVLDELRVNNHRVGELTNKVGRIVEKVVVPNIVDKFNEKGFKFDAVSTNVEFLNEKKSGNLTEIDALLENGKFVIAVETKMDLSVSDVNAHIKRLQALRKVPRFKGKKIYGAVSTAIAREKPVNYALSKGFYVLQQPDVMAVRIIDFPKGHSAKAW

SEQ ID NO: 6941 - DNA, 780 bp, Unknown
  Obtained from environmental sample
  misc_feature (1)..(780): n is a, c, g, or t
gtggcggaatttgcggatatggtgaaattgccgcaaggtggggatattatagaatttattaagtggcaggttgggtcaatgcttgggatagaggttggggcgcaacccaattcagccgcgcaaacatcgtccgcgtctgtgtcaaacacttcatctgttaagcaacctgttaatcaggttactgcgccgacaaatcgaccgtccggtatagacggttctggtatattaaccgacagcaggaacgggaagcgatataggacggtggtgataggcgggaagagatggatggctgagaatatgaatatagagacggcgaactcgcactgttataaggatagtcctgatagttgcgcgaagtatggcaggttgtacacttggaacgcggcgatgacggcgtgtccgagcgggtggcatttgccttctcgtgatgagtgggtaacattggcgatggccgtcggaggtaccggtaattatggttcaagcggtacagctggtagggcactgaaatcgtcaagcggttggacagatcttcgcgggaacataagcgacaaaggtaccgacgagtacgggttttcggccttgccgggcggcttacgtagttacagcagtttcaacggcggctatttcttcgaaatcggcagctacggctactggtggacggctacgaagggcaatggcggcttcaacttcaaccggcgcatgaactacgccagcgacaacgtgggcgagtccggcgacgatacgagatacggctactctgtgcgttgcgttatggattag

SEQ ID NO: 6942 - protein, 259 aa, Unknown
  Obtained from environmental sample
  misc_feature (1)..(259): Xaa is any amino acid
MAEFADMVKLPQGGDIIEFIKWQVGSMLGIEVGAQPNSAAQTSSASVSNTSSVKQPVNQVTAPTNRPSGIDGSGILTDSRNGKRYRTVVIGGKRWMAENMNIETANSHCYKDSPDSCAKYGRLYTWNAAMTACPSGWHLPSRDEWVTLAMAVGGTGNYGSSGTAGRALKSSSGWTDLRGNISDKGTDEYGFSALPGGLRSYSSFNGGYFFEIGSYGYWWTATKGNGGFNFNRRMNYASDNVGESGDDTRYGYSVRCVMD

SEQ ID NO: 6943 - DNA, 744 bp, Unknown
  Obtained from environmental sample
  misc_feature (1)..(744): n is a, c, g, or t
gtgataatgtcagaacttggaacgcaaaacgcggcacagagcgaaaacagcctgccaccggaagcattgactctgttaaaaaatgtaagagaaatgttgaatgaagaaaaatggacaagggccgccctgagcaattactcaaccggtcagttcaaggaattcgattctttgctgaaggaagccagagatctgcgggtagtcgacgaaatgaaaaaagactgcgacgagcatcttgcccattccaagaacagcattatcgccctgtacctttccggcatgatcgccctgtcgcgccagataattgacgacgcggcgatgataaaccttgtgacaatcttcgcggataaccacaaatgggcaatcgtaaaatacctctgcgagcgcatccttgaccacggcgaatcgaaatacgcgctgcgttcccttatcgactgctgtaaaaacgaaaacaacgaggaagctctctacggaatatgggagcgccttgtaaaagtggactacgaggaagcggaactggcaaagtcccttgccgagcattatgaaaaaacgggcaatgacgaagcggcggttgactactataaaaaagccctgcaccgctttatcaacaaatcgctttttgccaatgtcaaggaaatatgggaaaaactccttatctattgcccggatgacatcgacttcttcttccatgtgcagaaggaaggtcgccaaaaccctcagcgaaggagagggccatcgacctcttga

SEQ ID NO: 6944 - protein, 247 aa, Unknown
  Obtained from environmental sample
  misc_feature (1)..(247): Xaa is any amino acid
MIMSELGTQNAAQSENSLPPEALTLLKNVREMLNEEKWTRAALSNYSTGQFKEFDSLLKEARDLRVVDEMKKDCDEHLAHSKNSIIALYLSGMIALSRQIIDDAAMINLVTIFADNHKWAIVKYLCERILDHGESKYALRSLIDCCKNENNEEALYGIWERLVKVDYEEAELAKSLAEHYEKTGNDEAAVDYYKKALHRFINKSLFANVKEIWEKLLIYCPDDIDFFFHVQKEGRQNPQRRRGPSTS

SEQ ID NO: 6945 - DNA, 822 bp, Unknown
  Obtained from environmental sample
  misc_feature (1)..(822): n is a, c, g, or t
atgaaccattttacccaaaaaccggcgcgttcggggaaaaaattcaccgttccngaatacgcttttgccgatcagcataagaaacaaaaaaaagaacgttcaaaaaaaagcgggttcagtttccctgttccttcacttgcgacagtcgcggttatcgcggggacagttttgatatgccttgccgcgcttaaatgggaagatttaaggataaaattaccggaaaggtacgcttttcaactggacgctgaaaatattgactctcagacaaggcaatacgcctcgacaggggttccgtcactattatcagtaagctctagcgccattcctgatgagcctgtgccggtaaaaaggccggaggaagcggaaacggctaaaaaaccggactccgcggggacagagctcaatcaacctgctaaaaagtcagaagaacccgccaaagatttaattactttcaaatggcagcaatataaagtacaaaaaggggattccgtatcgggaatagccaaaaaattcggagtttcccttggcgcggttatcgcttccaacaatatccgcaacgcgagacagcttaaagaaggggttaacttaagaataccgaatattgacggcatcccgtactcaataaaagccggggacaacctttcaaagatttccgtgtctttcaatgttccgctggaagttatactcgatatcaacgacttaaagagcgatgtaatcaaggcgggggaaaccatttttatcccgggcgcgagaatgaacgatttagaccttagaatgagccttggggaactgtttatctaccctgtctcaggcaagcactaa

SEQ ID NO: 6946 - protein, 273 aa, Unknown
  Obtained from environmental sample
  DOMAIN (156)...(199): LysM domain
  misc_feature (1)..(273): Xaa is any amino acid
MNHFTQKPARSGKKFTVPEYAFADQHKKQKKERSKKSGFSFPVPSLATVAVIAGTVLICLAALKWEDLRIKLPERYAFQLDAENIDSQTRQYASTGVPSLLSVSSSAIPDEPVPVKRPEEAETAKKPDSAGTELNQPAKKSEEPAKDLITFKWQQYKVQKGDSVSGIAKKFGVSLGAVIASNNIRNARQLKEGVNLRIPNIDGIPYSIKAGDNLSKISVSFNVPLEVILDINDLKSDVIKAGETIFIPGARMNDLDLRMSLGELFIYPVSGKH

SEQ ID NO: 6947 - DNA, 558 bp, Unknown
  Obtained from environmental sample
  misc_feature (1)..(558): n is a, c, g, or t
atggaaaaaataccttatgttctgcgccccgaaaatataaacggcggcgctcccggcataggagagaaaatttacaaaacagaaaatgaaaagatcgccgttattgttcttttgggccagaacggttttaacaggcttcacgccaacaacccctttaccgccctgcccccccttcttgaacggcttaaaaaacaaactccgtatattattgtggattttcacgctcaggcaaccgccgaaaaaaagactctcttttttacagccgacggaaattgttcggcggttataggctctcacacaaaagtccaaaccgccgatgaaacaatactccccaacggaacggcggtcatcaccgatgccggaaggacgggaagcattcaatcagtcggcggcagcgatataaattcccgcgttaaagaatacataacaggcatccccgactggacaaaagaagcctgggaccaacccgaactgcaaggagtatatctggacataggcaaagacggcaaagcgctatcaatagaaagagtacgcatacctgtaagagcgccggaataa

SEQ ID NO: 6948 - protein, 185 aa, Unknown
  Obtained from environmental sample
  misc_feature (1)..(185): Xaa is any amino acid
MEKIPYVLRPENINGGAPGIGEKIYKTENEKIAVIVLLGQNGFNRLHANNPFTALPPLLERLKKQTPYIIVDFHAQATAEKKTLFFTADGNCSAVIGSHTKVQTADETILPNGTAVITDAGRTGSIQSVGGSDINSRVKEYITGIPDWTKEAWDQPELQGVYLDIGKDGKALSIERVRIPVRAPE

SEQ ID NO: 6949 - DNA, 930 bp, Unknown
  Obtained from environmental sample
  misc_feature (1)..(930): n is a, c, g, or t
atgggcaaccttttacncgataaatacgcngaaggttttcctattcaccgtttttacgcggggaacgaaaatgttgacgcaattgagtctcttgccgcagaggaagcccgcaaacttttcggcgccgagtacgccaatgtgcagccccattgcggcgcggacgccaatctgcttgcgtactgggcgattctttccgtgcgggttgaaaacccggcgctggaaaaatggggcgaaacgaatctttacaaacttaccgatgcccaatggaaagaattaaaatcctcgctgggaaaccagcgctttttgggtcttgattattattccggcggacatttgacacacggttaccggaataatatttccagccggatgtttgatgtttacggatattcggtttcccaggaaaccggcgtacttgattatgatcaaattgaaaaacaggcgcttgaggtgcggcctttgattctgttggcgggttattcagcgtatccccgcaaaatcaactttaagcggatgcgggaaattgccgacaaagccggcagcgtctttatggtggatatggcccactttgccggactggtggcgggcaaagtctttaccggagaatatgatcccgtaccctgggcgcatgtcgtcactaccacgacgcataaaacgctgcgcgggccgcgcgccggactggtgctttcaacaaacgaatttgccgaagcgctggacaagggctgccccttgacgatgggcggtcccctcccccacgttatcgccgccaaagcaattactttccgcgaggcatctgccccggaattcagaagttacgcggggcggattgttgaaaattgccaggcgcttgccgcctcctgcatgaaaaacnggccttacggtgcttaccggcggcacggacaatcacttgctgctgatcaatgtgcataa

SEQ ID NO: 6950 - protein, 309 aa, Unknown
  Obtained from environmental sample
  DOMAIN (1)...(303): Serine hydroxymethyltransferase
  misc_feature (1)..(309): Xaa is any amino acid
MGNLLXDKYAEGFPIHRFYAGNENVDAIESLAAEEARKLFGAEYANVQPHCGADANLLAYWAILSVRVENPALEKWGETNLYKLTDAQWKELKSSLGNQRFLGLDYYSGGHLTHGYRNNISSRMFDVYGYSVSQETGVLDYDQIEKQALEVRPLILLAGYSAYPRKINFKRMREIADKAGSVFMVDMAHFAGLVAGKVFTGEYDPVPWAHVVTTTTHKTLRGPRAGLVLSTNEFAEALDKGCPLTMGGPLPHVIAAKAITFREASAPEFRSYAGRIVENCQALAASCMKNXPYGAYRRHGQSLAADQCA

SEQ ID NO: 6951 - DNA, 408 bp, Unknown
  Obtained from environmental sample
  misc_feature (1)..(408): n is a, c, g, or t
ttggtttcttctcttaccagtatggcatcgcggccgcgggacatgggtaattttgtgcttggcccggtaacactggggattggcgctttacttgcccttttgcttttcccttcacctgcggcttgtatcggtatttatgccctggcttttggcgacggttttgccggacttatcggaagattgtttggcaagattcgcccggcttttcttttcggtaaaagcgtagaaggttcattggcctgttttacagcgacttttatctccgcttatctggtttcgcagaattaccttgtttctctgtgcgccgctttcaccgccacagcggtagaggctctgccgctggaagactatgataatgttgccctgcctttggtcgtaggcgctgtcgttaagttagcattgcattaa

SEQ ID NO: 6952 - protein, 135 aa, Unknown
  Obtained from environmental sample
  DOMAIN (15)...(132): Cytidylyltransferase family
  misc_feature (1)..(135): Xaa is any amino acid
MVSSLTSMASRPRDMGNFVLGPVTLGIGALLALLLFPSPAACIGIYALAFGDGFAGLIGRLFGKIRPAFLFGKSVEGSLACFTATFISAYLVSQNYLVSLCAAFTATAVEALPLEDYDNVALPLVVGAVVKLALH

SEQ ID NO: 6953 - DNA, 342 bp, Unknown
  Obtained from environmental sample
  misc_feature (1)..(342): n is a, c, g, or t
ttggccgaggccgaggtgcctatagaccagctgaccccgaaactcctgcgaataataaaacaaatggaacccttcggccccggcaacatgcgccccgttttgttgacaaaaggcctgaaacaccgctatccgcccaaaatagtcggtcagaaacatttaaagatgtcgttgacagacgggaaagtagttatggacgccatcgccttcggaatgggggagaggctgccggaggtaagcgcagcaaagacgttggacgtcgccttcggactggaggataacgagtggaacgggaaggtcagtttgcagatgaatgtaaaggggatcgttgcaggcgatagttga

SEQ ID NO: 6954 - protein, 113 aa, Unknown
  Obtained from environmental sample
  misc_feature (1)..(113): Xaa is any amino acid
MAEAEVPIDQLTPKLLRIIKQMEPFGPGNMRPVLLTKGLKHRYPPKIVGQKHLKMSLTDGKVVMDAIAFGMGERLPEVSAAKTLDVAFGLEDNEWNGKVSLQMNVKGIVAGDS

SEQ ID NO: 6955 - DNA, 402 bp, Unknown
  Obtained from environmental sample
  misc_feature (1)..(402): n is a, c, g, or t
atgactttccttgatacggatattatttcatattttttggacgcgaatattaaggttaaagaaaaaatattggaaataatcgatagagatgagcctatttgtacaacagtaataaatatctatgaaatattaaaaggatttaagtggaaaaacaataaaaagaaagagtctcaattcaaggaatttttggaagacgttgttatctttaccatagataacgatgtaataaacatcgcatctgatttatatgcgaatttacgaaaaaccggaaaaactataggggatgccgatatattaatcgccgctatcgtaataaaaagcaatggaattttggtatccaacaatataaagcattacgaagacatagacggattagcattggtaaattggttgaaggaataa

SEQ ID NO: 6956 - protein, 133 aa, Unknown
  Obtained from environmental sample
  DOMAIN (2)...(130): PIN domain
  misc_feature (1)..(133): Xaa is any amino acid
MTFLDTDIISYFLDANIKVKEKILEIIDRDEPICTTVINIYEILKGFKWKNNKKKESQFKEFLEDVVIFTIDNDVINIASDLYANLRKTGKTIGDADILIAAIVIKSNGILVSNNIKHYEDIDGLALVNWLKE

SEQ ID NO: 6957 - DNA, 396 bp, Unknown
  Obtained from environmental sample
  misc_feature (1)..(396): n is a, c, g, or t
atgatgaacttctgtattccctaccttaccatagagccgataatcggcaaattgtcagcccaattctggtattcttcggtacgccgtaacgccactacggaaaacctcaatgttctaaaggataagctcgcaacggtcgatgttaatgtaacagccgaaattggaaagataaacgtacctgttcgggacgttctttcattgcagattggggatgtaataaggctatacaatacccgtattggcgatccctattcacttaacattggctcaaggaagaaatttctgtgccgtcccggcattatcgggaaaaaaatagcggttcagataacaaagaaaatagacgagcttgtgcatgaagaatttgaagagctcgcttctgaaggagatgaattatga

SEQ ID NO: 6958 - protein, 131 aa, Unknown
  Obtained from environmental sample
  DOMAIN (39)...(116): Surface presentation of antigens (SPOA) protein
  misc_feature (1)..(131): Xaa is any amino acid
MMNFCIPYLTIEPIIGKLSAQFWYSSVRRNATTENLNVLKDKLATVDVNVTAEIGKINVPVRDVLSLQIGDVIRLYNTRIGDPYSLNIGSRKKFLCRPGIIGKKIAVQITKKIDELVHEEFEELASEGDEL

SEQ ID NO: 6959 - DNA, 477 bp, Unknown
  Obtained from environmental sample
  misc_feature (1)..(477): n is a, c, g, or t
atgatgagcgatggcgcactttcacaggatgagatagacgcattattgtcaggtgtagattcatcgtctagccatggtggtcatagcagcgcgcctgcggcgacaatggctccctctgccgccacttttgacgttgattcgcttgaacagtttttttcttcaactaccggcgctctttcttccaatcttgcggctcttacgggcacaacggtaactcttgtcggtcctgaagtcgcggcgatgtcacgcgataatatgttgaccctgcttcccggtatggttaccgtggtaaataccaattttacttcaggtttccccggcgagcattgtttcattttttctgaagaatcagccaaggctatcgcaagccttatgactaaagagagcgatatacagcttgatgagatggcaatgtccgttatcggcgaaagtgtttcacaaattgccggaactcanattaccgctctttacggataa

SEQ ID NO: 6960 - protein, 158 aa, Unknown
  Obtained from environmental sample
  misc_feature (1)..(158): Xaa is any amino acid
MMSDGALSQDEIDALLSGVDSSSSHGGHSSAPAATMAPSAATFDVDSLEQFFSSTTGALSSNLAALTGTTVTLVGPEVAAMSRDNMLTLLPGMVTVVNTNFTSGFPGEHCFIFSEESAKAIASLMTKESDIQLDEMAMSVIGESVSQIAGTXITALYG

SEQ ID NO: 6961 - DNA, 531 bp, Unknown
  Obtained from environmental sample
  misc_feature (1)..(531): n is a, c, g, or t
ttgaacgaaaccattatgaaagacgggctttctccttctccgttgttgaccagaatcggcatcaacaccggaaacatggtcgcgggcaatatgggcaccggaaacaagatgaactatacgattatgggaaacgcggtaaatctggccgcccgtcttgaaggggtcaacaagcaatacggcacctggatacttgcctcagacgcgacaattcgggaaaccgataacaaaattctcacccgcaggcttgaccgcgtccgggtagtcggcatcaacgagccggttcagcttcacgaactgctgaacactgtggaacaggcaagtccgcaggaaaaggagcttgtcactgttttccatcaggctctggattactacaacaaccgcaaatggaaagaagccgcgcagggtttccggcaatcctacgccatcgaaaacggcggcccttcggccaagtacttcaagcgctgcgaagtttttctcaaagagccgcctcctgatacatgggacggagtgagtaatctgactgaaaaataa

SEQ ID NO: 6962 - protein, 176 aa, Unknown
  Obtained from environmental sample
  misc_feature (1)..(176): Xaa is any amino acid
MNETIMKDGLSPSPLLTRIGINTGNMVAGNMGTGNKMNYTIMGNAVNLAARLEGVNKQYGTWILASDATIRETDNKILTRRLDRVRVVGINEPVQLHELLNTVEQASPQEKELVTVFHQALDYYNNRKWKEAAQGFRQSYAIENGGPSAKYFKRCEVFLKEPPPDTWDGVSNLTEK

SEQ ID NO: 6963 - DNA, 756 bp, Unknown
  Obtained from environmental sample
  misc_feature (1)..(756): n is a, c, g, or t
gtggtaatccctgatacagtgattactattgaagatggagtatatggtaactctgcgcttcaagacatgaatgtgggtgccttttatagcaatgaaaatctaataaaagttactttaggaaaaggcttaaagacgataggagattttgcctttggtaattgtaaaattgctgaaattactattcctgattctgtaaccaggatcgggaattactcttttatgcaagccggtttaacaaaagtaacttttggtaaaggattacagactattggaagtggagcctttcaaagtgattatcttacgccgaataataatattacagaaattattcttccggcttctctaaaagaaatagggtcaaatgcgtttataaataataaaattcaagaattaacgcttggtaccggcttacagactatcggctcgagcgcgtttttaaataataaaataaaaaaattaactcttggtacaggtttacaaactattgggcagtccgctttttccaataatcagattacggaacttaattttagtttaccgtcttctctaanaagaattgaaactgatacatttaaaaacaatcaaattcaatcggtaactattccaaatagtattatttctgtgtctgcgggagcttttgncgacaaacccgctgcaaatgtggntattcctgcctctcttgtaaatgggaccgtctcaggnaaagccttttggagatggagcacaatcacccgtattaccattcccgcgggatga

SEQ ID NO: 6964 - protein, 251 aa, Unknown
  Obtained from environmental sample
  misc_feature (1)..(251): Xaa is any amino acid
MVIPDTVITIEDGVYGNSALQDMNVGAFYSNENLIKVTLGKGLKTIGDFAFGNCKIAEITIPDSVTRIGNYSFMQAGLTKVTFGKGLQTIGSGAFQSDYLTPNNNITEIILPASLKEIGSNAFINNKIQELTLGTGLQTIGSSAFLNNKIKKLTLGTGLQTIGQSAFSNNQITELNFSLPSSLXRIETDTFKNNQIQSVTIPNSIISVSAGAFXDKPAANVXIPASLVNGTVSGKAFWRWSTITRITIPAG

SEQ ID NO: 6965 - DNA, 687 bp, Unknown
  Obtained from environmental sample
  misc_feature (1)..(687): n is a, c, g, or t
atgaagaacaaatatatattttttttggcagttttacttgtattttttaatctttggagctgcaagaacaacaaatccggttctctgtcaggagaagaaaattttgacagggacgcatcctatgctctgggcatgaatctgggtgcggatataaaacaaaccctcgaaatggaaggcatttctcttaatttcgatgaattcataaaaggctttaatgatagtctggccggtaaaaacacccgttttactatggaagaagccattgaaataattgaaacggcttataatacgcttacagaaggaaaaaatgccgaagcaattcaaaaagaaatctcttttcttgccgaaaacagcaaaaaaccgggcgttgtaataacgccgagcggcctccagtaccagattatcacacaaacacagggaccaaaaccttcagactccagctatgtaaaggtacattatgaaggcaagctgatagatggaactgtttttgacagttcctatgaacgcggagaaccggtggaatttcccctggatgctgtcattcccggctggaccgaaggattgcaattaatgagcgcaggcagcaagtatatcctctatatcccgtcggagttgggttacggttccagaggatggggatcaaatcccgcgtattcaacaattgatctttactgtagatcttcctga

SEQ ID NO: 6966 - protein, 228 aa, Unknown
  Obtained from environmental sample
  SIGNAL (1)...(20)
  DOMAIN (15)...(134): Domain amino terminal to FKBP-type peptidyl-prolyl isomerase
  misc_feature (1)..(228): Xaa is any amino acid
MKNKYIFFLAVLLVFFNLWSCKNNKSGSLSGEENFDRDASYALGMNLGADIKQTLEMEGISLNFDEFIKGFNDSLAGKNTRFTMEEAIEIIETAYNTLTEGKNAEAIQKEISFLAENSKKPGVVITPSGLQYQIITQTQGPKPSDSSYVKVHYEGKLIDGTVFDSSYERGEPVEFPLDAVIPGWTEGLQLMSAGSKYILYIPSELGYGSRGWGSNPAYSTIDLYCRSS

SEQ ID NO: 6967 - DNA, 471 bp, Unknown
  Obtained from environmental sample
  misc_feature (1)..(471): n is a, c, g, or t
gtggattcaattcttacaagcggcagagcgcagttgtcaagcgatgttatgcgatattcgcagaacattatagacgaattaaaattaggagttcttatttccggcgtagagctgacggaaattacagcgcccgccgaaacaatccgctattttgaggaagtaagaaacgccgctatttacaaagcgacaaattaccagcgggcgcaggaatacgcctctacccggatgcttggagcggaagctgcggcaaacatactaaaacaaaccgctatttcacagcaggctgaaaaactgactaaagccaacggcgaaatggcggaattttacggattgtacgaccaatacgccagaaacccgcaaattatcatgtcgggaacattcaggcagagagtgggcgctgtattaaaaaaagcgggcaagtccatagtaattccgacaggcgcagaagcgccgactttcctgctgccatag

SEQ ID NO: 6968 - protein, 156 aa, Unknown
  Obtained from environmental sample
  misc_feature (1)..(156): Xaa is any amino acid
MDSILTSGRAQLSSDVMRYSQNIIDELKLGVLISGVELTEITAPAETIRYFEEVRNAAIYKATNYQRAQEYASTRMLGAEAAANILKQTAISQQAEKLTKANGEMAEFYGLYDQYARNPQIIMSGTFRQRVGAVLKKAGKSIVIPTGAEAPTFLLP

SEQ ID NO: 6969 - DNA, 705 bp, Unknown
  Obtained from environmental sample
  misc_feature (1)..(705): n is a, c, g, or t
ttgttctttacgggtctttattttacaggcagtgtaaccgccgccgtatngtcggcgattttaacggcgatcgctttgtcggcgttacattcgttagctgttttcaaacttaaagccgatttatttatttcaggtcttgcaataaatttattctcaagcggtttatgcgtagttctttcggaaaaaatattcggcacaaagggagtagtcacggcaaataacgcaaacggcttgttaatatggtatgtgattttaggaataatcctgctgataatttcacatatcgcaatttacaaaaccccattcggttacagacttcgagcctgcgaaaaaaacgcagacgctcttgtttcacttggaataaaacccgtattttatcaaacatcagcgtttttaatatcaggttttttctgcggcataggcggttcgtttttaagcttaaaccttggagcgtttgtacccggaatgtccgcaggcaaaggctggatagctctcgccgtaattttcctcggcgtaaaaaaaccgataggcatacttgccgccgctttcgttttcgccctagcagaatgtttttcaaactacgcccaaggtttttggcaaataccggcgggttttattttggcgtttccgtatatttgtacattgattgcgataatagttgtgtcggttattccttcttacaccgcaaagcgaaatggcaaataa

SEQ ID NO: 6970 - protein, 234 aa, Unknown
  Obtained from environmental sample
  SIGNAL (1)...(25)
  DOMAIN (1)...(218): Branched-chain amino acid transport system / permease component
  misc_feature (1)..(234): Xaa is any amino acid
MFFTGLYFTGSVTAAVXSAILTAIALSALHSLAVFKLKADLFISGLAINLFSSGLCVVLSEKIFGTKGVVTANNANGLLIWYVILGIILLIISHIAIYKTPFGYRLRACEKNADALVSLGIKPVFYQTSAFLISGFFCGIGGSFLSLNLGAFVPGMSAGKGWIALAVIFLGVKKPIGILAAAFVFALAECFSNYAQGFWQIPAGFILAFPYICTLIAIIVVSVIPSYTAKRNGK

SEQ ID NO: 6971 - DNA, 561 bp, Unknown
  Obtained from environmental sample
  misc_feature (1)..(561): n is a, c, g, or t
atgcgccagcgcatcgttattgccatagcaatggcgtgtaaccccaaaatactgatttgcgacgaaccgaccaccgctctggatgttacaatccaggcgcagatactgagccttttgaaagacctaaaggaaaagtaccacctgactatagtctacataacccacgacctgggcgttgtggcagcagtggcggacagggtggccgtaatgtacgccggcgatatagtggagataggcggcgtatgcgaggtgttctacaacccgcagcacccgtatacctgggcgcttctttcctcgctcccgcagttgggcgtaaagggagagaagctatttacgataaagggcacacccccaaacctttttttcgaggtttcaggcgacgcattcgcgccgcgcaatcaaaacgctttgcgcatagatttcctggaacgcccgccttatttcacggtagaaggttcaacaacccataaggccagaacctggcttttggacccgcgctcgcccaggattgagccgcctcctgtcattaagtccataggagcccaccgccatgccgtctaa

SEQ ID NO: 6972 - protein, 186 aa, Unknown
  Obtained from environmental sample
  DOMAIN (1)...(73): ABC transporter
  misc_feature (1)..(186): Xaa is any amino acid
MRQRIVIAIAMACNPKILICDEPTTALDVTIQAQILSLLKDLKEKYHLTIVYITHDLGVVAAVADRVAVMYAGDIVEIGGVCEVFYNPQHPYTWALLSSLPQLGVKGEKLFTIKGTPPNLFFEVSGDAFAPRNQNALRIDFLERPPYFTVEGSTTHKARTWLLDPRSPRIEPPPVIKSIGAHRHAV

SEQ ID NO: 6973 - DNA, 444 bp, Unknown
  Obtained from environmental sample
  misc_feature (1)..(444): n is a, c, g, or t
atgtctcgtttcatccaaaaacaggggttcacgcttatcgagctgatggtcgttatcgtgatcatcggggtgctggcgtcgttggcgattcctaggtttacggaagcgtcggctaaggctaagatgtcggaggcgccgcttgtgttgaagtcttatgagtcgggggtgctggcggcgatagtggaatcggattcggcgactttagcgggtttggggtttgatgatattgttatggatccaccgaaagattcgaagtggtggaattatcagacagaaaacggtgctgaaaaaaaagtattagaggatccatttgctggtgtatccaaaggaaaaatggggtcgtttgatcagggcgagaagcttatgacgaagtatcagcaggagcaaggcgcggatcctaacgatccagatagtaaaggaagcgatgatgcttcatcactatag

SEQ ID NO: 6974 - protein, 147 aa, Unknown
  Obtained from environmental sample
  DOMAIN (8)...(31): Prokaryotic N-terminal methylation motif
  misc_feature (1)..(147): Xaa is any amino acid
MSRFIQKQGFTLIELMVVIVIIGVLASLAIPRFTEASAKAKMSEAPLVLKSYESGVLAAIVESDSATLAGLGFDDIVMDPPKDSKWWNYQTENGAEKKVLEDPFAGVSKGKMGSFDQGEKLMTKYQQEQGADPNDPDSKGSDDASSL

SEQ ID NO: 6975 - DNA, 705 bp, Unknown
  Obtained from environmental sample
  misc_feature (1)..(705): n is a, c, g, or t
atgtccatccatattgcggcgaaagccggagaaattgccgaagtcattctgcttccgggagatcccctgcgggccaaatttatctcagagaaatttctggagaatgccaaacagtacacggatgtgcgcggcatactgggttttaccggaacctacaagggcaagcaggtttctgtgcagggtactgggatgggtattccttccatctcaatttacgtgaacgaacttttcagagactacggcgtcaagcgggcaataaggatcggtaccgcaggctctattcaggaaaacctgaaaatacgcgacctggtaatcgccatgaccgcctgtaccgattcgggggccaaccgcgtccgttttggcgggcgggacttcgcaccggcggcgaccttttcgcttgtacgaaaggcctacgacacagcccttgaaaaaggctggcaggcggcggttggtacggtggtttctacggatatgttctacaccgaagacccggatgaatggaaactctgggcaaagttcggcgctctggccctggaaatggaaacttcggagttgtacaccctggcggccaaatacaagcgggaatgtctttccctccttacaatttcggacagcattataagccacgaagtaaccagcgcggaagaacgtcagaccacttttaccaggatgatggaagtagccctggaaacagcgatattataa

SEQ ID NO: 6976 - protein, 234 aa, Unknown
  Obtained from environmental sample
  DOMAIN (14)...(232): Phosphorylase family
  misc_feature (1)..(234): Xaa is any amino acid
MSIHIAAKAGEIAEVILLPGDPLRAKFISEKFLENAKQYTDVRGILGFTGTYKGKQVSVQGTGMGIPSISIYVNELFRDYGVKRAIRIGTAGSIQENLKIRDLVIAMTACTDSGANRVRFGGRDFAPAATFSLVRKAYDTALEKGWQAAVGTVVSTDMFYTEDPDEWKLWAKFGALALEMETSELYTLAAKYKRECLSLLTISDSIISHEVTSAEERQTTFTRMMEVALETAIL

SEQ ID NO: 6977 - DNA, 816 bp, Unknown
  Obtained from environmental sample
  misc_feature (1)..(816): n is a, c, g, or t
ttggcgaagccgggttcggtcatcggcgtagacgggaagacagtcaggggaagcgcgacggataccgaaagagccatacatctggtgagtgcctgggcagacacattaggcttagtactcgcccaggtaaagacgcaggagaaatccaatgagattaccgccattccccagttgcttgccgccttggacatagcaggctgcatcattactattgacgctatggggtgtcagaaacagatagccgccgatataatccgggggaagggggattatgtcctggctctcaaggaaaaccatcctgaagtctatagggaagttgaggaactatttccggagaaagagcttggcgaacctgaatacagcgaaattaccaaggatcacggccgtattgagaagcgggaagcatggcttagtaccgacatctcatggtttgagggcagggaagagtggccgggacttaagggttttggctgtgtccgttccacccggacggtcaaagaagcaactaccgttgagtaccggtatttccttaccagcctcaccgataccgctcaatttgccaattcggtcagaagccactgggggatagaaaacaagctccactgggtgctggatgtggcatttcgggaagattatgcccgtaacagaaaagaccattccgcagccaatctggcggtgctgagaaaaatcactttaaacctgctccgtttggagccgacagagaaataccagaaacagaaactgtctctcaaccgcaaacgtctttatgcttcctacaatcctgatttccttctcaacattttatttaatttataa

SEQ ID NO: 6978 - protein, 271 aa, Unknown
  Obtained from environmental sample
  DOMAIN (7)...(234): Transposase DDE domain
  misc_feature (1)..(271): Xaa is any amino acid
MAKPGSVIGVDGKTVRGSATDTERAIHLVSAWADTLGLVLAQVKTQEKSNEITAIPQLLAALDIAGCIITIDAMGCQKQIAADIIRGKGDYVLALKENHPEVYREVEELFPEKELGEPEYSEITKDHGRIEKREAWLSTDISWFEGREEWPGLKGFGCVRSTRTVKEATTVEYRYFLTSLTDTAQFANSVRSHWGIENKLHWVLDVAFREDYARNRKDHSAANLAVLRKITLNLLRLEPTEKYQKQKLSLNRKRLYASYNPDFLLNILFNL

SEQ ID NO: 6979 - DNA, 363 bp, Unknown
  Obtained from environmental sample
  misc_feature (1)..(363): n is a, c, g, or t
atggagccgtatgtgtacgcgcagatggtagccggaaaggacgcgccgcgtttcggcgaagcaaaaaactcctggctcactggaaccgcggcgtggacttttgtcagcatttctcagtacatcctgggtgtgcaccctgtgttcgacggcttgctcatcgacccttgcatcccttcaagcatgaaaggtttctccgttattcgtcattttcaaaacgcggtttaccgtatcgccgtggacaatagcgcaggcgtggagaaaggcgttaagttggtaacgctggacggcaagccgctggatggcgctgtattgccggcgctgggcgacggaaagacgcatgaggtttgtgttgtaatgggatga

SEQ ID NO: 6980 - protein, 120 aa, Unknown
  Obtained from environmental sample
  misc_feature (1)..(120): Xaa is any amino acid
MEPYVYAQMVAGKDAPRFGEAKNSWLTGTAAWTFVSISQYILGVHPVFDGLLIDPCIPSSMKGFSVIRHFQNAVYRIAVDNSAGVEKGVKLVTLDGKPLDGAVLPALGDGKTHEVCVVMG

SEQ ID NO: 6981 - DNA, 318 bp, Unknown
  Obtained from environmental sample
  misc_feature (1)..(318): n is a, c, g, or t
atgatagactcattactcgcggttaacgcggacgcttatcattttggcaacgcgatagacatggcagaaatgatgccgcatattccggaaaataccatagcgcttggtaatatcgaaccagccgggcaattccggaacggcacccccgaatccgtcagaaaagcgacgctggaccttatgtccaagtgctgtaaatacccgaactttgtggtatcatcaggctgcgacattcctcctctttcaagctgggacaacatagacgcgtttttcgccgcagttgaggagttttatagcggggtagatagcctcagaaaataa

SEQ ID NO: 6982 - protein, 105 aa, Unknown
  Obtained from environmental sample
  misc_feature (1)..(105): Xaa is any amino acid
MIDSLLAVNADAYHFGNAIDMAEMMPHIPENTIALGNIEPAGQFRNGTPESVRKATLDLMSKCCKYPNFVVSSGCDIPPLSSWDNIDAFFAAVEEFYSGVDSLRK

SEQ ID NO: 6983 - DNA, 837 bp, Unknown
  Obtained from environmental sample
  misc_feature (1)..(837): n is a, c, g, or t
atggcaataacatcacttactccggttatacaaattgatgaagaaaaatgtattaactgttacgcctgtatcatcatttgcccggttaagtactgcatggacggttcaggagacaagttacagataaatcatgacatctgtatcggctgcgggaactgcattaacgtctgtacccacaaggcaaggacgctcatagacgacacgggccgtttcatgaacgatctgaaacagggacagaaaataattgccgtggccgccccggctgtcgcttcttttttccccgatcaatttctcaacttaaacggctggttaaaatcgctgggcgttgaagccttttttgacgtgagccttggagcggaacttacagtcatatcctatcttgactatgtcaaagaaaaaaatccccggacggtgatttcacagccatgcccggcgcttgtcacttttattgaaattaaccaccctgaattgctgccctatctagccccggcggacagccccatcctgcataccataaaaatgatcaaagaatattatccccaatataataaccacaaagtagcggtaatttccccctgcatcgccaaacggcgggaatatgacgaaaccggcctgggagactataacgttacgatgaccgcgttaaaaaattttctggacgagcggaaaatagaactttccgcctttccgaaagtggaatataccggagcaaacgcggaacgggccgcgggcttccccattcccgggggacttttggataccgccgagcgttttgagccgggtatcaggcggagtaccatcaagattgaaggggtacattcgatttatccatactga

SEQ ID NO: 6984 - protein, 278 aa, Unknown
  Obtained from environmental sample
  DOMAIN (72)...(277): Iron only hydrogenase large subunit, C-terminal domain
  misc_feature (1)..(278): Xaa is any amino acid
MAITSLTPVIQIDEEKCINCYACIIICPVKYCMDGSGDKLQINHDICIGCGNCINVCTHKARTLIDDTGRFMNDLKQGQKIIAVAAPAVASFFPDQFLNLNGWLKSLGVEAFFDVSLGAELTVISYLDYVKEKNPRTVISQPCPALVTFIEINHPELLPYLAPADSPILHTIKMIKEYYPQYNNHKVAVISPCIAKRREYDETGLGDYNVTMTALKNFLDERKIELSAFPKVEYTGANAERAAGFPIPGGLLDTAERFEPGIRRSTIKIEGVHSIYPY

SEQ ID NO: 6985 - DNA, 417 bp, Unknown
  Obtained from environmental sample
  misc_feature (1)..(417): n is a, c, g, or t
atgaactcttcaagagaaaagaatagacgcatcttagttatcgacgatgaggcggacgtccttgagtttttgaggatctaccttgagacgatgggttgggaggtgacggccgtgcccacggttgccgccgcgtttgaggctttagccaaagccccgtacttcctagtcatcaccgacattgccatgcccgaaatggacgggtatgaactggtggacgcggtgaaagaaaagggctaccaatgccgcttcgccctaatgacaggcttcggatacaaccccaaacacaccattataaagatcaataaaacaataaaattcccttgcctcttcaaaccgttcaaccgagaaaaggtgatggacgcggtaaacgaggcatttgccctgtatcacagcgatatgggcgataccgcgaactga

SEQ ID NO: 6986 - protein, 138 aa, Unknown
  Obtained from environmental sample
  DOMAIN (9)...(123): Response regulator receiver domain
  misc_feature (1)..(138): Xaa is any amino acid
MNSSREKNRRILVIDDEADVLEFLRIYLETMGWEVTAVPTVAAAFEALAKAPYFLVITDIAMPEMDGYELVDAVKEKGYQCRFALMTGFGYNPKHTIIKINKTIKFPCLFKPFNREKVMDAVNEAFALYHSDMGDTAN

SEQ ID NO: 6987 - DNA, 300 bp, Unknown
  Obtained from environmental sample
  misc_feature (1)..(300): n is a, c, g, or t
gtggccggaggtcttttgctctatggatatggccggcgacaatccgtcgatcctgtcgacgtcgggcttctccatgaggcccaagaactgccgggcgtacgaggagagcgattcgacgtagcgccgttggctctcggagtagagcgtgtcgaaagcgagcgacgactttccggagccggagaggcctgtgatcaccgtcaggctgtttcgcgggatcacgacgtcgatgtttttgaggttgtggacgcgagcgccctttatttctatgttgcgcatagtgtttccgtgatagagtggtag

SEQ ID NO: 6988 - protein, 99 aa, Unknown
  Obtained from environmental sample
  misc_feature (1)..(99): Xaa is any amino acid
MAGGLLLYGYGRRQSVDPVDVGLLHEAQELPGVRGERFDVAPLALGVERVESERRLSGAGEACDHRQAVSRDHDVDVFEVVDASALYFYVAHSVSVIEW

SEQ ID NO: 6989 - DNA, 879 bp, Unknown
  Obtained from environmental sample
  misc_feature (1)..(879): n is a, c, g, or t
atgctttggagaaaaacggggctttgcaaaaagaagacaaagagtacgtggatagcaggttatctcactaaagcagccaatttccgcattttttttgcaatttcttactttaacggagaattttcacaaatgaaaacagtttcctctaaaattgttctcgtagcaggctttgcgcttgccataacattcacattttcctgctcgtcagacgatggcgggggcagttcgggtggggatagctccagttcgttagttgcggaaggcatttccagcgacaacggcggctcttcgccttccggcggcagcagtagcagcggcggcggttcttcgccttccggcggctcgtcttcgtctgttagcagcagtggcggttcttcgtctgggggtggcagtagcagtagcggctcgtcttcgtctggcggtggcggttctagtagtagtaatgcttgtgtagaaagctggcaagtgacaaccgctgctacctgcgaagcggcaggcgtggaaacagagacttgcacaggcgtaacacgagcaattcctcaactttcatacaaccacacaactcagttctgccacaacggcaaggtagggaatttttgtggcacaagaacggaaacttttgaccctgatttgtatgaatgcaagacaggcaacaagatatatctaaaaagcggacttacagacagcagggataataaccgttacgatgcagttttgataggcacacgaacctggatggcgaagaatttgagttacgcgataagcggcagcaaatgcggcagtgttcttactggtactggtaatcttgtaaatgcaaatactcaggcttgcgagacctatggcagatgtacgactggaaacagcatggctcggccataa

SEQ ID NO: 6990 - protein, 292 aa, Unknown
  Obtained from environmental sample
  misc_feature (1)..(292): Xaa is any amino acid
MLWRKTGLCKKKTKSTWIAGYLTKAANFRIFFAISYFNGEFSQMKTVSSKIVLVAGFALAITFTFSCSSDDGGGSSGGDSSSSLVAEGISSDNGGSSPSGGSSSSGGGSSPSGGSSSSVSSSGGSSSGGGSSSSGSSSSGGGGSSSSNACVESWQVTTAATCEAAGVETETCTGVTRAIPQLSYNHTTQFCHNGKVGNFCGTRTETFDPDLYECKTGNKIYLKSGLTDSRDNNRYDAVLIGTRTWMAKNLSYAISGSKCGSVLTGTGNLVNANTQACETYGRCTTGNSMARP

SEQ ID NO: 6991 - DNA, 414 bp, Unknown
  Obtained from environmental sample
  misc_feature (1)..(414): n is a, c, g, or t
gtgcaagtctctgtttccacgcctgccgcttcgcaggtagcagcggttgtcacttgccagctttctacacaagcattactactactagaaccgccaccgccagacgaagacgagccgctactgctactgccacccccagacgaagaaccgccactgctgctaacagacgaagacgagccgccggaaggcgaagaaccgccgccgctgctactgctgccgccggaaggcgaagagccgccgttgtcgctggaaatgccttccgcaactaacgaactggagctatccccacccgaactgcccccgccatcgtctgacgagcaggaaaatgtgaatgttatggcaagcgcaaagcctgctacgagaacaattttagaggaaactgttttcatttgtgaaaattctccgttaaagtaa

SEQ ID NO: 6992 - protein, 137 aa, Unknown
  Obtained from environmental sample
  misc_feature (1)..(137): Xaa is any amino acid
MQVSVSTPAASQVAAVVTCQLSTQALLLLEPPPPDEDEPLLLLPPPDEEPPLLLTDEDEPPEGEEPPPLLLLPPEGEEPPLSLEMPSATNELELSPPELPPPSSDEQENVNVMASAKPATRTILEETVFICENSPLK

SEQ ID NO: 6993 - DNA, 504 bp, Unknown
  Obtained from environmental sample
  misc_feature (1)..(504): n is a, c, g, or t
ttggaagacttcccctaccattttgaacctggaaaggaagccgtccttggcgcacacatgctggaaatctgcccctcgatagccggggcaaagccccgcatcgaggtgcatcccctgggaataggcggcaaaggcgatcccgcccgcctggtgtttgacgccgcgcccggcccggctgttttggcaaccctgattgacctaggcgaccgcttcaggatgatcgtgaacgaaattgagaccatcaagatagaaaaggaaatgccaaagctccccgttgccagggcactgtggaagccttatccgagtttgagcgaagccgccgaggcctggatactcgcgggcggaacccaccattctgtttatactacggctttaaccgccgaatatttcagggactgggcggaaatctgcggaattgagtttgtcctaatcgggcgcgacacgaagccggacaggcttagggatgagttgcgctggagcgaggcttactggtcgggccgctga

SEQ ID NO: 6994 - protein, 167 aa, Unknown
  Obtained from environmental sample
  DOMAIN (1)...(167): L-arabinose isomerase
  misc_feature (1)..(167): Xaa is any amino acid
MEDFPYHFEPGKEAVLGAHMLEICPSIAGAKPRIEVHPLGIGGKGDPARLVFDAAPGPAVLATLIDLGDRFRMIVNEIETIKIEKEMPKLPVARALWKPYPSLSEAAEAWILAGGTHHSVYTTALTAEYFRDWAEICGIEFVLIGRDTKPDRLRDELRWSEAYWSGR

SEQ ID NO: 6995 - DNA, 927 bp, Unknown
  Obtained from environmental sample
  misc_feature (1)..(927): n is a, c, g, or t
gtgtccgatttggtgcatgaggcgatcgatggcgaactgcattttgttcaccgatatggatggctcagtgactatggacgtgaaaatgtgccggttcccatgggtttgagtttcccctacagctctatacccgagtgggaaagcttatttatgcgaggcgaatacataaacagcccgctctccggcttaaaggagaacgaacaaaattttttgaactcttacgggatgaaatccatcgtgattatcccgatgtttttggaagataagttttgggggtttttcagtattgacgactgtcgcaaggagcggactttttcagataaagagatgcgtatattagcatccgtaggcttgatgatgagcaatgccgtaaaccgcaatttacaaagcgctaaaatgcgcgatgcggatgaacgtgtgcggattatgttcaataccatgcctttgggcgcaattattcgtgatgtgaactttgattattttgactgtaacgagagcatagtcaatatgtttgagctatcgggtaaaaatgagttttccgaaaaatttgatcagctctcgcctgagtatcagccggacgggagtctgacaagcaaaaagatggatgaagttgttggaaaggctctttccgacgggtactgccgttttgaatggatgcaccaaaaactaaacggcgagccaataccctgcgaagttacgcttatccgcgttaaatataacaacgaagttaatttgagcgcctatgtgcgggatttgcgcgacttaaaggttgcaattgcacaaaaaaacgagtcagaacaatcgcgcagacatctgagtaatattttgaatggcattgacgcgcaggtttatgttactgttccacattcaggggaaattctctttgtgaacgatcgcatgaaaaatgaattcaaaaattggggatga

SEQ ID NO: 6996 - protein, 308 aa, Unknown
  Obtained from environmental sample
  misc_feature (1)..(308): Xaa is any amino acid
MSDLVHEAIDGELHFVHRYGWLSDYGRENVPVPMGLSFPYSSIPEWESLFMRGEYINSPLSGLKENEQNFLNSYGMKSIVIIPMFLEDKFWGFFSIDDCRKERTFSDKEMRILASVGLMMSNAVNRNLQSAKMRDADERVRIMFNTMPLGAIIRDVNFDYFDCNESIVNMFELSGKNEFSEKFDQLSPEYQPDGSLTSKKMDEVVGKALSDGYCRFEWMHQKLNGEPIPCEVTLIRVKYNNEVNLSAYVRDLRDLKVAIAQKNESEQSRRHLSNILNGIDAQVYVTVPHSGEILFVNDRMKNEFKNWG

SEQ ID NO: 6997 - DNA, 705 bp, Unknown
  Obtained from environmental sample
  misc_feature (1)..(705): n is a, c, g, or t
atgcttgcaagacgcttttccataatagggattttcagcgttacatgggtaatccgttcgctttgcatggcgctggccgtcatagctccgtttgttgattacgccgggcacagaaataccgctctgctgttaatcatactcggcgtgtttctttttaacgctttccggggagtaggaatgatagggaataatcccgtcttaagcgaactggccgtgggtcccgacaggggcagttttatgacgcagattcaaatcattaacagcgcgataggcatggtcagcagtttcctgatagctatggcgcttggaacggaaccgcccatatttttattttccatcctgcttggaggcggcgtaattacggggattgtaagcggttatgtgataaaaaaagttcccgagccgccaagcgaaaaggacaggcagggaatgagccttgccgcgacttttaaagacgctttctcgcaggaaagccttcgcagttttatggttattctctttttggtaattcttgtgtccggcgttacgcgaacattcgtagtggtttacgcccgcgaggtgtttgaacataacgacggccttattttgctttactcggtcttcggcggattgggctacctgatagcgggattaagtataaaattccttgtagacaggctgggcgctaagccgctcttccttgtctgcgtgatacttggtctgtaa

SEQ ID NO: 6998 - protein, 234 aa, Unknown
  Obtained from environmental sample
  SIGNAL (1)...(26)
  misc_feature (1)..(234): Xaa is any amino acid
MLARRFSIIGIFSVTWVIRSLCMALAVIAPFVDYAGHRNTALLLIILGVFLFNAFRGVGMIGNNPVLSELAVGPDRGSFMTQIQIINSAIGMVSSFLIAMALGTEPPIFLFSILLGGGVITGIVSGYVIKKVPEPPSEKDRQGMSLAATFKDAFSQESLRSFMVILFLVILVSGVTRTFVVVYAREVFEHNDGLILLYSVFGGLGYLIAGLSIKFLVDRLGAKPLFLVCVILGL

SEQ ID NO: 6999 - DNA, 576 bp, Unknown
  Obtained from environmental sample
  misc_feature (1)..(576): n is a, c, g, or t
ttgatagaagcggtaatgtacgcttgggatatagctcccggattaggcagacgatttgccattcaggatatgccgatagcggattcaaaaattgaacaacaggttcgcgatgaatttcgcgctaaaataaattttagtggcgcggatgggggacggcttgtcagaatagcgggcagtgacgaagatttgcgttcaatatccatcgcatcgtcaaacactgcgcgtctgcgagacattgcggagggcagagaacctcagcgcggtatccgtaacgcggataaatttttaggaatagacttaaaagttcttcctatggcgcaggcgcaatctccgtatacggacgcaggttttataataacaaatcccccttacggaaaacggcttggagatcaatccgcagcggaagaaacctacaaaaatatgtcagggattgttagccgttttcccggttggaaactggctgtgataaccgatcatagcggatttgaaagcttttatggtaaaaaagccgattcatgccgtgaaataagtaacggcgcaattccttcctttttttatcaatatggtgtaaactaa

SEQ ID NO: 7000 - protein, 191 aa, Unknown
  Obtained from environmental sample
  DOMAIN (33)...(187): Putative RNA methylase family UPF0020
  misc_feature (1)..(191): Xaa is any amino acid
MIEAVMYAWDIAPGLGRRFAIQDMPIADSKIEQQVRDEFRAKINFSGADGGRLVRIAGSDEDLRSISIASSNTARLRDIAEGREPQRGIRNADKFLGIDLKVLPMAQAQSPYTDAGFIITNPPYGKRLGDQSAAEETYKNMSGIVSRFPGWKLAVITDHSGFESFYGKKADSCREISNGAIPSFFYQYGVN

SEQ ID NO: 7001 - DNA, 885 bp, Unknown
  Obtained from environmental sample
  misc_feature (1)..(885): n is a, c, g, or t
ttgattctgctggtgggaacacatatttatttgaccttcaggacagggttcatccagcgtaaactggtgctgggaataaaacttacgtttgcccgcgacaggggcagtcctggagatattgcccattttggcgcgcttgctacggcgctgtcttccactatcggcacggggaacattatcggggtgggaaccgccatcgcgttgggcggaccgggcgcgctgttgtggatgtggcttaccggcgtgttcggtattgccaccaagtactccgaaagcctgctcgctgtaaaatacagggtaaaaaacaataaggggatgatgataggcggcgcgatgtttgtgctggaacgcgggcttaagatgaagtggctgggggcggttttcgcgtgtttaaccgcgcttgccgcttttgggataggctgcgcggtgcagtccggttcggtggcaaaagcgttatttgaaaattttaacattaccccctgggtttccggactgctcatcgcggtcatggcagccctggttatcataggcggcttgaagtggattgcacgggccgccgagtccctggttccctttatgtcggttatctatattctcgggtgtataactattctggtgatcaaccataatttcatcattcccgccattcaactggtatgtaccaacgcctttaacatcaggtcggtagggggaggtttcctgggctttgccgccgtcaaaatgatgaccgccgcccgttacggcattgcccgcgggcttttctcaatgaatcgggcatgggttcggctcccatcgtggccgccgcggcccagaccaaaaaccctgtccggcaggccctgggttccagtaccggacctttctgggatacggtgcttatctgcttaa

SEQ ID NO: 7002 - protein, 294 aa, Unknown
  Obtained from environmental sample
  DOMAIN (17)...(294): Sodium:alanine symporter family
  misc_feature (1)..(294): Xaa is any amino acid
MILLVGTHIYLTFRTGFIQRKLVLGIKLTFARDRGSPGDIAHFGALATALSSTIGTGNIIGVGTAIALGGPGALLWMWLTGVFGIATKYSESLLAVKYRVKNNKGMMIGGAMFVLERGLKMKWLGAVFACLTALAAFGIGCAVQSGSVAKALFENFNITPWVSGLLIAVMAALVIIGGLKWIARAAESLVPFMSVIYILGCITILVINHNFIIPAIQLVCTNAFNIRSVGGGFLGFAAVKMMTAARYGIARGLFSMNRAWVRLPSWPPRPRPKTLSGRPWVPVPDLSGIRCLSA

SEQ ID NO: 7003 - DNA, 336 bp, Unknown
  Obtained from environmental sample
  misc_feature (1)..(336): n is a, c, g, or t
atggatagaaagcgattccacccgctctgtcttcttcggacaggacgacgtgatttaggggatgctgttatgaaagaaaaaatagtaaccgttacaaacagagccggcgttcacgcgcgtccctcggcattattggttcaaacgacaaaaaattataaatgtaatatttattttgaaaaaggttccgacagaattaacgccaaatccatcatgggtattataacgcttggagcggcttacaatactcaattaaaaataatcgccgacggagaggacgaagaagcagcgataaacgcaataagcaaattatttgagacaaaatttgaagaggagtag

SEQ ID NO: 7004 - protein, 111 aa, Unknown
  Obtained from environmental sample
  DOMAIN (24)...(107): PTS HPr component phosphorylation site
  misc_feature (1)..(111): Xaa is any amino acid
MDRKRFHPLCLLRTGRRDLGDAVMKEKIVTVTNRAGVHARPSALLVQTTKNYKCNIYFEKGSDRINAKSIMGIITLGAAYNTQLKIIADGEDEEAAINAISKLFETKFEEE

SEQ ID NO: 7005 - DNA, 831 bp, Unknown
  Obtained from environmental sample
  misc_feature (1)..(831): n is a, c, g, or t
ttgtttttcttntacggcgtatttttccttccaaccctgcttatgactgtaattatcgcgatttcctttacgcggcggattacccatccgattgtggaacttacggaagcgacacggcgcgtagccgaaggcgactntgctattcaaatactgtcacgccgcaatgacgaactgggccttcttatccgttcttttaacgcaatggttcaagatttggaaaaatcaagggcggcgctggttaaaagcgaaaaaatatcgatatggcagaacatggcgcagcagcttgcgcacgaaattaaaaacccgcttacccctataaaactttcagccgagcgcgtgctgcgccggtggaggaatgagcctgataatatcggtgaaatccttgaaagttccatgatggcgattattcaggaaacggaagggctttccaccctgcttaatgaattcaggacattatcaaagccgatggaaccgtctcaaacatggacggacctgcgcgagtctgcggaagaaataataaacgcctattcaacttcgtacccgcaggttcaattcgatataaacaacgtggaaaaaggaataacggtaaaaatagaaaaacaccgtattgcccaaattcttacaaaccttattattaacgcaattgacgcgatgaacgggacgggctcaattgaaattcgtacagatcttgtaaaaaaacgtgacgtgctttattgtagaataagcgtaaaagattcaggcaaaggcatcggcaaacaggacagccaccttttatttacgccgtactatacgacaaaagaatccggcacagggcttgggcttccgatgtag

SEQ ID NO: 7006 - protein, 276 aa, Unknown
  Obtained from environmental sample
  DOMAIN (198)...(275): Histidine kinase-, DNA gyrase B-, and HSP90-like ATPase
  misc_feature (1)..(276): Xaa is any amino acid
MFFXYGVFFLPTLLMTVIIAISFTRRITHPIVELTEATRRVAEGDXAIQILSRRNDELGLLIRSFNAMVQDLEKSRAALVKSEKISIWQNMAQQLAHEIKNPLTPIKLSAERVLRRWRNEPDNIGEILESSMMAIIQETEGLSTLLNEFRTLSKPMEPSQTWTDLRESAEEIINAYSTSYPQVQFDINNVEKGITVKIEKHRIAQILTNLIINAIDAMNGTGSIEIRTDLVKKRDVLYCRISVKDSGKGIGKQDSHLLFTPYYTTKESGTGLGLPM

SEQ ID NO: 7007 - DNA, 789 bp, Unknown
  Obtained from environmental sample
  misc_feature (1)..(789): n is a, c, g, or t
atggttatggccaacgcaaccggctgttcctccatttacggcggcaacctgcccaccactccgtattgccaaaattctgacggcaagggccctgtgtgggcaaacagcctgtttgaagacgcagccgaattcggcttgggcatgaggcttacaagcgacaaactcgccctacacgcccatgaaatagcggaaaaggcaaaatccgaagggatcgctgtcgccataatcgacaagatactggcaaacgaccagaaagatgacgccgctatcgaagcccagcggaaaaacgtggacgagctcaaagccgccctgaagagcgactccaaaccaacagcgaagctgctactctccctggctgactattttatcaagcggtctgtgtggatattgggcggcgacggctggggctacgacattggctttggcggtcttgaccacgttatcgcttccaaccataacgtgaacgtgctgtgtatggacaccgaggtttattccaacaccggcggccagatgtccaaggctactcctgtgggcgctatcgccaggtttgcagcggcgggcaaggaaattactaagaaagaccttggcgcaatcgcgatgagctacggttacgtgtatgtggcaaagatttccataggggggaacctggctcaggccatcaaagcgttccgggaagctgagtcctacgacgggccatccctcattattgcctactcccactgtattaaccatggtatcgatatgagccacggaatggatcagcaaaaagctgcgctcgtgcnaatctga

SEQ ID NO: 7008 - protein, 262 aa, Unknown
  Obtained from environmental sample
  DOMAIN (107)...(237): Thiamine pyrophosphate enzyme, C-terminal TPP binding domain
  misc_feature (1)..(262): Xaa is any amino acid
MVMANATGCSSIYGGNLPTTPYCQNSDGKGPVWANSLFEDAAEFGLGMRLTSDKLALHAHEIAEKAKSEGIAVAIIDKILANDQKDDAAIEAQRKNVDELKAALKSDSKPTAKLLLSLADYFIKRSVWILGGDGWGYDIGFGGLDHVIASNHNVNVLCMDTEVYSNTGGQMSKATPVGAIARFAAAGKEITKKDLGAIAMSYGYVYVAKISIGGNLAQAIKAFREAESYDGPSLIIAYSHCINHGIDMSHGMDQQKAALVXI

SEQ ID NO: 7009 - DNA, 873 bp, Unknown
  Obtained from environmental sample
  misc_feature (1)..(873): n is a, c, g, or t
atgcggaaaaaaccgcttataaaggtacttactggggttcgtaggtgcggtaaatctacgattttgcagagttttgcggaaaaacttatttcgggcggaataaaaaaggggcagataatttcactgaactttgaggatctgcatcttgaacccttaaaaaattaccgcgctctacacgattacttgatttcaaaaataacagatgataatactcagtactttgtttttttagatgaaatacaagaggttgaaagttttgaaagagttgtcaatagtttgcatttgcaaaaaaacgttgatatttatataacgggttcaaatgctttttttatgtctggcgagttatccaccttgctttctggcagatacattgaaattcccatttttccgctttcgttcagtgaatttaaaaatgcctacaaggaactctcaaaaaacgatttgtataataagtacataacacaaggcgcaatgccttaccttataaacagggaaaatagctacaaagaaattcgcgattattacggtggaatttacaatactgttttgctcaaagatgtggttgctagaaaaaagatttctgcaccagatgttttggaaaaagtggtaaaatttttagctggcaatataggctcccttaattcaacgaaaaaaatagcagatactctaactagttttgggcgaaaaatttccgtaaataccttagagaattatataagtgcacttatagattctcttttgttttacaaagtatctcgctttgacattaaaggcaaggaacatttaaaaacaattgataaatattacattgcagatttgggttttagaaattatctgcttaacaacgaaagagataatttggatttgtgctga

SEQ ID NO: 7010 - protein, 290 aa, Unknown
  Obtained from environmental sample
  DOMAIN (2)...(164): Archaeal ATPase
  misc_feature (1)..(290): Xaa is any amino acid
MRKKPLIKVLTGVRRCGKSTILQSFAEKLISGGIKKGQIISLNFEDLHLEPLKNYRALHDYLISKITDDNTQYFVFLDEIQEVESFERVVNSLHLQKNVDIYITGSNAFFMSGELSTLLSGRYIEIPIFPLSFSEFKNAYKELSKNDLYNKYITQGAMPYLINRENSYKEIRDYYGGIYNTVLLKDVVARKKISAPDVLEKVVKFLAGNIGSLNSTKKIADTLTSFGRKISVNTLENYISALIDSLLFYKVSRFDIKGKEHLKTIDKYYIADLGFRNYLLNNERDNLDLC

SEQ ID NO: 7011 - DNA, 564 bp, Unknown
  Obtained from environmental sample
  misc_feature (1)..(564): n is a, c, g, or t
atgattaagacaccgcgcttctttttaatcgcgctgtcactgatgttcggtacttcggtgtttttcattatcaacccagaccttgtagatttagcgaataaaagaggactggaatctttcgcaacggtacttgtcatgttcaccggtatagccaacgctctgggcaggcttggcgcaccgcttatgtccgacaagatcgggcgcgaaatggcggacgtgatcattcttgccgtaaccgcgcttggcgcttttgggctttgtttcgcaagcgggattttgttaatcgtaattatcgcggcggtcgccttctgttacggcggttattcgggactgtaccccgttctgacttctgaaaatttcggcattaaaaatgtcggctcaaattacggcgcggtgatggttggctttatgctctccgccctgttattcccgattgtgatcaaaaaaattgatggtcaaaagctgcaatttatgacgctcggcgcactggcggctgttggcgcggttttggttatcattctaaaattgatgaacttaaaacaggcaaaagaaacaacaaagtga

SEQ ID NO: 7012 - protein, 187 aa, Unknown
  Obtained from environmental sample
  SIGNAL (1)...(29)
  misc_feature (1)..(187): Xaa is any amino acid
MIKTPRFFLIALSLMFGTSVFFIINPDLVDLANKRGLESFATVLVMFTGIANALGRLGAPLMSDKIGREMADVIILAVTALGAFGLCFASGILLIVIIAAVAFCYGGYSGLYPVLTSENFGIKNVGSNYGAVMVGFMLSALLFPIVIKKIDGQKLQFMTLGALAAVGAVLVIILKLMNLKQAKETTK

SEQ ID NO: 7013 - DNA, 387 bp, Unknown
  Obtained from environmental sample
  misc_feature (1)..(387): n is a, c, g, or t
atggccggggntganagatgcacgcccgcagtacgggggccttattcactggttacgcagcagcctcttggcggcaaggcccagtttggcgggcagcgcctgggcgagatggaagtctgggctttggaagcttatggcgcggcgcatacccttcaggaactgctgacgatcaagtcggacgacatgaccggacgttccaaaatttacgaggccattgtaaagggggaaccttccaccacggcgggcattcccgaatcgtttaacgttctggtgcaggaactgagggggcttgcgcttgatctcgctatttttgacaacaacagtaaacaaattccccttactgaaaaagatgaagagttgattgcgaagtcgaagagtaatttctaa

SEQ ID NO: 7014 - protein, 128 aa, Unknown
  Obtained from environmental sample
  DOMAIN (30)...(106): RNA polymerase Rpb2, domain 7
  misc_feature (1)..(128): Xaa is any amino acid
MAGXXRCTPAVRGPYSLVTQQPLGGKAQFGGQRLGEMEVWALEAYGAAHTLQELLTIKSDDMTGRSKIYEAIVKGEPSTTAGIPESFNVLVQELRGLALDLAIFDNNSKQIPLTEKDEELIAKSKSNF

SEQ ID NO: 7015 - DNA, 471 bp, Unknown
  Obtained from environmental sample
  misc_feature (1)..(471): n is a, c, g, or t
atgcgggacatacaggattttgattcgataatgattcggctggcttccccggagatgatcaggaactggtcgtatggggaagtaaagaaaccggaaacgataaattaccggacgctgcgtccggaaaaagacggcctcttctgcgaaaggattttcggtactacgaaggaatgggagtgttattgcggtaaattcaagtcgatacgctataaaggcgttatctgcgaccgctgcggcgttgaggttacccactttaaggtgcgcagggaacgcatgggccatatagaattggcggccccggtttcccatatttggtattaccgctcggttcccagccgcatgggcctgctccttggtatgtcaatgacggccctccgttccgtgctgtattacgaaaaatatgttgttattgatccggcggacacggaactggaaagactgcagatgctctccgaggacgaatacaattga

SEQ ID NO: 7016 - protein, 156 aa, Unknown
  Obtained from environmental sample
  DOMAIN (4)...(156): RNA polymerase Rpb1, domain 1
  misc_feature (1)..(156): Xaa is any amino acid
MRDIQDFDSIMIRLASPEMIRNWSYGEVKKPETINYRTLRPEKDGLFCERIFGTTKEWECYCGKFKSIRYKGVICDRCGVEVTHFKVRRERMGHIELAAPVSHIWYYRSVPSRMGLLLGMSMTALRSVLYYEKYVVIDPADTELERLQMLSEDEYN

SEQ ID NO: 7017 - DNA, 816 bp, Unknown
  Obtained from environmental sample
  misc_feature (1)..(816): n is a, c, g, or t
atgggttccgtggcttgcggcattgttttgcacggtgaattcacagccgcctgcgcaaccttctttgtgttcagcgattatatgaagcccattttaaggcttgcatcgctaatggctttgcctgttaaattcttattcacccacgatagtttcagggttggcgaagatggtcccacccacgagcctgtggagcaagaggcgcaaattcgcttgttggaaaatatgaacctgccaaacggcaagccttccatgctggttctaagacccgcagatgcaaatgaaacaacgcttgcttgggaaatggctatggcaaacggggatagccccacagcccttatattgtctaggcaaacaatgccaccgctggagaatccacattcaaaagcctctgcctcaggctatattgtgcaaaacgcagaaaacccaaacttgacatttgccgccaacggctccgatgtttatctgtgttgccaagctgctgaactgctccgcaaagaagggattaccgttagggtagtgagcattatgagcccaaagcttttcttggatttgccgcaaaaagaacgtgaggctttgatacctcgctggggagctgcttatgccgtatccagtggcttgccttctgtatttgctccagttgtaggtcccttgggttattcgtggggcttgtctgaatttggaaaatctgcaccctttgctgttttggaaaaagaatttggctacacgcctcaggcaatagctacaaaagcaaaggcatatttggaagaatacaaagaaatgcgaaaagagttgaaagcgaggaatttgatgtgttga

SEQ ID NO: 7018 - protein, 271 aa, Unknown
  Obtained from environmental sample
  DOMAIN (133)...(246): Transketolase, C-terminal domain
  misc_feature (1)..(271): Xaa is any amino acid
MGSVACGIVLHGEFTAACATFFVFSDYMKPILRLASLMALPVKFLFTHDSFRVGEDGPTHEPVEQEAQIRLLENMNLPNGKPSMLVLRPADANETTLAWEMAMANGDSPTALILSRQTMPPLENPHSKASASGYIVQNAENPNLTFAANGSDVYLCCQAAELLRKEGITVRVVSIMSPKLFLDLPQKEREALIPRWGAAYAVSSGLPSVFAPVVGPLGYSWGLSEFGKSAPFAVLEKEFGYTPQAIATKAKAYLEEYKEMRKELKARNLMC

SEQ ID NO: 7019 - DNA, 951 bp, Unknown
  Obtained from environmental sample
  misc_feature (1)..(951): n is a, c, g, or t
ttgacggataaatatattgacaccatcggtggttatataagaagctgcaagaattatagcccatcgggtacgtgcgaagatgatttttccgcagagatgagcgagactgcaaacaaaatgagtgaagctgtgactgcagctaaagaatccagagtgagcagggttagcaacatttcggacgaggcatcggcacaggctgatgctagcataagagcagcgattgtcattttagtagtggtgcttattctagccgtgggtcttggcatattcttgacattctccataacaaccccattgaatgtggttgttagcgttctttctaaaattgagaaaggcgacatgactgttcgctccgatttagaacgcggagacgagctaggtacgctctccaaagcactagacagcgtatcctcaaggctccaatccatattcaggaacctccgccagaattcagacacacttgcaggtgcggcagaagagctttccagcgtaggcaggcaaatagccagctccgccgaagagaacgttgctcaaagcgcatctgttgcaagtgccactgaggaaacatccgtgaacataaacgcaatggcaagcggtgcggaacaagccgccgtaaatgccaacgaagtagcaggcgcagcagagcagatgtccacaaacatgaacaccatagccgcagccatagaagagatgagcgcaagcataaaccaaatatccagcaatgccggagaggcaaacaaggtggcaaaccaagccacagtcaaatctggcgatgccactggagttatgaacgagctaggagcggcggctaaggaaataggtcaggttaccgatgtgataaagaaaatagccgacaaaaccaaccttctagcacttaacgccaccatagaagcagcttcagcaggcgaggcaggcaaaggctttgcggttgggcaggctcggccgatctga

SEQ ID NO: 7020 - protein, 316 aa, Unknown
  Obtained from environmental sample
  DOMAIN (201)...(316): Methyl-accepting chemotaxis protein (MCP) signaling domain
  misc_feature (1)..(316): Xaa is any amino acid
MTDKYIDTIGGYIRSCKNYSPSGTCEDDFSAEMSETANKMSEAVTAAKESRVSRVSNISDEASAQADASIRAAIVILVVVLILAVGLGIFLTFSITTPLNVVVSVLSKIEKGDMTVRSDLERGDELGTLSKALDSVSSRLQSIFRNLRQNSDTLAGAAEELSSVGRQIASSAEENVAQSASVASATEETSVNINAMASGAEQAAVNANEVAGAAEQMSTNMNTIAAAIEEMSASINQISSNAGEANKVANQATVKSGDATGVMNELGAAAKEIGQVTDVIKKIADKTNLLALNATIEAASAGEAGKGFAVGQARPI

SEQ ID NO: 7021 - DNA, 345 bp, Unknown
  Obtained from environmental sample
  misc_feature (1)..(345): n is a, c, g, or t
gtgctcgacggttccgtgggcaagacgctctccgacccggcggcgctcaaggagttcgtctcagccgccatccacaactggaaaatggccggcggcgaagccccgaacttggaagtccttcttcccgccgcaaagcagagcgagcttcaggcgagcttcaacgccggggcggggcaggcgctcggcgcgggggtgacggtcagcttctcttcggacataaaagccggcttccgcatcggcccgtccgacggcacgtacaagatcagcctcacggacgaggatttcaaggaattctttaaggagtacctgcgccccaaaacgcgcgcgtaccttttcggagaataa

SEQ ID NO: 7022 - protein, 114 aa, Unknown
  Obtained from environmental sample
  misc_feature (1)..(114): Xaa is any amino acid
MLDGSVGKTLSDPAALKEFVSAAIHNWKMAGGEAPNLEVLLPAAKQSELQASFNAGAGQALGAGVTVSFSSDIKAGFRIGPSDGTYKISLTDEDFKEFFKEYLRPKTRAYLFGE

SEQ ID NO: 7023 - DNA, 657 bp, Unknown
  Obtained from environmental sample
  misc_feature (1)..(657): n is a, c, g, or t
atgaataaactaaggataggcattctttttggcggtaagtcggcggagcatgaggtgtctctgcaatccgctaaaaatatttttgatgccattgatcgcgaaaaatacgagcctgtgcttattgggatcgataagagcggccgatggcttttaaacgatgaatccagttttcttattcacgcgaacgatccaaagcgcattcggcttaacctttcaagcgatgctgttgctctggctccccaaagtaagggagttatttcgaatttatcggctttaaaaaataacggcgcagataacggccccaataatagttccattgatgtgatctttcctgtgcttcacggccccttcggcgaagacggcacagttcagggtcttttgaagctcgccgatattccctttgtgggttccggcgtcctggcttcggcggtcggcatggacaaggatgtgatgaagcgcctcctgagggatgcgggaattcccatcgggaagttccgtgtcctttgcgctgatgacgatgtcccgtcttgcgaagaaatcagctcggagcttggcgctccgttttttgttaaacccgccaacatgggatcttcggttggcgtaagcaaagttaaaaaacaaagccaataccttccgggcttaaaggatgctttttga

SEQ ID NO: 7024 - protein, 218 aa, Unknown
  Obtained from environmental sample
  DOMAIN (4)...(146): D-ala D-ala ligase N-terminus
  misc_feature (1)..(218): Xaa is any amino acid
MNKLRIGILFGGKSAEHEVSLQSAKNIFDAIDREKYEPVLIGIDKSGRWLLNDESSFLIHANDPKRIRLNLSSDAVALAPQSKGVISNLSALKNNGADNGPNNSSIDVIFPVLHGPFGEDGTVQGLLKLADIPFVGSGVLASAVGMDKDVMKRLLRDAGIPIGKFRVLCADDDVPSCEEISSELGAPFFVKPANMGSSVGVSKVKKQSQYLPGLKDAF

SEQ ID NO: 7025 - DNA, 366 bp, Unknown
  Obtained from environmental sample
  misc_feature (1)..(366): n is a, c, g, or t
gtgataatatatcccgatacttgtatctatggacgactgtttgatgaccagtttgaccctgatatcgccgcagacacgattgacattttattagttatcgcgttatgtaaaaccaacaagtacccgattgtaggaagtcaggcggtaatatttgagcataataaaatccgcaaccttgtacggcgggacgctatagacgaacaatacaaaaaaattatcgaccgtagcgtaactataacagcaaacgtcggctcgcgcgcgcaggtactgcaaaccaaaggcgtgaaactcatggatagttaccacctcgcggcggcagaggcggcgggcgcggatgcgttgctgaccgtagacaaagatttataa

SEQ ID NO: 7026 - protein, 121 aa, Unknown
  Obtained from environmental sample
  misc_feature (1)..(121): Xaa is any amino acid
MIIYPDTCIYGRLFDDQFDPDIAADTIDILLVIALCKTNKYPIVGSQAVIFEHNKIRNLVRRDAIDEQYKKIIDRSVTITANVGSRAQVLQTKGVKLMDSYHLAAAEAAGADALLTVDKDL

SEQ ID NO: 7027 - DNA, 735 bp, Unknown
  Obtained from environmental sample
  misc_feature (1)..(735): n is a, c, g, or t
gtgacgccagggaagtaccaaggcactggattcagcgtcgaaaaaagcggggcggaaatgacggctatgtatttacaggcaagaattgattctacagnattgccgggaaaagcgcttctcttgcttgacggaaaaccgcttgtaatgcgggttatggaagcgttaaaccatattcccgccgacctaagaatactggcctgtacggaagattcaatttcttcttttacgcctttggcgcaggaagcggattttcaaatattagcgggtcctaaagaggacgttcttaaacgttactgtcttgcaatccgcaaatattcaataaccagagtaatcagggcgacaggcgacaacccttttgttttcgcggacgcagccgctttcattaacacggaagcttcatcccttaacgcggattacgcaggttttttaaaccttccctacggcgcgggcgttgaatccgtttcttcttcggctctccttcgcgccgcagaagaagccgctcttccatccgagcgcgaacatgtttgcccgtatttatacaatcaccctgaattgttctttgtttaccgtcctgtcgctcctgaacgctggctttttcccgacatccgcattaccgttgacactcaggaagactacaaccgcgcggcggaattgtactgcgcgttaaataatgagccagacagataccacggggagacaattataaagaaatacgcggagatatttcataaatga

SEQ ID NO: 7028 - protein, 244 aa, Unknown
  Obtained from environmental sample
  DOMAIN (22)...(234): Cytidylyltransferase
  misc_feature (1)..(244): Xaa is any amino acid
MTPGKYQGTGFSVEKSGAEMTAMYLQARIDSTXLPGKALLLLDGKPLVMRVMEALNHIPADLRILACTEDSISSFTPLAQEADFQILAGPKEDVLKRYCLAIRKYSITRVIRATGDNPFVFADAAAFINTEASSLNADYAGFLNLPYGAGVESVSSSALLRAAEEAALPSEREHVCPYLYNHPELFFVYRPVAPERWLFPDIRITVDTQEDYNRAAELYCALNNEPDRYHGETIIKKYAEIFHK

SEQ ID NO: 7029 - DNA, 456 bp, Unknown
  Obtained from environmental sample
  misc_feature (1)..(456): n is a, c, g, or t
atgcaaaacgcaacttatgctaaaccaggtctcggacaataccgacaagcctccgttgaaaccgccgaccgcgggcaattgatcattatgatctacgaccattgcataaaatggtgcggtatagccagagaagctttagaagccggccagcttgcccgcaaggcagaagcctgccacaaggtagaagccggactaagcgagcttctgaccgctttggatatggaaaaaggcggcgatatagcaaaaaatctttggagactatacgatttttacagccaccacatccacgaaggcaatataaaaaacattgccaaaaacttcacagaagttgcagatatgatggggcagctcagagaatcttggcaaaaagcccttgggcaggttcgccaagacagaacactcgcaaacaatttggcagcaggaactccacgcagctatgttagtatggtgggataa

SEQ ID NO: 7030 - protein, 151 aa, Unknown
  Obtained from environmental sample
  DOMAIN (6)...(128): Flagellar protein FliS
  misc_feature (1)..(151): Xaa is any amino acid
MQNATYAKPGLGQYRQASVETADRGQLIIMIYDHCIKWCGIAREALEAGQLARKAEACHKVEAGLSELLTALDMEKGGDIAKNLWRLYDFYSHHIHEGNIKNIAKNFTEVADMMGQLRESWQKALGQVRQDRTLANNLAAGTPRSYVSMVG

SEQ ID NO: 7031 - DNA, 420 bp, Unknown
  Obtained from environmental sample
  misc_feature (1)..(420): n is a, c, g, or t
ttgattccgataatcaggatagaaggagaaagaattatggttggcggtgtttcaagcattacaatacccaccctcagctactcgtcaggacaatacgggaaaatggcccttcccgtcgattctacatggcttatttactctcactttgaacacgtttccggcattcccgccccggatggaacccagggtgtttctatcagcaagctaaaccttctggacgtgcttatcggcatgatcaaccagattaataaaactcctgcttctcagacttcggcgaatttgaatcctactgccggcgtagacgacttaattgcgaatctggaaaaccaaatccggcaggcccaggccgccagcgaggcaatgccttactacccttccccaaacgtggaaagcggtatgctgtttagcctttttagctag

SEQ ID NO: 7032 - protein, 139 aa, Unknown
  Obtained from environmental sample
  misc_feature (1)..(139): Xaa is any amino acid
MIPIIRIEGERIMVGGVSSITIPTLSYSSGQYGKMALPVDSTWLIYSHFEHVSGIPAPDGTQGVSISKLNLLDVLIGMINQINKTPASQTSANLNPTAGVDDLIANLENQIRQAQAASEAMPYYPSPNVESGMLFSLFS

SEQ ID NO: 7033 - DNA, 756 bp, Unknown
  Obtained from environmental sample
  misc_feature (1)..(756): n is a, c, g, or t
atgagggaaaaaaaattcggtgactcgggcgcaagtgtcgtaattgaggaattcttgacagggccggaagtttccgttcttgcctttacggacggaaaaaccgtagtacccatggtttcgtccatggaccacaaacgcgcttacgacggcaatgaaggccccaacacgggcggcatgggcgtaatagcgcctaatccccactacacggatgagattgccgctatatgcgaaaaaaccatatttttacccagtattaacgcgatgagggaagaaggctgtccgttcaaaggctgtctgtacttcgggcttatgctcacttccaaaggccccgttgtaattgagtacaactgccgcttcggagaccctgaagctcaggcggtgctgcccctgctggaaacaagcctgttggaagtaatggaagccgtaacggacgaaaggctttctgaaataaagataaactggaaaaacgagcattgtgcctgcgttattctggcaagcgggggctacccgctgtcctacaaaacaggttttgtcattgcagggcttcccggggctgaaaaaagcggagcggaggtatatcatgccggaaccgaatacaggcaggcggaaagctctttttacacttccggaggccgtgttttaagcgtaagcgcccttgaaaagacgcttaaaacagcccttgaaaaggcgtataaagcagttgattttattaattttgagggaattcactaccgaaaagacataggaaagtactaa

SEQ ID NO: 7034 - protein, 251 aa, Unknown
  Obtained from environmental sample
  DOMAIN (158)...(250): Phosphoribosylglycinamide synthetase, C domain
  misc_feature (1)..(251): Xaa is any amino acid
MREKKFGDSGASVVIEEFLTGPEVSVLAFTDGKTVVPMVSSMDHKRAYDGNEGPNTGGMGVIAPNPHYTDEIAAICEKTIFLPSINAMREEGCPFKGCLYFGLMLTSKGPVVIEYNCRFGDPEAQAVLPLLETSLLEVMEAVTDERLSEIKINWKNEHCACVILASGGYPLSYKTGFVIAGLPGAEKSGAEVYHAGTEYRQAESSFYTSGGRVLSVSALEKTLKTALEKAYKAVDFINFEGIHYRKDIGKY

SEQ ID NO: 7035 - DNA, 453 bp, Unknown
  Obtained from environmental sample
  misc_feature (1)..(453): n is a, c, g, or t
ttggtaataaaaaatcatgccgataataaaattataaaggtggtaggtaaaatggcggatgacaaaaaacttaaaatttatttgattgatgatgatgatataaaccttacgactgccgagttgtttttaagggacgaatatgaaatcaagaaatctcaggtcgggcaagaggctctggactgcataaagagcaatgaattcgtgccggatataatattgctggatgtagtaatgccaaccatgagcggctgggaagtctacaagaagatgagggaaataggctccatgaagaacgttccgatagcatttgtaacatcgcttgtggaagaagaagaaaagaaaaaagcctataaaatgggagctgccgattatatcatcaaaccgtttaacatgacggagctgaagggcagaattaaggaaatcgtcagaaaatataaaataacaaaagcctaa

SEQ ID NO: 7036 - protein, 150 aa, Unknown
  Obtained from environmental sample
  DOMAIN (24)...(139): Response regulator receiver domain
  misc_feature (1)..(150): Xaa is any amino acid
MVIKNHADNKIIKVVGKMADDKKLKIYLIDDDDINLTTAELFLRDEYEIKKSQVGQEALDCIKSNEFVPDIILLDVVMPTMSGWEVYKKMREIGSMKNVPIAFVTSLVEEEEKKKAYKMGAADYIIKPFNMTELKGRIKEIVRKYKITKA

SEQ ID NO: 7037 - DNA, 606 bp, Unknown
  Obtained from environmental sample
  misc_feature (1)..(606): n is a, c, g, or t
gtgcaaaagcaattatcagcatatctcggagtcccagattttgcaggtccaagacttatagacgaaaaacgcgcaggcataacaacagggctcgcgtggactccagttggcggcgatgttctgcatatagagtgcatacttttacccggcaagggaaaattgcagcttacggggcacttgggcgatgttatgaaggaatctgctcaaatagccctttccttggttagagaacgtgcaaaaaaatacaaaatcccagaagacaaattccgcaaaagcgatgttcatttgcattttcccgaaggcgcaacccccaaggacggtccttctgcgggcatagcgataacaatagcaatgctctctgcattcacaggtcatctcatttcgcccttcatagctttcacaggcgaagtgagccttattggtcgtctcattgcgattggtggtttaaaagaaaaatctctagccgctttggactccggagtgaaaagattatttttgccaaaagacaaccaaaagaatgtggaagatttgcccgatttggttaagaatgggttggaaataaatatgcacacgcatattgatgaggttatagagaagttgttttag

SEQ ID NO: 7038 - protein, 201 aa, Unknown
  Obtained from environmental sample
  DOMAIN (2)...(201): Lon protease (S16) C-terminal proteolytic domain
  misc_feature (1)..(201): Xaa is any amino acid
MQKQLSAYLGVPDFAGPRLIDEKRAGITTGLAWTPVGGDVLHIECILLPGKGKLQLTGHLGDVMKESAQIALSLVRERAKKYKIPEDKFRKSDVHLHFPEGATPKDGPSAGIAITIAMLSAFTGHLISPFIAFTGEVSLIGRLIAIGGLKEKSLAALDSGVKRLFLPKDNQKNVEDLPDLVKNGLEINMHTHIDEVIEKLF

SEQ ID NO: 7039 - DNA, 771 bp, Unknown
  Obtained from environmental sample
  misc_feature (1)..(771): n is a, c, g, or t
gtggatagtattcttgttaggctttatcaagctgcggaatacaatgttcaagcaacggaaaggggcatcgtttttgttgatgaaatagataaaattgctcgcaaatccgcaaacccttcaatcaccagagatgtgtctggcgagggtgttcagcagggcttgctaaaaattttggaaggaaccattgccgctataccgcccaagggtggtcgcaagcatccagagcagcttttggttcatataaatacccgcaacattttatttatatgcggcggtgcttttgaaactttggataaggttatttcaaagcgtgtgaattccggcggtggaatgggttttggcgcagatgtggtatctaaaaacgaaagcaaaatcggagaaatactaagcaaatgcgaaccagaagatctaataagttttggcttgctcccagaactcgttggcaggctgcctgttatagttagcctaaacgagctagacgaagccgcgctactgagcattttaaccgaaccgcaaaattccttggtgaaacaatacacaaaactctttgcaatggacggaatagaactctcttttaccaaagatgcttttgatgctatagtcaaaaaaaccgttgagcaaaaaacaggggcgcgtgggcttcgttctgttctggaaaaaatattgatgccttatatgtttgaggtttcaaaatatagagaacaggctgttttaaaaatagattccaaaattgttcacgcagcaatagaaaaagaaaaaaagcagaggtaa

SEQ ID NO: 7040 - protein, 256 aa, Unknown
  Obtained from environmental sample
  DOMAIN (1)...(153): ATPase family associated with various cellular activities (AAA)
  misc_feature (1)..(256): Xaa is any amino acid
MDSILVRLYQAAEYNVQATERGIVFVDEIDKIARKSANPSITRDVSGEGVQQGLLKILEGTIAAIPPKGGRKHPEQLLVHINTRNILFICGGAFETLDKVISKRVNSGGGMGFGADVVSKNESKIGEILSKCEPEDLISFGLLPELVGRLPVIVSLNELDEAALLSILTEPQNSLVKQYTKLFAMDGIELSFTKDAFDAIVKKTVEQKTGARGLRSVLEKILMPYMFEVSKYREQAVLKIDSKIVHAAIEKEKKQR

SEQ ID NO: 7041 - DNA, 369 bp, Unknown
  Obtained from environmental sample
  misc_feature (1)..(369): n is a, c, g, or t
ttgactatagcatcaaaagcatctttggtaaaagagagttctattccgtccattgcaaagagttttgtgtattgtttcaccaaggaattttgcggttcggttaaaatgctcagtagcgcggcttcgtctagctcgtttaggctaactataacaggcagcctgccaacgagttctgggagcaagccaaaacttattagatcttctggttcgcatttgcttagtatttctccgattttgctttcgtttttagataccacatctgcgccaaaacccattccaccgccggaattcacacgctttgaaataaccttatccaaagtttcaaaagcaccgccgcatataaataaaatgttgcgggtatttatatga

SEQ ID NO: 7042 - protein, 122 aa, Unknown
  Obtained from environmental sample
  misc_feature (1)..(122): Xaa is any amino acid
MTIASKASLVKESSIPSIAKSFVYCFTKEFCGSVKMLSSAASSSSFRLTITGSLPTSSGSKPKLIRSSGSHLLSISPILLSFLDTTSAPKPIPPPEFTRFEITLSKVSKAPPHINKMLRVFI

SEQ ID NO: 7043 - DNA, 789 bp, Unknown
  Obtained from environmental sample
  misc_feature (1)..(789): n is a, c, g, or t
atgggcctgcgcgtacggcacgacttgttctccgccgacacaagaatagacagcggacagatatacgccgcaagccgtcttgtgtcgcaggtgacgggagttaaggttcagccgaacaaggctatcgtgggcgacaacgcgttcgcgcatgaagcgggaatccaccagcacggtgttttggcaaagagggaaacttacgagattatgactccgcagtcaataggcattccgcagaaccgcatggtgcttggcaagcattcaggccgccacgcttttgaagagcgccttaaagacttgggtttgggtgttaaacctgaagactttgagaaagtttttgccgacttcaaagaccttgccgataaaaagaaagttgtcagcgaccgcgacatagaagcgcttgtaatggacaggacggtctccgtccccgaaacatggaaactggatcattgggctgtgaacacaggctcggccttaggcgcagcaggcgttatccgcttacagcacaaagacggcgaatgcaaaaaactggtctgtctcggcgacggccccatagactcaatctttaaagcgatcaatcaaatagtaggcaaagagccggagttggaactttatgaaataggagcggttacaggcggctcctcttcgcagggcgaggcaatggtaaaaatcgcgatggacggccgccgctggaacgggcgcggcgtctccacagacgtgattgagtcttcgataatggcatacctctccgcgattaaacgcatggaatgggacttagcgcagagagattag

SEQ ID NO: 7044 - protein, 262 aa, Unknown
  Obtained from environmental sample
  DOMAIN (124)...(255): LeuA allosteric (dimerisation) domain
  misc_feature (1)..(262): Xaa is any amino acid
MGLRVRHDLFSADTRIDSGQIYAASRLVSQVTGVKVQPNKAIVGDNAFAHEAGIHQHGVLAKRETYEIMTPQSIGIPQNRMVLGKHSGRHAFEERLKDLGLGVKPEDFEKVFADFKDLADKKKVVSDRDIEALVMDRTVSVPETWKLDHWAVNTGSALGAAGVIRLQHKDGECKKLVCLGDGPIDSIFKAINQIVGKEPELELYEIGAVTGGSSSQGEAMVKIAMDGRRWNGRGVSTDVIESSIMAYLSAIKRMEWDLAQRD

SEQ ID NO: 7045 - DNA, 924 bp, Unknown
  Obtained from environmental sample
  misc_feature (1)..(924): n is a, c, g, or t
ttgacagattggccgagagtgacggcgagggtaaaggccaagatcaccgtgaatgcgtataacatatacactgtaaagtgggtatggacgaccggcgcaagcacgcctccggctacgacgcaagaagtaaagaaagagggcagtaccaatccgaggatagacgtccccgctccgatagatagggggaccggctggacgttcttaggttggtacagcgacgagttgaagacgcagcaggtgacggcgaagacggtcacgatattgagggacacgtcgttctacgcgaagtggaagaacgacgcgggagtctacacgatagctttcgaagtcaaccccgaaggcgccagaggtgttccgcccgtgtatcccaagtcgactcaaaccgacaataagggcaggctgacggagttgcctacactggatgatgagcgtgttggttacaagttcagcgcctggtacacgacgcccaagacgggcggtacgaaagtggtcttgggcactaagttcgaggacgacgcgacggtctacgcccgttgggacttgatgacgtacaatataacgtacgatctcaagggcggaacggttacgggcaatcccacttcctatacagtgaagaccgagtccccgattattatcaaagacccggtcaggcccggctacagattcgaaggctggacggatgaggagggcgatgatttggattggaatgagtctgaaggtatctctagactgtacatatacccgaccgaaggagaagtcaagaacaagaagttcacggcgaattgggaagcgagcgaatacgcaataacattcagccgtgccggcggaatatgggcggaggacgcggatgtggaagaagaggtttatacggttcccggcggcggctggctgcttccgaaatcgctgcccaccgataagcaatag

SEQ ID NO: 7046 - protein, 307 aa, Unknown
  Obtained from environmental sample
  misc_feature (1)..(307): Xaa is any amino acid
MTDWPRVTARVKAKITVNAYNIYTVKWVWTTGASTPPATTQEVKKEGSTNPRIDVPAPIDRGTGWTFLGWYSDELKTQQVTAKTVTILRDTSFYAKWKNDAGVYTIAFEVNPEGARGVPPVYPKSTQTDNKGRLTELPTLDDERVGYKFSAWYTTPKTGGTKVVLGTKFEDDATVYARWDLMTYNITYDLKGGTVTGNPTSYTVKTESPIIIKDPVRPGYRFEGWTDEEGDDLDWNESEGISRLYIYPTEGEVKNKKFTANWEASEYAITFSRAGGIWAEDADVEEEVYTVPGGGWLLPKSLPTDKQ

SEQ ID NO: 7047 - DNA, 315 bp, Unknown
  Obtained from environmental sample
  misc_feature (1)..(315): n is a, c, g, or t
atgctggatgctcttcgccgtgtgtcgcaggttgttgaacagaaatcacatcgtgtatatatagggcttaaaccgggaattatggaaatttattccgaggaaggtgaaattgcggaaggaaaaactgaaattccctgtaaatatgatggtgaagaagtagcatttgctcttaactatcaataccttgaagaaccttttaaggtgatgaattgtgaagagatttgcataaattttacagggccaagcaaggcaataaccatagtccctgtccccaagacggattatttccacatcgtaatgcccatgcaatcctga

SEQ ID NO: 7048 - protein, 104 aa, Unknown
  Obtained from environmental sample
  DOMAIN (1)...(103): DNA polymerase III beta subunit, C-terminal domain
  misc_feature (1)..(104): Xaa is any amino acid
MLDALRRVSQVVEQKSHRVYIGLKPGIMEIYSEEGEIAEGKTEIPCKYDGEEVAFALNYQYLEEPFKVMNCEEICINFTGPSKAITIVPVPKTDYFHIVMPMQS

SEQ ID NO: 7049 - DNA, 741 bp, Unknown
  Obtained from environmental sample
  misc_feature (1)..(741): n is a, c, g, or t
gtggaaagcacctacggcgaccgccgccatgacaaaaccagcgacgctatggaaaaacttgcggagctggccaaacgcgccgtggagaccaggggaaggattatcattccctcgtttgccatagagcgtacccaggaactggtgtattatttccacctgcttgttgacgacgggataataccggaaatcccgatctatgtggattccccaatggcgactaacgcgacaacgattttccaggtacaccctgaatgttacgacgaagaaataatgaaagcctttatcaaacaccacaaaaacccctttggttttaacaatcttcactttactaccagcgtccaggaatccaaagctttgaacgatgaaaagggcccccttatcatcatctccgcggacgggatgtgcgaggccgggcgtatccagcaccacctgatccacagcatacaggatcccaacacaaccattcttctcgtggggtacatggcggaaaacaccctgggacgccgtatacgcaaccgcgagagcgaggtaaaaatccatgggatgtggctcanacttaaggcccatgttgagcagataaacgcgttcagcgcccacgcggattatgaggaaacggtagactggcttaacgagctggacagatcgcgcttaaaggggctttttatggttcacggcgaaaaaaaggcgcaggcggcgttcaaaaataccttgccgaacaagggtatgccaacacggagatag

SEQ ID NO: 7050 - protein, 246 aa, Unknown
  Obtained from environmental sample
  DOMAIN (184)...(228): RNA-metabolising metallo-beta-lactamase
  misc_feature (1)..(246): Xaa is any amino acid
MESTYGDRRHDKTSDAMEKLAELAKRAVETRGRIIIPSFAIERTQELVYYFHLLVDDGIIPEIPIYVDSPMATNATTIFQVHPECYDEEIMKAFIKHHKNPFGFNNLHFTTSVQESKALNDEKGPLIIISADGMCEAGRIQHHLIHSIQDPNTTILLVGYMAENTLGRRIRNRESEVKIHGMWLXLKAHVEQINAFSAHADYEETVDWLNELDRSRLKGLFMVHGEKKAQAAFKNTLPNKGMPTRR

SEQ ID NO: 7051 - DNA, 735 bp, Unknown
  Obtained from environmental sample
  misc_feature (1)..(735): n is a, c, g, or t
atgtttagaatcaaaaccatgaataaaatttctcccctggggttggaaattttccctgcgacccgatacgaagtgggcagtgaggtttccgacccagacgcaatactggtcaggagcgcggatcttcattcggtagaaattcccgatactgtgctggccattgcaagggctggcgcaggctataacaacatccccgtttcggcctgttcagcgcggggaatcgctgtttttaacacacccggcggaaacgcgaatgccgtaaaagagctggccctcgcggccttgcttctttccgcaaggaacattgttggcgggattgactggtgccgaaccatagcggacaaagctgacgaagtgcccgatctggtagagaaggggaaatcccgctttgacggcccggaactcaagggcaagaccctgggcgtggttgggcttggcgcgattggggtaatggttgccaatgacgcttccgcccttggcatgaatgtgatcggctacgatccttttatttcggtggaagccgcctggaatctttcccgttccgttgcacgggccgaaaccctggaagggctcctgtcaaaggccgactacgtaagccttcatctgcctttaagcgataacacaaaaggactattaagcgctgaaaaaatccgctgtatgaaaaacggggcaaggctcatcaacctggtccgagggggacttggttgtcgaaactgccgtcctctctgctcttaa

SEQ ID NO: 7052 - protein, 244 aa, Unknown
  Obtained from environmental sample
  DOMAIN (1)...(193): D-isomer specific 2-hydroxyacid dehydrogenase, catalytic domain
  misc_feature (1)..(244): Xaa is any amino acid
MFRIKTMNKISPLGLEIFPATRYEVGSEVSDPDAILVRSADLHSVEIPDTVLAIARAGAGYNNIPVSACSARGIAVFNTPGGNANAVKELALAALLLSARNIVGGIDWCRTIADKADEVPDLVEKGKSRFDGPELKGKTLGVVGLGAIGVMVANDASALGMNVIGYDPFISVEAAWNLSRSVARAETLEGLLSKADYVSLHLPLSDNTKGLLSAEKIRCMKNGARLINLVRGGLGCRNCRPLCS

SEQ ID NO: 7053 - DNA, 588 bp, Unknown
  Obtained from environmental sample
  misc_feature (1)..(588): n is a, c, g, or t
atgatactccttatagacaattacgatagttttacctataacatttaccaataccttttggaacttggggcagatgtaaaagttattagaaatgataaaattacaatagaagaagcggcggaattaaaacctgaaaaactcctgctttcgcctggtcccggccgccccgaagatgctgggataaccgttgcatcaattggttattttgcgggcaaaattcctatttttggtgtatgtcttggtcaccaagccatagggcatttttatggcggaaaaattataggtgcaaaaagacttatgcacggcaaaacttcaaatatacaggcaaacggcaaaggcgtgtttgcaggcattgacgaaccctttgacggaatgcgttatcacagccttgttattgaaaaagaaagtttaccggattgtttggaaataaccgccacttcggaagatggcgagataatgggagttcgccacaaaacgctcaatgttgaggggattcaattccaccccgaaagcataatgaccccactggggaagaggatgctggggaattttatgcaatcaaattcacaacaaaagaagtttctatga

SEQ ID NO: 7054 - protein, 195 aa, Unknown
  Obtained from environmental sample
  DOMAIN (1)...(170): Peptidase C26
  misc_feature (1)..(195): Xaa is any amino acid
MILLIDNYDSFTYNIYQYLLELGADVKVIRNDKITIEEAAELKPEKLLLSPGPGRPEDAGITVASIGYFAGKIPIFGVCLGHQAIGHFYGGKIIGAKRLMHGKTSNIQANGKGVFAGIDEPFDGMRYHSLVIEKESLPDCLEITATSEDGEIMGVRHKTLNVEGIQFHPESIMTPLGKRMLGNFMQSNSQQKKFL

SEQ ID NO: 7055 - DNA, 666 bp, Unknown
  Obtained from environmental sample
  misc_feature (1)..(666): n is a, c, g, or t
atgatagtgctttcctgttattgggcaatccgtttccgggaagtactgcgggcggagatttatctcgatcttattttactgctgggaattttcgcggttgtgctgggttttggaatccttccgatgctgctctattttgtcaggcccagggtaaatccctggacggtattatacggttcactggggccggcaatagcggcatttttttccggtgacgttaatttttcgctgccggtgctgatgagccatgctcaggaaaatcttggcgtacagcggaggagcaatgcgatcagcctgactctgtttaatactttttgccgggcgggcagcgctatggctgctactgtcgcttttattgttatttttaagtcttattccagcctggaaataacatcggcggaaattctgtccataagcatccgcgcccttgcaatttctttcctgcttgcccgtcatccgggcgatggcgcctataccgctcttgccgtgctgtgcctgggctatggcaaaggctttgaagcgggttaccttatccttaaaccgctggcgttctatctggttgccgtgggcgcttttcttgacgtaatgattgcctcgtttgccgcttatgcggtggcgcgtatcagcggctttgttgatgaaaaaagcccggcgcatggtatatga

SEQ ID NO: 7056 - protein, 221 aa, Unknown
  Obtained from environmental sample
  misc_feature (1)..(221): Xaa is any amino acid
MIVLSCYWAIRFREVLRAEIYLDLILLLGIFAVVLGFGILPMLLYFVRPRVNPWTVLYGSLGPAIAAFFSGDVNFSLPVLMSHAQENLGVQRRSNAISLTLFNTFCRAGSAMAATVAFIVIFKSYSSLEITSAEILSISIRALAISFLLARHPGDGAYTALAVLCLGYGKGFEAGYLILKPLAFYLVAVGAFLDVMIASFAAYAVARISGFVDEKSPAHGI

SEQ ID NO: 7057 - DNA, 393 bp, Unknown
  Obtained from environmental sample
  misc_feature (1)..(393): n is a, c, g, or t
ttggaagccctccgtgggggtggtattttgcgccttttgccaaaaaaaacccgtttccggaatataaactggagggttttgttttttggggccctttttgaagagatagggcgggggattccctcacttatgctttttatccgcatacaaattcggaaagggggaggagggcgcagccttccaaaccgttcaatgggcgctgttcagtttccaagccacaacagcatggttttttttgggggagtatcacaggctgccgatttttcgcggatgtcaaaagcaagccgtcccgataacgggacagtggttcgcccccagccaaaattgggaggcaacgacccctgcccctggggaaggggcaaaaagtacaaattttcccatggagcccggtag

SEQ ID NO: 7058 - protein, 130 aa, Unknown
  Obtained from environmental sample
  misc_feature (1)..(130): Xaa is any amino acid
MEALRGGGILRLLPKKTRFRNINWRVLFFGALFEEIGRGIPSLMLFIRIQIRKGGGGRSLPNRSMGAVQFPSHNSMVFFGGVSQAADFSRMSKASRPDNGTVVRPQPKLGGNDPCPWGRGKKYKFSHGAR

SEQ ID NO: 7059 - DNA, 828 bp, Unknown
  Obtained from environmental sample
  misc_feature (1)..(828): n is a, c, g, or t
gtggcctgcagtagcgacgaatcggttagctatactgtcttatttgaaagtaatggcggccaacatgaggccggtgagattattgttactggtcgtacggtttatcagcctggtgatccaacaaaggcaggatcggtatttaaaggctggtttaccgatcctgctttaactaaaaaatacgacttttatagcatagttaccagtgactttactttatacgctaagtgggtaccaattacatcaggcggctccggtggtggttctggtggcggcggttctggtggtggtggttctggtagcggagacggtagttctggcggcggcggctccagtagcggtggcggttctggtagcggcggtggctctggtggcggcgacggctccggtggtggcggtggctccggtagcggcaatggagggggcggcacaaatggcgacgatagtggaggctcaggcgataacggcggcacaactggcggcgatggcggtaccggcggaggtgacggaggcggcagtaccggaggggatgataacactagcggaagtggcgacgacggaggcaataccggtgacgccttaattcctgaccgtggagttgctgttgttagctttgacagtaacggtggaaaagaagtcattaaaccgcgaactgtgcatagtggcgatgctttaaatatgagtcctgatgaaattcctacaagaaacgggtttgttttcgataactggtataccgatgaaaatatcttcaccaagcccttcgcattttcttctacaccggtaacagaagacattaccctctacgcaaattggctggtcgctgtaacttga

SEQ ID NO: 7060 - protein, 275 aa, Unknown
  Obtained from environmental sample
  misc_feature (1)..(275): Xaa is any amino acid
MACSSDESVSYTVLFESNGGQHEAGEIIVTGRTVYQPGDPTKAGSVFKGWFTDPALTKKYDFYSIVTSDFTLYAKWVPITSGGSGGGSGGGGSGGGGSGSGDGSSGGGGSSSGGGSGSGGGSGGGDGSGGGGGSGSGNGGGGTNGDDSGGSGDNGGTTGGDGGTGGGDGGGSTGGDDNTSGSGDDGGNTGDALIPDRGVAVVSFDSNGGKEVIKPRTVHSGDALNMSPDEIPTRNGFVFDNWYTDENIFTKPFAFSSTPVTEDITLYANWLVAVT

SEQ ID NO: 7061 - DNA, 606 bp, Unknown
  Obtained from environmental sample
  misc_feature (1)..(606): n is a, c, g, or t
atgtcttctgttaccggtgtagaagaaaatgcgaagggcttggtgaagatattttcatcggtataccagttatcgaaaacaaacccgtttcttgtaggaatttcatcaggactcatatttaaagcatcgccactatgcacagttcgcggtttaatgacttcttttccaccgttactgtcaaagctaacaacagcaactccacggtcaggaattaaggcgtcaccggtattgcctccgtcgtcgccacttccgctagtgttatcatcccctccggtactgccgcctccgtcacctccgccggtaccgccatcgccgccagttgtgccgccgttatcgcctgagcctccactatcgtcgccatttgtgccgccccctccattgccgctaccggagccaccgccaccaccggagccgtcgccgccaccagagccaccgccgctaccagaaccgccaccgctactggagccgccgccgccagaactaccgtctccgctaccagaaccaccaccaccagaaccgccgccaccagaaccaccaccggagccgcctgatgtaattggtacccacttagcgtataaagtaaagtcactggtaactatgctataa

SEQ ID NO: 7062 - protein, 201 aa, Unknown
  Obtained from environmental sample
  misc_feature (1)..(201): Xaa is any amino acid
MSSVTGVEENAKGLVKIFSSVYQLSKTNPFLVGISSGLIFKASPLCTVRGLMTSFPPLLSKLTTATPRSGIKASPVLPPSSPLPLVLSSPPVLPPPSPPPVPPSPPVVPPLSPEPPLSSPFVPPPPLPLPEPPPPPEPSPPPEPPPLPEPPPLLEPPPPELPSPLPEPPPPEPPPPEPPPEPPDVIGTHLAYKVKSLVTML

SEQ ID NO: 7063 - DNA, 378 bp, Unknown
  Obtained from environmental sample
  misc_feature (1)..(378): n is a, c, g, or t
gtgactttactttatacgctaagtgggtaccaattacatcaggcggctccggtggtggttctggtggcggcggttctggtggtggtggttctggtagcggagacggtagttctggcggcggcggctccagtagcggtggcggttctggtagcggcggtggctctggtggcggcgacggctccggtggtggcggtggctccggtagcggcaatggagggggcggcacaaatggcgacgatagtggaggctcaggcgataacggcggcacaactggcggcgatggcggtaccggcggaggtgacggaggcggcagtaccggaggggatgataacactagcggaagtggcgacgacggaggcaataccggtgacgccttaa

SEQ ID NO: 7064 - protein, 125 aa, Unknown
  Obtained from environmental sample
  misc_feature (1)..(125): Xaa is any amino acid
MTLLYTLSGYQLHQAAPVVVLVAAVLVVVVLVAETVVLAAAAPVAVAVLVAAVALVAATAPVVAVAPVAAMEGAAQMATIVEAQAITAAQLAAMAVPAEVTEAAVPEGMITLAEVATTEAIPVTP

SEQ ID NO: 7065 - DNA, 423 bp, Unknown
  Obtained from environmental sample
  misc_feature (1)..(423): n is a, c, g, or t
atggttaagtattacaaattgcaagcaggaagaattgttgcctccgaaaagcacgaagcgcaggttacaatgctggttagcccagaccaagaggaagtaaattcccttgtaaaagttattgggatagatgagcacacaatttcttctgcttttgacgtggaagaacttgcgcgtttggagtacgaagatgattatacagccattattttcaaaaagcctaaaagctataatgcagaagaccaatttatgtttcgcataagctcttttggtatttttgcttatgcagataaaataataattttaagcgatgccgtgctgcctttggtggacgaaaaacggtttttccgcataacatcgctgaatatgcttgtgctaaaactgctgaactattcctcttaccattcagcgagcacctgcgcataa

SEQ ID NO: 7066 - protein, 140 aa, Unknown
  Obtained from environmental sample
  misc_feature (1)..(140): Xaa is any amino acid
MVKYYKLQAGRIVASEKHEAQVTMLVSPDQEEVNSLVKVIGIDEHTISSAFDVEELARLEYEDDYTAIIFKKPKSYNAEDQFMFRISSFGIFAYADKIIILSDAVLPLVDEKRFFRITSLNMLVLKLLNYSSYHSASTCA

SEQ ID NO: 7067 - DNA, 489 bp, Unknown
  Obtained from environmental sample
  misc_feature (1)..(489): n is a, c, g, or t
atggcaggcgcacaggcggcgggggataatgcatttccccaggaattgctgacttttatcgatgaatggaaggtaaaaccggggagtctgatcatgattctccacaaaacccaggaagtttacggctttatttcaagaccggcggcggaacagctttcccatcttacagggattcctctggcccgaatctacggggttattaccttttaccactttttcaagactaccaaacccggcaaacacaaaatttccgtatgcctgggaacggcgtgctatctgaagggcggacaggatctgatcgacgaaacccgcagccttttggggctggcgccggacggcgttaccgaagacggccagttctcggtggatccggttcgttgcgtcggttgttgcggcctcgccccggtattaaccgtgggtaatgacaccttcggcaagctgaccaaggatatgctccccggcattatcgccaagtatcagaatgtatag

SEQ ID NO: 7068 - protein, 162 aa, Unknown
  Obtained from environmental sample
  DOMAIN (11)...(160): Respiratory-chain NADH dehydrogenase 24 Kd subunit
  misc_feature (1)..(162): Xaa is any amino acid
MAGAQAAGDNAFPQELLTFIDEWKVKPGSLIMILHKTQEVYGFISRPAAEQLSHLTGIPLARIYGVITFYHFFKTTKPGKHKISVCLGTACYLKGGQDLIDETRSLLGLAPDGVTEDGQFSVDPVRCVGCCGLAPVLTVGNDTFGKLTKDMLPGIIAKYQNV

SEQ ID NO: 7069 - DNA, 402 bp, Unknown
  Obtained from environmental sample
  misc_feature (1)..(402): n is a, c, g, or t
atgcactttacccttgccgatctggtcgccgatattacgcagaatggctgtgaatcgggggcgaaactggttgagcttgaggtaagtgagactgagaaagaattccggtttttggtaagggataacggcaagggcatgaccgccgaggaattgagcagagcccttgatccttttgtaacggacggagtgaagcacccgcaccggaaggttggattggggcttccttttttaatacagaccgccgagcagtccggcggggggctgggatgtacagtccgaaaaaagggaagggaactacggcgacggcatggttcgataccggcaatgtggacccgccgccggggggggatttcccagtatgttcaggcctatctgatgtttacggggccggataaatggtga

SEQ ID NO: 7070 - protein, 133 aa, Unknown
  Obtained from environmental sample
  DOMAIN (3)...(128): Histidine kinase-, DNA gyrase B-, and HSP90-like ATPase
  misc_feature (1)..(133): Xaa is any amino acid
MHFTLADLVADITQNGCESGAKLVELEVSETEKEFRFLVRDNGKGMTAEELSRALDPFVTDGVKHPHRKVGLGLPFLIQTAEQSGGGLGCTVRKKGRELRRRHGSIPAMWTRRRGGISQYVQAYLMFTGPDKW

SEQ ID NO: 7071 - DNA, 612 bp, Unknown
  Obtained from environmental sample
  misc_feature (1)..(612): n is a, c, g, or t
atggcttataaaaactttattctgacctgcggcggcactgcctgtgaatccaacaaagggaatgaaattcacgaccaactcattgccgaggcggagaagcagggtgttaagtctgaggtacagattgttaaaacaggctgtttcgggttttgcgagatggggccaatcgtcaaagtcctgccggatgaatcattctatgtattggtgaagcctgaggacgcgaaggagatcattgccgagcacatcatcaagggccgcgaggttaaacgacttctctataaagatgaaggccatgcaaaaaagtctgactccgtagaggacatccagttctatcagaagcaattcagggtagtgcttcgcaactgcggctttatcgatcctgaaagcattgatgagtacattgcccgcgaaggctacaagggccttgaaaaagtcctgtttgaatggaatcaggagcagatcatcgcggaggtgaaggcttccggtctgcgcggacggggcggcgcgggcttccccacctggctcaagtgggaccttgcccgcaaagctcagggcgatgttaaatacgttatctgcaatgccgacgaaggcgaccccgctcggccgatctga

SEQ ID NO: 7072 - protein, 203 aa, Unknown
  Obtained from environmental sample
  DOMAIN (137)...(202): Respiratory-chain NADH dehydrogenase 51 Kd subunit
  misc_feature (1)..(203): Xaa is any amino acid
MAYKNFILTCGGTACESNKGNEIHDQLIAEAEKQGVKSEVQIVKTGCFGFCEMGPIVKVLPDESFYVLVKPEDAKEIIAEHIIKGREVKRLLYKDEGHAKKSDSVEDIQFYQKQFRVVLRNCGFIDPESIDEYIAREGYKGLEKVLFEWNQEQIIAEVKASGLRGRGGAGFPTWLKWDLARKAQGDVKYVICNADEGDPARPI

SEQ ID NO: 7073 - DNA, 810 bp, Unknown
  Obtained from environmental sample
  misc_feature (1)..(810): n is a, c, g, or t
atgcttgccggaatgatccttcttttttttgcgccattcgcaccgccggcacagcaggaattcaccattcgaatccgctttatcatgggctatatccttgttatgggtctggcgatcgtatatgaatacatcagtataaaaaaagaccaaaaggaaaggattctaaaagcggaactggcccaggaaaaaaatataattcaaaccatgaaggataatatcaatcagggtattttcatgatggattctgaacttaaaatactaccgctatattccaagccgcttatttcgattctttcatgttacgattccgaactggcaggtaaaaattttctagatatacttcaggcttccctggacattaaacagcttcagaccatgaagggctacttttccatgattttctcaaaagccaaaagcgccagagttcttgaatctgccaatccaatttcggaatttgattaccgtgtcgatgatcgcgtaaaaaccctcgccacaaattttcaccttattgaacaatcagggaccgaacctctgattatagggataatccaggacataaccagggaaaaagaatacgaaaaagacctgcagatccagagggaagagcaggaaatggaaatgaaaaatatgttcgacgtcctgcaagtcgatcctcttgtatttaacgacttcattgaagatacggaagcgaatttcaattacataaatacgatcctgaaagacagatccctgacagaaaagcaagtgctgacaaaattcttccagactgtccacgccattaagtccaatgcccttatccttggcccttga

SEQ ID NO: 7074 - protein, 269 aa, Unknown
  Obtained from environmental sample
  SIGNAL (1)...(19)
  misc_feature (1)..(269): Xaa is any amino acid
MLAGMILLFFAPFAPPAQQEFTIRIRFIMGYILVMGLAIVYEYISIKKDQKERILKAELAQEKNIIQTMKDNINQGIFMMDSELKILPLYSKPLISILSCYDSELAGKNFLDILQASLDIKQLQTMKGYFSMIFSKAKSARVLESANPISEFDYRVDDRVKTLATNFHLIEQSGTEPLIIGIIQDITREKEYEKDLQIQREEQEMEMKNMFDVLQVDPLVFNDFIEDTEANFNYINTILKDRSLTEKQVLTKFFQTVHAIKSNALILGP

SEQ ID NO: 7075 - DNA, 402 bp, Unknown
  Obtained from environmental sample
  misc_feature (1)..(402): n is a, c, g, or t
atgtcgaaattcttaccgcgctggggtcagcttgccacggccggatcggtgtccaggctctttaagcgcctgggggtcataactttagacggtgaaaagtacactgaagaccaggtgatggaagtggccattgaggggggagccgaagacgtgtccctttcagacggcgtcattgaggttacgacggcgccagaggattttgaaaccgtagtgaacgccttaaccgaaaaaagctttgaaaccatgagcgcggaaatcagcatggttccggaagccgatgtgagtctggataatgacgctaccgccaaagtgctgaagctaatcgataaactggaagaaaacgacgacgttcaaaacgtatactccaacataaatatacccgacgggtttgagtctgagtga

SEQ ID NO: 7076 - protein, 133 aa, Unknown
  Obtained from environmental sample
  DOMAIN (6)...(125): Domain of unknown function DUF28
  misc_feature (1)..(133): Xaa is any amino acid
MSKFLPRWGQLATAGSVSRLFKRLGVITLDGEKYTEDQVMEVAIEGGAEDVSLSDGVIEVTTAPEDFETVVNALTEKSFETMSAEISMVPEADVSLDNDATAKVLKLIDKLEENDDVQNVYSNINIPDGFESE

SEQ ID NO: 7077 - DNA, 546 bp, Unknown
  Obtained from environmental sample
  misc_feature (1)..(546): n is a, c, g, or t
ttgagtctgagtgacagattcagaataatcggtgttgaccccggtctggcatcaaccggctggggtgtggtggagttttcggaaaatcgtctgttctatgttgcccacggctgtatcgaaaccggtgcggaagaccccaggggcaagcgccttcatatcattcatagttcttttttaaaaatattaaaagcttataagccctgcgaagctgccatcgaaaacctttatttcggcaaaaacatttccagcgccatgtctgtcgctgaagcccgcggcgttctgcttttggctttgacaagccaggggcttcccattagggagctgacgcccaacgccataaaaaaagctgtggtgggtgtaaccagggccgataaaagccagattcaggaaatggtgcgccttattctgggattgaggaaataccaaagccggatcacgccgccgatgctttgggtgccgcgatcagcgcctcccacagctttattccgcgtcaggaataggaaatataaacttaaggtaaggcccggattcggagaatctgcttaa

SEQ ID NO: 7078 - protein, 181 aa, Unknown
  Obtained from environmental sample
  DOMAIN (9)...(147): Crossover junction endodeoxyribonuclease RuvC
  misc_feature (1)..(181): Xaa is any amino acid
MSLSDRFRIIGVDPGLASTGWGVVEFSENRLFYVAHGCIETGAEDPRGKRLHIIHSSFLKILKAYKPCEAAIENLYFGKNISSAMSVAEARGVLLLALTSQGLPIRELTPNAIKKAVVGVTRADKSQIQEMVRLILGLRKYQSRITPPMLWVPRSAPPTALFRVRNRKYKLKVRPGFGESA

SEQ ID NO: 7079 - DNA, 345 bp, Unknown
  Obtained from environmental sample
  misc_feature (1)..(345): n is a, c, g, or t
atgcctgatgacgggagaataaagaaagccctgcaaatggcaaatatatgggattttctcgcggcaaaagacggcatcaacaccctggtcggcgaagggggcattcagttaagcggcggtcagcagcagcgtatcggcattgcccgtgccctttacgatgaccccgatgtactggtactcgacgaagccacctccgcgcttgataccgaaaccgaacaaaaaataatggatgaaatttacagcgtaagcgtaaataaaacattgattgtaatcgcccaccggctcagcacggttgagcgctgcggcagaagaattcggattgaaaacggtaaaattatttcatga

SEQ ID NO: 7080 - protein, 114 aa, Unknown
  Obtained from environmental sample
  DOMAIN (2)...(110): ABC transporter
  misc_feature (1)..(114): Xaa is any amino acid
MPDDGRIKKALQMANIWDFLAAKDGINTLVGEGGIQLSGGQQQRIGIARALYDDPDVLVLDEATSALDTETEQKIMDEIYSVSVNKTLIVIAHRLSTVERCGRRIRIENGKIIS

SEQ ID NO: 7081 - DNA, 309 bp, Unknown
  Obtained from environmental sample
  misc_feature (1)..(309): n is a, c, g, or t
atgaaagttgtcatacttgccggcggactcggtacccgtctttcagaagaaacaaatctgataccgaagccaatgatagaaataggcgggcatcctatcctgtggcatattatgaagatttattcttattggggttttaatgaatttgttattcttacaggctataaatcccaggttataaaagattattttatcaattattataccagatattcggacataaccgttgatatggccaataattctgttgaaattcacaatatcagaaatgagccatggaaagtatcaatgctctacaccggggattga

SEQ ID NO: 7082 - protein, 102 aa, Unknown
  Obtained from environmental sample
  misc_feature (1)..(102): Xaa is any amino acid
MKVVILAGGLGTRLSEETNLIPKPMIEIGGHPILWHIMKIYSYWGFNEFVILTGYKSQVIKDYFINYYTRYSDITVDMANNSVEIHNIRNEPWKVSMLYTGD

SEQ ID NO: 7083 - DNA, 498 bp, Unknown
  Obtained from environmental sample
  misc_feature (1)..(498): n is a, c, g, or t
gtggagccagatacctgggcaaaggtggtgaaccgcgttagcggtgcgaattttggcaatatttattgtggatccaaagtgctcggttacagaaaaataaaactcccagaagggcatacttgggaaagctacaccaaactgctgcttgcaacgcttccaaaagcggtttcaatcggttacaagaaaaaattcaccaagttcataaagcactggcaaagcacaggctctgccataaaatcttcttggattccagacgaagcaagtctttctggcaaattctcaactcgtggcaaaaaaaatctgccgcttgtgatttacaaaaaaataccggacaaacttcctttttgggtggaatcaaaaaagattggcccaagctggcggcgcatggctatatgtattttgaaaaacgaccaattgtgccgtaccctttctttttctcaaacaaaaaagcaaagagaaagaatgcaaaacatgtttgaaaaatacagcttaatataa

SEQ ID NO: 7084 - protein, 165 aa, Unknown
  Obtained from environmental sample
  misc_feature (1)..(165): Xaa is any amino acid
MEPDTWAKVVNRVSGANFGNIYCGSKVLGYRKIKLPEGHTWESYTKLLLATLPKAVSIGYKKKFTKFIKHWQSTGSAIKSSWIPDEASLSGKFSTRGKKNLPLVIYKKIPDKLPFWVESKKIGPSWRRMAICILKNDQLCRTLSFSQTKKQRERMQNMFEKYSLI

SEQ ID NO: 7085 - DNA, 417 bp, Unknown
  Obtained from environmental sample
  misc_feature (1)..(417): n is a, c, g, or t
atgacagcatattttgacacaaatgtaatagttgatattttgttaagaagagaaccttttttcaaagattctttcagcgctctgtccgcaatagcaaacaagtcggctaatgggataataggaactagcgcgattacggatatttattacatagtcaataaagaaatgaagagcaaagaaaagtctttaaactcaattttcaacattttaaaaatattattgcttgtggagacgatccctcaagatattttcactgccaaaacattaagcgttcctgattttgaagattcggttatatctgcggtggcggctcgaaacaacgctgactacataatcacaagaaacgtcggagattttgcaaagtcccctattcctgcgatctcgccgcatgattttctgaactgtacgtcgagataa

SEQ ID NO: 7086 - protein, 138 aa, Unknown
  Obtained from environmental sample
  DOMAIN (3)...(124): PIN domain
  misc_feature (1)..(138): Xaa is any amino acid
MTAYFDTNVIVDILLRREPFFKDSFSALSAIANKSANGIIGTSAITDIYYIVNKEMKSKEKSLNSIFNILKILLLVETIPQDIFTAKTLSVPDFEDSVISAVAARNNADYIITRNVGDFAKSPIPAISPHDFLNCTSR

SEQ ID NO: 7087 - DNA, 882 bp, Unknown
  Obtained from environmental sample
  misc_feature (1)..(882): n is a, c, g, or t
gtgctttttaccgagcgaaagctgaagcccggaaaaaagctaaagacaggctattccacagacgcggcgacccttgaagagcttgcccgcgaagatcctcttcccgccttgatactccggcaccgtactctcgcaaaattaaaatccacttatgttgacaccctggcgggcatggcggacagtgaaaaaaggctgcatacaaactttgaccagtgcggaaccgcgacaggccgtctttccagccgggagccgaatctgcaaaatattcccatccgcgcagaggaaggccgccgtatacgcgaagccttcattgccggcccggactgccttttattgtccgctgactacagccagattgagcttgtggttttagcgcacctttcacgggatgaaaacctccttgccgccttcagggacggtacggatgtccatgcccgcaccgccgcgctgatattcggcgtcagcgaagacaaggtaaaaccagaacagcggcgcatggcaaagacgattaatttcggcgtgatgtatggtatgagcgcgttcaggctttcaaacgaattggggatcagcagaaccgacgcggcaaatttcataacggcgtattttaacacatattcgggagtcaggcgctttattgaggagcttatcaagaaaacagaagactgtggttatgtctcaacaattcttggccgccgtcggtatgtccccgctatcaactcgcggaataaaaccgaaaaatccgccgccgagcgaatcgctgttaatacgcccattcagggttcagcggcggatattgtcaagaccgccatgctccgcctggacaaaagccttgccgccggaaatagcggcgcgaaaattctgctgcaggttcacgatgaatga

SEQ ID NO: 7088 - protein, 293 aa, Unknown
  Obtained from environmental sample
  DOMAIN (1)...(293): DNA polymerase family A
  misc_feature (1)..(293): Xaa is any amino acid
MLFTERKLKPGKKLKTGYSTDAATLEELAREDPLPALILRHRTLAKLKSTYVDTLAGMADSEKRLHTNFDQCGTATGRLSSREPNLQNIPIRAEEGRRIREAFIAGPDCLLLSADYSQIELVVLAHLSRDENLLAAFRDGTDVHARTAALIFGVSEDKVKPEQRRMAKTINFGVMYGMSAFRLSNELGISRTDAANFITAYFNTYSGVRRFIEELIKKTEDCGYVSTILGRRRYVPAINSRNKTEKSAAERIAVNTPIQGSAADIVKTAMLRLDKSLAAGNSGAKILLQVHDE

SEQ ID NO: 7089 - DNA, 771 bp, Unknown
  Obtained from environmental sample
  misc_feature (1)..(771): n is a, c, g, or t
atgaaggataaaccgtctctaacgcttgagttggacagccacaccgccgacgcgggcgtgaacacccgcatagaggctttcttagatatcgtcgcgcgttatagggcgctgaacattccggcaagcgcggacgccccgttccaaaaggcgtttatcgattactccggcaagaagccgatgttcgtcgcctccgacggtaatagggtgccgcttacggacaagagggtgcgcgtgcttttcccgtccatgggttctctgacaagcggtattttcgccgcggcgtttaacggggctgggatcaacgcctcggcgataccggtgtatgataccgaggtgctgaaagtcggcaaaggccacagttcctgcaaggagtgtctgccgctcatcctcactaccggcggattgctccactacttggcgacgcgccgcgacaaggatgaatacctgatatatttcatgccgacgtgcggcggcaactgccgtttctcacagtacaacgtctacatccgcagcgttttggaaaagaagcggattaaagacgtgacgctcctaaccttgacaaatgagaacggctacgcggggcttgagattaaggatacgctgaacgtgatgaaaggcaccattgtatcggatgtcatggaggatataaaaaacgctatcggcgtattggcgaaagacaagccctccgcgatgaaagtcttttatggagagtgggagcggattttggcgctgttccgcaccggtaagaccgcgaatctttacaaatattag

SEQ ID NO: 7090 - protein, 256 aa, Unknown
  Obtained from environmental sample
  misc_feature (1)..(256): Xaa is any amino acid
MKDKPSLTLELDSHTADAGVNTRIEAFLDIVARYRALNIPASADAPFQKAFIDYSGKKPMFVASDGNRVPLTDKRVRVLFPSMGSLTSGIFAAAFNGAGINASAIPVYDTEVLKVGKGHSSCKECLPLILTTGGLLHYLATRRDKDEYLIYFMPTCGGNCRFSQYNVYIRSVLEKKRIKDVTLLTLTNENGYAGLEIKDTLNVMKGTIVSDVMEDIKNAIGVLAKDKPSAMKVFYGEWERILALFRTGKTANLYKY

SEQ ID NO: 7091 - DNA, 708 bp, Unknown
  Obtained from environmental sample
  misc_feature (1)..(708): n is a, c, g, or t
gtgaacgcgtcgcggcaacagattgccgtccccgccgtcgaaaacagcaagggttttttcggttggggaaaaagcaaggaaagcgacgttgacacgctctccgtcgccctcagcatagacacgaccctccagaagtatgccgcgagcatgttccgacaatacaggccgcgctacgccgccgcggcagccattgacccgacgacaggccgcgtgctggcgctcgcctcattcgccgacggcggcgacgcagagacggacggcaaagagttgtatttgaggagctgctttcccgcggcctccgtattcaagacgatcgtcgccgccgccgccgtggagaggggcggaatgcacggcaagaccgtcttagagcacttcggacgcaaccacacgctctacaccacgcaactgaaaaaagatctcaaggtctcacgagatataacactggaggacgcctacgcctactccgtaaatccggtcttcgcccgcatcgcgctcttcaacataaacaaggacattgtgacagagtacgggcggcgcttcggattcaacgaatccgtgccgtttgagtacgacgtagacgtgagcgaaatgttctcgccggacaccggtttctcggtagcggagttcgcctcgggcttcaacgcaaaacaactatcactcccctattcggcgcgctccttgccggcgcggtgtggcgaaacggggtga

SEQ ID NO: 7092 - protein, 235 aa, Unknown
  Obtained from environmental sample
  misc_feature (1)..(235): Xaa is any amino acid
MNASRQQIAVPAVENSKGFFGWGKSKESDVDTLSVALSIDTTLQKYAASMFRQYRPRYAAAAAIDPTTGRVLALASFADGGDAETDGKELYLRSCFPAASVFKTIVAAAAVERGGMHGKTVLEHFGRNHTLYTTQLKKDLKVSRDITLEDAYAYSVNPVFARIALFNINKDIVTEYGRRFGFNESVPFEYDVDVSEMFSPDTGFSVAEFASGFNAKQLSLPYSARSLPARCGETG

SEQ ID NO: 7093 - DNA, 858 bp, Unknown
  Obtained from environmental sample
  misc_feature (1)..(858): n is a, c, g, or t
atggtttgttcggtacaaaaaaactcgcgaaaaanctttttttatcccaagattttattttccggcagaatagatcgaaaccaatatcttttgccggtatcgttcaatattccggcttttattttcgccaaaaacaaaggggcggctatgtcgaaccagtttaccgccgattttgacgagataaaaagattgagcaaagaatacaacagtataagcagaggggtatataccagaatgggattttccccgctttggaacggtaatttcctgctttccacagcccagcttttcggcgcgtcctttaaagacggcgaccctttggaatgggacgcggcggcgctggaaaaatcaatggtttttataaataagtggacaaacgaaattaattcaaatcctcaagctgaagatgattttaatttcagatacttttttgaaccgcccgaaaaactgattcaaagcggacgtattcttttttcttacatggagagtgaagaccttttcatgctgagtgaagaaagcaagaaccagcttgatttccgctgggtgatggaacagggcaaaattatggtttcggaagacatggtgtacttggggatgccgaaaaaggttagatccaagaaggcggctaaggaatttattttttggtttttcaccgttgaaaaccaacgccgtattttagattattccaaggcaaacaggataaacgaaaacattttcggtatttgcggcggcttttcagtgttaagtcctgttaccgagcaaatctacccgcttttttaccccgagctttcgggaaaaatgccgcctcangagcattatgcaagcaccagcatattaccgtccaactggctggtttaa

SEQ ID NO: 7094 - protein, 285 aa, Unknown
  Obtained from environmental sample
  misc_feature (1)..(285): Xaa is any amino acid
MVCSVQKNSRKXFFYPKILFSGRIDRNQYLLPVSFNIPAFIFAKNKGAAMSNQFTADFDEIKRLSKEYNSISRGVYTRMGFSPLWNGNFLLSTAQLFGASFKDGDPLEWDAAALEKSMVFINKWTNEINSNPQAEDDFNFRYFFEPPEKLIQSGRILFSYMESEDLFMLSEESKNQLDFRWVMEQGKIMVSEDMVYLGMPKKVRSKKAAKEFIFWFFTVENQRRILDYSKANRINENIFGICGGFSVLSPVTEQIYPLFYPELSGKMPPXEHYASTSILPSNWLV

SEQ ID NO: 7095 - DNA, 648 bp, Unknown
  Obtained from environmental sample
  misc_feature (1)..(648): n is a, c, g, or t
ttggcgaaactcggagccgggcttgaataccatatgatttccgcccagacagataagctggcggagattcttaacgaggcgcttaccgcaaaatggagggaaggccggggcatagaaattgtcaacttcggtatcacctgcaccgccaccgaagaagacgaaaaccggatcaaacaacttcagacggcggcggtaatgcgcgatcctacaatggcagccgcctcgctggtgaacgcccagagcgacgctatgcgcaccgccgcgggaaatacgggcggagcgatggccggcttcatgggcatgggcatggcaaacatggccggcggcatgaattcccagaacctgtacgctatgggagcgcagcagcaacaagccccgcagcaggcggctgccgctcctgccggaggctggacttgcgcctgcggacacgcgggaaacaccggcaagttctgcgccgaatgcggcaaggctcaacccacggcggctcctgctggagccgtatgggattgtgcctgcggccataagggaaacaccggtaagttctgcgccgaatgcggcaagccccaacccacagcgtgggattgctcctgcggacaaaagggaaacaccggtaaattctgcgccggatgcgggaaccccaggccctaa

SEQ ID NO: 7096 - protein, 215 aa, Unknown
  Obtained from environmental sample
  misc_feature (1)..(215): Xaa is any amino acid
MAKLGAGLEYHMISAQTDKLAEILNEALTAKWREGRGIEIVNFGITCTATEEDENRIKQLQTAAVMRDPTMAAASLVNAQSDAMRTAAGNTGGAMAGFMGMGMANMAGGMNSQNLYAMGAQQQQAPQQAAAAPAGGWTCACGHAGNTGKFCAECGKAQPTAAPAGAVWDCACGHKGNTGKFCAECGKPQPTAWDCSCGQKGNTGKFCAGCGNPRP

SEQ ID NO: 7097 - DNA, 711 bp, Unknown
  Obtained from environmental sample
  misc_feature (1)..(711): n is a, c, g, or t
atgaaaaaaggaaaactgtttattcccggtttttattccgattgggcgcggcccacatacaggatattgcaggctcttttatgcgcttttgcggttgcgattatttatccctatctgcccggttccgactcaagggcttttcagggagtttcggtttttgtcggtataattttttctatcggttctaccagcgctatcggcaatcttgtcgcggggctggtcatcacatatatgcgtccgtttaagatcggcgatcgcgtacagataaaggatataacaggttttgttgtagagaagaaccttatggtagtaaggcttaaaacccataaaaatgaatatgttacatttcccaacgttatgatcctgggatcaaatattattaattacaatacgtcttccgatgaagatgaggaaggattgatcctttattccgagattacctacggctatgcaacgccctggcagacaattcatgatattctggttaacgcggctcttgccacggaatatatcctaaaaaagcccaaaccctttgttttacagactcaattggatgatttttacgcccattaccagataaattgttatacgaaggatgtaagcaaagtcccgcttatctattcccttctttttgaaaatatccaaagcggtttcactgaagccggacttgatatgactacggcgcatttccgtattatcacaaaaacatag

SEQ ID NO: 7098 - protein, 236 aa, Unknown
  Obtained from environmental sample
  DOMAIN (21)...(226): Mechanosensitive ion channel
  misc_feature (1)..(236): Xaa is any amino acid
MKKGKLFIPGFYSDWARPTYRILQALLCAFAVAIIYPYLPGSDSRAFQGVSVFVGIIFSIGSTSAIGNLVAGLVITYMRPFKIGDRVQIKDITGFVVEKNLMVVRLKTHKNEYVTFPNVMILGSNIINYNTSSDEDEEGLILYSEITYGYATPWQTIHDILVNAALATEYILKKPKPFVLQTQLDDFYAHYQINCYTKDVSKVPLIYSLLFENIQSGFTEAGLDMTTAHFRIITKT

SEQ ID NO: 7099 - DNA, 996 bp, Unknown
  Obtained from environmental sample
  misc_feature (1)..(996): n is a, c, g, or t
ttgaattgtctgccttacgacggcggtttatatgttcccgatcaagcggttgattttcgccatctttttttacacatggatgaaaaaacggaatttaatgagttggttgccgctgtagctccttcgttttttgaaggttctcttaatcctgtttccgcttccaaagttgccggtagcgcatttaattttaagcctgaactgataaaacttgacaataatttttcactgctgaatttatataacggacctaccggagtttttaaggattttggaattgcctttatgtcggcggtacttgaggaatttcttgaagaaaatgagcagataatgattctttccgccgcagggccggataccggcgtcagcatggctcatgccttcagcggaaggaaaggtattctgcttgttcttgtatatccgtcaggacaaattcacggacttgatccttcctgctttgtacaaaacggcggaaatattattcctgttcaggtaaacggaactatggacgactgccagcgtttgattattgaaacaattattgatagaaaattttcaggacgttataaagtaacgaacgcaaattccatgaatatcggcagggtttttccgcagattttttatttcctttatgcttttattcaaattaaaaatactcttaacggagattttgttttcagcgtgccttgcggcaatttcggcagcctgattgccggactttatgcatggaaattcggtatgcctgtaaacggttttattgccgcaatgaatcataataattcgatgggtgattatatctgcggcaggccttttattccctctcccaatataattaccaattctccggcactggatataagtctgccgttaaattatgaaaggcttgcgtctttctacgaagaagctccgtctgttatgcgcaatatggtgtatccggcttcattgacgataacttacattggaacaatagaagagtttaaaaaatccggtatttcatga

SEQ ID NO: 7100 - protein, 331 aa, Unknown
  Obtained from environmental sample
  DOMAIN (58)...(323): Pyridoxal-phosphate dependent enzyme
  misc_feature (1)..(331): Xaa is any amino acid
MNCLPYDGGLYVPDQAVDFRHLFLHMDEKTEFNELVAAVAPSFFEGSLNPVSASKVAGSAFNFKPELIKLDNNFSLLNLYNGPTGVFKDFGIAFMSAVLEEFLEENEQIMILSAAGPDTGVSMAHAFSGRKGILLVLVYPSGQIHGLDPSCFVQNGGNIIPVQVNGTMDDCQRLIIETIIDRKFSGRYKVTNANSMNIGRVFPQIFYFLYAFIQIKNTLNGDFVFSVPCGNFGSLIAGLYAWKFGMPVNGFIAAMNHNNSMGDYICGRPFIPSPNIITNSPALDISLPLNYERLASFYEEAPSVMRNMVYPASLTITYIGTIEEFKKSGIS

SEQ ID NO: 7101 - DNA, 969 bp, Unknown
  Obtained from environmental sample
  misc_feature (1)..(969): n is a, c, g, or t
atgatatgttccatcctgctgtcggccagagcggatgaggtcaagttcatctttgttgaccccaagatggtgaacttgggcgtctatgaggacataccgcacctatggctcccagtggtaacggacatgaaagaggcgggccgcgtgctaaagtgggtggtggcacagatggaggatcgctatagacgcctcaccgtccttgccgtcaggaatttagagcagttcaacgaaaaagtgatagaggcaggcggctcgattgacctatccagcaagacccccaaccccaaatggcccgacaggcccaaacagcttgagccgctgccatacatcgtggttgtcatagacgagcttgccgacctgatgatggtatgccggagcgaagtagaggacagcatagcccgcatagcccaaaaggctagggcggtgggcatccacttgatactggctacgcaacgcccaagcgtggacatagtgaccggggtaataaaggccaacctgccggccagactgagctaccgcgtaaacacaaaaattgacagccgcactatattggactctggcggcggcgaacaactactgggaaagggcgacgcgctctacttggccccaggcacggcgcgcccaaggcgcatccacgcgcccctcctgacggaagacgagatccttcgcttggtgaagtggctcaaagaaaggggccgccccgattacaaccaagccctgataaaggctatggacacggaagaggaaggggcctcagccgcagccggggaagcgggcggcgacgatgacatctacgctagggccgtggccctcgtcatgcgggagcgcaaagcaagcaccagccttctccagagaaagctcagcataggctatgggcgcgccgccaagataatagacaggatggaggccgagggccttgttggcccagaccggggttccggcaggccgagggaatgtgtagagagctag

SEQ ID NO: 7102 - protein, 322 aa, Unknown
  Obtained from environmental sample
  DOMAIN (1)...(155): FtsK/SpoIIIE family
  misc_feature (1)..(322): Xaa is any amino acid
MICSILLSARADEVKFIFVDPKMVNLGVYEDIPHLWLPVVTDMKEAGRVLKWVVAQMEDRYRRLTVLAVRNLEQFNEKVIEAGGSIDLSSKTPNPKWPDRPKQLEPLPYIVVVIDELADLMMVCRSEVEDSIARIAQKARAVGIHLILATQRPSVDIVTGVIKANLPARLSYRVNTKIDSRTILDSGGGEQLLGKGDALYLAPGTARPRRIHAPLLTEDEILRLVKWLKERGRPDYNQALIKAMDTEEEGASAAAGEAGGDDDIYARAVALVMRERKASTSLLQRKLSIGYGRAAKIIDRMEAEGLVGPDRGSGRPRECVES

SEQ ID NO: 7103 - DNA, 879 bp, Unknown
  Obtained from environmental sample
  misc_feature (1)..(879): n is a, c, g, or t
ttgcaccctgaacgaggggctcggcaaggtgctgcgctacggcgcgtacggcgacgatgtggtcgagcgcctcagtggcttgagaaggttatgtaccccgtactcaaaaaggcgatagagagccttgagcgcgggattgatctgaaaaatatgatcgcccaggcattgcacatgggcgacgaggtacacaaccggaaccgcgccgggacttcgctcttctaccgcgcgattgcgccggcggtcatccgcacctgcgaggatcgcgccacggcggcggcggtgcttgagtttatcaacggcaacgatcacttcttcctgaatctctccatgcccgccggcaaggcgacgctcgacgccgcgcgcaacgtggatggcagcagcatcctggtggtgatggcgcggaacggcacggatttcgggattcagctctccggaaccggcaatgcctggtataccggcgccgcgctcgtgccggacgcgctctacttccccggctttaccaaggacgacgcgaatccagatatcggcgacagcgcgatcaccgagaccttcggcctcggcggattcgcgattgccgccgcgcccgccatcgtgcagtttgtgggcggcaccgcgcgcgacgccgtgaattacagcatgacgatgtacgagatcacctttggcgaaaataatatgtatcagatcccggcgctcaacttccggggtacgccgacggggattgacgttaccaaggtgatcgcgaaaaacatcacgccggttatcgataccggcgtggcgcacaaaaagccgggcgtcggccaggtcggcgcgggcgttgtacaagcgccgattgatccgttcatgaaggcgtttgaggggctggcaaataagctgaagtaa

SEQ ID NO: 7104 - protein, 292 aa, Unknown
  Obtained from environmental sample
  DOMAIN (11)...(292): Protein of unknown function (DUF1116)
  misc_feature (1)..(292): Xaa is any amino acid
MHPERGARQGAALRRVRRRCGRAPQWLEKVMYPVLKKAIESLERGIDLKNMIAQALHMGDEVHNRNRAGTSLFYRAIAPAVIRTCEDRATAAAVLEFINGNDHFFLNLSMPAGKATLDAARNVDGSSILVVMARNGTDFGIQLSGTGNAWYTGAALVPDALYFPGFTKDDANPDIGDSAITETFGLGGFAIAAAPAIVQFVGGTARDAVNYSMTMYEITFGENNMYQIPALNFRGTPTGIDVTKVIAKNITPVIDTGVAHKKPGVGQVGAGVVQAPIDPFMKAFEGLANKLK

SEQ ID NO: 7105 - DNA, 615 bp, Unknown
  Obtained from environmental sample
  misc_feature (1)..(615): n is a, c, g, or t
atggggggagtgtttatgtggccccttttggcgttctcggtcgctactatcactatcggcgttgaacgggcggtttatttcatataccacagcctggagatcagcgatctgggcggcaaaacctccgaactggtgaaaagcggcgactatgcgggtgcggcggaatatctttccgcgcagaccgagcggcgcatgggagcgcgggttcttctggcgctgatcaaccgcgccaacctgggcaaaggcaagcctttctccgaacaccatgccgaacgggctgtcgaaaccgaagcgatgacctgcatcaattccatggaaaacggttttaattttctggtcgccctgggttccctttccccccttaccggctttttgggaacggtatcggggatgattggcgcgttcaaatccatagccgaggcgactgaggtaaacgcccagatcgttgccaacggaatttacgaagcgctgatcaccaccgtcttcggcctgatcattgcgattatcgccatgattttccattcggttttcagccaccttgttgataaatttgccgccgaaattgaaacgacctgctccgacctgatagcggaaatcgccgaccgtcagccatag

SEQ ID NO: 7106 - protein, 204 aa, Unknown
  Obtained from environmental sample
  DOMAIN (54)...(193): MotA/TolQ/ExbB proton channel family
  misc_feature (1)..(204): Xaa is any amino acid
MGGVFMWPLLAFSVATITIGVERAVYFIYHSLEISDLGGKTSELVKSGDYAGAAEYLSAQTERRMGARVLLALINRANLGKGKPFSEHHAERAVETEAMTCINSMENGFNFLVALGSLSPLTGFLGTVSGMIGAFKSIAEATEVNAQIVANGIYEALITTVFGLIIAIIAMIFHSVFSHLVDKFAAEIETTCSDLIAEIADRQP

SEQ ID NO: 7107 - DNA, 672 bp, Unknown
  Obtained from environmental sample
  misc_feature (1)..(672): n is a, c, g, or t
gtgggagaccaggagcagggcggaggccgaattcttcaggtggttttccagccagagcaggctgtccaggtccagatggttggtcggctcgtccagcaccagaaggtcgggcgaggccagaagcagccgggccaggacgccgcgcatgagccagcccccggaaaactcgcccaggtcgcgcccgaaatcggcttcggcgaagcccaggccggagaggatttttttggcctcggcctccttgccccagccgcccagggcttcaaacagctgcaagagatgtccgtggcgttcggccagttccaggagttccccggcctcccggctttgggccagttcctcgctcaccagggccagttccgcctctaccttccggtattcctcggccgtgtccagaaccagttccaggagggagaggccgcgcctggccgcgagttcctggggcagataacctgtcctgagccccttggcccgggtcaccgtcccggcatccgggctttccaggtccaggagcaggcggatgagggtggttttgcccgcgccgttgcggcccaccaggcccaccctttcgccggggctcaaagccagggtcacgccggccaggacgtcctgccggccgtaaaaccggctgacttccgaaaaactcaccagggccatgtcgctcggccaatctga

SEQ ID NO: 7108 - protein, 223 aa, Unknown
  Obtained from environmental sample
  misc_feature (1)..(223): Xaa is any amino acid
MGDQEQGGGRILQVVFQPEQAVQVQMVGRLVQHQKVGRGQKQPGQDAAHEPAPGKLAQVAPEIGFGEAQAGEDFFGLGLLAPAAQGFKQLQEMSVAFGQFQEFPGLPALGQFLAHQGQFRLYLPVFLGRVQNQFQEGEAAPGREFLGQITCPEPLGPGHRPGIRAFQVQEQADEGGFARAVAAHQAHPFAGAQSQGHAGQDVLPAVKPADFRKTHQGHVARPI

SEQ ID NO: 7109 - DNA, 408 bp, Unknown
  Obtained from environmental sample
  misc_feature (1)..(408): n is a, c, g, or t
ttggccgagcgacatggccctggtgagtttttcggaagtcagccggttttacggccggcaggacgtcctggccggcgtgaccctggctttgagccccggcgaaagggtgggcctggtgggccgcaacggcgcgggcaaaaccaccctcatccgcctgctcctggacctggaaagcccggatgccgggacggtgacccgggccaaggggctcaggacaggttatctgccccaggaactcgcggccaggcgcggcctctccctcctggaactggttctggacacggccgaggaataccggaaggtagaggcggaactggccctggtgagcgaggaactggcccaaagccgggaggccggggaactcctggaactggccgaacgccacggacatctcttgcagctgtttga

SEQ ID NO: 7110 - protein, 135 aa, Unknown
  Obtained from environmental sample
  misc_feature (1)..(135): Xaa is any amino acid
MAERHGPGEFFGSQPVLRPAGRPGRRDPGFEPRRKGGPGGPQRRGQNHPHPPAPGPGKPGCRDGDPGQGAQDRLSAPGTRGQARPLPPGTGSGHGRGIPEGRGGTGPGERGTGPKPGGRGTPGTGRTPRTSLAAV

SEQ ID NO: 7111 - DNA, 570 bp, Unknown
  Obtained from environmental sample
  misc_feature (1)..(570): n is a, c, g, or t
atggctaaaaatattttagaagagaagtattatatactgcaacctgtttgctatgaagcaattgaaatgttcaaaaaagctatacaagatcacaatgaaatgaagcttattcaaaacgatttaatgaggcttgaaataggaattggcttaatacctttagttactgaagaaaaaatattattagaacggattaagcaaatacggaaagggattgaatcagatattggcataagcatacctttaatacgtatttctgagaattctttattaaaaccatttgaatattcttttttaatacgcatgaagagattaataaaatttgaaattaaggcaaataaattattgtgccttgaaaatggtaaagctaaccaaaaaattatggggaaaattataaaagagcctgtttttgaaattcctgcaatttggattagcanaaataaattacaagaaagcattgataaaggatataccgttgtagatacgcctgcannntatactactaatttggatcatttnattagggaaaatattgttgaaatatttacttatgatatgtcaaaaatatattag

SEQ ID NO: 7112 - protein, 189 aa, Unknown
  Obtained from environmental sample
  misc_feature (1)..(189): Xaa is any amino acid
MAKNILEEKYYILQPVCYEAIEMFKKAIQDHNEMKLIQNDLMRLEIGIGLIPLVTEEKILLERIKQIRKGIESDIGISIPLIRISENSLLKPFEYSFLIRMKRLIKFEIKANKLLCLENGKANQKIMGKIIKEPVFEIPAIWISXNKLQESIDKGYTVVDTPAXYTTNLDHXIRENIVEIFTYDMSKIY

SEQ ID NO: 7113 - DNA, 576 bp, Unknown
  Obtained from environmental sample
  misc_feature (1)..(576): n is a, c, g, or t
ttgtgtcgaantaacgtcgtttcctatacggtcattgtcaaggttgaaaatcaggacggcgctttgctgccggggatgacctgcgcggttgattttatcgtggaacgcagtgagaatgtcctgatggtttccaacgccgccctgcgctatcagccgacaaatttcagcgaggaaaaaattgccgaaatggtctttaacgcgggtcttgaaaatatggacgaagaacagcggaaagcggcgcaaaaagcgcgggaagaagcgcgggcccagactcaggccgccggacaaaacgcgaatcaaagcgccgggataaccggcttactggcgggcggcggacaaccgatgcgcatgatgggcggcggtcgttccggcggcaggcagagaccggggcagggagacagaccggatcgtaacagcgaaccggtaatcgttatgcgtaacctatggtaccttaacgatgaaggtaagcttgaagtgatgcgggtgcgaaccggcatttccaacggctcatttaccgcaatttattccggagaggatatggaagggaaacaggtcattctcagggaaaagatataa

SEQ ID NO: 7114 - protein, 191 aa, Unknown
  Obtained from environmental sample
  misc_feature (1)..(191): Xaa is any amino acid
MCRXNVVSYTVIVKVENQDGALLPGMTCAVDFIVERSENVLMVSNAALRYQPTNFSEEKIAEMVFNAGLENMDEEQRKAAQKAREEARAQTQAAGQNANQSAGITGLLAGGGQPMRMMGGGRSGGRQRPGQGDRPDRNSEPVIVMRNLWYLNDEGKLEVMRVRTGISNGSFTAIYSGEDMEGKQVILREKI

SEQ ID NO: 7115 - DNA, 873 bp, Unknown
  Obtained from environmental sample
  misc_feature (1)..(873): n is a, c, g, or t
atgtctgtccgggcaagtgtctttaccaaaaaagaccttcaaaaattgaaagatgaaacgagttttaccgccgctatttccggcagagtcgaacagtttcttgatgttgttggtccggagggaaacacccagctttcggttctgggagtcgagccggattatattaaagccaggaactggaaaattaagaccggcgtcttttttgacgaagatgatttactggaaagaaacaggacagcggttctgggaagcgctacggcaaaaaaccttttcggcgacgcggaaaacgccctgtctcaacagatacgaataaggaatatctattttaccgttatcggtcttttggaaaacaaaggcggcgatagtgatgatgttatcatggttccaatggatacggcgatgacgcggctgaacaattcgcatgatataagcgtgatttacatgagcgtagtcagcaaggagtacatggaagcggcgcagaaagaggttgaattgatcctgcgcgaatcccgcaatatccgcgaaggagcggaaaatgatttcagcattatgaaccagacggatatgatcgaaatggcgtcggcaacgtcaaaaacattaaccacattgttggccgccattgccggagtgtcactgctggtcggcggcatcggcataatgaacatcatgctggtttccgttaccgagcgcacccgcgaaatcggcatcagaatggcggtgggcggacgcaagcgggacatacttttccagttcctcaccgaatcggtcattctcagccttatgggggggttgctcggaataggcatggcttttcttgcctgccgcgtactgacaatgataaaaattcccacggcgattaatccgttgatgtag

SEQ ID NO: 7116 - protein, 290 aa, Unknown
  Obtained from environmental sample
  DOMAIN (143)...(288): Predicted permease
  misc_feature (1)..(290): Xaa is any amino acid
MSVRASVFTKKDLQKLKDETSFTAAISGRVEQFLDVVGPEGNTQLSVLGVEPDYIKARNWKIKTGVFFDEDDLLERNRTAVLGSATAKNLFGDAENALSQQIRIRNIYFTVIGLLENKGGDSDDVIMVPMDTAMTRLNNSHDISVIYMSVVSKEYMEAAQKEVELILRESRNIREGAENDFSIMNQTDMIEMASATSKTLTTLLAAIAGVSLLVGGIGIMNIMLVSVTERTREIGIRMAVGGRKRDILFQFLTESVILSLMGGLLGIGMAFLACRVLTMIKIPTAINPLM

SEQ ID NO: 7117 - DNA, 462 bp, Unknown
  Obtained from environmental sample
  misc_feature (1)..(462): n is a, c, g, or t
atgaaaataagaataaaactaagtcttatggttatcgccattgtatcggtagtcgcgggcggcattgcaataatactgttattgcaagcttccgacataagtttgaaatccaaccttagaggccttaattatatggcaatggagcaagccgaatactggaaaggccgcgaagacgcatatatacgggcgttaagcacactggcaaatgtaatggatgattatgatttaattccggcaaatcagcgcagagacaggtatgacgatatgctgcactccgtcctgagatcggaacccaatttaattaccatttatacgatctggaaacctaacgccctagacggcatggacagcagtttcataggccggacaggttcaagtcccacagggcagtacgcgatgaccttcagcaaggaaaccggagaaatattatctcgcgcaagcatgatatttcggccgatctga

SEQ ID NO: 7118 - protein, 153 aa, Unknown
  Obtained from environmental sample
  SIGNAL (1)...(30)
  misc_feature (1)..(153): Xaa is any amino acid
MKIRIKLSLMVIAIVSVVAGGIAIILLLQASDISLKSNLRGLNYMAMEQAEYWKGREDAYIRALSTLANVMDDYDLIPANQRRDRYDDMLHSVLRSEPNLITIYTIWKPNALDGMDSSFIGRTGSSPTGQYAMTFSKETGEILSRASMIFRPI

SEQ ID NO: 7119 - DNA, 855 bp, Unknown
  Obtained from environmental sample
  misc_feature (1)..(855): n is a, c, g, or t
gtggcggaagtcggcaaacgccttgcgggtatgcggggcattgtagggacctcaaccccgtcggcagtggctgtaatctacgattatcagaatcactggatattggacgatattaagggcctgcagcgggggaataacaagtacaaagaaaccgttgtcagccattatcgctctttctggcgtatgggcgtatcggttgatgttatagattccaccggggatattgaaggctatgatttggttgtagccccaatgctgtatatgcttcgccccggtatcgctgaaaagattaccgcgttcgtacgggcgggcgggacttttgccgccacttacgctaccggttacgccgatgaaaacgatctgtgttttctcggcggttttcccggccccctgaaagaagttttagggatctggtgcgaggaaattgacgcgttatatcctgaagacggcaattcgtttaactggaacggcaaggattatgatgtttttgacttttgtgaactcctgcatttacggggcgcggattgtcttgccgtttacaaccgggatttttacaaaggcagacccgccgttaccgtgaaccgttacggcaagggtaaagctttttttctggcggcgcgtaccgggcaagccttcctcaatgatttctatacatggctcgtaaaaggaatgaacataccccgcgttcttgacgcggagctgcccgaaggagtaacagcgcanatgcgaagcgacggtgataccaattatatttttttaatgaatttctcgccttccggacaaatagtggaaactaacgatgggtgtataacgctcgccccatggggaatacntataanagaagaaaaaaaataa

SEQ ID NO: 7120 - protein, 284 aa, Unknown
  Obtained from environmental sample
  DOMAIN (237)...(282): Beta-galactosidase C-terminal domain
  misc_feature (1)..(284): Xaa is any amino acid
MAEVGKRLAGMRGIVGTSTPSAVAVIYDYQNHWILDDIKGLQRGNNKYKETVVSHYRSFWRMGVSVDVIDSTGDIEGYDLVVAPMLYMLRPGIAEKITAFVRAGGTFAATYATGYADENDLCFLGGFPGPLKEVLGIWCEEIDALYPEDGNSFNWNGKDYDVFDFCELLHLRGADCLAVYNRDFYKGRPAVTVNRYGKGKAFFLAARTGQAFLNDFYTWLVKGMNIPRVLDAELPEGVTAXMRSDGDTNYIFLMNFSPSGQIVETNDGCITLAPWGIXIXEEKK

SEQ ID NO: 7121 - DNA, 495 bp, Unknown
  Obtained from environmental sample
  misc_feature (1)..(495): n is a, c, g, or t
atggcagataaatcggtttatacaattgaaaaagaagaatttattattgaaaattacaataacgcaaaagcattcgcgagttttttacctgccattgcaggtctttggggtaaacctctttgggtttattatgttaaccgtgggcaggcaatagcaaattttggcgtaaaagataaggacggagctataattgaatttaacgcggcaaacaaggcatggcggcagaccgctttacaaggtttcagaactttttacaaggtaaatggcgttttctttgagccttttcgcaattcaattgatttaaaaactaaaaagattacccagaaaatgtatattaaaacccatcaagtgcgtctccatgaaaggaatgaaacacttggcattgaaactgaggccgctttttgtactctaccgggcgaaaattttccagctcttttaaggcggctttccataaaaaatattttccggcgagacaaaagaaatttgatgtattga

SEQ ID NO: 7122 - protein, 164 aa, Unknown
  Obtained from environmental sample
  misc_feature (1)..(164): Xaa is any amino acid
MADKSVYTIEKEEFIIENYNNAKAFASFLPAIAGLWGKPLWVYYVNRGQAIANFGVKDKDGAIIEFNAANKAWRQTALQGFRTFYKVNGVFFEPFRNSIDLKTKKITQKMYIKTHQVRLHERNETLGIETEAAFCTLPGENFPALLRRLSIKNIFRRDKRNLMY

SEQ ID NO: 7123 - DNA, 558 bp, Unknown
  Obtained from environmental sample
  misc_feature (1)..(558): n is a, c, g, or t
ttgatggccgagccatggnatgatattgacatcaccgccaaacccatgtaccgcagggcgcggcagggcatcgcgtacctgcctcaggaggcatctatattccgcaagctgacagtggagaagaacatctgggctatacttgaaagccgccgggacattgataaagaagctaaaaaacagcggcttgaagccctgctggatgaatttggtatagccaggatacggaagcagttcggctataccctttccggcggcgagaggcggcgtacggaaattgcccgcgccctggcgacggagccaaaattcctcctgttggatgagccttttgccggcatagaccccatcgccgtttacgagatcaaacagattatccggcgccttgccgaaaaaggcataggcatcctcatcaccgaccataatgtccgcgacaccctggaaattaccacggaggcgtttattattgccgagggttcgattgtagcgcggggcggacgcgatgagattctggcaaacgaaatggtccgcgaagtatacctgggttcggaattcaagatgtaa

SEQ ID NO: 7124 - protein, 185 aa, Unknown
  Obtained from environmental sample
  DOMAIN (1)...(157): ABC transporter
  misc_feature (1)..(185): Xaa is any amino acid
MMAEPWXDIDITAKPMYRRARQGIAYLPQEASIFRKLTVEKNIWAILESRRDIDKEAKKQRLEALLDEFGIARIRKQFGYTLSGGERRRTEIARALATEPKFLLLDEPFAGIDPIAVYEIKQIIRRLAEKGIGILITDHNVRDTLEITTEAFIIAEGSIVARGGRDEILANEMVREVYLGSEFKM

SEQ ID NO: 7125 - DNA, 669 bp, Unknown
  Obtained from environmental sample
  misc_feature (1)..(669): n is a, c, g, or t
atgtcatnttcgagaggtttgaaagcaaaagcgttaaaggtttgggaagagggttacaatcatccgtttgtgcaggaattgggcaagggcacgttagacagggaaaagtttaaattttatttactgcaggactacctgtatttaatacagtacgcgaaagtttttgccatagcagccgtaaaatcagatacggaagaactgatgacaaaattttcaacaagccagtatttaatcctcgcgcaagaaatggacgtgcatcgcgaatatatggccggtttcggcgtaacgcgggaacggatgttatccgtcaagccctcgctgtataacagcgcgtacaccgccaatatgctggcgtacggccagacaggcgggcttgcggaaattctcgccgctgtctttccctgcgcctggacatactccgattacgccaaacggctgaaagagcaatacgccggctgcctgagcgggaacttctataaaacatggatcgagaattactcaggcgatgaatttgcggattcttttgaatggttttacgacgctcttgatgctctcgtttcaaatatgagtgacaggcagcgtgaaaaaataacggaaatatttacctccagcgttgagtttgagtatctgttttgggacatggcgtataaaaggcaaatgtcgtattaa

SEQ ID NO: 7126 - protein, 222 aa, Unknown
  Obtained from environmental sample
  DOMAIN (8)...(218): TENA/THI-4/PQQC family
  misc_feature (1)..(222): Xaa is any amino acid
MSXSRGLKAKALKVWEEGYNHPFVQELGKGTLDREKFKFYLLQDYLYLIQYAKVFAIAAVKSDTEELMTKFSTSQYLILAQEMDVHREYMAGFGVTRERMLSVKPSLYNSAYTANMLAYGQTGGLAEILAAVFPCAWTYSDYAKRLKEQYAGCLSGNFYKTWIENYSGDEFADSFEWFYDALDALVSNMSDRQREKITEIFTSSVEFEYLFWDMAYKRQMSY

SEQ ID NO: 7127 - DNA, 795 bp, Unknown
  Obtained from environmental sample
  misc_feature (1)..(795): n is a, c, g, or t
ttgcccacgcgcccggactggggaaaggacatgggcctacgcatcatttttactctttatacgaaacttttttcaagggaaaataaaatgtccaattcctatgccgccctgctgaacaaggtgcgggaaagcaagccgctggtgcatcatatcaccaactatgtaaccgtgaatgactgcgccaacatcacccttgccatcggggcctcgcccgtaatggcggacgctgtcggggaagcggcggacatcgccgccatcgcgaaggcggtggttctgaacataggaacgctcaatgagcgttccattccctcaatgatgacagccggaaaaacagctaacgcgaaaggtattcccgttgtgtttgatccggtcggcgcgggcgtgtcaaagttacgcaatgataccgccgcctccataacaggagaaataaagttaagcgtaatccgggggaatatctctgagattaaatatatagcgggtttgagctctcaaataaagggtgtggacgcttcggagactgaccttgccggggcggaggacgccgacnaggcggcgcggacgctggcgcggaaactgggttgtgtggtggtgataagcggcgctgttgataccgtttcagatggtaaaaaaactgtttttgtggaaaatgccatcccatgctgggtaacttaccggcacggnctgtatgtgtacttcgcttatcggttctttttgcggagccgcgccggagcagcctttcgccgccccctcgctgccatgatgtgcatgggcattgccgggggattggccttatga

SEQ ID NO: 7128 - protein, 264 aa, Unknown
  Obtained from environmental sample
  DOMAIN (38)...(264): Hydroxyethylthiazole kinase family
  misc_feature (1)..(264): Xaa is any amino acid
MPTRPDWGKDMGLRIIFTLYTKLFSRENKMSNSYAALLNKVRESKPLVHHITNYVTVNDCANITLAIGASPVMADAVGEAADIAAIAKAVVLNIGTLNERSIPSMMTAGKTANAKGIPVVFDPVGAGVSKLRNDTAASITGEIKLSVIRGNISEIKYIAGLSSQIKGVDASETDLAGAEDADXAARTLARKLGCVVVISGAVDTVSDGKKTVFVENAIPCWVTYRHGLYVYFAYRFFLRSRAGAAFRRPLAAMMCMGIAGGLAL

SEQ ID NO: 7129 - DNA, 765 bp, Unknown
  Obtained from environmental sample
  misc_feature (1)..(765): n is a, c, g, or t
atgaggcctctttttgagaaagcctttggccgggaaatacaggtcattcccacggctgtatctgcggatcaggttaatccaacggatattctcgcgattgtcgcgtcctcagcggcggtgcatatttccgatataccgttcaacggccctatcgccggcgcccgcgtttgtcaggtagacggggaacttgttcttaacccaagctacgagcagattgaaagggccacacttgaaattgtcgtggcgggaactaaagacgggatcaccatggtggaaggcggcgctaatgaggcgagcgaagacctgatgatctccgccctggaaaaagcccacggcatgattaaagagctctgccttctgcaagagaaactaagggagctggcgggaaagccgaagcttccccttaaagaagtttctatcgcccttgaaaacaaggacgcgatattctccgccgcttatccacttatcgaggcggcctgctttcttaaaggcaagcaggagcgccgggacgccatatcaaaggtaaaatcagatctggcgggcgttcatgccgcacagctggaaaacgagagccagaaaaaacttttcgacgccctttttgaagatatgcagtatgaaatcctgagatcttcaattttaaataaagggatcagggtagacggcaggggaaccgnaagacatagggaaataacctgtgaaatcggcatccttaagcgaaccacggctccgcccctcttacgaggggcgagaaccaggcgcttgtag

SEQ ID NO: 7130 - protein, 254 aa, Unknown
  Obtained from environmental sample
  DOMAIN (49)...(113): 3' exoribonuclease family, domain 2
  misc_feature (1)..(254): Xaa is any amino acid
MRPLFEKAFGREIQVIPTAVSADQVNPTDILAIVASSAAVHISDIPFNGPIAGARVCQVDGELVLNPSYEQIERATLEIVVAGTKDGITMVEGGANEASEDLMISALEKAHGMIKELCLLQEKLRELAGKPKLPLKEVSIALENKDAIFSAAYPLIEAACFLKGKQERRDAISKVKSDLAGVHAAQLENESQKKLFDALFEDMQYEILRSSILNKGIRVDGRGTXRHREITCEIGILKRTTAPPLLRGARTRRL

SEQ ID NO: 7131 - DNA, 453 bp, Unknown
  Obtained from environmental sample
  misc_feature (1)..(453): n is a, c, g, or t
atggcacaggaaagcgccccgctgcttagggtgaaaaaaaaagacgggagggtagcgcttccaaattacgagacttcaggctcagccggtctggacataagggcatatatcacttccgatctggatattccgcctatgggaagggtaaaaatccctactggcctgtttttggaaatcccaaaaggctacgaggcccagataaggcctcgttccggacttgccttgaaatggggtataaccctcttgaattcaccgggaacaatagattcggattacaggggcgagcttgaagtgatacttttcaatacgggttctgaatcctttacagtgaaaaacggcgaccggatcgcgcaaatggtaatttctccggttgtccgtgcagtaatatccgaagccgatcatctttcggaaaccgaacgcgggaccggcggattcggttccacaggcacatag

SEQ ID NO: 7132 - protein, 150 aa, Unknown
  Obtained from environmental sample
  DOMAIN (16)...(149): dUTPase
  misc_feature (1)..(150): Xaa is any amino acid
MAQESAPLLRVKKKDGRVALPNYETSGSAGLDIRAYITSDLDIPPMGRVKIPTGLFLEIPKGYEAQIRPRSGLALKWGITLLNSPGTIDSDYRGELEVILFNTGSESFTVKNGDRIAQMVISPVVRAVISEADHLSETERGTGGFGSTGT

SEQ ID NO: 7133 - DNA, 351 bp, Unknown
  Obtained from environmental sample
  misc_feature (1)..(351): n is a, c, g, or t
gtgcttgtatgtttgggatccggagtgggaaagacgtacaacggtacggtaaagcgcgtaatggaatacggcgcttttgtggaaattcttccgggaaaggaagggctggttcatgtcagtaagctttcccgccagagggttgcccaggtaagcgatgtagtcaaggaaggggacaagattcaggtaaaattgattgaaatagacaaggtgggccgccttaacctttcttacattgacgctattgatccggtgcctgacggcggtatggaagccggccggggagtttccggcggatcaaacagaatttctgaaggaaattctgacaacaggcgggattcccgccgccattag

SEQ ID NO: 7134 - protein, 116 aa, Unknown
  Obtained from environmental sample
  DOMAIN (6)...(78): S1 RNA binding domain
  misc_feature (1)..(116): Xaa is any amino acid
MLVCLGSGVGKTYNGTVKRVMEYGAFVEILPGKEGLVHVSKLSRQRVAQVSDVVKEGDKIQVKLIEIDKVGRLNLSYIDAIDPVPDGGMEAGRGVSGGSNRISEGNSDNRRDSRRH

SEQ ID NO: 7135 - DNA, 732 bp, Unknown
  Obtained from environmental sample
  misc_feature (1)..(732): n is a, c, g, or t
atgggctgtaattattacgaagaaaacctcgaagattttatcgccatgcgtaaaaaacagggaaaaaaagcccctcttcatcttcacatcggcgcgtatcccctgcctggcaaactaatccgcaaactgtgtgaaagtgtagacgaagtgattgttatcgaggaagggcagaattttatcgccggaaaacttttcggcgttacgggcggcgcttttaccgatgtaaagcctcttattcaaagcggggagcttgatccggataatgtcagagccgcgcttgggcttgcgcccagaaaaagcggtttaagaacacctgccaacctgccccaaaggccgccgcagctctgtcagggctgcccgcacgcggacagttacgaaacaatcaacaaagtggtggacgctcttgattcgcgtccgggaaagcccgacataggtattaactccgacatcggctgttattcgcttggcgctaccccgccttattcggctattgaaagcgtaatttgtatgggcgcatgtatcggtatggcaaagggcgcgtcggaggcgggacttaagcactcacttgccgtcatcggcgattccacatttatccattcagggataaccgcccttatcgacgcggtcgcctcagatactcctatgaccattattatattggacaattccagcgtcgcgatgacaggctgccagccgaccatagtgccgtctgaaaaacntggaaaaccctga

SEQ ID NO: 7136 - protein, 243 aa, Unknown
  Obtained from environmental sample
  DOMAIN (149)...(243): Thiamine pyrophosphate enzyme, C-terminal TPP binding domain
  misc_feature (1)..(243): Xaa is any amino acid
MGCNYYEENLEDFIAMRKKQGKKAPLHLHIGAYPLPGKLIRKLCESVDEVIVIEEGQNFIAGKLFGVTGGAFTDVKPLIQSGELDPDNVRAALGLAPRKSGLRTPANLPQRPPQLCQGCPHADSYETINKVVDALDSRPGKPDIGINSDIGCYSLGATPPYSAIESVICMGACIGMAKGASEAGLKHSLAVIGDSTFIHSGITALIDAVASDTPMTIIILDNSSVAMTGCQPTIVPSEKXGKP

SEQ ID NO: 7137 - DNA, 429 bp, Unknown
  Obtained from environmental sample
  misc_feature (1)..(429): n is a, c, g, or t
gtgtcaagcgggcagaacaaggtcatggcgcttttacccaacgcctatatgcagggcgagtgcgccggaatcaacatgaccggcaacgccgctggcggagcgagtttcgacaaggctatacccatgaacgccatcgggtttttaggtctgcatgtcattaccgccggcaactacgacggacaggtatattccgaaaataataatcccaaaaccgatgagggcagctataaacgcctgtttttcagcaataacaaactgaacggctatatccttatcggcaatgtggaaaaagcggggatttacacaaaccttatccgcgagcacattcctcttgacaccatcgacttcccgcttgtctgtgaaaaacccgggcttatggcgtttaccaaagaaaccagaatggagaaactgggaaaagcggcatcttga

SEQ ID NO: 7138 - protein, 142 aa, Unknown
  Obtained from environmental sample
  misc_feature (1)..(142): Xaa is any amino acid
MSSGQNKVMALLPNAYMQGECAGINMTGNAAGGASFDKAIPMNAIGFLGLHVITAGNYDGQVYSENNNPKTDEGSYKRLFFSNNKLNGYILIGNVEKAGIYTNLIREHIPLDTIDFPLVCEKPGLMAFTKETRMEKLGKAAS

SEQ ID NO: 7139 - DNA, 378 bp, Unknown
  Obtained from environmental sample
  misc_feature (1)..(378): n is a, c, g, or t
atgacggcgtatttggttttacagaacggcaccgtaatgaaaggcaattctttcggcgcgcagggtgaaattaccggagaagttgtttttgccaccggtatgaccggttatctggaaacccttaccgacccaagctattatggacagatcgttctgcagacatttccactgattggaaattacggcgttattccacctgattttgaaagctcanacgtaggggcaagagcgtatatcgtcaaaaccccgtgtcagaacccttctaatttcagaagtgaaaaaaatcttgacaattttctaaaagagcgcggcatcatcgggttatgcggaaatgataccaaggcgctcacaagaatatccgttgaaaccggcttatga

SEQ ID NO: 7140 - protein, 125 aa, Unknown
  Obtained from environmental sample
  DOMAIN (1)...(124): Carbamoyl-phosphate synthase small chain, CPSase domain
  misc_feature (1)..(125): Xaa is any amino acid
MTAYLVLQNGTVMKGNSFGAQGEITGEVVFATGMTGYLETLTDPSYYGQIVLQTFPLIGNYGVIPPDFESSXVGARAYIVKTPCQNPSNFRSEKNLDNFLKERGIIGLCGNDTKALTRISVETGL

SEQ ID NO: 7141 - DNA, 453 bp, Unknown
  Obtained from environmental sample
  misc_feature (1)..(453): n is a, c, g, or t
gtggaagtaaccgtcaacacctttaaggaatttgtcggtttggacgtgagcccaaggcatcctcattttctggatccggaaaaaggaatggaatgggacatatcggccgtcatcggcctttccggcgccgtcaaaggagccgtaattgtctccatgaaagcggagttggcgattaaactgaccaacatcctcgccggagaggggcatacggaagttgacgccgatgttgttgacgcgataggcgaaataaacaacatcatcgcgggcaatataaagcccaaagtgccgaacggggaaaagatagttatttctattcctactattattaagggaaaagaacattcaatcgcctggcccagcaaacaaacgcggatattgtgcattcctcataaggcttatgagaatgacatatttcacctgatggtggccattgaattggaacctgagaaataa

SEQ ID NO: 7142 - protein, 150 aa, Unknown
  Obtained from environmental sample
  misc_feature (1)..(150): Xaa is any amino acid
MEVTVNTFKEFVGLDVSPRHPHFLDPEKGMEWDISAVIGLSGAVKGAVIVSMKAELAIKLTNILAGEGHTEVDADVVDAIGEINNIIAGNIKPKVPNGEKIVISIPTIIKGKEHSIAWPSKQTRILCIPHKAYENDIFHLMVAIELEPEK

SEQ ID NO: 7143 - DNA, 837 bp, Unknown
  Obtained from environmental sample
  misc_feature (1)..(837): n is a, c, g, or t
atgaaggattaccatatcttttccatggatgacatagaaaacggacaagtaaccgatcacggcgtagttttggacgttaaagacattccctgggcgggacgccagctttgggacagcgacgccgcgcataaaaacggcaaatattacctgtatttctccttaaaagacaaaaccgactctttccgtataggcgtcgccgtcgcagacaagcctgaaggcccctttatcccgcaaggcgacccgattcgcggcagttacagcatagacccctgcgttttcgaggaaaacggcaattattacatgtacttcggcggactctggggcggacagctccagcgttaccgcgacaacaaggcgcttgaagccgccgtaataccagccgacaacgaacctgcaattacagcccgggtcgcaaaactaagcgcggatatgcttcaatttgccgaagagccgtacccggtagttattctcgacaaagaaggcaaaccccttacccagggcgacaacaatcgccgtttttttgaagcttcgtggatgcacaagtacaacggcaaatactacttttcctattcaacgggcgatacccattttttatgctacgcgacaggagacaacccttacgggccgtttacatatcaaggagtcctccttactcccgtcgtangctggacaacccatcacgcaatcgctgagtacaagggaaaatggtatcttttctaccacgacagcgtcccttccggaggcaaaacatggctgcgaagccttaaagttacacagttgggatacaattccgacggaacaataaaaacgctggaaggccggggattgaataggtaa

SEQ ID NO: 7144 - protein, 278 aa, Unknown
  Obtained from environmental sample
  DOMAIN (27)...(268): Glycosyl hydrolases family 43
  misc_feature (1)..(278): Xaa is any amino acid
MKDYHIFSMDDIENGQVTDHGVVLDVKDIPWAGRQLWDSDAAHKNGKYYLYFSLKDKTDSFRIGVAVADKPEGPFIPQGDPIRGSYSIDPCVFEENGNYYMYFGGLWGGQLQRYRDNKALEAAVIPADNEPAITARVAKLSADMLQFAEEPYPVVILDKEGKPLTQGDNNRRFFEASWMHKYNGKYYFSYSTGDTHFLCYATGDNPYGPFTYQGVLLTPVVXWTTHHAIAEYKGKWYLFYHDSVPSGGKTWLRSLKVTQLGYNSDGTIKTLEGRGLNR

SEQ ID NO: 7145 - DNA, 735 bp, Unknown
  Obtained from environmental sample
  misc_feature (1)..(735): n is a, c, g, or t
ttggcaaaactccagcctgacatcataaaaatcaatattgattatatccataacagcgaaaactcttatcattaccgcgaattcttacgcgctatggcggtctttgccgacaatgtaggcatagaagttttgcacgaaggcgtagaaacggaacgtcagcttgatatttgtatttcctctaaaggaagattttatcagggatttttacttgccatgcctcagccttcaatgacaaatccggctattaacacatttgtcttttccacattgatagcgttagcttataacgctattcaaacaaatgtctccaatatggaaaccttaaaaaattctcttgacgttcaagttgagcattttttagaagaaaacccgtttgataatgaaaaaataaacgacgataaatatcttgcaaaaattttccttaaattgtcggaggtaataagggtctatgtttgcaacagaacaggaactcaactttctaataacatagaaaagaaagacggagagattgtataccgcgattttaaaaacaaaaattgggcgtggcgcggattttttcatgaaacaataaaagcgtttatcaggggcagaagaagctgtctttcgaatccgtaccgcgattttacgacaaaagacaaaatatgcacttactgttatgcgataacagataatatatttttattcgcggacatgataaaagaaccggataagggactcgtatatgccgctggataa

SEQ ID NO: 7146 - protein, 244 aa, Unknown
  Obtained from environmental sample
  misc_feature (1)..(244): Xaa is any amino acid
MAKLQPDIIKINIDYIHNSENSYHYREFLRAMAVFADNVGIEVLHEGVETERQLDICISSKGRFYQGFLLAMPQPSMTNPAINTFVFSTLIALAYNAIQTNVSNMETLKNSLDVQVEHFLEENPFDNEKINDDKYLAKIFLKLSEVIRVYVCNRTGTQLSNNIEKKDGEIVYRDFKNKNWAWRGFFHETIKAFIRGRRSCLSNPYRDFTTKDKICTYCYAITDNIFLFADMIKEPDKGLVYAAG

SEQ ID NO: 7147 - DNA, 939 bp, Unknown
  Obtained from environmental sample
  misc_feature (1)..(939): n is a, c, g, or t
gtggcagccgaggaagaagaagccgaagaagaaattattgtcgatcttccccaaccgggatccaacctgccggtatcggtgtttcaggagatatgggcctatgttgtagcggacagggaagcggctttcaggcccagtctgccattatccgacatcggctattgcggcgcggaaatcagcagttacggaaccctgattgacgtgcccaagcgcagtaagctgcgttttttttccggcagggtacaccttgttgtcatgtgtggcggaagggctttaagccattttgtccttaagcccggcagcgacgagcgaagaaaactgatcgccgacctccttgccgcggccaaagactttgacggcctgcaaatcgattttgaagatgtcgggcaaagggacgcggagccgtattttactttcctgaaagaactcagggccggacttggaaacaaaatgtttaccgtggcccacagggcccgcacaagaaaaatagccgacgacgtgtatgactacgagaaagtcctgccgtatgtggaccgcatactggtaatggcctacgacgagcactggtcaggcagcgccgcaggctcgattgcttcgcttgcctggtgtaaaagggtcgcggattattctttgaaagttatcggaaaagacaaacttatcatggggctgcctttttacggccgcgcctgggcaaaaccgaaccacgcgggggcttatatatataccaccattgaaagaatcatcaaggaaaataacgtgaaaaccatagggcgcgaaaacggaataccgacttttgatttacacgccactgtttccgttaaggtttactatgaagacgagtattcgctttcggcccgcatggagatgtaccggacaatgggcgttaccgcatcggtttttggcgggctggcccaggaaaccccgccgtctgggcgctaa

SEQ ID NO: 7148 - protein, 312 aa, Unknown
  Obtained from environmental sample
  DOMAIN (29)...(302): Glycosyl hydrolases family 18
  misc_feature (1)..(312): Xaa is any amino acid
MAAEEEEAEEEIIVDLPQPGSNLPVSVFQEIWAYVVADREAAFRPSLPLSDIGYCGAEISSYGTLIDVPKRSKLRFFSGRVHLVVMCGGRALSHFVLKPGSDERRKLIADLLAAAKDFDGLQIDFEDVGQRDAEPYFTFLKELRAGLGNKMFTVAHRARTRKIADDVYDYEKVLPYVDRILVMAYDEHWSGSAAGSIASLAWCKRVADYSLKVIGKDKLIMGLPFYGRAWAKPNHAGAYIYTTIERIIKENNVKTIGRENGIPTFDLHATVSVKVYYEDEYSLSARMEMYRTMGVTASVFGGLAQETPPSGR

SEQ ID NO: 7149 - DNA, 477 bp, Unknown
  Obtained from environmental sample
  misc_feature (1)..(477): n is a, c, g, or t
atgataaaaatccgggaattgatcggggaagattgcgtcataaccgacctcaaagccgccgataagctcgaggcgatcaagtcggtagcaagtttcgcctgctcaataggggggcttgaccgcgcggaggaggtgacgggcaaggtgctggagcgcgaggaggagatgtcgacagggataggcttcggcatagcgatcccccacgcgcgcctggccgatatagaccgcctgtacatggtcgcggcgcgctccgtgggggggatagagttcgactctttggacgggcttgcggtgaacctgatctttatgctgatctcttcggagagcatccctacggcgcataccgaggtgctctcgtcgctctctcggatactctcctacgaggaggtcaggcgggggctgctgtcggccggcggcgcgaaggagtttgcggatatcttggccaaggccgaagtgaagtacgtcgaggcgcagtga

SEQ ID NO: 7150 - protein, 158 aa, Unknown
  Obtained from environmental sample
  DOMAIN (6)...(150): Phosphoenolpyruvate-dependent sugar phosphotransferase system, EIIA 2
  misc_feature (1)..(158): Xaa is any amino acid
MIKIRELIGEDCVITDLKAADKLEAIKSVASFACSIGGLDRAEEVTGKVLEREEEMSTGIGFGIAIPHARLADIDRLYMVAARSVGGIEFDSLDGLAVNLIFMLISSESIPTAHTEVLSSLSRILSYEEVRRGLLSAGGAKEFADILAKAEVKYVEAQ

SEQ ID NO: 7151 - DNA, 426 bp, Unknown
  Obtained from environmental sample
  misc_feature (1)..(426): n is a, c, g, or t
ttgcgtctgcgcgccgccggcgaacatccccaggctcttgcgtccgccggggtaaacgttttgcggattcgctacatcgcggttctaatctccggcgcgcttgccggcctggccggcgcctgcatcgtgctgacccaggacattcaatacaccgtaacaaccattaacggcaaaggcttcattgcacttgcagcggtttctttcgggcgctggcttcccatcggcatcctgggctcttcgtttctgttcggcttttcttctgccctggcggtgaacatcattaacattcccagcctccgcgccctgccgtcggagtttttcagccttttgccgtatcttatcaccctcctaaccctggtgatcttcagcggcaaggattactccccccgcgctgtaggtcagccgtatgacaaggggaaggggtaa

SEQ ID NO: 7152 - protein, 141 aa, Unknown
  Obtained from environmental sample
  misc_feature (1)..(141): Xaa is any amino acid
MRLRAAGEHPQALASAGVNVLRIRYIAVLISGALAGLAGACIVLTQDIQYTVTTINGKGFIALAAVSFGRWLPIGILGSSFLFGFSSALAVNIINIPSLRALPSEFFSLLPYLITLLTLVIFSGKDYSPRAVGQPYDKGKG

SEQ ID NO: 7153 - DNA, 909 bp, Unknown
  Obtained from environmental sample
  misc_feature (1)..(909): n is a, c, g, or t
atgcggcaggagccagttcaagtgattggtaaaagtgtcagactcagcgggaagagcgaatgtaaaaatgttccttttctatgttacgggatgcccaaaggttccggcgccccgcttgattccgccgcctctntgatagacgctatggagtacgctttaaagtccccaaaaaaggggacaattctttttatcggctatcaaaaccatgacgcagattttgaattattattgtccaataccgccccctttaccaaaaaacaaaattcaaccgcaggcggtacggtttttgaaaaagtttatattgattccatgaattcatttaatgaaacggtgggtgaagtaaagcccctgttggttgttttcaattcccttgatattgaaggggcggggacggtacgccggcacccgctgacaatgatggttcccataataatgatgatcaacagccgtatgaacaacgctattgacgtacattcattgagccaaatttccaggcttatagtctgccaccgggcgattgtctcttctccggaattcagggtccgcgtaatggctatcatgagcggggttgaaatactgccgccgcataccggcgaattggtaaaaaaaacaattctcaatttcgacaaacacgccaagaaccacatatcacgctggaaacttgctgactcggcaaatgtcagtgaagattatcttacccgtatctttcacaaagaaatggggctttccctgtgggactatttaaatcgttacaggatttttcatgcggtggatttactgcagcagactgatgccacaatacatgaggttgcaaataaatgcggctttcaggatcaggcgtatttttgccgtgttttcaaaaaaatctacggtatcccacctggtcaggtacgaaaaaaaattatataa

SEQ ID NO: 7154 - protein, 302 aa, Unknown
  Obtained from environmental sample
  DOMAIN (255)...(299): Bacterial regulatory helix-turn-helix proteins, AraC family
  misc_feature (1)..(302): Xaa is any amino acid
MRQEPVQVIGKSVRLSGKSECKNVPFLCYGMPKGSGAPLDSAASXIDAMEYALKSPKKGTILFIGYQNHDADFELLLSNTAPFTKKQNSTAGGTVFEKVYIDSMNSFNETVGEVKPLLVVFNSLDIEGAGTVRRHPLTMMVPIIMMINSRMNNAIDVHSLSQISRLIVCHRAIVSSPEFRVRVMAIMSGVEILPPHTGELVKKTILNFDKHAKNHISRWKLADSANVSEDYLTRIFHKEMGLSLWDYLNRYRIFHAVDLLQQTDATIHEVANKCGFQDQAYFCRVFKKIYGIPPGQVRKKII

SEQ ID NO: 7155 - DNA, 645 bp, Unknown
  Obtained from environmental sample
  misc_feature (1)..(645): n is a, c, g, or t
gtggacaatgggatgtctcaaggcgtgaaaatagaaattattgttgaaggcgagacggaaaaggtttttattccctttttgagaaaatttcttagtacaaggctggaaaacaatatgccaaaaatacacatacattcatatgacagcagaatcccaaagcaagacaaattaatgcgaattgtaaagaatcttctttccggcaaagacccagctgattatgtcattgccttgaccgatgtttatacaggtcagggccagtctgaattcaaagatgccgcagatgctaaagagaaaatgagattatgggttggcaacgaacatcgtttttttcctcatgcggctcagtacgaatttgaagcatggttattgacctattgggatacaatccaaaggttagcaaaccataatatgacagctccatgtacaaatccggaagatgtgaatcacgatagacccccatcatattggataaaggaaatattcagaaaaggcaaaggtagggacagttacgtaaaacgcagggatgccaatagaatcctccgtgaaaacgaaaataatttattggcgtcaattaataaatgtaccgaacttaaggcgttagttaatactatacttggtgtttgcggcggcgaaataatatcttaa

SEQ ID NO: 7156 - protein, 214 aa, Unknown
  Obtained from environmental sample
  misc_feature (1)..(214): Xaa is any amino acid
MDNGMSQGVKIEIIVEGETEKVFIPFLRKFLSTRLENNMPKIHIHSYDSRIPKQDKLMRIVKNLLSGKDPADYVIALTDVYTGQGQSEFKDAADAKEKMRLWVGNEHRFFPHAAQYEFEAWLLTYWDTIQRLANHNMTAPCTNPEDVNHDRPPSYWIKEIFRKGKGRDSYVKRRDANRILRENENNLLASINKCTELKALVNTILGVCGGEIIS

SEQ ID NO: 7157 - DNA, 549 bp, Unknown
  Obtained from environmental sample
  misc_feature (1)..(549): n is a, c, g, or t
ttgtctgataatcctcttgcgatggcaagcggcctttcagcgttaactgatggtacgaaattaataattgagggaatgaatcaagcctttggcggaggatccacacctgggggaagcacgtttgtagcggtaaccgggattaccggcgttccaactactgcctcgataggaacccttgctctttcagggacgatagcgccttccaatgcgaccaacaagaccatagtgtggtcagtaaaatcacctggaactactggcgcgtcgatcagcgggaatatcctaacaacaacagcggcaggaaccgttacggttactggtactgttgtgaacggcaaggctgtaggtacgccatatgccaaggactttcctattaccatcgcaggttctggtccaggcaccaaacctaatcctcctacaaacctgactgcgactgtgacatcaccaagaagcatttctttaacttggtctccggtttccggagctactggatatgatgtgtctaggagtactgggaaggacgttgattataggggggtacaacaacattaa

SEQ ID NO: 7158 - protein, 182 aa, Unknown
  Obtained from environmental sample
  misc_feature (1)..(182): Xaa is any amino acid
MSDNPLAMASGLSALTDGTKLIIEGMNQAFGGGSTPGGSTFVAVTGITGVPTTASIGTLALSGTIAPSNATNKTIVWSVKSPGTTGASISGNILTTTAAGTVTVTGTVVNGKAVGTPYAKDFPITIAGSGPGTKPNPPTNLTATVTSPRSISLTWSPVSGATGYDVSRSTGKDVDYRGVQQH

SEQ ID NO: 7159 - DNA, 546 bp, Unknown
  Obtained from environmental sample
  misc_feature (1)..(546): n is a, c, g, or t
atgcctgaaaaatacttcaacatagctggtccctgcaattcaagcaggcattatatgcttgaccctttacgcaatatgggcaaagaactaatgaatttaattgagcgagaaaattattttgtccttcacgccgctcggcaaagcggaaagacaactcttttactggaactcgtagataaaataaatgcagagggtaaatattatgctttatattgttctttggaaaagatacaaggaattacagaagcaaaagaagcaatgccgcagataatagacgttttaaaaatggctttttatggctcaaattttcccaaaggagatatgtttgcaaaagaatctagcaatataggttttgcctccttgctgcaatttgaactttcaaaagtcagcaaaattttagacaaacctttggtcatattctttgacgaagctgattgccttagcaacggaactttaatcacatttttaaggcagcttagggatggatatataaataggaatagcggttcttttgtccacagcatagcctggtctcggccgatctga

SEQ ID NO: 7160 - protein, 181 aa, Unknown
  Obtained from environmental sample
  misc_feature (1)..(181): Xaa is any amino acid
MPEKYFNIAGPCNSSRHYMLDPLRNMGKELMNLIERENYFVLHAARQSGKTTLLLELVDKINAEGKYYALYCSLEKIQGITEAKEAMPQIIDVLKMAFYGSNFPKGDMFAKESSNIGFASLLQFELSKVSKILDKPLVIFFDEADCLSNGTLITFLRQLRDGYINRNSGSFVHSIAWSRPI

SEQ ID NO: 7161 - DNA, 717 bp, Unknown
  Obtained from environmental sample
  misc_feature (1)..(717): n is a, c, g, or t
ttgggcttcctatgcgaatattttatcaggcgctcaaaatggtatagcaattcggaggcgcaaattactaatgaaggtttggatatccctgcattaaaaacccgtaccatgaacgccagggaaaggtttttcgcaaaaaactttagctccctggatcttgcgatagccggactttgcatgatccccgccctgctttttaatcaggacacttatacgcgccttgttcagtttttgttattcttctttatcgcgttgctttcaggaaaaaaaataaatcccctgatcacactttcaattatcctcgcgattgttttctttaatctccttgtaccgtacggggaactgctttattccatcggttcgctaaaaataacatcaggcgcgcttctctccggattgcgccgggcggtaacccttgaagggctttttatgctgtcacgcttttgcataagaagcgaccttgcttttcccggcgcattcggaaaactggcgggtgaatcactgcgcgttttttcccgtcttgcggaatcaaaaaacctctttacccggaagaattgggttgaaactttggacgggcttttatcagatttcacacaggatgtttcgggtgaaaaaaaaaccgaaagtgaaaaaaaacattcgctgtcgggcagaattatactcgttatattggttatccttgcatggataccattgattataggggaatatctttaa

SEQ ID NO: 7162 - protein, 238 aa, Unknown
  Obtained from environmental sample
  misc_feature (1)..(238): Xaa is any amino acid
MGFLCEYFIRRSKWYSNSEAQITNEGLDIPALKTRTMNARERFFAKNFSSLDLAIAGLCMIPALLFNQDTYTRLVQFLLFFFIALLSGKKINPLITLSIILAIVFFNLLVPYGELLYSIGSLKITSGALLSGLRRAVTLEGLFMLSRFCIRSDLAFPGAFGKLAGESLRVFSRLAESKNLFTRKNWVETLDGLLSDFTQDVSGEKKTESEKKHSLSGRIILVILVILAWIPLIIGEYL

SEQ ID NO: 7163 - DNA, 501 bp, Unknown
  Obtained from environmental sample
  misc_feature (1)..(501): n is a, c, g, or t
gtggtgggcgacctttccgtcctgcgggtggaaacctttgtgcccgagcgttttgtctcatcgataaggccggggcttggcgccatggtgaaccttgaagcccttcccggcgaaacctttcctgcggagatagacgaggtaaaccccgtgcttgatccggcaagcagaaccttgcggataaagcttcgttttgttggcaggaacgacaggggcgccgcggatccgcggattaaggccgggatgttcgcgacaatcagccttgtcaccagaaccaggtccaacgtgccgatcatacccaggacttcggttatcaatacatacggttcatggatagcctttgttatagatgaaaacaacatcgcccatcggcgcatgctggaattgggccttgaaaacgaaaggttttttgaagtgataagcggcatcagccttggagaacaggttgtaaccgccgggcaaaattttctgacggacggcgaccccgtccgtatagtggaataa

SEQ ID NO: 7164 - protein, 166 aa, Unknown
  Obtained from environmental sample
  misc_feature (1)..(166): Xaa is any amino acid
MVGDLSVLRVETFVPERFVSSIRPGLGAMVNLEALPGETFPAEIDEVNPVLDPASRTLRIKLRFVGRNDRGAADPRIKAGMFATISLVTRTRSNVPIIPRTSVINTYGSWIAFVIDENNIAHRRMLELGLENERFFEVISGISLGEQVVTAGQNFLTDGDPVRIVE

SEQ ID NO: 7165 - DNA, 717 bp, Unknown
  Obtained from environmental sample
  misc_feature (1)..(717): n is a, c, g, or t
gtgaggttttttaatatacgctggaaattttttatagaagttttatataaatcaggaatgatatttgtctccgaattgtcctggatcagctcggaaacaataatgaccgccatgtataacaggcgcggcggcgcggaagttgtcgcgggcatggcggccggttttacaatcgctaatattttctttatgcttttcggcgggatatggaccgcttcgggagtccttgtaggaggagcgttaggcgccggtaaacttgaggaggcccgcagccgcgccgcctggttaaaatcaggttccattgccgtgggtgttattattgcgcttttcggggcggtcttttcggctctgcttgttccgcttgttttttccaatctgagcgccgctgcgcggtttaactgcatcggccttgtttatgtgatcctggcctatcttcccttatggggttttctcaatttgcaattcgccatatcccgcgcgggaggcgacgccgcgaccggaatgtacacagatctgtcggttaacaccctgctggttgtcccgggcgcggtgctcctttcttatttcacctcattgccgcccgtgccgatgttcgcccctgataagctttcagatttcgccaaaatgttcattgcccgccattttttaaagaaagaacgctgggtgagaaatctgactaaaggggatagaagggatcagggagccggccccgatccttga

SEQ ID NO: 7166 - protein, 238 aa, Unknown
  Obtained from environmental sample
  DOMAIN (19)...(184): MatE
  misc_feature (1)..(238): Xaa is any amino acid
MRFFNIRWKFFIEVLYKSGMIFVSELSWISSETIMTAMYNRRGGAEVVAGMAAGFTIANIFFMLFGGIWTASGVLVGGALGAGKLEEARSRAAWLKSGSIAVGVIIALFGAVFSALLVPLVFSNLSAAARFNCIGLVYVILAYLPLWGFLNLQFAISRAGGDAATGMYTDLSVNTLLVVPGAVLLSYFTSLPPVPMFAPDKLSDFAKMFIARHFLKKERWVRNLTKGDRRDQGAGPDP

SEQ ID NO: 7167 - DNA, 702 bp, Unknown
  Obtained from environmental sample
  misc_feature (1)..(702): n is a, c, g, or t
atgagccgcagattgtccatagcatcccttttttttgctctggtttttaccttgccggcccaggagtatgatctgcgcggggaagtgtggatagaactggagccgatatacggggattttgtcgatgagcagtatcccctggaccccgaaacagccggcaggcgggcgctggaagaagcggccatgttttactcaggcatcatctacggctggtcttttcattacgatgtcggagaaaatgcccgcagaatccccgaaaaactcgacttgacgcctgtagcttccattccatttggcgatccggggctgcaggccacagaccttgaagttattgatatgcgtgtccggctttggaccgattaccggatgaccgatgcccagcggcgccgtattcagatttggcgcaagggcaatatccgcagcgcccaggccataggctacagcccgctgggcggtccggcggggacaggagaaccttcttccgccgacgctcgttcggcgggagattccggctggctggtaataaaaaaagcggtgctcgaagacgcggcgcggacggcgttgcgggccatgctcaggggaagcgagcgaaaccgcccaaaagaagtaaccggttttatatgccttgccgcctttccccgctatttcatagactcaggccagtgggcggcatcggcccgctttatggctcggccgatctga

SEQ ID NO: 7168 - protein, 233 aa, Unknown
  Obtained from environmental sample
  SIGNAL (1)...(22)
  misc_feature (1)..(233): Xaa is any amino acid
MSRRLSIASLFFALVFTLPAQEYDLRGEVWIELEPIYGDFVDEQYPLDPETAGRRALEEAAMFYSGIIYGWSFHYDVGENARRIPEKLDLTPVASIPFGDPGLQATDLEVIDMRVRLWTDYRMTDAQRRRIQIWRKGNIRSAQAIGYSPLGGPAGTGEPSSADARSAGDSGWLVIKKAVLEDAARTALRAMLRGSERNRPKEVTGFICLAAFPRYFIDSGQWAASARFMARPI

SEQ ID NO: 7169 - DNA, 564 bp, Unknown
  Obtained from environmental sample
  misc_feature (1)..(564): n is a, c, g, or t
atgaaagcttgggctagagaaaattctgattcttttatggaattcctcaatcccgaagataaaggaaccaagtatttgaaaaagggtggaaggctttatgtgtattcaccagacaacgaaggcgttatgttaatctctgggcatatgctaaaagaatctatgatgggttccgatatgtcttatgaagatgccgttaataacgaccctctttctgctcgctatgaacctgtgcttgctggttcggaagtttggaatgggcaggatgcctgggtgctggaattgaatgcaaagaaaaaaaccgaaagctacccaaaacgtaaattgtggatagacaagaaaaccggagatatgctgcactatgaactttacgctctttctggagcaaagctaaaagaatacagccttataaaagttggcacttttgcaaaccgccgttttccggttgaaattgagcttcgcgaccttttgaggaaaaacagcaaaacaacctttataatgaaaaacgtggtgatggataaaccaattgcagatgcggtgtttagccaacggaatttggagagatag

SEQ ID NO: 7170 - protein, 187 aa, Unknown
  Obtained from environmental sample
  misc_feature (1)..(187): Xaa is any amino acid
MKAWARENSDSFMEFLNPEDKGTKYLKKGGRLYVYSPDNEGVMLISGHMLKESMMGSDMSYEDAVNNDPLSARYEPVLAGSEVWNGQDAWVLELNAKKKTESYPKRKLWIDKKTGDMLHYELYALSGAKLKEYSLIKVGTFANRRFPVEIELRDLLRKNSKTTFIMKNVVMDKPIADAVFSQRNLER

SEQ ID NO: 7171 - DNA, 462 bp, Unknown
  Obtained from environmental sample
  misc_feature (1)..(462): n is a, c, g, or t
atgaagagatatttaatcgtagtttgtttagcgttttttatcgcgggttttgcggcggctcaggttggccccaacgcaacattgtatgtgtcggttaagagcatagacttgaaatcctcagccgggaaaaaagtggcaacgttaagttacggcgacaaggttacggtgacacaggtaaaggacaaatctgtggaagtaaaaagtgccgaggattcctcagtaattggctgggctccgtctgcaagtttttcaacaaagaaaatcattgtcggaagcgcgtccacaacatcggcaaaagaagtcgctctggccggaaaaggttttaatcaggatattgaaaattcctacagtacgcagggagagattaatttcgacgatgtagacaaaatagaggcgataactgcggatgaaaccgctcttatgcgttttattcaagagggccgtctgtcaccgggaagatag

SEQ ID NO: 7172 - protein, 153 aa, Unknown
  Obtained from environmental sample
  SIGNAL (1)...(20)
  misc_feature (1)..(153): Xaa is any amino acid
MKRYLIVVCLAFFIAGFAAAQVGPNATLYVSVKSIDLKSSAGKKVATLSYGDKVTVTQVKDKSVEVKSAEDSSVIGWAPSASFSTKKIIVGSASTTSAKEVALAGKGFNQDIENSYSTQGEINFDDVDKIEAITADETALMRFIQEGRLSPGR

SEQ ID NO: 7173 - DNA, 801 bp, Unknown
  Obtained from environmental sample
  misc_feature (1)..(801): n is a, c, g, or t
atgggccctatttgtggacttgccaaaaactcaaacgccgcaaaagcgcctttcctgtgcgctctggcctactcgccctcgtccgggacggacatggatgtgttccatatatcggctcttgattccattgcgccttccgatttggaggcgcgccgtccggggcctgttatggaattcagttatccgcggggagaggcaatagaaactcccattaaggggacggcgttcagcgcgctggtcaggaaaaacgacgcagaggcggcccaggagtttgtggacagggaattcgccctgattagccgttatgaaaacgcccccggctggcagcaggcgtggatacgcttttacagggctatataccgggattcctgggacaggatagccaacgcggttttccggcttgaacgcgaatggaactcagacaatgggcttaacaacagggcgtttgccgaaaaagcccttgcatttgtgcagggtttcagttacgagcgcgacctggaaggcagtgattttgtcaatctggtgacagccattaccgagggcaggggagactgcgacagccggtcaatgctcttggcgatgattttggagcaggcggacatcccttcggccataatggtatcccgcgtccacagccacgcgatgggccttgttgatgttcccggcggcggcgcccgttttgactcaggggggaagaaatggctggtggccgagactaccgataaggtaggcatcggccttataagcgccgacaaaagcgatatcgcgtcatggctgggagtggttttcaatgttccataa

SEQ ID NO: 7174 - protein, 266 aa, Unknown
  Obtained from environmental sample
  misc_feature (1)..(266): Xaa is any amino acid
MGPICGLAKNSNAAKAPFLCALAYSPSSGTDMDVFHISALDSIAPSDLEARRPGPVMEFSYPRGEAIETPIKGTAFSALVRKNDAEAAQEFVDREFALISRYENAPGWQQAWIRFYRAIYRDSWDRIANAVFRLEREWNSDNGLNNRAFAEKALAFVQGFSYERDLEGSDFVNLVTAITEGRGDCDSRSMLLAMILEQADIPSAIMVSRVHSHAMGLVDVPGGGARFDSGGKKWLVAETTDKVGIGLISADKSDIASWLGVVFNVP

SEQ ID NO: 7175 - DNA, 762 bp, Unknown
  Obtained from environmental sample
  misc_feature (1)..(762): n is a, c, g, or t
atgaaaaaaaacattgttaaaagaacgaaattcagaagaacacctcgaataaaagcgccaattcgtgtaccgataagaaaagaagaattaaaaaagggaatatatatcatcccttcgctgtttacatgcggaaacatgagctttggcatactttcggttatttcctcaatcaacggagattttgcaagagcggcatggtttttggttgcggcattgggatgtgatattttagacggcagaatcgcaagaatgacaaacacaacaagtatgttcggaatgcagcttgattccctcagcgatctagtttcattcggaacagcgccggcaataatgatgtatatgctggtacttaaaaatatgggaaaccccggcattgctattgctgtactttttgtgctttgcagcgccctgcggctggcgcgcttcaatgtactggctcaaagcggtgaaatacacaaacattttgtcggtctccccactccggcatcggcaggcgtaattatctcatttgtgctgagttatgaacttttggcgccggaagattactctttaaattttaagacaattcccgtattgatggagcttatcccttcttttttcaaggttatgccggtcgtcattgtaattctttcatttctaatggtctccaatattccttatttatcatttaagagaataaaattgacaaaagtaaggactattgaacttttggccgttttaattgtcttaaatatacttattgtcgtttatcctcaaatgtaa

SEQ ID NO: 7176 - protein, 253 aa, Unknown
  Obtained from environmental sample
  DOMAIN (65)...(215): CDP-alcohol phosphatidyltransferase
  misc_feature (1)..(253): Xaa is any amino acid
MKKNIVKRTKFRRTPRIKAPIRVPIRKEELKKGIYIIPSLFTCGNMSFGILSVISSINGDFARAAWFLVAALGCDILDGRIARMTNTTSMFGMQLDSLSDLVSFGTAPAIMMYMLVLKNMGNPGIAIAVLFVLCSALRLARFNVLAQSGEIHKHFVGLPTPASAGVIISFVLSYELLAPEDYSLNFKTIPVLMELIPSFFKVMPVVIVILSFLMVSNIPYLSFKRIKLTKVRTIELLAVLIVLNILIVVYPQM

SEQ ID NO: 7177 - DNA, 534 bp, Unknown
  Obtained from environmental sample
  misc_feature (1)..(534): n is a, c, g, or t
ttggccgagaactacggagaacagcggctggaagattttatcaacggaaatgtcgcaatgatgattgcctctacaggcgttattccgtttctaagggaaaagatgggagataaagcattcggaataacaaatattcccggttccggttctgccggtaaatacaatatcggtatttcaagtatatatgcaggtattaatgtaaattgtaaataccctgatgaagcatgggattttcttgtatttcttgaagaacaaagccagcttttttgtgaaatgctaaaagcagttcccggcacggtttccggtattattccaggaggctatgtcagaaacgatccgttttattccaagtcgcaggatatttttgaatcttcggttattgtacagggtttttccgggaaaccgttcgccgaagaatacgaaaatgcttttcttgaagaactgcagatgtttttcagaagcggccgtactgctgaagaaacaataaccgctattcagcgccggtgggatgaaattttttatcgtataaaatga

SEQ ID NO: 7178 - protein, 177 aa, Unknown
  Obtained from environmental sample
  misc_feature (1)..(177): Xaa is any amino acid
MAENYGEQRLEDFINGNVAMMIASTGVIPFLREKMGDKAFGITNIPGSGSAGKYNIGISSIYAGINVNCKYPDEAWDFLVFLEEQSQLFCEMLKAVPGTVSGIIPGGYVRNDPFYSKSQDIFESSVIVQGFSGKPFAEEYENAFLEELQMFFRSGRTAEETITAIQRRWDEIFYRIK

SEQ ID NO: 7179 - DNA, 813 bp, Unknown
  Obtained from environmental sample
  misc_feature (1)..(813): n is a, c, g, or t
atgcccgcgggctcaggcgacccaatcgattccgcgtcttccctgatcgaggcgatagaattcgctttaaagtcgccgaaaaagggaacgatcctttttatcggttacaaatatcccgacggcgattttgagttattgctgtccccctccgccgcccccggtaaaaaacagaattcagccaacgcggtttttgaaaaaacgtacatagaatccatggatacattcggtgaaacagtcgcggaggtaacccccctgttgatcgttttcaattcccttgatgttgagggtgcggcggcggtgcgccgtcatccgctgacaatgacggttccggtaataatgatcagcggacgggtggacagcacggtcaatgtaaactcattaagccaattatcacggcttataatctgccaccgcgcgattgtctcttccccggaattcagggcgcggataatggccatcgtaaacggcgccgaaatactgcccccgcataccggcgtgctggtaaaaaaagcgatcctcaatttcgacaagcacgccaagacccacatctcccgctggaaattggccgattcggtaaatgtcagcgaagattaccttacccgcatctttcacaaggaaatggggcttcccctgtgggactatctgaaccgttaccggatttttctttcggccgaacttctgcagcagaccgacgacacgatacaggaaatcgccaacagatgcggctttcaggaccaggcgtatttctgccgcgttttcaagaaaatctacggcggtttcccccgggcagatgcgcaagaagtgagcggataa

SEQ ID NO: 7180 - protein, 270 aa, Unknown
  Obtained from environmental sample
  DOMAIN (222)...(266): Bacterial regulatory helix-turn-helix proteins, AraC family
  misc_feature (1)..(270): Xaa is any amino acid
MPAGSGDPIDSASSLIEAIEFALKSPKKGTILFIGYKYPDGDFELLLSPSAAPGKKQNSANAVFEKTYIESMDTFGETVAEVTPLLIVFNSLDVEGAAAVRRHPLTMTVPVIMISGRVDSTVNVNSLSQLSRLIICHRAIVSSPEFRARIMAIVNGAEILPPHTGVLVKKAILNFDKHAKTHISRWKLADSVNVSEDYLTRIFHKEMGLPLWDYLNRYRIFLSAELLQQTDDTIQEIANRCGFQDQAYFCRVFKKIYGGFPRADAQEVSG

SEQ ID NO: 7181 - DNA, 681 bp, Unknown
  Obtained from environmental sample
  misc_feature (1)..(681): n is a, c, g, or t
atgataagggaagattataaataccacgattttggagtgcttacaaggacaaacgcccttatgcgtaacattgaagaagcgttcttagctgagaatataccttaccgcgtatcggggggaacaagtttttttcaacggaaagaaattaaggatattatttcctatttgcgcgtaatagccaatcccgatgatgacgtaagccttttgcgtattattaacactcctcgtagggggattggaaagaccaccatcgccatgttaaatgaaatcgcgaagaagaaccacgtcagcctatgggattctcttgcgcggttaaattacgcgcgttcgcatggacagcaggggctttttcaagacaaaaaagccgcgaccgaacttgaagaattttcgataatgatagaagattttcgcgccctttttcttgaacgccaaacacaggacggcaagccttggtcgctctcgctttgcgcgcgcacgttagtcgataatattgattactggagctaccttgttcttgaacacggaaaagacgaaaagaaagcaagatggaaatacagtaacattgaatattttatcagaatgataaataactgggaaacggaccccgataacctagagcctggactttatgcgtggcttaacaggatcagtctaatcactagggatgacggcgaagaatga

SEQ ID NO: 7182 - protein, 226 aa, Unknown
  Obtained from environmental sample
  misc_feature (1)..(226): Xaa is any amino acid
MIREDYKYHDFGVLTRTNALMRNIEEAFLAENIPYRVSGGTSFFQRKEIKDIISYLRVIANPDDDVSLLRIINTPRRGIGKTTIAMLNEIAKKNHVSLWDSLARLNYARSHGQQGLFQDKKAATELEEFSIMIEDFRALFLERQTQDGKPWSLSLCARTLVDNIDYWSYLVLEHGKDEKKARWKYSNIEYFIRMINNWETDPDNLEPGLYAWLNRISLITRDDGEE

SEQ ID NO: 7183 - DNA, 870 bp, Unknown
  Obtained from environmental sample
  misc_feature (1)..(870): n is a, c, g, or t
gtggtagataaaagatgcgccgttgatttactttttgagtctgtagcaagcagagggcatgtctgcgtcgggcttgacacgtcgcctgattatgttcccgacagtgaaaaacaaaaaacaaaaaatgccgctgaagcggttcttgcctttaacgccgctcttgttgacgcgactattgacgttgccgcgtgttacaaggttcagattgcttattatgaggaaatgggcatagaaggattaatcacatattccaaaactcttgaatatatacgaaaaaaaggcgggcttgttatcgcagacatcaaacgcggcgacatcgcggatacagcccgttgttacgcgaaagctcacttatccggcgatttcaaagcggactttgtaaccttaagcccttacatgggaatggactccgttgaaccgtggctttccgaagcgcagaaccaaggcggcggagcgtttgtccttatgagaacaagcaatcccggaatgagagactttcaatattcaattacctcggacggaaaaaaactttaccacaaggtaggagacaaactggcggaacttgcttcaaaacacgctgggaaaaacggatacggccttttcggagccgtagtcggctgcacggaaaaggatgaagcgtcagatatcagaaaaaattatcccaatcttttttttcttattccaggttacgggacacagggcggcggagcgcangttgccgctctgttgttgcgcgaagggaacggcggcgtagtaaacgcttcccgctcaataattacggcatggcagaaagaganaaaatatgaaaaaacgcagtctttgctttgccngcgacgcggcgcgaaaagcggcaataaaaatgcgcgatga

SEQ ID NO: 7184 - protein, 289 aa, Unknown
  Obtained from environmental sample
  DOMAIN (19)...(271): Orotidine 5'-phosphate decarboxylase / HUMPS family
  misc_feature (1)..(289): Xaa is any amino acid
MVDKRCAVDLLFESVASRGHVCVGLDTSPDYVPDSEKQKTKNAAEAVLAFNAALVDATIDVAACYKVQIAYYEEMGIEGLITYSKTLEYIRKKGGLVIADIKRGDIADTARCYAKAHLSGDFKADFVTLSPYMGMDSVEPWLSEAQNQGGGAFVLMRTSNPGMRDFQYSITSDGKKLYHKVGDKLAELASKHAGKNGYGLFGAVVGCTEKDEASDIRKNYPNLFFLIPGYGTQGGGAXVAALLLREGNGGVVNASRSIITAWQKEXKYEKTQSLLCXRRGAKSGNKNAR

SEQ ID NO: 7185 - DNA, 756 bp, Unknown
  Obtained from environmental sample
  misc_feature (1)..(756): n is a, c, g, or t
atgagcattccagtaatcgatatgattctgaagtcgggtatgatgggtaagattatcgtcggcctgttgatgttcttctcgcttttgagttgggcgttgatctttgcgcgggtggtgtcgctaaagagggtggtgggcggttgcaagaagttccgcaggcgcttccagaacgatgtgcggcacataacggagatagaccggatgagcgtggacgagttgaatacgcccatggggcggctggccaaagtggggtcggacgagtacaaccggatcataggcgatgtcaagacgcacacacgggtgaacgattggtcgttcttcttggagagtcagttcactatggcgcgggagcggatagacagcgcgctcgcgggcatagtggcgccctttgactccggggtattcctcttggctatgataagcagcgtcgcgccgttcttggggcttctaggtacggtatggggcattatgaattcgttctatgagatcggcagccaaggttcggccagcttgccggtggtggcgccgggtattgccgaggcgctcatcaccacgatagtcggtcttgccgtggccattccggcgctgtttttttacaactactgcaaccacaaggcggagcgggcggcggacgatatggaagagttcaaggatcttttggtggtgcggttgcgtagggagatcttcagcgcgttcttcgcggagagccaagcggcgccggcagcgccgagatcgcctatcggcggggggttctga

SEQ ID NO: 7186 - protein, 251 aa, Unknown
  Obtained from environmental sample
  DOMAIN (74)...(218): MotA/TolQ/ExbB proton channel family
  misc_feature (1)..(251): Xaa is any amino acid
MSIPVIDMILKSGMMGKIIVGLLMFFSLLSWALIFARVVSLKRVVGGCKKFRRRFQNDVRHITEIDRMSVDELNTPMGRLAKVGSDEYNRIIGDVKTHTRVNDWSFFLESQFTMARERIDSALAGIVAPFDSGVFLLAMISSVAPFLGLLGTVWGIMNSFYEIGSQGSASLPVVAPGIAEALITTIVGLAVAIPALFFYNYCNHKAERAADDMEEFKDLLVVRLRREIFSAFFAESQAAPAAPRSPIGGGF

SEQ ID NO: 7187 - DNA, 840 bp, Unknown
  Obtained from environmental sample
  misc_feature (1)..(840): n is a, c, g, or t
atgggactgatcgaactaagcagcgcccttgatctgctgttgaatttccccgaaaaggcctccaataggtggaacgacgaggagttcaacgtactggcaaagatcgaacacgagttctacaacctgcgtagggcgcacggcctctgggactttgccgacctgatctgcggtgggcttgaactcttctccaaataccccgacatcgcggacgattggggaaggcgctttgacgcggttttggttgacgagttccaagacacgaaccccatgcaaatcgatatgctcgacgtactgctgcgcttcggggcgagtctctacgccgtcggcgacgacgaccaagcgatatacggatttaggggcgcggacatcaggccgataagaaatttcacgtcgcgctttagggacgcggcgattgtcaagctgcaaatcaactatcgcagtgtgagctcaatacttgattgcgccaacagactgtgggcggataagccggcggagtataggaaaacgcttgtaagcggactaaacccccaaccgtcaggttgccgcaaacctaagactatgcgcttcggaacgcaggcccaagcgctagagtggatattgggcagagcgcgctttatcgaacgccgcgaaaagataccgatcgggtcaatgaccgtactgtttcgtatcaacgacacgctgacggccgtggagaaccattacaagagcatgggcttgacagacgggaaaataccgcaactgctgaccgtccacgcgagtaaggggctggagtatccggtggtttttctgtgcgacttagaggagggcgtcttcccgcatacaagttgccctcggccataa

SEQ ID NO: 7188 - protein, 279 aa, Unknown
  Obtained from environmental sample
  misc_feature (1)..(279): Xaa is any amino acid
MGLIELSSALDLLLNFPEKASNRWNDEEFNVLAKIEHEFYNLRRAHGLWDFADLICGGLELFSKYPDIADDWGRRFDAVLVDEFQDTNPMQIDMLDVLLRFGASLYAVGDDDQAIYGFRGADIRPIRNFTSRFRDAAIVKLQINYRSVSSILDCANRLWADKPAEYRKTLVSGLNPQPSGCRKPKTMRFGTQAQALEWILGRARFIERREKIPIGSMTVLFRINDTLTAVENHYKSMGLTDGKIPQLLTVHASKGLEYPVVFLCDLEEGVFPHTSCPRP

SEQ ID NO: 7189 - DNA, 855 bp, Unknown
  Obtained from environmental sample
  misc_feature (1)..(855): n is a, c, g, or t
ttgagtttcttctccccaaggctgacaaaagacgaacgcaaggcgcttgaggagtctttgcggaagaggggttgccgcgacccgattgtaacctggcgcggcacgataatcgacgggcacaaccgatactcaatctgcaaaaagcacaacatcccgttcaaggtcaaagagatggacgacctcttggacgagaacgccgtgaagatgtggatgatcaacaaccaactgagccggcgcaacttgactgacgagcagcgcgagcggttcatcggaatcctccacaacacaagcaaaaaagggcagggcggtgcccgcgataaggcgggccggaaatcaaaggctcaatttgagcctttgaaaaacgccaaccccaaagagagcgcagatatgaacacggcggagatgattgccaagcagcaaggggtctcccgcgaaacagtcaaacgtgccggcaaatacgcccttgcgctcgaccgaatcagcaaaatcagtcctgaagccgaagccaaaataatgagcggcgaagccagaagcatcgttaacaaaagcgacatccgagacctagccgaagcgtcggacgcggaaatccaaaaggtcgccagggcgatcgaaaaggacaagccggtcaatttggtcaaaaaagccaaaacgacagaaaatggatcgctggttcggcaagtgtacaaaataattgatgagatagaaagccgaacggatatcctcaacgatatgatggggaaacttgctggagcaggatcgcatggacaggtcgcggactgggatcgggcggagattgttaaccgtgttgataatgtgtcggctaagatggggttgattgggcagagttttttgtga

SEQ ID NO: 7190 - protein, 284 aa, Unknown
  Obtained from environmental sample
  misc_feature (1)..(284): Xaa is any amino acid
MSFFSPRLTKDERKALEESLRKRGCRDPIVTWRGTIIDGHNRYSICKKHNIPFKVKEMDDLLDENAVKMWMINNQLSRRNLTDEQRERFIGILHNTSKKGQGGARDKAGRKSKAQFEPLKNANPKESADMNTAEMIAKQQGVSRETVKRAGKYALALDRISKISPEAEAKIMSGEARSIVNKSDIRDLAEASDAEIQKVARAIEKDKPVNLVKKAKTTENGSLVRQVYKIIDEIESRTDILNDMMGKLAGAGSHGQVADWDRAEIVNRVDNVSAKMGLIGQSFL

SEQ ID NO: 7191 - DNA, 849 bp, Unknown
  Obtained from environmental sample
  misc_feature (1)..(849): n is a, c, g, or t
ttgctaggcagtataaagatagacaatttaaacatagatggttttaattacgaaaaggaatatgtttttgagcgcaataaagacaactgttttgtaaagaaaataaaagaatacgatcttaatgaaggttcaataatattaatgattattttctgccacaattttattcaaaatgacagtgaactgataaaagcggataatttatatgatgaaatgcgtgaaattgccggtttttccgaaacaaggcgtatacaaaaccgcttaaaatcgggaaagcataaagtcgttgaaaaagggcttatccagtttgactgccaggacggcatggctgataccgagcatttcaggcttaccgaaaaagcaaaagaagaattccttgcggatattaatttcgcggaaaaagccaaacacaacggaaaaaatattattccggcggataaaattaccgaaaaaaacctttattacagcgataaaataaaagatcgcataaacgagcttacggaattgcttggagaaagtaatttttccggtattcaaaaaaggcttacggaaaaaggaatgagaaccggttttgcctgcattttctcaggccctcccggaaccggaaaaacggaaaccgcgtaccagatagcgaaaaaaacaggcagggacataatgcttgttaacatcgcggataccaaaagcatgtggttcggtgaaagcgagaagcgcattaaatccctgtttgaccgctaccgaggcattgtaaaaagcggcggccttgcgccgatcttattttttaatgaagcggacgcagttttgggaaaacgcagggaattgtcgcaatcccgcaacgctcggccgatctga

SEQ ID NO: 7192 - protein, 282 aa, Unknown
  Obtained from environmental sample
  misc_feature (1)..(282): Xaa is any amino acid
MLGSIKIDNLNIDGFNYEKEYVFERNKDNCFVKKIKEYDLNEGSIILMIIFCHNFIQNDSELIKADNLYDEMREIAGFSETRRIQNRLKSGKHKVVEKGLIQFDCQDGMADTEHFRLTEKAKEEFLADINFAEKAKHNGKNIIPADKITEKNLYYSDKIKDRINELTELLGESNFSGIQKRLTEKGMRTGFACIFSGPPGTGKTETAYQIAKKTGRDIMLVNIADTKSMWFGESEKRIKSLFDRYRGIVKSGGLAPILFFNEADAVLGKRRELSQSRNARPI

SEQ ID NO: 7193 - DNA, 315 bp, Unknown
  Obtained from environmental sample
  misc_feature (1)..(315): n is a, c, g, or t
ttggttcaattttataggattagtatgagcaaaagcatctatgtgggtaacctcccattcgcattcggcaacgaacaactaggcgaattattcgctgaattcggagaggttaaaagtgccaaggtcgtcattgaccgcaactccaaccgtagcaaaggttttgggtttgtggaaatggacgaggaagtagcagacaaggctattcaggctttgaacgggaagaatgtaggcaataggccgcttcgcgttaatgagtctcagccacgcgagcaacgccccccacgccaagacagtcgtgacaaccgccgcagataa

SEQ ID NO: 7194 - protein, 104 aa, Unknown
  Obtained from environmental sample
  DOMAIN (13)...(83): RNA recognition motif. (a.k.a. RRM, RBD, or RNP domain)
  misc_feature (1)..(104): Xaa is any amino acid
MVQFYRISMSKSIYVGNLPFAFGNEQLGELFAEFGEVKSAKVVIDRNSNRSKGFGFVEMDEEVADKAIQALNGKNVGNRPLRVNESQPREQRPPRQDSRDNRRR

SEQ ID NO: 7195 - DNA, 369 bp, Unknown
  Obtained from environmental sample
  misc_feature (1)..(369): n is a, c, g, or t
ttgcgggaaatattcggcgcggattccgccctgtatatcacaataaccagttacggcgtaagatatgtcggaatagccagtgtggtagaagcggctgcttccacaaagcttatcgacctgagaaacggccttgagctttggtctggcagggtcgctttggcggaaagcagtaaaaacagcaaaaaagatagctttatagaaatgctgatttcggcggcgtttgaccaaatatccaacgtcctttcggacagggcttacgatgtaggcaaaaaagcgaaccatcaaatgctttcggctggtcagaaaaaaggccttttatacgggccttatcattccaggtacaaaacagatttgctgcaagacttgtga

SEQ ID NO: 7196 - protein, 122 aa, Unknown
  Obtained from environmental sample
  DOMAIN (1)...(117): Putative bacterial lipoprotein (DUF799)
  misc_feature (1)..(122): Xaa is any amino acid
MREIFGADSALYITITSYGVRYVGIASVVEAAASTKLIDLRNGLELWSGRVALAESSKNSKKDSFIEMLISAAFDQISNVLSDRAYDVGKKANHQMLSAGQKKGLLYGPYHSRYKTDLLQDL

SEQ ID NO: 7197 - DNA, 867 bp, Unknown
  Obtained from environmental sample
  misc_feature (1)..(867): n is a, c, g, or t
atggaagacagaaaagtcattgcggttcataacgcgtataatgatcagattgagtgcggctcggacgtaataagccggattaattacgcgaaaaaattccttcccgaactaaaaacgcggatactaaaaacaattaatgagttattaattgccgcctgtaaagacgcgggaattgaggcgaatcgagttgtttgcgtatctgcggcgggaaataccacaatgattcatttactgttaggcgtcattcctgaatacatccgtctttccccgtatactcccgcagttttcctgccgcaatgttatacggcggggcaggtgggaataggcgcgtgtgaaagcgctccaatacttttcgctccatccgtgggaagctatgtggggggcgacatcacagcgggactactttgtaccgctcttgcctcgccgaaaaaatattcgggtgttattttatttatcgacatcggcactaacggggaaattgttcttggaaataacgattttattttcgcctgcgcctgctcagcgggtcccgcttttgagggcggaggaataaaacacggaatccgcgcgtgttcaggcgcgatagaaagggtagtaattgacgaaaatggcaaaccgcanatcttcacaatcggcggcgcggaacctataggtatttgcggatcgggggtaatttccgctattgcggaacttttcagaaagggaattattgactccgccgganagttttcgcaaaaaaaaggcgagtattttctttgcgacggaatctcgctcaatgaaagcgacattaacaattttatccgcgcagagggcgctattttttccgcctgtcagataatgctcgacaatgccggaatgtcgttttaa

SEQ ID NO: 7198 - protein, 288 aa, Unknown
  Obtained from environmental sample
  misc_feature (1)..(288): Xaa is any amino acid
MEDRKVIAVHNAYNDQIECGSDVISRINYAKKFLPELKTRILKTINELLIAACKDAGIEANRVVCVSAAGNTTMIHLLLGVIPEYIRLSPYTPAVFLPQCYTAGQVGIGACESAPILFAPSVGSYVGGDITAGLLCTALASPKKYSGVILFIDIGTNGEIVLGNNDFIFACACSAGPAFEGGGIKHGIRACSGAIERVVIDENGKPXIFTIGGAEPIGICGSGVISAIAELFRKGIIDSAGXFSQKKGEYFLCDGISLNESDINNFIRAEGAIFSACQIMLDNAGMSF

SEQ ID NO: 7199 - DNA, 780 bp, Unknown
  Obtained from environmental sample
  misc_feature (1)..(780): n is a, c, g, or t
atgagaggcgcgacgcgaaaatacgcgattttgctatccgtgctgatatgcggattctctccgtcgcggagcgccgcgcaaacgcacttagactcgctgatagagcggcaaaggtcgatgcaagatcaagaggcgcgccaatatggagagaacgggcaggagacgcagtcggatgaatcatcgcgttggagcgggcgtacgctctcccgcagcgaggcgcgggagtttgagcgtcagcaaaaggaggagcgcaagcggcgcgaacagcgttcgtggcgcgtacgctcaatcgactttacgggcaatgttacctacggcaaaagggatctccaaagcctgatggaactcaagcgcaagtcgcgattcacggaatacatgctgagatccgatttggacgcgctgaccgcgttctacaaaaacggcggattcgagtacgttaacgttaagtctgcgagcgagcgtgacagcgcaagccgcagggttaagattcacgtcacagtgggggaggggcggcgtatccatgtcggcgagatcaacattgacgcgcggcgattcgcgcccagccaaagcgctatgcgcagactcgcgactaagcgcggctcgccgcttgtccactccgatgtgcgccaagactgccgcacgctgaaagagatcgccggcgagcgcggattccttgaggccgttgttgaaccggaggttatgatagacaccgtcgaacatttagcaagcgtggtttttagggtgcatgaagggcccgatcgtgaaagtaggcggcattga

SEQ ID NO: 7200 - protein, 259 aa, Unknown
  Obtained from environmental sample
  SIGNAL (1)...(25)
  DOMAIN (173)...(251): Surface antigen variable number repeat
  misc_feature (1)..(259): Xaa is any amino acid
MRGATRKYAILLSVLICGFSPSRSAAQTHLDSLIERQRSMQDQEARQYGENGQETQSDESSRWSGRTLSRSEAREFERQQKEERKRREQRSWRVRSIDFTGNVTYGKRDLQSLMELKRKSRFTEYMLRSDLDALTAFYKNGGFEYVNVKSASERDSASRRVKIHVTVGEGRRIHVGEINIDARRFAPSQSAMRRLATKRGSPLVHSDVRQDCRTLKEIAGERGFLEAVVEPEVMIDTVEHLASVVFRVHEGPDRESRRH

SEQ ID NO: 7201 - DNA, 957 bp, Unknown
  Obtained from environmental sample
  misc_feature (1)..(957): n is a, c, g, or t
gtgtgtttgaccggccttcaacaagcggtagttgaacgcgccaagtccgatttaaaggtgatagtccccggctacacgcacctgcagcaagcgcagccggtgttgctgtcgcactactggatgtcgctcttctccatccttgaacgggaaaagagccgtgtcgcccacgcccgccgatccgccgacatcctgccgctgggttcaggcgcgatagccggtagcggtttctgtgtagacagagacgcaatagccgccgaactgggtttctcgtccgtatcgaccaacagcatagacatggtggcctcaagagacttcgtcatagaggcgctatcatccatcgcctccataggcatacacctgagccgctacgccgaagacctgataatttggtcgtcgagggagttcggctttgtagagttagacgacgcgtggtcaacggggtcaagcatgatgccgcagaaaaagaatccggattcgttggaattgatacgcggcaaaagcggtcggctgatcggcaactacgtacgcggcgctaccacgctaaaaggtttgggattagcctattacaaagatctgcaagaggacaaggaaccgctatttgacagtattaatactatatctatagtgataaacgtattcacaaatgttatagccacgctaaaagtccgtgaggagaggatcanacagggcttagatccgttcctactggccacagacatggcggattacctagtccgcanaggaatgccgttccgtcaagcgcacaaggtggtangccgtcttgtaggttactgcgcggagtccggcgttgcgctcacaagcgtatcgataggaaaactaaaagaattttcggatatgttcggggacgatgttacggaactctactcatgggatagagcggtaaattcacgcgctgtaaagggcgggacgagcctgcccagcgtagagcgcaaataa

SEQ ID NO: 7202 - protein, 318 aa, Unknown
  Obtained from environmental sample
  DOMAIN (1)...(172): Lyase
  misc_feature (1)..(318): Xaa is any amino acid
MCLTGLQQAVVERAKSDLKVIVPGYTHLQQAQPVLLSHYWMSLFSILEREKSRVAHARRSADILPLGSGAIAGSGFCVDRDAIAAELGFSSVSTNSIDMVASRDFVIEALSSIASIGIHLSRYAEDLIIWSSREFGFVELDDAWSTGSSMMPQKKNPDSLELIRGKSGRLIGNYVRGATTLKGLGLAYYKDLQEDKEPLFDSINTISIVINVFTNVIATLKVREERIXQGLDPFLLATDMADYLVRXGMPFRQAHKVVXRLVGYCAESGVALTSVSIGKLKEFSDMFGDDVTELYSWDRAVNSRAVKGGTSLPSVERK

SEQ ID NO: 7203 - DNA, 645 bp, Unknown
  Obtained from environmental sample
  misc_feature (1)..(645): n is a, c, g, or t
ttgaacgaaattgcgaccttgtacaaaaaagctgtgccagaagcaacgcttacatttaattttgactcaagcggcaaactgcaaacgcaaatagaaaacggagccgaagcagatttgtttttatccgcagggcaaaaacaaatggatgcaatagcagaggcttatgtggacgctgcaacacgcaaggatttgcttgtaaatcaggtggtgttgattgtgccaaaaaacagcaaaaaaccaattaagtcttttgaggactgccttggcgacaaagtgtctctgattgcaatcggaaactccagcgtacctgttgggcagtacaccgaagaaatattcacattcctaaaagggtgggataaaatcaccgccaaagcttctttaggcaccaatgtaaaagaggtgctatcgcaagtggaaagcggaagcgttgatgcaggcatagtttatgccacagatgcagctaccgcaaaaaatgtgaaaatcgtggcgcaagctccaaaagagagccataaaccagcggtatatcctgcggcagtgctgaaaaaatcaacgcacccacaggaagcaaaagcgtttttagattttctaagttcaccaaaagctattgctgtgtttaaaaagataggttttgaggttgtgaaataa

SEQ ID NO: 7204 - protein, 214 aa, Unknown
  Obtained from environmental sample
  misc_feature (1)..(214): Xaa is any amino acid
MNEIATLYKKAVPEATLTFNFDSSGKLQTQIENGAEADLFLSAGQKQMDAIAEAYVDAATRKDLLVNQVVLIVPKNSKKPIKSFEDCLGDKVSLIAIGNSSVPVGQYTEEIFTFLKGWDKITAKASLGTNVKEVLSQVESGSVDAGIVYATDAATAKNVKIVAQAPKESHKPAVYPAAVLKKSTHPQEAKAFLDFLSSPKAIAVFKKIGFEVVK

SEQ ID NO: 7205 - DNA, 603 bp, Unknown
  Obtained from environmental sample
  misc_feature (1)..(603): n is a, c, g, or t
gtgggttcgccatacatcctaatgctagacgaaccttttgccgctttagacagccatttgcgttgggaattagaaacggaactttccgctctgttcaagggtttcgcaaatccgattttatatgtatctcacaatcgagacgaagtatataggctcagtgacaatatcgcagttatgaattgcggcaaaaatgaacccatttccgaaaagaaagctctgttcaaaaatcctgcaagcgttcaggcggcaaggcttacgggttgcaaaaatatcgctaaggcaatatccaaaggaacgcagatttccgtgccggattggggagtggaacttgacatagcgcaaaacgatgtgcaatatataggtattcgggcaaattacattgttccagtttctgccgcaaacaaagccgatattgccgcctcatttccgtttgagatagtgaatgagattgaagacaccttcacaaatattctaatggtgcgaaaacagggaacaaacctaccgcccattcgctgggaaatgcccaaaaaagaccgtgttgccttgcgaaatcttccgcaggagcttgcgcttttgcgtgagcatattttgtttttgaaatag

SEQ ID NO: 7206 - protein, 200 aa, Unknown
  Obtained from environmental sample
  misc_feature (1)..(200): Xaa is any amino acid
MGSPYILMLDEPFAALDSHLRWELETELSALFKGFANPILYVSHNRDEVYRLSDNIAVMNCGKNEPISEKKALFKNPASVQAARLTGCKNIAKAISKGTQISVPDWGVELDIAQNDVQYIGIRANYIVPVSAANKADIAASFPFEIVNEIEDTFTNILMVRKQGTNLPPIRWEMPKKDRVALRNLPQELALLREHILFLK

SEQ ID NO: 7207 - DNA, 783 bp, Unknown
  Obtained from environmental sample
  misc_feature (1)..(783): n is a, c, g, or t
gtggttccaggcgggacggagggcccctggcgctattggaatttcgggcctgaatccgacgacgggcgatcctatgtcggggagggagaagggacgctcggccctgacggaaaagcgggcatcagcggcgagacaagcggcgaaggcattgaaggcgcggcctaccgctaccggcttgaaacctcggtacaggacgcggcccgccaggaaatatcctcccgcgcctctgttttggttcatcccgcctctttttacattgccgcgcggcttgattcaggaacgataaaaaccgccgccacaggcaacgccaccacaggtggcgccggtgcggcttcaacatcttcagcctttttcctcagcgcgggacagccggcgacattaagctgggcgcttgtttcgcctaacggcgacctggcggaaactagtctgactagtcaggacttgtcaatacagcttgtccgccacgaatggaaacaggcgcggcagcagggatcgggcggcagggtcaacctgatatgggagcgggttgaggaaatcgccgcgcagagaaacgtaaaaattacaagcggaaataattccggcgtgtttaattttacgccggacaaaagcggcctctgggaactcaggctttccggccgcgatcaaaagcagagaattgccgcgacccgctcccgcttttacgtgagcggcgcgggatgggtgcgctgggattccgatgatgtggataccataaccctgaccaccgaccgccagagctacgcgcccggtgagacggcgaaataa

SEQ ID NO: 7208 - protein, 260 aa, Unknown
  Obtained from environmental sample
  misc_feature (1)..(260): Xaa is any amino acid
MVPGGTEGPWRYWNFGPESDDGRSYVGEGEGTLGPDGKAGISGETSGEGIEGAAYRYRLETSVQDAARQEISSRASVLVHPASFYIAARLDSGTIKTAATGNATTGGAGAASTSSAFFLSAGQPATLSWALVSPNGDLAETSLTSQDLSIQLVRHEWKQARQQGSGGRVNLIWERVEEIAAQRNVKITSGNNSGVFNFTPDKSGLWELRLSGRDQKQRIAATRSRFYVSGAGWVRWDSDDVDTITLTTDRQSYAPGETAK

SEQ ID NO: 7209 - DNA, 789 bp, Unknown
  Obtained from environmental sample
  misc_feature (1)..(789): n is a, c, g, or t
ttggagaataacaggaatatggataataaggaaaagagagcggagaaattttacagctcgttcttgacatatacagaatcgctttttgacagatttcctgtaaaaaacgaactggattttgtatcaatacaaaaaatgattaaaatgtcatgcgaatttgtaaggcgggatcgtaatcacatagtgtatgcgatgcaaacagccaaaccatttagaaaccctcatgtgtcccattctgtaagaaccagtattgttgccgtaattattggaacaaatctgaaacttcgaagacatcagcttattgaattgggaattgcgggcttactgtgcaatataagcgtactcaatatgtcaggaagaatatacacaagtaaagagggtgggcctaacttgttgaaatcaggcacagatatggaaaaaaaattattgtttgtccatcctatacacgccaataagatgctcaaagcgttaaattttcccttgtcaatttgcgaagcggtgcttcagcaccatgaactggaagacggatcgggcttccctcaacaacttaaaggaaacgctatcggcctgtatggaaagattttggttgttgccggtttttacgaagccttctctacggaaaatattgatgggacaaagtgcagtcacagcggaatagtacaaatactgaaaaatggcgggagttttgacgtgtcgggtatccgggccttagtaaactcaatttcaattaccccggtgggatatatgttttattatccaacgggaaacgcgggcaggtgtcagacatag

SEQ ID NO: 7210 - protein, 262 aa, Unknown
  Obtained from environmental sample
  misc_feature (1)..(262): Xaa is any amino acid
MENNRNMDNKEKRAEKFYSSFLTYTESLFDRFPVKNELDFVSIQKMIKMSCEFVRRDRNHIVYAMQTAKPFRNPHVSHSVRTSIVAVIIGTNLKLRRHQLIELGIAGLLCNISVLNMSGRIYTSKEGGPNLLKSGTDMEKKLLFVHPIHANKMLKALNFPLSICEAVLQHHELEDGSGFPQQLKGNAIGLYGKILVVAGFYEAFSTENIDGTKCSHSGIVQILKNGGSFDVSGIRALVNSISITPVGYMFYYPTGNAGRCQT

SEQ ID NO: 7211 - DNA, 525 bp, Unknown
  Obtained from environmental sample
  misc_feature (1)..(525): n is a, c, g, or t
gtgctggcttttataattcagcttctcttccagagcgaaacaggcgcttccctttctttcatactttcctatttggctttgctgggcatactcactcttggtgaggccgtgcgggatttgtttcgcggaaggctgcctgagattattggcgcgggactttcggcttccataggggcgtttgtttttacggctcctgtagtcgccctgtattttgcttctgtcaggccgataggaattctggcgggcctcgtagccgcgcctttggcgtcggtttttatgattttgtctctggccgctcttgtcgcgagttttttaccttttcctgtatggaatatatttgattttattcttacccgtatttaccgcttgctggaattacttgtcggcatcgccggacgcgttccggggttttcagcttcaaaccctatcgcggttttgattttttctcttgtattttgtatcttgctttatttctttcatctccgaaacaagcgctataggaacagcattgcccccttcaattaa

SEQ ID NO: 7212 - protein, 174 aa, Unknown
  Obtained from environmental sample
  misc_feature (1)..(174): Xaa is any amino acid
MLAFIIQLLFQSETGASLSFILSYLALLGILTLGEAVRDLFRGRLPEIIGAGLSASIGAFVFTAPVVALYFASVRPIGILAGLVAAPLASVFMILSLAALVASFLPFPVWNIFDFILTRIYRLLELLVGIAGRVPGFSASNPIAVLIFSLVFCILLYFFHLRNKRYRNSIAPFN

SEQ ID NO: 7213 - DNA, 393 bp, Unknown
  Obtained from environmental sample
  misc_feature (1)..(393): n is a, c, g, or t
ttgtattttgtatcttgctttatttctttcatctccgaaacaagcgctataggaacagcattgcccccttcaattaactacgattcaccaagggagttaaaatcatttctcgaagagcgcggaatagggatgaggaaaaaattcgggcagaattttatggtgaacccgtatgagcgttccatgctgcttgacgctctggaattgccggcaggggcaaaggtttgggaggccggcgccggcttgggcgcgatgacggagggccttttgaaacgcggcgctcaggttacggcctttgaaattgatcccgcgtttgccggcgctttaaggaattttttgggaatggttctgtcgagagtggaggctcttttcgccttgttgaaggggacatactaa

SEQ ID NO: 7214 - protein, 130 aa, Unknown
  Obtained from environmental sample
  misc_feature (1)..(130): Xaa is any amino acid
MYFVSCFISFISETSAIGTALPPSINYDSPRELKSFLEERGIGMRKKFGQNFMVNPYERSMLLDALELPAGAKVWEAGAGLGAMTEGLLKRGAQVTAFEIDPAFAGALRNFLGMVLSRVEALFALLKGTY

SEQ ID NO: 7215 - DNA, 741 bp, Unknown
  Obtained from environmental sample
  misc_feature (1)..(741): n is a, c, g, or t
ttgccgctctggcggtgtttttggaggaaactgtttcaaatggccgttgatattgccgaaagggtcgcgcgtatagaggagaaaattgaggcggcctgcgcccgctcgggacgcaaacggcaggagatcaaactcatgggagttacgaaattccacggcgttgaagtggtggaggccgcctgtaaagccgggataagcttatttggggaaagccgcgttcaggaagcgacggaaaaattttcgaagttttgggaaagccgccgtaaagacggaagcgttgagcttcacctgattggtccccttcagcgcaacaaggcaaaaaaagcggcggccttttttgattgcatccagtcgatagacagagattccatcattgacgagttgggagccttgaccgccggggcggaaaatcctataaagatcatgttggaataccacaccggggaagaaaccaaaataggctttcccgattcggaaagtttattaaaggcggcggaaaaagttttgtccttttccggcttgcgtccggtagggcttatgactatggccccctttacccaggatgcggctcttgtccgttcatcctttcgaagccttgttcttgccagggacgagcttgaaaaacgttttagcggatattggtcctgcctttcaatgggtatgacaaacgattatgaaattgccattgaggaagggtcaaccctgattcgattgggaacagctatttttggggaaggttga

SEQ ID NO: 7216 - protein, 246 aa, Unknown
  Obtained from environmental sample
  DOMAIN (17)...(246): Alanine racemase, N-terminal domain
  misc_feature (1)..(246): Xaa is any amino acid
MPLWRCFWRKLFQMAVDIAERVARIEEKIEAACARSGRKRQEIKLMGVTKFHGVEVVEAACKAGISLFGESRVQEATEKFSKFWESRRKDGSVELHLIGPLQRNKAKKAAAFFDCIQSIDRDSIIDELGALTAGAENPIKIMLEYHTGEETKIGFPDSESLLKAAEKVLSFSGLRPVGLMTMAPFTQDAALVRSSFRSLVLARDELEKRFSGYWSCLSMGMTNDYEIAIEEGSTLIRLGTAIFGEG

SEQ ID NO: 7217 - DNA, 759 bp, Unknown
  Obtained from environmental sample
  misc_feature (1)..(759): n is a, c, g, or t
ttgaaacgccggggagtggaaatacttgatgagtgtcacctgcccgaagatttgcacggcgccgtggtgattatccgcgcccacggcgtaagtccccaaactgaaacggaattgcgccggcggggggcacaggtagttgacgcaacctgccccaaagtaaaatccagccaggtcaaggccgccgcttttgccaaagacggataccggctttttctggcgggtgaagaacgccacgctgaaattattggcatcaaaggttatgccgaggcggtcggcagggtcgctcctttctgtgtcgttgtcagtaatgccgccgcagcggaaaaaaccgccgctcaactgcatgatgaagatgccgcattatgccgcaatgccgcaaccgcgcttattgggcaaactacaatttcgacagaagaataccaatctattggcagcgcaatcacccggttttttcccgatctggaaattgcccaaacaatttgcgccgccactgaagaacggcaggacagcctgcgggaactttttgacaaaacagacgccattattatcgccgggggaaaagagtcagccaacacccgccgcctgcttaccatagcggagacagcggtcctgccggcgagtaaaccttgcgcctttgtagaaacagccgcagatataccggcgaatttttttaagtttaatatcatcggtcttgcgtccggtacttcaacgccggatgttgttattgatgacattgagcgcagtttagggaaccgctga

SEQ ID NO: 7218 - protein, 252 aa, Unknown
  Obtained from environmental sample
  DOMAIN (1)...(252): LytB protein
  misc_feature (1)..(252): Xaa is any amino acid
MKRRGVEILDECHLPEDLHGAVVIIRAHGVSPQTETELRRRGAQVVDATCPKVKSSQVKAAAFAKDGYRLFLAGEERHAEIIGIKGYAEAVGRVAPFCVVVSNAAAAEKTAAQLHDEDAALCRNAATALIGQTTISTEEYQSIGSAITRFFPDLEIAQTICAATEERQDSLRELFDKTDAIIIAGGKESANTRRLLTIAETAVLPASKPCAFVETAADIPANFFKFNIIGLASGTSTPDVVIDDIERSLGNR

SEQ ID NO: 7219 - DNA, 945 bp, Unknown
  Obtained from environmental sample
  misc_feature (1)..(945): n is a, c, g, or t
gtggtcagattggccgaggtcaagcgtcccgtcgtgtccgcagttccggccaccgccacgcataaggtgcgtcaggatatcttggcacaacttgatctccgcgccccgcaggttctgatagcgggttttgaccgcaaaaatctctatttcggcgtacggaggccgaggaacaaatacgacgcgcttacggcgtttctaaaagacaaaaaggagcgcagcggaatcgtttactgcggtacgcgcaaatacgtggagattgtgtgcaagcgtttgcgagccgacggatacagcgtctcgcgttaccacgccggtctgcccgataaggagcggcacgacaatcaggatgattttctgcacgaccgcgtgcaaataatggtcgcgacaaacgctttcggcatggggatagacaagtccaacgtatcgtttgtggtgcacgtcaatatgcccaaggatatagagagttattatcaggaggcgggtcgggccgggcgcaacggcgaaccggcggactgcatactgctctatagcggtcgagacgcgagggttagcgagtggatgattgaaaacgacaaagagaatcgatctctcgacagggaaacggagcggcggctgaaagagcgcagccgtgaacgtatgagagaaatggtttcttacggcacgacggaggagtgcctgcgggggttcatcctcaaatacttcggcgaggccccgcccgacaactgcggcaactgcgaccgctgcaacgcggtcgccgctactacggatgaagttgatacggagaaagagatcgacaagagggacactgcaaaaacatcgggcaaaaccggcgcgaagaagagacagattaaagtaaaggttgcggacaagggcggtacgaaagaacaagcggtcgcggcaaagatcgcgggccaaagcccgcgcgaagaaaaaggcggtcaaggctga

SEQ ID NO: 7220 - protein, 314 aa, Unknown
  Obtained from environmental sample
  DOMAIN (90)...(166): Helicase conserved C-terminal domain
  misc_feature (1)..(314): Xaa is any amino acid
MVRLAEVKRPVVSAVPATATHKVRQDILAQLDLRAPQVLIAGFDRKNLYFGVRRPRNKYDALTAFLKDKKERSGIVYCGTRKYVEIVCKRLRADGYSVSRYHAGLPDKERHDNQDDFLHDRVQIMVATNAFGMGIDKSNVSFVVHVNMPKDIESYYQEAGRAGRNGEPADCILLYSGRDARVSEWMIENDKENRSLDRETERRLKERSRERMREMVSYGTTEECLRGFILKYFGEAPPDNCGNCDRCNAVAATTDEVDTEKEIDKRDTAKTSGKTGAKKRQIKVKVADKGGTKEQAVAAKIAGQSPREEKGGQG

SEQ ID NO: 7221 - DNA, 840 bp, Unknown
  Obtained from environmental sample
  misc_feature (1)..(840): n is a, c, g, or t
gtgcggatactctccggcgttgagggcgggcaaacgctcggaacgcctttaaccttggtcgtcgccaacggggacaagcgtcctagcgactacgattctataaagggcataccgcggccctcgcacgccgactatacctacaagatgaagtacggcgtgtgcgcgtcgagcggcggcggtcgggcgagcgccagagagacggtagggcgcgtcgcggcgggagcggcggcggagatctttctgcgcgaacggttcggcgtggagatagtggcgttcgtatcgtcggtgggcggcataagcgtctccacccccgttctcgacggcgcacacagcgcggccagcaacgctatcagcctaaacggcatagagtgcatagactttaataccatcacgcgcggcatggtggacgccaaccccgtgcgctgccctgtcgccgacagcgccaaggttatggaggcggcgatactcgacgtgatggagaacggcgactctataggcggcacgataacctgcgtatgccgcaacgtgccggcgggctggggtgagccggttttccaaaagctggaggcggcgctcgccatggcgatgctgtccatccccgccgccaaaggcttcgagataggctcgggtttcgccggagccgctatgcgcggttcggagcacaacgacctgttcgtcaaaaagcaaaacggtcttggcacggcgacaaacaggagcggcggggtattgggcggcatatcgaacggcgagcccatctacttcaaaaggcgttcaaaccgaccgcgacgatcggcagccaccaaaccactgcggactacgacggaaacgacgcantactaa

SEQ ID NO: 7222 - protein, 279 aa, Unknown
  Obtained from environmental sample
  DOMAIN (1)...(273): Chorismate synthase
  misc_feature (1)..(279): Xaa is any amino acid
MRILSGVEGGQTLGTPLTLVVANGDKRPSDYDSIKGIPRPSHADYTYKMKYGVCASSGGGRASARETVGRVAAGAAAEIFLRERFGVEIVAFVSSVGGISVSTPVLDGAHSAASNAISLNGIECIDFNTITRGMVDANPVRCPVADSAKVMEAAILDVMENGDSIGGTITCVCRNVPAGWGEPVFQKLEAALAMAMLSIPAAKGFEIGSGFAGAAMRGSEHNDLFVKKQNGLGTATNRSGGVLGGISNGEPIYFKRRSNRPRRSAATKPLRTTTETTXY

SEQ ID NO: 7223 - DNA, 618 bp, Unknown
  Obtained from environmental sample
  misc_feature (1)..(618): n is a, c, g, or t
atgggctcgccgttcgatatgccgcccaataccccgccgctcctgtttgtcgccgtgccaagaccgttttgctttttgacgaacaggtcgttgtgctccgaaccgcgcatagcggctccggcgaaacccgagcctatctcgaagcctttggcggcggggatggacagcatcgccatggcgagcgccgcctccagcttttggaaaaccggctcaccccagcccgccggcacgttgcggcatacgcaggttatcgtgccgcctatagagtcgccgttctccatcacgtcgagtatcgccgcctccataaccttggcgctgtcggcgacagggcagcgcacggggttggcgtccaccatgccgcgcgtgatggtattaaagtctatgcactctatgccgtttaggctgatagcgttgctggccgcgctgtgtgcgccgtcgagaacgggggtggagacgcttatgccgcccaccgacgatacgaacgccactatctccacgccgaaccgttcgcgcagaaagatctccgccgccgctcccgccgcgacgcgccctaccgtctctctggcgctcgcccgaccgccgccgctcgacgcgcacacgccgtacttcatcttgtag

SEQ ID NO: 7224 - protein, 205 aa, Unknown
  Obtained from environmental sample
  misc_feature (1)..(205): Xaa is any amino acid
MGSPFDMPPNTPPLLFVAVPRPFCFLTNRSLCSEPRIAAPAKPEPISKPLAAGMDSIAMASAASSFWKTGSPQPAGTLRHTQVIVPPIESPFSITSSIAASITLALSATGQRTGLASTMPRVMVLKSMHSMPFRLIALLAALCAPSRTGVETLMPPTDDTNATISTPNRSRRKISAAAPAATRPTVSLALARPPPLDAHTPYFIL

SEQ ID NO: 7225 - DNA, 519 bp, Unknown
  Obtained from environmental sample
  misc_feature (1)..(519): n is a, c, g, or t
atgaaaaaacgcgtttctgtacttggagcgacaggctctatcgggaaaagttctcttgacgttatttcgcgtaacaaagacgaatttgaagtagtcctcctttccgcccattccaaaggcgaagaactggaaaaactgaaaaccctttggtccaacgccgtttgcgtgctatcgggagaagaaggcggaaaggagaatcttcttgccgcaatcggcggcgtaaacgctgatataacaataaacggcataacgggcgcaagcggccttgagccgtctcttgcggcgatagaagccagttctgatctggctcttgcaaacaaggaaacgctcgtcatggcggcccccctcgttttccgtcttgcaaaagaaaaaaacgtaaaaataatcccggtcgattccgaacattcggcaattttccacatgatacaggcacattcagacggcggcaaagatgcggtaaacgaaataattttgaccgcctcaggcggccctttcagaaaaatgagtttcaggagctaa

SEQ ID NO: 7226 - protein, 172 aa, Unknown
  Obtained from environmental sample
  DOMAIN (128)...(170): 1-deoxy-D-xylulose 5-phosphate reductoisomerase C-terminal
  misc_feature (1)..(172): Xaa is any amino acid
MKKRVSVLGATGSIGKSSLDVISRNKDEFEVVLLSAHSKGEELEKLKTLWSNAVCVLSGEEGGKENLLAAIGGVNADITINGITGASGLEPSLAAIEASSDLALANKETLVMAAPLVFRLAKEKNVKIIPVDSEHSAIFHMIQAHSDGGKDAVNEIILTASGGPFRKMSFRS

SEQ ID NO: 7227 - DNA, 543 bp, Unknown
  Obtained from environmental sample
  misc_feature (1)..(543): n is a, c, g, or t
atgctactaatattgaatataaatctgtcccctcgaccatgctcaattatctacggattagttgtgggtagcaataggaagtcagcattgaaccaaaaaaaaataataggcattacaggaaactactgtgcggggaaaaactatgtggcggccattttggagcgacgttttattccggttcttgacgttgacaagctgggccaccaggccattgaaaacgaaaaagagcgccttttgaaacgctttggcgatgacatcataggccaggacgggtttatagatcgcaagcggctgggaaataaggtttttggcagacaaaaagagctacaggctcttgaggaaataatccatcctgccgcanaccgggaaactcttgcatggatcaacgcacggcaagaaactgcctgcattattaacgcggcgttgcttcaccgctcattggcttttgaaatgctggacgcggttattatcgttgaagccccttttttgtcaggcttcttagagccagaagcgggatcgcctaccgtggacagccctttttaa

SEQ ID NO: 7228 - protein, 180 aa, Unknown
  Obtained from environmental sample
  DOMAIN (34)...(177): Dephospho-CoA kinase
  misc_feature (1)..(180): Xaa is any amino acid
MLLILNINLSPRPCSIIYGLVVGSNRKSALNQKKIIGITGNYCAGKNYVAAILERRFIPVLDVDKLGHQAIENEKERLLKRFGDDIIGQDGFIDRKRLGNKVFGRQKELQALEEIIHPAAXRETLAWINARQETACIINAALLHRSLAFEMLDAVIIVEAPFLSGFLEPEAGSPTVDSPF

SEQ ID NO: 7229 - DNA, 312 bp, Unknown
  Obtained from environmental sample
  misc_feature (1)..(312): n is a, c, g, or t
ttgggttatcgagagtttcggttgactttagacgataattaccttagcgcctttgacgtgttgcaaaatgagcttgcctcattctccccagatctggtacggaaaaaacggcttcttgtggggacaaaaaccgacctgccggaaaccggcggacgcctcgcggaattggcggccaaatatccaaatgaaaaagtattcggcatttcggttttttccggtgagggtataaaggaacttgccctggaatttcttcggcttgccgacggtcttgccgatggcaaggccattgatactcaggagtttcaggcgtga

SEQ ID NO: 7230 - protein, 103 aa, Unknown
  Obtained from environmental sample
  misc_feature (1)..(103): Xaa is any amino acid
MGYREFRLTLDDNYLSAFDVLQNELASFSPDLVRKKRLLVGTKTDLPETGGRLAELAAKYPNEKVFGISVFSGEGIKELALEFLRLADGLADGKAIDTQEFQA

SEQ ID NO: 7231 - DNA, 642 bp, Unknown
  Obtained from environmental sample
  misc_feature (1)..(642): n is a, c, g, or t
gtgagactggcaatactgggcggcagctttaaccctattcatcttgggcatctgttccttgctgacgcggttctgtctgaattgcgctatgaccgcgtggtgatggttcctgcgtatatttctcctttcaagccgactgctgtgggcatggaagacagcgcccaacagcgcctggagatgatcgccgcttccattactgcggatccccggctttccgttgacgcttgcgagatcaggcgggaaggggtttcctacaccgtggacacagtcgccgatattatccgccgttacaatccggacggcaaaccgggactcatcattggcgatgatctgatcggggatttccccaaatggtacaagagcgatgagattctctctatggcggatataatcatcgcgcggcgcgtacattcgggcgggctgatagtttcttatcccaatacccagataaccaatgatgttattggaatctcatcaggcgcggtgagggaaaaaatcgcgtcaaactcgacatggcgttatcttgttcccaatgccgcaaggataataatcgaagacaggaaactctacggtttccgcaaactcaccgctgataacggcgcccggcccgtatgcatcnaaaacctcatccagcatatttga

SEQ ID NO: 7232 - protein, 213 aa, Unknown
  Obtained from environmental sample
  DOMAIN (5)...(165): Cytidylyltransferase
  misc_feature (1)..(213): Xaa is any amino acid
MRLAILGGSFNPIHLGHLFLADAVLSELRYDRVVMVPAYISPFKPTAVGMEDSAQQRLEMIAASITADPRLSVDACEIRREGVSYTVDTVADIIRRYNPDGKPGLIIGDDLIGDFPKWYKSDEILSMADIIIARRVHSGGLIVSYPNTQITNDVIGISSGAVREKIASNSTWRYLVPNAARIIIEDRKLYGFRKLTADNGARPVCIXNLIQHI

SEQ ID NO: 7233 - DNA, 765 bp, Unknown
  Obtained from environmental sample
  misc_feature (1)..(765): n is a, c, g, or t
atgaaaggcgttattgctggaagcggcggcattaacattatgatgccggaatttgaaaattttaatatcaattttaacgagatgataaaaccgtccctcgacaatcctgaatcggaaaaaataattacgcatatcgcgttacaccagtacaacgcgacaagcgattcgtcctcaagggcaggttcaatggaattccccggcattacagcgtccggcaaacgtttctggcagactgaagtttcaggctccgggtcggctcttccgccgggacccggaattcacaacgcgcttttttacgcgagaatgatccattgggatatgacgctggcgcagacaaacgcctttctttactggtggctttggacaaataaccccagcggcgattttccgggcgctcttataaaagtcaacgatgacgcaataatcacttctcaacgtctttacgcgatggggcaatattcgcgctttatccgcccgggatggcaaagaatcgactgcgacgcttctcccagaggcggcatttattcaagcgcgtacaaaaatccaaatacaaaggaaatagcgatagtaataataaacgaaacaatcactcatttttccgtccctttgaatttaacgggagcggaatacgatcagcttgaaatatggcgcacttcggaaaaagaaaagttaaaaaacatcggcaaacagcagacatcacgtaacactgcggaagtaacgctcgcgccaatgtccataaccactttttacggaaaagtgaaatag

SEQ ID NO: 7234 - protein, 254 aa, Unknown
  Obtained from environmental sample
  misc_feature (1)..(254): Xaa is any amino acid
MKGVIAGSGGINIMMPEFENFNINFNEMIKPSLDNPESEKIITHIALHQYNATSDSSSRAGSMEFPGITASGKRFWQTEVSGSGSALPPGPGIHNALFYARMIHWDMTLAQTNAFLYWWLWTNNPSGDFPGALIKVNDDAIITSQRLYAMGQYSRFIRPGWQRIDCDASPRGGIYSSAYKNPNTKEIAIVIINETITHFSVPLNLTGAEYDQLEIWRTSEKEKLKNIGKQQTSRNTAEVTLAPMSITTFYGKVK

SEQ ID NO: 7235 - DNA, 312 bp, Unknown
  Obtained from environmental sample
  misc_feature (1)..(312): n is a, c, g, or t
atggggttaaaacttgtcgttaacagggcgaagggagcggcggaagcgaaaagcgttgcggacaggatgatcaatatttccggccagtttttgaatttaaaggttgattatcttgggtttatttacgatgattcatccgtccctcacgcggttatcaggcaaaaaccttttatggtggtggatcctaaatgcaaggcaagcatctgcgtccagcatattgtggaacgcatggacagaaacaaacacggggaatcgcacggtttcggggctatgctcagaagatttttcggcggttcgccggaaacaatataa

SEQ ID NO: 7236 - protein, 103 aa, Unknown
  Obtained from environmental sample
  misc_feature (1)..(103): Xaa is any amino acid
MGLKLVVNRAKGAAEAKSVADRMINISGQFLNLKVDYLGFIYDDSSVPHAVIRQKPFMVVDPKCKASICVQHIVERMDRNKHGESHGFGAMLRRFFGGSPETI

SEQ ID NO: 7237 - DNA, 528 bp, Unknown
  Obtained from environmental sample
  misc_feature (1)..(528): n is a, c, g, or t
atggcgctggaaagagaccgtccatggaacggggtaagggtttttttgtatactttgccggtttatctctcggaaatatcagagttattagaggcaatgaacctgataacctatttattgtacggtatgatgcttttaataatccttgtaagcgccgccgttacataccgtttgatacttcacgaacgggcaaaagaaatgggtactatgcggattatcggcttttacgggggagacctgcgtctggttctctggaccgaggttcttataataggctttatatccctgatagccggatttatactggcgcaaatcttttgctgggcggtttcattgctgtctttttcatggtttcccggttttgatattttcttaaaaaacggaaaattattacccctgtatcttcccaagacaatgtttgttaatataatattagtttttatcttactttttgtgatggcattattgccgtctattcgcgcatcccggaaaaatctgccggggcttttatcaggagaaccattatga

SEQ ID NO: 7238 - protein, 175 aa, Unknown
  Obtained from environmental sample
  DOMAIN (14)...(166): Predicted permease
  misc_feature (1)..(175): Xaa is any amino acid
MALERDRPWNGVRVFLYTLPVYLSEISELLEAMNLITYLLYGMMLLIILVSAAVTYRLILHERAKEMGTMRIIGFYGGDLRLVLWTEVLIIGFISLIAGFILAQIFCWAVSLLSFSWFPGFDIFLKNGKLLPLYLPKTMFVNIILVFILLFVMALLPSIRASRKNLPGLLSGEPL

SEQ ID NO: 7239 - DNA, 696 bp, Unknown
  Obtained from environmental sample
  misc_feature (1)..(696): n is a, c, g, or t
atgaccatgcccaactacaattccccggacgatctgcaggccttcctgaacgggaaaggcatgggcatgagaaaaaaattcgggcagaattttttaataaatcccgccataaggagggcccttattgaggctttggatgcggaggcgggggagtccgtatgggaaatcggagccggacttggagcgatgaccggcccgcttctggaaaaaggcctttgtgtccaggcttttgagatagaccagggctttatcggcatccttaatgattttttttcagctgacggaaattttaccctaatcgagggcgacgcgcttaaaacctggtatgcccagccccccgccccgtatcttctgggaaacctgccctacaatatagccgcgactctgctcgccgattttattgtcaaaaggcgtttcttcaggcgaatggttgtcacggttcagcgggaagtcgccatgcgtatgtcggccggcgcgggaacgcccaactactcctctttttccgttctatgcgcttcggcttaccatgtaaagccgttaatggtaattaaaagctcttctttttatcccaggcccaatgtggattcccaggctgttcttctggaaatgcgcgatgacgccgcaagccgcccgcttccgtcatgttttcaccctctggttcacggccttttttcatccaggagaaagacaatttaa

SEQ ID NO: 7240 - protein, 231 aa, Unknown
  Obtained from environmental sample
  DOMAIN (20)...(231): Ribosomal RNA adenine dimethylase
  misc_feature (1)..(231): Xaa is any amino acid
MTMPNYNSPDDLQAFLNGKGMGMRKKFGQNFLINPAIRRALIEALDAEAGESVWEIGAGLGAMTGPLLEKGLCVQAFEIDQGFIGILNDFFSADGNFTLIEGDALKTWYAQPPAPYLLGNLPYNIAATLLADFIVKRRFFRRMVVTVQREVAMRMSAGAGTPNYSSFSVLCASAYHVKPLMVIKSSSFYPRPNVDSQAVLLEMRDDAASRPLPSCFHPLVHGLFSSRRKTI

SEQ ID NO: 7241 - DNA, 699 bp, Unknown
  Obtained from environmental sample
  misc_feature (1)..(699): n is a, c, g, or t
atgagcaaccactataatatgcctaaattgccaacagcgtcttctccgcttgtagcaattacagtagatggcaaagaagttcaggttcctggcgatacaaacctcatagaggctcttaaagcagcccacatagaaaccccgcatttgtgctatcacgggtacttgcccgttagcggaaactgccgccagtgcttggttgaggtggacggacctagaggaatggcactcaccataggctgctacacacccattcgtccaggcatgaaagttgcaacccctgctagcagccctcgcgttgcagatgcccgcaaatcggttctggaatttctgcttgtgaatcatcctttagattgccccatctgcgataaagctggtgagtgcttgctccaagaaaattatgtaatggcgggagcctcaaatagcaggttgaaccctgaagtagggaaactttaccacggaaaccccgaacacgcctccacagacagccacgggcagcaccgaggcggcaaacgagttgatttgggtccaagaatttcgctggacgaagaacgttgcattcaatgcgacagatgcgttaggtttatgcgccacatcgcangcgatgagcaactgcagctagcatcaaggggcggtcatacttacatttcaaccttccccggcgaaaaactagaccaccccttacgacagatgcgtgactga

SEQ ID NO: 7242 - protein, 232 aa, Unknown
  Obtained from environmental sample
  DOMAIN (20)...(86): 2Fe-2S iron-sulfur cluster binding domain
  misc_feature (1)..(232): Xaa is any amino acid
MSNHYNMPKLPTASSPLVAITVDGKEVQVPGDTNLIEALKAAHIETPHLCYHGYLPVSGNCRQCLVEVDGPRGMALTIGCYTPIRPGMKVATPASSPRVADARKSVLEFLLVNHPLDCPICDKAGECLLQENYVMAGASNSRLNPEVGKLYHGNPEHASTDSHGQHRGGKRVDLGPRISLDEERCIQCDRCVRFMRHIAXDEQLQLASRGGHTYISTFPGEKLDHPLRQMRD

SEQ ID NO: 7243 - DNA, 765 bp, Unknown
  Obtained from environmental sample
  misc_feature (1)..(765): n is a, c, g, or t
gtggtcaagtggctcacgcttttgttcgcggctgatttttggggcaggcggcagtcagaccaagtcaaaatgcccgagatcatggtggttgtttttgcagtgctaatccccgttgcattggtcgcaaaacagccagaccttgggatggcgctctcttttttgccaatactggtgctcatccccttaataaaggggctgaggtggaaatgggtggcggccacgatcttgcttattggccttgccgtccccgttgcgctgaaagtgggcttggttcaagggtaccagctgcggcgcgtcacagactttatgaacccatcggccaacctcaaggacagcaactatcagataaaccaagcaaaaattgccataggcgcaggaaacgtgtttgggcagggcctaacggggggcacacagacccaattgaactacctgccagtcaagaccaccgatttcatttttgccgcatggtccgaggagaggggctttttgggagtcctgctggccttggcgctattcggagtgttcctcagcaggatactggccgtggcccgaaacgccaaaaccacgtcggaaagctatttttgctctggcgcagcagctatcttggggctcaacatattcgttaacatcgccatggtgataggcagcctgccaaacaaaggcatggtgctgccatttttcagctatggcggcagcagcaccataagctattttttggggatagctgttgtgatgggcgcttcgtacagatccaaggttctatag

SEQ ID NO: 7244 - protein, 254 aa, Unknown
  Obtained from environmental sample
  DOMAIN (1)...(253): Cell cycle protein
  misc_feature (1)..(254): Xaa is any amino acid
MVKWLTLLFAADFWGRRQSDQVKMPEIMVVVFAVLIPVALVAKQPDLGMALSFLPILVLIPLIKGLRWKWVAATILLIGLAVPVALKVGLVQGYQLRRVTDFMNPSANLKDSNYQINQAKIAIGAGNVFGQGLTGGTQTQLNYLPVKTTDFIFAAWSEERGFLGVLLALALFGVFLSRILAVARNAKTTSESYFCSGAAAILGLNIFVNIAMVIGSLPNKGMVLPFFSYGGSSTISYFLGIAVVMGASYRSKVL

SEQ ID NO: 7245 - DNA, 723 bp, Unknown
  Obtained from environmental sample
  misc_feature (1)..(723): n is a, c, g, or t
atgcgtaaaccgtatttggacgcgccgtccacgcgcggtcaccaaattcatccgcaggaagagatggactcgctggtattaaaaaatcatcaacacggctttcaggtaatcgtacacgccattggagacgcggctgttgaagaaacgctgaacgcttttgataaagcgaacaatggatgtgcaaacgagctgcgccacggattagtgcattgccagattaccgatatgccgcttctgcggcgcatggcggataacggcatcctcgcgtttatgcagccaatctttcttggcaacgatctttatatgcttgaaagccgcgtgggcaaggaacttgcgtctacttcctacgcccatgcaaccatgaacaggctgggtgttaaaacggcttacggaacggacagccctgtagaatccataagcccgctggaatgtatcgactgcgctgtaaaccgccatgacgtaacaaacggctatccggaagaaggtttttaccctggcgagtgtgtagatgtgtataccgctgtagacgcttacaccacaggcagcgcgtacgccgaattcgccgaggctttcaaaggcagaatcaagccgggctacctcgccgacatgacacttttggatcgcgatatttttaccattccgcgaaaagaaattcgtaaggcgcaagtacagtggactatggttggcggcgttatggcgtatatgggggacattttgccttga

SEQ ID NO: 7246 - protein, 240 aa, Unknown
  Obtained from environmental sample
  DOMAIN (1)...(205): Amidohydrolase family
  misc_feature (1)..(240): Xaa is any amino acid
MRKPYLDAPSTRGHQIHPQEEMDSLVLKNHQHGFQVIVHAIGDAAVEETLNAFDKANNGCANELRHGLVHCQITDMPLLRRMADNGILAFMQPIFLGNDLYMLESRVGKELASTSYAHATMNRLGVKTAYGTDSPVESISPLECIDCAVNRHDVTNGYPEEGFYPGECVDVYTAVDAYTTGSAYAEFAEAFKGRIKPGYLADMTLLDRDIFTIPRKEIRKAQVQWTMVGGVMAYMGDILP

SEQ ID NO: 7247 - DNA, 483 bp, Unknown
  Obtained from environmental sample
  misc_feature (1)..(483): n is a, c, g, or t
atgagagaagtaaggaaagagcttaaggtttacggccccggagccgggattgcgtttaccgttccgctttccgctattaacgatccgattttattggtattcaagcaaagtatattaaaaagtgaaaaaattcaggaaaaaaatcccggcaaaggagcaaatatggcaaataaattttcacacgatttaatcgtttctattgttaatcacggctacaccgacgagttaatgaatacggcaagaaacgccggggcaagaggcggcacggtactgcacgcccgcggcacggcgcacgaggggcctgtaaaatttttcggcatttccgtacaagatgaaaaagaggtaattttgattctgtccgagaacgtcaagaaagttccgataatgcaggcaataagcgaaaattacggacttaacaccaaagctcaggggttaattttttctttgcccgttgacagtgtaataggcttaagcgccgaataa

SEQ ID NO: 7248 - protein, 160 aa, Unknown
  Obtained from environmental sample
  misc_feature (1)..(160): Xaa is any amino acid
MREVRKELKVYGPGAGIAFTVPLSAINDPILLVFKQSILKSEKIQEKNPGKGANMANKFSHDLIVSIVNHGYTDELMNTARNAGARGGTVLHARGTAHEGPVKFFGISVQDEKEVILILSENVKKVPIMQAISENYGLNTKAQGLIFSLPVDSVIGLSAE

SEQ ID NO: 7249 - DNA, 399 bp, Unknown
  Obtained from environmental sample
  misc_feature (1)..(399): n is a, c, g, or t
ttgggtagttcttcagtttttttgcgaatgatgaaaaaaggcaacccacaagatgctatgtttatgggccagctaatcgtcgcccttgtctgcactccctttttcttcctgtttcccccttcctttgacgctaccgtagtcatatccatcacttttttgggcttcttccaggcgggtttggcgtcggtaaccttttcttacggtataaagcgtatcagtgcggttcaggccatgctcattgccgccgcagagccaattctaaaccctatttgggttttattatttatcggggaaaaaccttccctgacggcacttgcgggcggaatcatcattttagtcgcggtggtgtcctcgtccctgatcagcaagtaccgcgaagacagggaagcattgcaatga

SEQ ID NO: 7250 - protein, 132 aa, Unknown
  Obtained from environmental sample
  DOMAIN (1)...(120): Integral membrane protein DUF6
  misc_feature (1)..(132): Xaa is any amino acid
MGSSSVFLRMMKKGNPQDAMFMGQLIVALVCTPFFFLFPPSFDATVVISITFLGFFQAGLASVTFSYGIKRISAVQAMLIAAAEPILNPIWVLLFIGEKPSLTALAGGIIILVAVVSSSLISKYREDREALQ

SEQ ID NO: 7251 - DNA, 426 bp, Unknown
  Obtained from environmental sample
  misc_feature (1)..(426): n is a, c, g, or t
ttgggttttattatttatcggggaaaaaccttccctgacggcacttgcgggcggaatcatcattttagtcgcggtggtgtcctcgtccctgatcagcaagtaccgcgaagacagggaagcattgcaatgactgaaagtacgcttggcattatcaacgcaatcaaagctattcccaaaggcaaggtttcatcctaccgcgacgtggctttggccgcagggttacccaacggagcgcggcaggtcgttagggttctccactcgctttcagagaaatttgatctcccgtggtaccgcgtaattcgttccaacggcagtattgccctaaaagaaggggaaggaaaggaactgcaaatacagctcctccgcgccgaaggggtggaagtaacgcctgatggattggttgatatgtcacgattcggcatttga

SEQ ID NO: 7252 - protein, 141 aa, Unknown
  Obtained from environmental sample
  DOMAIN (43)...(129): 6-O-methylguanine DNA methyltransferase, DNA binding domain
  misc_feature (1)..(141): Xaa is any amino acid
MGFIIYRGKTFPDGTCGRNHHFSRGGVLVPDQQVPRRQGSIAMTESTLGIINAIKAIPKGKVSSYRDVALAAGLPNGARQVVRVLHSLSEKFDLPWYRVIRSNGSIALKEGEGKELQIQLLRAEGVEVTPDGLVDMSRFGI

SEQ ID NO: 7253 - DNA, 384 bp, Unknown
  Obtained from environmental sample
  misc_feature (1)..(384): n is a, c, g, or t
atggccgagcagntaagtacgcgctcaatttacgaaaaggcggagcagactttcacggaagctatggatcatcgttccaaagaggaatggggcccggcaaaggaatcggcgcttgccgttattgccattttgtcggaaataccggatgtcccggttctcgcggcgcaataccgggtaaaaacctggaacagccaaaaagactgtctgtggaacatagccgcgaaaaaggagatttacggagacccctggaagtggagagtcatatataacgcgaacaagaataaattaccaaagcccgacaatcccaacctggtagatcccggaacacttcttgacatccccagcattgcgggcgaattcagggcagggatattggaggattag

SEQ ID NO: 7254 - protein, 127 aa, Unknown
  Obtained from environmental sample
  misc_feature (1)..(127): Xaa is any amino acid
MAEQXSTRSIYEKAEQTFTEAMDHRSKEEWGPAKESALAVIAILSEIPDVPVLAAQYRVKTWNSQKDCLWNIAAKKEIYGDPWKWRVIYNANKNKLPKPDNPNLVDPGTLLDIPSIAGEFRAGILED

SEQ ID NO: 7255 - DNA, 666 bp, Unknown
  Obtained from environmental sample
  misc_feature (1)..(666): n is a, c, g, or t
ttgcagctgctttttggagcgggaacaaaaatagcggtacaggatccttcataccctgtgtatgttgacggttctgtgcttacaggagccgccggaggctgggaaggtggcggttatgcaggtattacataccttccctgcacggcggaaaacaattttttcccaaatcttgatcttattcctcagaacagtcttatttatttttgttcacctaacaatccgacaggtgcggcggtaaatcgctctcagcttgcgtcgctggtagacgccgctgtaaacaaaggatgtaaaattatttttgatgcggcatacagcgaatttataagggatacatcgcttccgaaaacaatttatgatattgaaaaagcgcatctttgcgccattgaagtaaactcattctccaaacccgctggatttaccggagtacggcttggctggtcggtggttccaaaggctattaaatattatgacggcgaaagcgtcaatgcggactggagcagaatcgccggaacaatcttcaatggtgcatccaacattgcacaggcgggaggacttgccgctctggacgacgagggactcaaagagatccgcgcccttacggatttttatcttggtaacgcggaacttatcaggaacgcattgcggcagcttggattaactgcatag

SEQ ID NO: 7256 - protein, 221 aa, Unknown
  Obtained from environmental sample
  misc_feature (1)..(221): Xaa is any amino acid
MQLLFGAGTKIAVQDPSYPVYVDGSVLTGAAGGWEGGGYAGITYLPCTAENNFFPNLDLIPQNSLIYFCSPNNPTGAAVNRSQLASLVDAAVNKGCKIIFDAAYSEFIRDTSLPKTIYDIEKAHLCAIEVNSFSKPAGFTGVRLGWSVVPKAIKYYDGESVNADWSRIAGTIFNGASNIAQAGGLAALDDEGLKEIRALTDFYLGNAELIRNALRQLGLTA

SEQ ID NO: 7257 - DNA, 501 bp, Unknown
  Obtained from environmental sample
  misc_feature (1)..(501): n is a, c, g, or t
gtggcggcgcggatattggccggacgcgggttcatcatacacgacaagggagagtctctgtggacgctgacagcctcctccgacttcgcccgcgggctggtcggtctcgtgggaaacaaggcggccgtcggcgagacgttccacatcacgagcgacgaggcgcttagctggaacgacatctacaaggaacttggcgcggcgcttggggtggataatataaatccggttcatatcccaacctcgtttatcgtgaagcgctacccggacgccagagggaaactcttgggcgacaaggcggagaacggggtcttcgacaactcgaaaattaagaagttcgttccgggttttaaatgcgaaaagagcttcgctaccgcgattcgggagtcggtcgcttggttcatggagaagccggagcggcgggaaattgatttggatgaggatgggttgattgaggctattgttacggcttgggggtggtcgagccgagggttgaatatataa

SEQ ID NO: 7258 - protein, 166 aa, Unknown
  Obtained from environmental sample
  misc_feature (1)..(166): Xaa is any amino acid
MAARILAGRGFIIHDKGESLWTLTASSDFARGLVGLVGNKAAVGETFHITSDEALSWNDIYKELGAALGVDNINPVHIPTSFIVKRYPDARGKLLGDKAENGVFDNSKIKKFVPGFKCEKSFATAIRESVAWFMEKPERREIDLDEDGLIEAIVTAWGWSSRGLNI

SEQ ID NO: 7259 - DNA, 549 bp, Unknown
  Obtained from environmental sample
  misc_feature (1)..(549): n is a, c, g, or t
gtgggaagttttttaccaaatcaatggggcctttacgatatgcacgggaatttgaatgaatggtgttgggattggtatggagaatacaataccggcgctcaaactgatccttcaggccctgtttcgggaaaatggcgtgttgcaagaggcggaagctggcttaacagtaagtcgcagcatctacgctcggcgtacaggtttacatggactcccacatggtatggcaggaatatgggtattcggctggtacgttcaattatccaggggcagcaaccgcaacctgcatcaacttatccgaattattctttaattaacgctgaacggcgcgcgtccggaatcagatggcagattggttcttttgcagtggcaagtagtgctcaaaacgttgttactatattgaaaaacgccgggattgatacatcgaccgttttgttcgaaccatataataattttattcgcgtggtaattgatgaaaatttatccggtacaatgcaaattcttttgtatcaggcagggtttcttgatgcatttaaacggatgaaatactaa

SEQ ID NO: 7260 - protein, 182 aa, Unknown
  Obtained from environmental sample
  misc_feature (1)..(182): Xaa is any amino acid
MGSFLPNQWGLYDMHGNLNEWCWDWYGEYNTGAQTDPSGPVSGKWRVARGGSWLNSKSQHLRSAYRFTWTPTWYGRNMGIRLVRSIIQGQQPQPASTYPNYSLINAERRASGIRWQIGSFAVASSAQNVVTILKNAGIDTSTVLFEPYNNFIRVVIDENLSGTMQILLYQAGFLDAFKRMKY

SEQ ID NO: 7261 - DNA, 600 bp, Unknown
  Obtained from environmental sample
  misc_feature (1)..(600): n is a, c, g, or t
gtgtctacccgcaaggggcgtttcgaaatggcgcacggcgggaccctctttcttgatgaaatcggagacatgagccttccggcgcaggcaaaagttcttcgggttattcaagaacaaaaaatcgaaaggctcggcggcgagaaaaccatagaaaccgacgtgcgtataatagccgcgacaaaccaggatttggaaaaagcgtgcgaaacagggcgcttcaggcaggatttgtttttcaggctgaatgtaatacccattcatgtcccgcctttaagggaaagaccggaagacatttccatgctgctctgccattttttaaatttattaaacgcggaaataacgctggaagccgacgccatggaattacttacctcgcatgactggccggggaatgtgagggaacttaaaaacctcgcggaacggatcgcggttatgcaccaggggccgcgcattacgggcgatgatttatcaaaattactgaataaaaagagcaaaaaaccgcaaaataccggaaatcaactgccggaaggcataatggaacgtaattataatgaagcaaaagacagctttgaaaaatgctatttagaattccaactttaa

SEQ ID NO: 7262 - protein, 199 aa, Unknown
  Obtained from environmental sample
  DOMAIN (1)...(136): Sigma-54 interaction domain
  misc_feature (1)..(199): Xaa is any amino acid
MSTRKGRFEMAHGGTLFLDEIGDMSLPAQAKVLRVIQEQKIERLGGEKTIETDVRIIAATNQDLEKACETGRFRQDLFFRLNVIPIHVPPLRERPEDISMLLCHFLNLLNAEITLEADAMELLTSHDWPGNVRELKNLAERIAVMHQGPRITGDDLSKLLNKKSKKPQNTGNQLPEGIMERNYNEAKDSFEKCYLEFQL

SEQ ID NO: 7263 - DNA, 516 bp, Unknown
  Obtained from environmental sample
  misc_feature (1)..(516): n is a, c, g, or t
atgaatgggtattacattcagcctgaaaaacaaatcctgcctgaagcgccctgtttcgcacgctttttccaaatcctggtttgtcgcggctattatacgcacgtcggtttctatggttttctcgccgccgagcctttcgattttttgttcttgaataacccgaagaacttttgcctgcgccggaaggctcatgtctccgatttcatcaagaaagagggtcccgccgtgcgccatttcgaaacgccccttgcgggtagacaccgcatcggtgaacgcgcctttttcatgaccgaaaagttcgctctctatcagcgtctccggtatcgcggcgcagtttacgtctacaaagggattgcccgagcgcgccgaacactggtgaatcgcccttgcgattacttcttttcccgcgccgttttcgcctgtgataagaatacgcgcgtcgctttcagccgcctgttttaccgtttccctgatgctgcggataagcgcgcttgttcctattatatcctcgcttga

SEQ ID NO: 7264 - protein, 171 aa, Unknown
  Obtained from environmental sample
  misc_feature (1)..(171): Xaa is any amino acid
MNGYYIQPEKQILPEAPCFARFFQILVCRGYYTHVGFYGFLAAEPFDFLFLNNPKNFCLRRKAHVSDFIKKEGPAVRHFETPLAGRHRIGERAFFMTEKFALYQRLRYRGAVYVYKGIARARRTLVNRPCDYFFSRAVFACDKNTRVAFSRLFYRFPDAADKRACSYYILA

SEQ ID NO: 7265 - DNA, 570 bp, Unknown
  Obtained from environmental sample
  misc_feature (1)..(570): n is a, c, g, or t
atgtttcacactgccggggtaaaacaaattcttgttgcttttttttgttattgcagtcttgaaagcacaaccggattatggggaagcagttttctggttatggagaaaaatatatctcctgaaatagccgcgaaatggatttcattattttatatcggtataacgtccggccgttttatttccggttttttgactatgaaattaaataatcgtcaaatggttcgcttgggacagtttcttgttgcctgtggagttatcatattgatgctgcccattggcaagttgttgctgttgcccggctttttcataatcggacttggctgcgcccccatatatccaagtcttttacatgagaccccgggaaatttcggcagtgaaaaatcacagacaataatgggaatacaaatggcaagcgcgtatatcggcaccacgtttatgcctccgttattcgggcagataacatcattttttggttttaatgtttttccgttatttattggcggtatattgacgctcaatatcataatggttgagttagtgaataagaaagtaaacaaaaaagcgacatga

SEQ ID NO: 7266 - protein, 189 aa, Unknown
  Obtained from environmental sample
  misc_feature (1)..(189): Xaa is any amino acid
MFHTAGVKQILVAFFCYCSLESTTGLWGSSFLVMEKNISPEIAAKWISLFYIGITSGRFISGFLTMKLNNRQMVRLGQFLVACGVIILMLPIGKLLLLPGFFIIGLGCAPIYPSLLHETPGNFGSEKSQTIMGIQMASAYIGTTFMPPLFGQITSFFGFNVFPLFIGGILTLNIIMVELVNKKVNKKAT

SEQ ID NO: 7267 - DNA, 621 bp, Unknown
  Obtained from environmental sample
  misc_feature (1)..(621): n is a, c, g, or t
atggccagccggaacgcgctattgggtagaaccggcgacgccattcagtntgaggtctacgagcaggcgatggcggaggccgccgcgaaactcgtcttcagccgcttggaggcggtgcgtgagttatccgcgtttacaagcaattattacgccgagatcagcggaggcgccgaggccgccgccgcggagtacgcccccaaaatcaagtgcgattcttttgatacagacgagtggcgaaatgcatatttaacatctttggcgcagcgccgcgaaagggacgccgaactccagtacacggcggccggcccgcaccgcgacgacctgcgtttcacgctgggcggcagggcggccaaagggcacgcgtcgcagggtcagtgccgtagtttcgccctctccctaaaactagcctcggcgcgtttcatagagcaaaagcgcggcggcggcatggtcttcttggtagacgacgccgtctcggaactcgacccggagcggacgtcgcgggtctaccccctgctggagggcaggggccaagtcttcatagcaacgccccgttgccttgcggcgctgggcgggagggtgctgcggtgcgtagtcgattcaggaaaagtatcgattgggtga

SEQ ID NO: 7268 - protein, 206 aa, Unknown
  Obtained from environmental sample
  misc_feature (1)..(206): Xaa is any amino acid
MASRNALLGRTGDAIQXEVYEQAMAEAAAKLVFSRLEAVRELSAFTSNYYAEISGGAEAAAAEYAPKIKCDSFDTDEWRNAYLTSLAQRRERDAELQYTAAGPHRDDLRFTLGGRAAKGHASQGQCRSFALSLKLASARFIEQKRGGGMVFLVDDAVSELDPERTSRVYPLLEGRGQVFIATPRCLAALGGRVLRCVVDSGKVSIG

SEQ ID NO: 7269 - DNA, 717 bp, Unknown
  Obtained from environmental sample
  misc_feature (1)..(717): n is a, c, g, or t
gtggacatcgactacatagaggttggggcctacgtctccgagccgttcacgatcagggggtcgctcgtcacgccgaacccgtcgcagaacgcccgtaagatatacggttttttgcgggataacttccagaaaaaagtgataagcggcgtcatgaccaacaccgtgacgcagaccgacggcaagtacacccccaacacccccgacaatcaggcggagatggcgcacatcaagagcgtctccggcaaactgcccgcgctcatggggctggacttcatgcacagcaccgggaagaaggcggatgacgagtggtacatgggctacaccaacgggacgctgtcgctcgccgaggcgttcttcaagaggggcggcatacctatatactgctggcactggcgggatccgctcaaaaacgacgaggagttctattcggaaaagacgaaattcgacctgaccaaggcgtttaagagttccaattacacggagaccaacttcaacgagagcagcgccgagtacaaggggatagtcgcggacatcgaccgtatcaccggctacctgaaagatcttgccgacaagggcatcccggtgctatggcgcccgttgcacgaggcggccggcgggtggttctggtgggggcgcgacaagaagcccgagccgtgccgggcgctttaccggttcatgttcgacaggatggtgcgccaccacgggctaacaacctga

SEQ ID NO: 7270 - protein, 238 aa, Unknown
  Obtained from environmental sample
  DOMAIN (23)...(238): Glycosyl hydrolase family 26
  misc_feature (1)..(238): Xaa is any amino acid
MDIDYIEVGAYVSEPFTIRGSLVTPNPSQNARKIYGFLRDNFQKKVISGVMTNTVTQTDGKYTPNTPDNQAEMAHIKSVSGKLPALMGLDFMHSTGKKADDEWYMGYTNGTLSLAEAFFKRGGIPIYCWHWRDPLKNDEEFYSEKTKFDLTKAFKSSNYTETNFNESSAEYKGIVADIDRITGYLKDLADKGIPVLWRPLHEAAGGWFWWGRDKKPEPCRALYRFMFDRMVRHHGLTT

SEQ ID NO: 7271 - DNA, 546 bp, Unknown
  Obtained from environmental sample
  misc_feature (1)..(546): n is a, c, g, or t
atggatttagcttggtattcggtgacgactttttcaggacaggagcttaaggtaaagcagctcctcgaagccatgattgaacgtgaacaagctcaagaattatttgggcgcattgaaatacctcacgtaaacgaagaacatatttcaacaaaaaaaggcaagagggttgtaaaaattgaaaggcgtaatctaataccttcttacgtgtttatacagatggttttaaacgaccgcacaagacatttagttcagagcattcaaggcgtgacaaaatttgtcaccataggcaataagattaaaaaaatctcagacgaagagatgatgacggtgttgcctcgcgataatggagaaattggggaactgccgatgctggaagttcccattaaagaaggcgattcaattcgcattaaagaaggcccgttcaaagattatacgggcattgtagaggaaattttaaaagagcgtagcaagttgaaagctatggtagttatatttggtcgttccattcctgttgaacttaacttttctgaagttgaggttctgtag

SEQ ID NO: 7272 - protein, 181 aa, Unknown
  Obtained from environmental sample
  DOMAIN (128)...(165): KOW motif
  misc_feature (1)..(181): Xaa is any amino acid
MDLAWYSVTTFSGQELKVKQLLEAMIEREQAQELFGRIEIPHVNEEHISTKKGKRVVKIERRNLIPSYVFIQMVLNDRTRHLVQSIQGVTKFVTIGNKIKKISDEEMMTVLPRDNGEIGELPMLEVPIKEGDSIRIKEGPFKDYTGIVEEILKERSKLKAMVVIFGRSIPVELNFSEVEVL

SEQ ID NO: 7273 - DNA, 348 bp, Unknown
  Obtained from environmental sample
  misc_feature (1)..(348): n is a, c, g, or t
gtggcaaaaaagattacaggttacataaaattgcagattaaagctggcgctgcgaatccggcaccgccaataggcccggcattgggttcaaaaaaggtaaatattgctgaattctgcaagcaatataacgctcgcacgcagtctatgggaggctcaatagttcctgttataataactgtgtatgcagataacagtttcacttttgttactaaaaccccgccggttccgtctttgataaaacaagctgcaaagatagaaaccgcttctggcgaacctaatcgcanaaaagtangcaaaataactatggcacangtaaaagaaatagctaaactgaaatgccngatttaa

SEQ ID NO: 7274 - protein, 115 aa, Unknown
  Obtained from environmental sample
  DOMAIN (71)...(115): Ribosomal protein L11, RNA binding domain
  misc_feature (1)..(115): Xaa is any amino acid
MAKKITGYIKLQIKAGAANPAPPIGPALGSKKVNIAEFCKQYNARTQSMGGSIVPVIITVYADNSFTFVTKTPPVPSLIKQAAKIETASGEPNRXKVXKITMAXVKEIAKLKCXI

SEQ ID NO: 7275 - DNA, 855 bp, Unknown
  Obtained from environmental sample
  misc_feature (1)..(855): n is a, c, g, or t
atggttcacgccgggcgcagtagaaacgatcaagtagcggtcgcttttcgtctgtacctgaaacgcacggtaccgcagttacaaaatgaattagccgcgcttattaatgctcttcttgataccgcgctgtcccatgtaaacagtatcatgcccggttacactcaccttcagagggcgcagcccataacgcttggacatcacctaacggcatggtgcgccgctcttgaacgggattattcccgctttaccgacgctctcaaaagacttgacgagtgtcctttgggaagcggcgcgttagccacaactaccctgccccttgatcgcaaatcaacggcgcaggatttgggtttcagcaggttatgcgtcaattcaatggacgccgtcgcagaccgtgactttgccctggaactttcaggcgcctgcgctatcactatgattcatttatcgcgtttttgcgaggacgtagttctgtgggcaagcgaagaatttaaatttatcgatcttgcagaatcatggagtacaggttcttctatcatgcctcagaaaaaaaatcccgactttgcggaacttatccgcggaaaaacaggaagaacaacgggcaaccttgtcgccctttttacgcttctaaaaggcctgccctatgcgtataacaaagatttacaggaagataaagaaactctttttgacagcatcgacacactgaacgcctgccttcgcatgttcgccgggatgattaaaagcgcccaattcaacgttaagcgaatgaaatctgcttgcacaggcggnctttttggaagcgacagacacggcggaatatcttgtcccacaaggacttcctttccgcgccgcccatga

SEQ ID NO: 7276 - protein, 284 aa, Unknown
  Obtained from environmental sample
  DOMAIN (1)...(200): Lyase
  misc_feature (1)..(284): Xaa is any amino acid
MVHAGRSRNDQVAVAFRLYLKRTVPQLQNELAALINALLDTALSHVNSIMPGYTHLQRAQPITLGHHLTAWCAALERDYSRFTDALKRLDECPLGSGALATTTLPLDRKSTAQDLGFSRLCVNSMDAVADRDFALELSGACAITMIHLSRFCEDVVLWASEEFKFIDLAESWSTGSSIMPQKKNPDFAELIRGKTGRTTGNLVALFTLLKGLPYAYNKDLQEDKETLFDSIDTLNACLRMFAGMIKSAQFNVKRMKSACTGGLFGSDRHGGISCPTRTSFPRRP

SEQ ID NO: 7277 - DNA, 477 bp, Unknown
  Obtained from environmental sample
  misc_feature (1)..(477): n is a, c, g, or t
atgcagcagcaacgaaacaggtggcttccggtgaaaattaatgtctatttggatactactattataagtgcgttatttgataaacgaacacctgaaaggatgtctcaaacgtggcaattttgggaacatattagcgactataatgtttttatttcagagttggttattgacgagataaaaggcgcgtctcagccgttgcaagatgaaatgttgaaaagtgtttcgggttttacgttgttaaatgttactgatgatgtacaatatttaacagagaaatatatagaaagtaacatatttcccgataagtattcagccgatgctctacatgtagcattagcggcggttaatcaaataggtgtattgttgagttggaattttactcacctggtgaagataaaaacacggcgtatggttgcattaacaaatgcgatttataattataatccgattgaaattattgctccgcccgaattgtag

SEQ ID NO: 7278 - protein, 158 aa, Unknown
  Obtained from environmental sample
  misc_feature (1)..(158): Xaa is any amino acid
MQQQRNRWLPVKINVYLDTTIISALFDKRTPERMSQTWQFWEHISDYNVFISELVIDEIKGASQPLQDEMLKSVSGFTLLNVTDDVQYLTEKYIESNIFPDKYSADALHVALAAVNQIGVLLSWNFTHLVKIKTRRMVALTNAIYNYNPIEIIAPPEL

SEQ ID NO: 7279 - DNA, 306 bp, Unknown
  Obtained from environmental sample
  misc_feature (1)..(306): n is a, c, g, or t
atgtatggcggtccggcgcggtattacgccgagccgcgctccgagagcgggattgtggaggcgtgccgcttcgccgtggataatggtatgccgctcttcgtcctcggcaacggttccaacgtgctgataagcgacgccggtttcggcgggcttgtggtgaatctctccaaatatttctcggcgctgagttgggacaaaaccacggctttcgtgcttagcggtaccccattggacgatctggccggcgaacccgcggagaggggttgcgccgggatanaatgcctgtcgggcattccggaacgataa

SEQ ID NO: 7280 - protein, 101 aa, Unknown
  Obtained from environmental sample
  misc_feature (1)..(101): Xaa is any amino acid
MYGGPARYYAEPRSESGIVEACRFAVDNGMPLFVLGNGSNVLISDAGFGGLVVNLSKYFSALSWDKTTAFVLSGTPLDDLAGEPAERGCAGIXCLSGIPER

SEQ ID NO: 7281 - DNA, 630 bp, Unknown
  Obtained from environmental sample
  misc_feature (1)..(630): n is a, c, g, or t
atgaatataattgatactgatacattaagggtcgggcagattttttctgaaccggtctattcagaaggcaataatttacttgtacccgcgatgattccgctgcttcaacgggatattgattttctttatacatggggtattgatgatgtttcaacggaaggatatcttctttccgacgaggaagtagcggcgctgtccaaagaacctgttaaacatgtagatttggtagatgtagaaatttcaatcagcgatgttcagaaaaattcaggtccgtatcgctcatataaatcccttatagaaaagcttgacggcgtgtttgtcggaataaaatccggagtcgatatagagatgcgcgtaatcgacaacataagcggccagctgcttaaggatttaagggataacccgaataattatatcggttatattttgggcggagaggttatggggcatgatctggcaaaaagctccgttaataccgcaatcctgtcggcgttgacggctcaggaactccgtctaccaaaccacaaaatcctaaatattgtatcaggcgctcttcttcatgatatcggcatgatcaggctatccaagggaatcactgaaaaaaaaggcggacttcagacgcggaattga

SEQ ID NO: 7282 - protein, 209 aa, Unknown
  Obtained from environmental sample
  misc_feature (1)..(209): Xaa is any amino acid
MNIIDTDTLRVGQIFSEPVYSEGNNLLVPAMIPLLQRDIDFLYTWGIDDVSTEGYLLSDEEVAALSKEPVKHVDLVDVEISISDVQKNSGPYRSYKSLIEKLDGVFVGIKSGVDIEMRVIDNISGQLLKDLRDNPNNYIGYILGGEVMGHDLAKSSVNTAILSALTAQELRLPNHKILNIVSGALLHDIGMIRLSKGITEKKGGLQTRN

SEQ ID NO: 7283 - DNA, 651 bp, Unknown
  Obtained from environmental sample
  misc_feature (1)..(651): n is a, c, g, or t
ttgacgctagtcccccacaacgaggaagcaaagcaagtagccgagacaatgcaggatttaatccttgaagaactaaacgtagagcaactccacttcgctggcgatgacaccgagctagcgaaaatctccgccaagcccaatttcgcaggcataaaagcaaaaggagcggactacgccaaaaatatgaaaaccctatccaccgccataaccgccttgaccgccgagcaaatcaagcaaatccaaagcggcacaccgcttgacgttgccggtctccaaatagactactcctgcctaatgctagtccgcgaagtagccgaaggtctcgcagttgaagcagacgaaaactacaccatagccttggacttgaaaataacgccggagctgcgtcaaagctgcatagcgagagagctggtgaatcgcatacaaaaccgccgcaaggaaatggatttgcagattacggataagataaagatagcgttgaaagggctgggtgcttacgcggatttgcaggcagcggttgagaagcacaggggttatattttggaggagacgcagggattggatatttccacaagcggtgaagcgagtggggagtgggttgcggttagtgtggaagggtgtgaggtggaggtttgtattgtaaatgcgtag

SEQ ID NO: 7284 - protein, 216 aa, Unknown
  Obtained from environmental sample
  misc_feature (1)..(216): Xaa is any amino acid
MTLVPHNEEAKQVAETMQDLILEELNVEQLHFAGDDTELAKISAKPNFAGIKAKGADYAKNMKTLSTAITALTAEQIKQIQSGTPLDVAGLQIDYSCLMLVREVAEGLAVEADENYTIALDLKITPELRQSCIARELVNRIQNRRKEMDLQITDKIKIALKGLGAYADLQAAVEKHRGYILEETQGLDISTSGEASGEWVAVSVEGCEVEVCIVNA

SEQ ID NO: 7285 - DNA, 846 bp, Unknown
  Obtained from environmental sample
  misc_feature (1)..(846): n is a, c, g, or t
gtggttgttccggcaatcatcgcgcttttatattccntgataataggattccttttaagcagattagacacctatctgtcaatcataaccggagtgtccggtttggttctgctcagcggcgttttcgcggcgttttttatgataagtaaaatatatatcggttttgccgtgccgttagccgcaacttcgctcacctttatttccatgatggttataaagttcctcacagccagcagagaaaaggcgttcttgcacagcgcgttctcccgctaccttgcccccgaagttattacggaacttatcaacgacccggacaaactcaatctgggcggcgaaaaaagggaaatgaccgcgatatttaccgacattcagggtttctccactatttccgagaaacttgatccggttcaccttgtccaactgctcaaccgctacctgacaactatgagtaacataatcatggaaaaccttggaacgattgacaaatacgaaggggacgcgattatcgcgtttttcggcgcgcctatattccgcgagaatcatcccgctcttgcctgccgcagcgctcttgcgatgaagtttgcggagaaggaactgaataaaattgtgttggaagaaaatttaagtccgtcgccgatttttaccagaatcggcattaacaccggcgaaatggtcgttggcaacatgggcgctgaaaataaaatggactatacgataatgggcaacgctgtaaaccttgccgcccgtcttgagggagtgaacaaacaataccatacaggcggcatattgataagcgaatacacaagggaaaaattaggcaatgaattttactctcggccgatctga

SEQ ID NO: 7286 - protein, 281 aa, Unknown
  Obtained from environmental sample
  DOMAIN (111)...(281): Adenylate and Guanylate cyclase catalytic domain
  misc_feature (1)..(281): Xaa is any amino acid
MVVPAIIALLYSXIIGFLLSRLDTYLSIITGVSGLVLLSGVFAAFFMISKIYIGFAVPLAATSLTFISMMVIKFLTASREKAFLHSAFSRYLAPEVITELINDPDKLNLGGEKREMTAIFTDIQGFSTISEKLDPVHLVQLLNRYLTTMSNIIMENLGTIDKYEGDAIIAFFGAPIFRENHPALACRSALAMKFAEKELNKIVLEENLSPSPIFTRIGINTGEMVVGNMGAENKMDYTIMGNAVNLAARLEGVNKQYHTGGILISEYTREKLGNEFYSRPI

SEQ ID NO: 7287 - DNA, 486 bp, Unknown
  Obtained from environmental sample
  misc_feature (1)..(486): n is a, c, g, or t
atgtcagattatgcggacactgaagaactcgtacgggagtctgtagaaactgtaaacagtgaaaaattccttgtcttttccatattgggaaaattatacagttttccatcccgctttattggggaaatcgcattatttgacaaagtattcccattacccctgatgccttcttatgtgcttggagttgtaaacagatattcagcgccatacgctttatttgacatcggtcttttattccaaaagactccaagtccgcgaaaaaaaataattatccttaaagaagaaattgacagaatcgccttccttattgacgatgtggcaggtatcgcggacatacagaacgacgatatttttattgttgaaagaaattccgattcgggagatctgacagatataatatgctcgtcgtttaaatgggaaaacaacgacgtttttgttcttgacgtaaacatgataatgagccgcgtctcaaaggagatagcttaa

SEQ ID NO: 7288 - protein, 161 aa, Unknown
  Obtained from environmental sample
  DOMAIN (22)...(157): CheW-like domain
  misc_feature (1)..(161): Xaa is any amino acid
MSDYADTEELVRESVETVNSEKFLVFSILGKLYSFPSRFIGEIALFDKVFPLPLMPSYVLGVVNRYSAPYALFDIGLLFQKTPSPRKKIIILKEEIDRIAFLIDDVAGIADIQNDDIFIVERNSDSGDLTDIICSSFKWENNDVFVLDVNMIMSRVSKEIA

SEQ ID NO: 7289 - DNA, 528 bp, Unknown
  Obtained from environmental sample
  misc_feature (1)..(528): n is a, c, g, or t
atgaagatcctgaatccgggagaacgcggcatcggcgaagtcatcgttaagggcccaatggtaacacagggttattatgaaaggcctgaactgacagccgaagcctttacggaagacggctacttcaagaccggcgatttgggttacctggacagcgagggctacctctacctcaccggcagagccaaaaacgtgatcgtaaccgagggcgggaaaaatgtatttcccgaggaaatagaaaacaaattccagttatacgggcaaatcgatcagattttggtccgcggctaccttatggatcaaaaaatgaagaaggaaggcattgaagccctcatataccccaatccggaactgaaaaaggaagacggccagccttattccagggaagaacttaaaaccatgatggacaatattatcgccgaggtgaaccagggtctgcatctttaccagaaaataggcagagttgtcatactggacaagcccatggagatgtcttccaccaaaaaaataaaacgtttcacggtttaa

SEQ ID NO: 7290 - protein, 175 aa, Unknown
  Obtained from environmental sample
  misc_feature (1)..(175): Xaa is any amino acid
MKILNPGERGIGEVIVKGPMVTQGYYERPELTAEAFTEDGYFKTGDLGYLDSEGYLYLTGRAKNVIVTEGGKNVFPEEIENKFQLYGQIDQILVRGYLMDQKMKKEGIEALIYPNPELKKEDGQPYSREELKTMMDNIIAEVNQGLHLYQKIGRVVILDKPMEMSSTKKIKRFTV

SEQ ID NO: 7291 - DNA, 375 bp, Unknown
  Obtained from environmental sample
  misc_feature (1)..(375): n is a, c, g, or t
atgcttcgatttccgaacaagttcattgcatattttttaaaattatggcataattggttaatggcagaagaaggcgattatctaaaaaaccttgacgaagttctcaaggaaagggctgaatggctggaaaagacggagcttccaaaactaaaggaagaacttcgcctttaccatacagggtttgcttccctttacaatttatacctaaaaaaagggcttatacacgaggatccctataaacaggaagccaaaatcgctgagctggaagtgcccagttcagccggattttcagatgcggaaagaatggaacagttgacccaaaggctcgcgaattacgataatcagctggatttcctggtcaattttatcccttaa

SEQ ID NO: 7292 - protein, 124 aa, Unknown
  Obtained from environmental sample
  misc_feature (1)..(124): Xaa is any amino acid
MLRFPNKFIAYFLKLWHNWLMAEEGDYLKNLDEVLKERAEWLEKTELPKLKEELRLYHTGFASLYNLYLKKGLIHEDPYKQEAKIAELEVPSSAGFSDAERMEQLTQRLANYDNQLDFLVNFIP

SEQ ID NO: 7293 - DNA, 909 bp, Unknown
  Obtained from environmental sample
  misc_feature (1)..(909): n is a, c, g, or t
atggctattacacaaaggacaaatatcgcgcgttttcaaaaagagctattgaagtacggcgttgaagttgtgaatgaaattgacacccccgcgcactctgaaatttttaggaacgcagggctgccgatgcgtgacattggagacatggacatcacatcggattcaaatcgcagcactgtagttaatttcatcctagatttatttgacgagtatacaagcggcccagacccagtgtttgtgggtcgaaaggtgcattttggaagcgatgagtacggcggtggctctccttcctatcaacaatttcatgcgttatacaacaaggccatgatggaagggctgcttgcaagagggctgaaagttaggacgtggacagaatttgcgtcctatcacgctgatatgccagatgaattggcgaaaaacccaaatgtggcggtcaacatgtgggcgccctattatgccgatgtgaagagcgtttacggcaagggctacagcgtgataaatactgtgggcggctggctgtacctagtgccgggctgcgccactggctaccccgactattgggggcgtgtgtatgccaacaatggcgactaccgactggactatctttataactcattcgatgcaaataatttttcccccaagcgcaacgccggcaggggcacggcgatcatgccaaaagcgcacccgcagaccaagggggtgcaattctgcgtctggcatgatttcccctcttttaatggtggcctttcggaatttgacctattcgacaggatgcgggacgtcatagcctttgttgcggaaaaggcttggcatggagaaaaaacaaatggtcaaacgtatgcgttgtatgccgcccgtttttcaagttggccaaccgctcgccaggcggccacccagggcgttttgtag

SEQ ID NO: 7294 - protein, 302 aa, Unknown
  Obtained from environmental sample
  DOMAIN (6)...(273): Glycosyl hydrolase family 20, catalytic domain
  misc_feature (1)..(302): Xaa is any amino acid
MAITQRTNIARFQKELLKYGVEVVNEIDTPAHSEIFRNAGLPMRDIGDMDITSDSNRSTVVNFILDLFDEYTSGPDPVFVGRKVHFGSDEYGGGSPSYQQFHALYNKAMMEGLLARGLKVRTWTEFASYHADMPDELAKNPNVAVNMWAPYYADVKSVYGKGYSVINTVGGWLYLVPGCATGYPDYWGRVYANNGDYRLDYLYNSFDANNFSPKRNAGRGTAIMPKAHPQTKGVQFCVWHDFPSFNGGLSEFDLFDRMRDVIAFVAEKAWHGEKTNGQTYALYAARFSSWPTARQAATQGVL

SEQ ID NO: 7295 - DNA, 759 bp, Unknown
  Obtained from environmental sample
  misc_feature (1)..(759): n is a, c, g, or t
atggtacagtccaccagcataaaactgttccaagataggaatattcgtaccatttgggacgaagaacaggaaaagtggtatttctcaataattgacgttatagctgttctaactgacagtgataatccccgcaaatattggagcgttcttaaaacaagactgaaaagtgaaggcagtcaactggctacaaattgtagccagttgaaaatgcccggagccgacggcaaaatgcgtgaaactgacgtagcggatgcagaacaaattctacgtcttgttcaatctgtccccagtaaaaaagctgaaccatttaagttatggcttgctaaagtaggaaatgaccgaatagatgaaatggcagacccggaacttgcaataaatcgagctttggatttttacgccaaaaaaggctattcattagattggataaaccaacgtcttaaaacaatagaagttcgtaaactcttaactgatgaatgggataaaggcggaattaaaaaaggcatggaatacgctttattgacagatgagatatactccggttgggctggattaaatgctcgcagttataaaaaattgaaaggattgcaaaaagaaaacttacgtgacaatatgtcaaacttggaactggtactcaatatgttggcagaagtatcgacaacagaaatatccaaaaaagaatctcccaaagggcttactgaaaatataaaagtagccaggaaaaggagcggcagtcgccggaaaatgccgcccgtgaattga

SEQ ID NO: 7296 - protein, 252 aa, Unknown
  Obtained from environmental sample
  misc_feature (1)..(252): Xaa is any amino acid
MVQSTSIKLFQDRNIRTIWDEEQEKWYFSIIDVIAVLTDSDNPRKYWSVLKTRLKSEGSQLATNCSQLKMPGADGKMRETDVADAEQILRLVQSVPSKKAEPFKLWLAKVGNDRIDEMADPELAINRALDFYAKKGYSLDWINQRLKTIEVRKLLTDEWDKGGIKKGMEYALLTDEIYSGWAGLNARSYKKLKGLQKENLRDNMSNLELVLNMLAEVSTTEISKKESPKGLTENIKVARKRSGSRRKMPPVN

SEQ ID NO: 7297 - DNA, 420 bp, Unknown
  Obtained from environmental sample
  misc_feature (1)..(420): n is a, c, g, or t
atggctaaagacattgattcacgtaaaaagattctcttggttgatgatgatgagatacatctttccatcactgaaatgtcattaaaagatgaatatgacgtatttatgctaaagtcaggagaagaagcgttagaattcttaaataaaagccagatcattccggatttaataatgcttgatattttaatgcctataatggacggctggttagtattcgataaaattagtgatattgcggcattaaaatttactccaataatgttttatacatcattggaagaggagagcgcaaaagaaaaagcgtatgagcttggagcgtttgattacattacaaaaccttgtgagcagtcaattctgttaaacagaataaacgacacgttaaagaaagctgagatgaaaaaacaacagtacggcgtttaa

SEQ ID NO: 7298 - protein, 139 aa, Unknown
  Obtained from environmental sample
  DOMAIN (9)...(124): Response regulator receiver domain
  misc_feature (1)..(139): Xaa is any amino acid
MAKDIDSRKKILLVDDDEIHLSITEMSLKDEYDVFMLKSGEEALEFLNKSQIIPDLIMLDILMPIMDGWLVFDKISDIAALKFTPIMFYTSLEEESAKEKAYELGAFDYITKPCEQSILLNRINDTLKKAEMKKQQYGV

SEQ ID NO: 7299 - DNA, 627 bp, Unknown
  Obtained from environmental sample
  misc_feature (1)..(627): n is a, c, g, or t
ttgatctnctcgcttttttatgaacattcggacagcataaacagggattcaattaattttcgtaaaatgcataatattttagatgacgatgaattaatcgtatttgtaggacggttgggaagcgaaaagaatgttgtaacgctgattgagaattttaaggaaattaattcgcgccgcagcaaagttaaattaatgcttgtaggagacggccctgataaaaaatcattacaggaaaaatgctatgagatgggtcttgcgaattccgtcgtgtttaccggatacttgcgctggcccgatgaaatacgtcaggtttacacggcggcggatatttttatgagcgcgtcgcacagcgaagttcaccctattacatttatagaatcaatggcggcggggcttcctgtcgttgccgccgcggatccaagcattgaaggaatggttgtaaacggcgataacggctgggctgtagaaaatgataaattgatgtgggaaaaagccattgatattctggcggataaagataaaaaagaaaaaatgggaaaacgttccgatgaaatatcaagaacctattcagttgataattttatcagaagaatgcttgacgtttatgaagaataccggaaacgctaa

SEQ ID NO: 7300 - protein, 208 aa, Unknown
  Obtained from environmental sample
  DOMAIN (17)...(185): Glycosyl transferases group 1
  misc_feature (1)..(208): Xaa is any amino acid
MIXSLFYEHSDSINRDSINFRKMHNILDDDELIVFVGRLGSEKNVVTLIENFKEINSRRSKVKLMLVGDGPDKKSLQEKCYEMGLANSVVFTGYLRWPDEIRQVYTAADIFMSASHSEVHPITFIESMAAGLPVVAAADPSIEGMVVNGDNGWAVENDKLMWEKAIDILADKDKKEKMGKRSDEISRTYSVDNFIRRMLDVYEEYRKR

SEQ ID NO: 7301 - DNA, 723 bp, Unknown
  Obtained from environmental sample
  misc_feature (1)..(723): n is a, c, g, or t
gtgcgcccccagtcgatcagtnacgaggcgaattccccggtgcgcgacgcgtacacgaaaagttcgccgcagattccggctgatgatccaaagataaaaaaccaggcagcggcaatccttggcagggagcagaacccttataccaaagcgcagcgaatttacgaatggatgctgagtgaatttgtctttcgccccgagcctgaggataacccgcaggcttccggttcaaacactgccggggccgggcggcaggcgccttccgacaatgatatttttacggcgctggaaaaaaagcaggctgatttttatacagccgccatgttgtacagcgccctgctccgcggcgcgggtattccctgcctgcctgtagccggggtgctggtcagtcgcggccagcagacaatcaaccactggtggaatgaattctggatagacggtttcggctggatcccggttgacattgcgatgggcgcgggcgcggcgccggcccagttcggggatcgtcccgacagggagagctattacttcggcaatcttgacagccagcgaatagctttttcgcgtggtttttccgatcttgcccagatggatccgcggggccgcacggtagcgcacagccgtacttacgcgctgcaaaacctgtgggaagaggcaatcggcggtctggattcctactccagcctctgggggggtataacaattacggggatgtactcacaataa

SEQ ID NO: 7302 - protein, 240 aa, Unknown
  Obtained from environmental sample
  DOMAIN (95)...(155): Transglutaminase-like superfamily
  misc_feature (1)..(240): Xaa is any amino acid
MRPQSISXEANSPVRDAYTKSSPQIPADDPKIKNQAAAILGREQNPYTKAQRIYEWMLSEFVFRPEPEDNPQASGSNTAGAGRQAPSDNDIFTALEKKQADFYTAAMLYSALLRGAGIPCLPVAGVLVSRGQQTINHWWNEFWIDGFGWIPVDIAMGAGAAPAQFGDRPDRESYYFGNLDSQRIAFSRGFSDLAQMDPRGRTVAHSRTYALQNLWEEAIGGLDSYSSLWGGITITGMYSQ

SEQ ID NO: 7303 - DNA, 309 bp, Unknown
  Obtained from environmental sample
  misc_feature (1)..(309): n is a, c, g, or t
gtgccgaaaggcgtgggggttcgagtcccttcatccgcacaaacctgcctctttatggtaaaaaaaacaaggatatacatagatacttccattgttggcggatatttcgataagatattcgctacggaaacacaggctttgtttgccattgctacaatcaacaaagtggatgtactggcaagttggaacttcaaacatattgttaacctcaaccgcataaaaggctacaacagtataaacatgaggatggggtacatcaccctcgaaattagaaaccccaaagatttaatgaattatggaaacaactga

SEQ ID NO: 7304 - protein, 102 aa, Unknown
  Obtained from environmental sample
  misc_feature (1)..(102): Xaa is any amino acid
MPKGVGVRVPSSAQTCLFMVKKTRIYIDTSIVGGYFDKIFATETQALFAIATINKVDVLASWNFKHIVNLNRIKGYNSINMRMGYITLEIRNPKDLMNYGNN

SEQ ID NO: 7305 - DNA, 390 bp, Unknown
  Obtained from environmental sample
  misc_feature (1)..(390): n is a, c, g, or t
gtggatgatgaccttcgcgataagccccgacaaatccatttcggcgaattttatggggatggaggggacacaaaattttgtgcccntacggtggacatttcgccatgttttacgttgtgcaaacaacaaatttcccttttggatgttgaacttcccgatggctattacgatgtcattttnttcgatgcattctcacccaacgtgcagtctgaattgtggacagaacctgtatttcaaaaactctacaacgctgcccacaaaaacgccattctcaccacttactgcgccaaaggcgatgttcgccgcgccctaaaatccgcaggtttcgccgtcgaaaaaatccccggcccaattgggaaacgggagattgttcgggcggtgaaacattaa

SEQ ID NO: 7306 - protein, 129 aa, Unknown
  Obtained from environmental sample
  DOMAIN (2)...(129): Protein of unknown function (DUF752)
  misc_feature (1)..(129): Xaa is any amino acid
MDDDLRDKPRQIHFGEFYGDGGDTKFCAXTVDISPCFTLCKQQISLLDVELPDGYYDVIXFDAFSPNVQSELWTEPVFQKLYNAAHKNAILTTYCAKGDVRRALKSAGFAVEKIPGPIGKREIVRAVKH

SEQ ID NO: 7307 - DNA, 711 bp, Unknown
  Obtained from environmental sample
  misc_feature (1)..(711): n is a, c, g, or t
gtgccgtcgtacaaatcgatagcccagtgnagaccgttatcaaagtctttgaccgaaacggttccaaaagagcgcatctgcgtcgtggacgacgcctccaacgacggcacgtacgaattttgcgtcgattccggcatagactgcgtccgccatcacagaaaccggggcaaaggggcggcgctaagaacgggtttttcgcacctaataagtacaaagggcgttgatgctccgcaaaaaaaatgcggttggatattgacaatggacgccgacggccagcactcccccgccgacatcccccgtttcctcgccgaatcaagaaaaaatccggctatcgggatctgcatcggcgtacgcgatatgcgcccccgctcgatgccgccggcccggattatatccaaccggttgacgtcgctcatcctctccgtcctcactgggcggcgcgttgcggacagccagtgcgggtaccgcctctactcggcggagttcataaaatcggtgcaaatcgagtataaccgctttcaggcggagtcggagctgatacaaaaagccgcggcgaaacattttcctattagctttacgggtgtgcggacattatatttaaagggtgggtcaagccacatatcccaccttttagacacgttgcgctgggtcgcggcggtcgggcgcgtgtggttcaaattaacgtttacggacggaaagcgtggtttttaa

SEQ ID NO: 7308 - protein, 236 aa, Unknown
  Obtained from environmental sample
  misc_feature (1)..(236): Xaa is any amino acid
MPSYKSIAQXRPLSKSLTETVPKERICVVDDASNDGTYEFCVDSGIDCVRHHRNRGKGAALRTGFSHLISTKGVDAPQKKCGWILTMDADGQHSPADIPRFLAESRKNPAIGICIGVRDMRPRSMPPARIISNRLTSLILSVLTGRRVADSQCGYRLYSAEFIKSVQIEYNRFQAESELIQKAAAKHFPISFTGVRTLYLKGGSSHISHLLDTLRWVAAVGRVWFKLTFTDGKRGF

SEQ ID NO: 7309 - DNA, 342 bp, Unknown
  Obtained from environmental sample
  misc_feature (1)..(342): n is a, c, g, or t
ttgaactccttggcggccttgcccgaccttacgatattgaccttttttatggcgtctcccttggcgatgctctttacgacatccatcccctttacgaccttgccgaaaaccgcgtggcgcccgtcgaggtgcggcgtcgccgagagcgttatgaagaactggctgccgttggtccccggaccggcgttcgccatggatagtatgccctctgaggtatgcttcaggtcggggtgtatctcgtcggcgaactggtaccccgggccgcccgtgccgttggcgttcgggtcgccgccttggatgacgaatctcggctcaacgcggtggaaggtcagcccgtcgtaa

SEQ ID NO: 7310 - protein, 113 aa, Unknown
  Obtained from environmental sample
  SIGNAL (1)...(22)
  misc_feature (1)..(113): Xaa is any amino acid
MNSLAALPDLTILTFFMASPLAMLFTTSIPFTTLPKTAWRPSRCGVAESVMKNWLPLVPGPAFAMDSMPSEVCFRSGCISSANWYPGPPVPLAFGSPPWMTNLGSTRWKVSPS

SEQ ID NO: 7311 - DNA, 819 bp, Unknown
  Obtained from environmental sample
  misc_feature (1)..(819): n is a, c, g, or t
ttgctttgcagacaggggggagtgaaccgcttaagtcttggagtgcagacttttcatgaaccttcgcgcttttcagtaagcaggaaaggcggcgcgctttttttggagagccaattaagccttgcctgtcaatattttcccggcgctaacagcggcgcggacttgtcttttgaccttatgaccggactcccgtatcaggatgaaaaaatcatcatggaagatataaaccgtatccacgcccgcaaaacgccgcatatttcactttacagcctgactgtagaacaaaacactccccttgcagaaaaaataaaagccaaaaaaataattttgccggatagtgataagaccgattctctttggctttttgggcgcgatctgctcataagcgaaggatacaatcattatgaagtttccaattttgcgccggatggaaaacagtgtcttcacaatatgcgctactggcaaatgaaaaactggattggagccggtccctcagcgtcaggaactctaattaacgaagaaacctcgcaggcaaagcgttttacctacgcgcaggatgttgacgcatatataaaaaccccattaataacttccgcccactgtgaaaatattgataaaaccgctcttttaaaagacacgattctaatgggtttccgctgtaaagaaggccctgacagggagttgtttaagaggcgttttggctgttcaccggaagaatgtatccctcaaactctagaaaaatggaaggaaaaggatataatgctttttttgaatagttttctctctgacgcattttctgagatagaagttttcttgtag

SEQ ID NO: 7312 - protein, 272 aa, Unknown
  Obtained from environmental sample
  DOMAIN (151)...(266): HemN C-terminal region
  misc_feature (1)..(272): Xaa is any amino acid
MLCRQGGVNRLSLGVQTFHEPSRFSVSRKGGALFLESQLSLACQYFPGANSGADLSFDLMTGLPYQDEKIIMEDINRIHARKTPHISLYSLTVEQNTPLAEKIKAKKIILPDSDKTDSLWLFGRDLLISEGYNHYEVSNFAPDGKQCLHNMRYWQMKNWIGAGPSASGTLINEETSQAKRFTYAQDVDAYIKTPLITSAHCENIDKTALLKDTILMGFRCKEGPDRELFKRRFGCSPEECIPQTLEKWKEKDIMLFLNSFLSDAFSEIEVFL

SEQ ID NO: 7313 - DNA, 885 bp, Unknown
  Obtained from environmental sample
  misc_feature (1)..(885): n is a, c, g, or t
ttgatcagatcggccgagcgtttagactggctggacgcctttttatgggccgcctgtatggtcttgctggcaaatcagtatctggtacaggcatacaggattccttcaggttcaatgatagacacgctcaatatcggggactttgtttttgtcaataaaattatttacggacctgaattactgcccggtttttttaaactgccaagcctgataagccccaaacgcaacgatattattatctttgaaaacccttcatatatttcaaggggggttgcttttgacgtaacgcagcgcattatctatatgcttaccctgacctttgttgatattgataaggacgaaaagggggagccgagggttcattttcttattaaaagatgcgtcggatattcaggggatcatttagtcatggagaacggcaacatgaaaatacgtttttcaggagaagaccgctgggttgatgaaaatgaatataacgcggctgttgggtggaatcaccatataagcagattaatgccgcaggaacaatatccggctttgaacgcggcggcaaaaatcgcgggatgggttgatgctaaactgaatccatccgaagttttatattcaaagtcacaagaggcaggcgaaatgcgatttccggactttcttacctatgaaaaaataaggattgaaacgctgcggaaagcgtctcccggagacggacgttatgccgcgcttttggcaaaacaccgtcttggctggtatgtgccgcgcggaaggattctgccgttgggggacaaccgcgataattcaagggacgggcgttattttggccctgtaaagaagtcaaaaattcttgggaaagggatgtttatttactggccgtattggcgaatgggaatatga

SEQ ID NO: 7314 - protein, 294 aa, Unknown
  Obtained from environmental sample
  DOMAIN (33)...(147): Peptidase S24-like
  misc_feature (1)..(294): Xaa is any amino acid
MIRSAERLDWLDAFLWAACMVLLANQYLVQAYRIPSGSMIDTLNIGDFVFVNKIIYGPELLPGFFKLPSLISPKRNDIIIFENPSYISRGVAFDVTQRIIYMLTLTFVDIDKDEKGEPRVHFLIKRCVGYSGDHLVMENGNMKIRFSGEDRWVDENEYNAAVGWNHHISRLMPQEQYPALNAAAKIAGWVDAKLNPSEVLYSKSQEAGEMRFPDFLTYEKIRIETLRKASPGDGRYAALLAKHRLGWYVPRGRILPLGDNRDNSRDGRYFGPVKKSKILGKGMFIYWPYWRMGI

SEQ ID NO: 7315 - DNA, 780 bp, Unknown
  Obtained from environmental sample
  misc_feature (1)..(780): n is a, c, g, or t
atgtcgataactatcaataaaacccactattctctgtcatttgctaatctattctctgctatatacaagatagaggcccagctctatcccaaccatctggccggaggggaaggcaccttctacgccaaaaacacaaaggaaaaaaccatcaacgtggacgccgtgtgcgcggccatgcggaaccgcggcggctacgatggcagccacgacgaggcggtcaagactgtcaaccatttcttcaaagaagtaatgtatcagctctgcgacggcttttccgtcaacaccggctggttcacgatcaacgtcagcttttccggcctgttccactcccccaaagaaccctttaccccgcccaagcacaaagtttcattcagcttccacatgctcaaagccatgaggaacctgacaaaccttatcgaagtggtcgtcaacgaccatatagaagactcggcctacatatccgaattcaaagacatggaagaagacctgcccagcaatttctatgatctgggccatgtatgcgagcttgcgggccaccggcttaaaatcgaaggctccacagccgaaatcggcctctggatggttcccgtaacagacgcctccaaagccgtgaaagtaacccgaatcatatccaattccccctcccgcatcgaattcgtcccggttgacaccggatttgcggaaaaccgattggaaatccgcacccggtactccggatcagccaaccccctattaacaacccgcgttatcgcgagcagtttctccatccaccgcgcgtga

SEQ ID NO: 7316 - protein, 259 aa, Unknown
  Obtained from environmental sample
  misc_feature (1)..(259): Xaa is any amino acid
MSITINKTHYSLSFANLFSAIYKIEAQLYPNHLAGGEGTFYAKNTKEKTINVDAVCAAMRNRGGYDGSHDEAVKTVNHFFKEVMYQLCDGFSVNTGWFTINVSFSGLFHSPKEPFTPPKHKVSFSFHMLKAMRNLTNLIEVVVNDHIEDSAYISEFKDMEEDLPSNFYDLGHVCELAGHRLKIEGSTAEIGLWMVPVTDASKAVKVTRIISNSPSRIEFVPVDTGFAENRLEIRTRYSGSANPLLTTRVIASSFSIHRA

SEQ ID NO: 7317 - DNA, 639 bp, Unknown
  Obtained from environmental sample
  misc_feature (1)..(639): n is a, c, g, or t
atggcttatcaggtaaagacgaccaggaactatgggaacaggctgctcgactcgttaaagggggcaggcatgggtttcatcctttttgcgattggaaccatcctgctttttgttaacgagggtaattttgtcaaaacgaaaaaaaccataggcgcggccgaaaaagcgctggtgcgggtgagcgacgtgtcggaactggatccggcgctggacggcaagctcatccacgcctatgcctttgccgatacccaggacgtgcttaccgatgatccgttcggagtcagcgagagggccatagctctcgtccgcaaagtggagttttaccagtatgatcaaaaatcaaaaacagagaaaagggataaagtaggcggcggagaggaaacggtaacaacctatacctacgaaaaaaaatgggttccatcgcccatcccttccgaaggatttgcggatcccgactataaagggaaaaattttattctggataatctggataccaaggttaaatcacagacgcaatacgccgtgaatgtaacattcggcgcgtataaactgcctcccttcataataaaatctatccggggcagcgtttccgttgaaccccctacaagcattgacgaactgctgggaaaacttggataa

SEQ ID NO: 7318 - protein, 212 aa, Unknown
  Obtained from environmental sample
  misc_feature (1)..(212): Xaa is any amino acid
MAYQVKTTRNYGNRLLDSLKGAGMGFILFAIGTILLFVNEGNFVKTKKTIGAAEKALVRVSDVSELDPALDGKLIHAYAFADTQDVLTDDPFGVSERAIALVRKVEFYQYDQKSKTEKRDKVGGGEETVTTYTYEKKWVPSPIPSEGFADPDYKGKNFILDNLDTKVKSQTQYAVNVTFGAYKLPPFIIKSIRGSVSVEPPTSIDELLGKLG

SEQ ID NO: 7319 - DNA, 327 bp, Unknown
  Obtained from environmental sample
  misc_feature (1)..(327): n is a, c, g, or t
gtgcatctgcccgagggaaccgccgataaccgtgaaatcctgggcgtaagcgtaaaccagtcgtccgttcaccttgccgtatcctgtaacgacgccctcagccggggcttcagtcgttgccatgtcgaaattaacgcagcggtgctttacaaacgcgtcaagctcgacaaaactgcccgcatcgaacaacagggcgatgcgctccctggcagtcagcttgccggattcgtgttgcttgtctacgcgcttctgccctccggcttcttctactttttttcgtatttctctaagctgttcaagtttttcagacactgtattctcctttaa

SEQ ID NO: 7320 - protein, 108 aa, Unknown
  Obtained from environmental sample
  misc_feature (1)..(108): Xaa is any amino acid
MHLPEGTADNREILGVSVNQSSVHLAVSCNDALSRGFSRCHVEINAAVLYKRVKLDKTARIEQQGDALPGSQLAGFVLLVYALLPSGFFYFFSYFSKLFKFFRHCILL

SEQ ID NO: 7321 - DNA, 699 bp, Unknown
  Obtained from environmental sample
  misc_feature (1)..(699): n is a, c, g, or t
atgcggcgtgagggctacgaattcacaataggcagcccacaggtcattttccaaaaagccgaagacggaagtgttttggaacccatgnagcaattcaaagtagaagtccccgcagaattcagcggtgcaattattgaagagttaggaaggcgcaagggcgaaatgacaaatatgatccaagacgacaacaaccgcgtttttttggaatacaatgtgccgagcagaggtttaatagggataagaagtttgttgctttcgctctcaaaaggttatgccatagcccaatccatatttttggaataccaaccgcacaaaggcgaaattccaagccgtgtaaatggagttttaattgtaaaagaccccggcgttgcaagtgcctatgcattgtggaaattggaagagcgcggctatatgattataccgccaggcgcagatgtttatgccggaatgatagttggagaacataaccgcgatgtggatataatagtaaatgtcacaaaatcaaagcacttaaccaatatgcgagcctctggcagtgatgacaatattttgctaacaccttaccgcagaatgagccttgaggaatgtgtaacattcattaacgaagacgaatgtgttgaaattacaccaaacgttttgagggttaggaaaagcgagttggatgagcatagacgaaaagcggcggctaagttggattga

SEQ ID NO: 7322 - protein, 232 aa, Unknown
  Obtained from environmental sample
  DOMAIN (24)...(112): Elongation factor G C-terminus
  misc_feature (1)..(232): Xaa is any amino acid
MRREGYEFTIGSPQVIFQKAEDGSVLEPMXQFKVEVPAEFSGAIIEELGRRKGEMTNMIQDDNNRVFLEYNVPSRGLIGIRSLLLSLSKGYAIAQSIFLEYQPHKGEIPSRVNGVLIVKDPGVASAYALWKLEERGYMIIPPGADVYAGMIVGEHNRDVDIIVNVTKSKHLTNMRASGSDDNILLTPYRRMSLEECVTFINEDECVEITPNVLRVRKSELDEHRRKAAAKLD

SEQ ID NO: 7323 - DNA, 333 bp, Unknown
  Obtained from environmental sample
  misc_feature (1)..(333): n is a, c, g, or t
atggataaaaggcgcgtgctggtttttgaggattctaaaattttcgcggacctgctgctgcatgtcctgaacgcggaaggctatgaaacacaactggcgaaaaacggccttgagggaatcaaacttgtttacaattttcttcccgaaattatcgttaccgccgtggatatgcccctatttaagggctgcgaatccgtccgttttctgaaatcccgcccctctacccggaacatacccgtaataatgcttacctttccgggggaaacaaaggataagttctggggcgaacaggccggggccgacgtttatattgaaaaactccggatattttga

SEQ ID NO: 7324 - protein, 110 aa, Unknown
  Obtained from environmental sample
  DOMAIN (4)...(110): Response regulator receiver domain
  misc_feature (1)..(110): Xaa is any amino acid
MDKRRVLVFEDSKIFADLLLHVLNAEGYETQLAKNGLEGIKLVYNFLPEIIVTAVDMPLFKGCESVRFLKSRPSTRNIPVIMLTFPGETKDKFWGEQAGADVYIEKLRIF

SEQ ID NO: 7325 - DNA, 828 bp, Unknown
  Obtained from environmental sample
  misc_feature (1)..(828): n is a, c, g, or t
gtgggaaaggaactttttgcggaacggatacattttctcagcgacaggagcgcggctccttttgtacggattaattgtgcggccctgccggaaggccttttggaaagtgaactttttggccatgttaagggagcctttaccagcgctttccaaaaccgtccgggacgctttgaattggcagacaaaggaacaatttttcttgatgaaataggagatatccccctgtctctccaggccaaactcctgcgggtaattcagcaaaagacgtttgaaaaagtcggttctgatatttcccaaaccgtggatgtaagaatactcgcggccacaaaccgtgatatagaagcaatggtagagaagggagaatttcgcagtgatctttattaccggatcaatgtacttcccctctatattccccccctgcggcaaaggcccgaggatatccccgaattggccgagtttttcctaaaaaaataccaggctgaaactaaaaaacaatttaccggtttttccggtgaggcaatggagtttatgctttcctatgcctggccgggcaatgtcagggaactggaaaacagcattgaacgtgcctgcgttatcggaaagggaaatcttgtccaaaaggacgacctctttatgagaaccgcgtcggagattgccgatcctgaaggggagggtagccgtgatcttaaaaatgcggtaaatagctttaagatgcattttatccaaaaagtgctggaagaaaataactggaaccagactgaagcagcaaaggccctggatattcagcggacctatctttccaggctgattaaggaactgggccattag

SEQ ID NO: 7326 - protein, 275 aa, Unknown
  Obtained from environmental sample
  DOMAIN (236)...(273): Bacterial regulatory protein, Fis family
  misc_feature (1)..(275): Xaa is any amino acid
MGKELFAERIHFLSDRSAAPFVRINCAALPEGLLESELFGHVKGAFTSAFQNRPGRFELADKGTIFLDEIGDIPLSLQAKLLRVIQQKTFEKVGSDISQTVDVRILAATNRDIEAMVEKGEFRSDLYYRINVLPLYIPPLRQRPEDIPELAEFFLKKYQAETKKQFTGFSGEAMEFMLSYAWPGNVRELENSIERACVIGKGNLVQKDDLFMRTASEIADPEGEGSRDLKNAVNSFKMHFIQKVLEENNWNQTEAAKALDIQRTYLSRLIKELGH

SEQ ID NO: 7327 - DNA, 603 bp, Unknown
  Obtained from environmental sample
  misc_feature (1)..(603): n is a, c, g, or t
atgaaacttataaagaaaaacaagagcgattggcttgtaatatttacagacagggaagaaataaaatcaggcggaaagcttaagtcccagggggcttatggccttgccgagtaccttaaaaaacttaaaatggaaaagtccaagatctttagttttgacgcgtgcggcacgggagataccttaatcatctctaccacgcttgaatccttgctgaaaaaagatggggccggggaaaagctaagggattccatattggagcttcgcaaatacgcccttgacaccgccagaaacctcaacatggcaaaagtgctgcttgcaccaacgcctttttcagatgacgcgggctttatccgcgccgggttgatcgcccagaccgttactatgctcccgtccagcgaatgtatccggctcattgcagagctccgcaaaaagccggaattcgccgaggcgctcatcaacgccaaaatgaggcagaccagccatttgctattcatcccggaaacatggcgcggccttaacacccctaccgacagccacttgcgcctgacgcctgaacacttccgcaccgtatcanagttcgcagaagcgttgtgcagcgagtaa

SEQ ID NO: 7328 - protein, 200 aa, Unknown
  Obtained from environmental sample
  misc_feature (1)..(200): Xaa is any amino acid
MKLIKKNKSDWLVIFTDREEIKSGGKLKSQGAYGLAEYLKKLKMEKSKIFSFDACGTGDTLIISTTLESLLKKDGAGEKLRDSILELRKYALDTARNLNMAKVLLAPTPFSDDAGFIRAGLIAQTVTMLPSSECIRLIAELRKKPEFAEALINAKMRQTSHLLFIPETWRGLNTPTDSHLRLTPEHFRTVSXFAEALCSE

SEQ ID NO: 7329 - DNA, 735 bp, Unknown
  Obtained from environmental sample
  misc_feature (1)..(735): n is a, c, g, or t
ttggtgccgggaaatttgcccccattgtgggcgcgcgttttccttcgcaaaaattcattaatcacggacgcggcgtacagcggtattcagcaaatatgcacatacctctacacccaatacgagcaggccctgttttngggtattctggcggggcttgttacaacaagcggaatgccccatgccaacagcgcgaaacggatcggttttattgctgcccaggaatatcccctgctgagcaggcaaatggttcccggctttattgacggcgcgcgccgggttgatccgggcattgaaacggattttcgcgttattggtaattggtatgacgcgaacaaggccgcagaacttgcgtccggtatgatcaatgccggggccgatgtgtttacttcgattgcgggcggcgcggcgcagggtcttgtgcgtaccataaaagaacgaggcgcttattcggtaaattttaataccaacgattacagccaggcggcgggctttattgtgggctgcggcaaaatggaacagaaaaaactggtaaaagaaatacttgcggacgcgcttgccggaaagatcaattacggcggcgcgaaaacggtcggcgttaaagagggctacttggatttcatttctgatgatcccggctaccgcgatcatgttcccacggagctacgacaaaaattcgacagcttcatggatgatttccgcgccggacgtattgaatatacagtcccggccctgtag

SEQ ID NO: 7330 - protein, 244 aa, Unknown
  Obtained from environmental sample
  DOMAIN (1)...(238): Basic membrane protein
  misc_feature (1)..(244): Xaa is any amino acid
MVPGNLPPLWARVFLRKNSLITDAAYSGIQQICTYLYTQYEQALFXGILAGLVTTSGMPHANSAKRIGFIAAQEYPLLSRQMVPGFIDGARRVDPGIETDFRVIGNWYDANKAAELASGMINAGADVFTSIAGGAAQGLVRTIKERGAYSVNFNTNDYSQAAGFIVGCGKMEQKKLVKEILADALAGKINYGGAKTVGVKEGYLDFISDDPGYRDHVPTELRQKFDSFMDDFRAGRIEYTVPAL

SEQ ID NO: 7331 - DNA, 864 bp, Unknown
  Obtained from environmental sample
  misc_feature (1)..(864): n is a, c, g, or t
atggctgagaggacaaagttctcggcttactgtctttacagctttctgattagcgccgtggtttacccgatttccggccactggatatggggcggcggctggctttcagatctcggcttccatgactttgccggctcaaccgcggtacacatggttggcggcgtagcgtcattagtaggcgccgcgattgtcggtccccgtatcggcaaatattctaaaacgggcgaatcgcgggctattcccggccacagcttaacgctgggcgccctcggcgttttcatcctctggttctgctggttcggttttaacggcggttccactgtcgcaatgacaagccaggaagacgtcgtgtccgccggcagtattttcgttacgactaacctggcggcggcgactgccgcggtatttaccatgtttattacatggatccgctacaaaaaaccggatgtgtccatgacgcttaacggcgctcttgccggccttgtggcaatcaccgcgggctgcgacgccgtatcacccttcggcgcgttctgcatcggcatcgtggcggcgtttgtaatcgtattcggaattgagttcgttgacaaaatattgaaggttgacgatcctgtcggcgcgataggcgtgcacggacttgccggagcggccggaacaattcttaccggtattttcgctcttgacggcggactgttttacggcggcggctgggctatggtcggagttcaggccctcggcgtcgtttcggtagcggcatgggtagcaataaccatgggcatcatctttacggtgatcaagaaaacaatcggactgagggttcacacgccgaagaaattgccggcctggatattacgaacacaacattga

SEQ ID NO: 7332 - protein, 287 aa, Unknown
  Obtained from environmental sample
  DOMAIN (1)...(278): Ammonium Transporter Family
  misc_feature (1)..(287): Xaa is any amino acid
MAERTKFSAYCLYSFLISAVVYPISGHWIWGGGWLSDLGFHDFAGSTAVHMVGGVASLVGAAIVGPRIGKYSKTGESRAIPGHSLTLGALGVFILWFCWFGFNGGSTVAMTSQEDVVSAGSIFVTTNLAAATAAVFTMFITWIRYKKPDVSMTLNGALAGLVAITAGCDAVSPFGAFCIGIVAAFVIVFGIEFVDKILKVDDPVGAIGVHGLAGAAGTILTGIFALDGGLFYGGGWAMVGVQALGVVSVAAWVAITMGIIFTVIKKTIGLRVHTPKKLPAWILRTQH

SEQ ID NO: 7333 - DNA, 723 bp, Unknown
  Obtained from environmental sample
  misc_feature (1)..(723): n is a, c, g, or t
atgaatacgtcgatttattacggtgaacaaaccagggttcagcttgaggaatatataaaaaagaacggggtaatcattttacctgtgggtactactgaagaacacggcctccatctgcctgtggagaccgacgccataattgccaaatatctgggagacgaaattggcaaagctgtccatgaagcaggcataccggttttggtgctcaggacgatttattacggtttttccatgaaggtgatacgccaatggccgggctgcccgaatatcaacgatcgtaccttcatggactatatctacagtatgatagattcccttattaaagaagggttccgcaagattgtacttttggattgccacggcaaccacgactgccttctgcgcacggtaatgcgggaaaccgcggatcagcacgacgtgtatattatgaccatcgctcctttgaccctgggggccgcagtgtataaccggattaaaaaagatcccgccggggacatccatggcggtgaatacgaaacttcctgcatactccacattgcccctcacctggttgataccaaagcctacaccaatgtagacgcgatccggtgcaataccccgcttcgggggcctgtgtccacctggggccttcagaaaacccacaccggtatattcggggatcccacccatgccagcgcggaaacgggaaagcctgtcttgacgccgcggtggaggaagggctga

SEQ ID NO: 7334 - protein, 240 aa, Unknown
  Obtained from environmental sample
  DOMAIN (5)...(239): Creatinine amidohydrolase
  misc_feature (1)..(240): Xaa is any amino acid
MNTSIYYGEQTRVQLEEYIKKNGVIILPVGTTEEHGLHLPVETDAIIAKYLGDEIGKAVHEAGIPVLVLRTIYYGFSMKVIRQWPGCPNINDRTFMDYIYSMIDSLIKEGFRKIVLLDCHGNHDCLLRTVMRETADQHDVYIMTIAPLTLGAAVYNRIKKDPAGDIHGGEYETSCILHIAPHLVDTKAYTNVDAIRCNTPLRGPVSTWGLQKTHTGIFGDPTHASAETGKPVLTPRWRKG

SEQ ID NO: 7335 - DNA, 468 bp, Unknown
  Obtained from environmental sample
  misc_feature (1)..(468): n is a, c, g, or t
gtgaaaatcggtaatcaagtctggatggctgagaacttgaatatagatattcagggtagtaaatgttacgaagataatcctgaaaattgcaagaaatatggtaggctctactattatggaattgcagttcaagcctgccctaaaggctggcatttgcccagcgataaagaatggcaaatgcttgttgattttgtaggtgcggaaggaggaaagaagctcaaggctaaggagggctgggacgaaggcggcaatggcacggatgaatacggtttttcggctctgcctggcggcgacggtatttccgatggttacttctacgatgtcggcaagggcggcctttggtggagtagctcggagtacgatgcttccttcgcttaccgctggggcatggtttactacggcgcggatgtgagcaggagcagcagcgataggagccactttttttcagtgcgttgtgtccaggactag

SEQ ID NO: 7336 - protein, 155 aa, Unknown
  Obtained from environmental sample
  misc_feature (1)..(155): Xaa is any amino acid
MKIGNQVWMAENLNIDIQGSKCYEDNPENCKKYGRLYYYGIAVQACPKGWHLPSDKEWQMLVDFVGAEGGKKLKAKEGWDEGGNGTDEYGFSALPGGDGISDGYFYDVGKGGLWWSSSEYDASFAYRWGMVYYGADVSRSSSDRSHFFSVRCVQD

SEQ ID NO: 7337 - DNA, 891 bp, Unknown
  Obtained from environmental sample
  misc_feature (1)..(891): n is a, c, g, or t
ttgaaaaaagacaaaatggctttgcaacgtttgaaagacgcagccgaaaaagcgaagatagatttgtctgccgcaacaagcacaaatataaacctgccatttataacagcagatgcaagcgggccaaagcatttggatttaacgctcactcgtgccaaattcgaccagctaacatcgttccttgtggaaaaaactcttggaccttgcaaaaaagcgttggcagatgcaaaactgaaagcctccgatataaacgaggttattttggttggcggctcaatacgcattccagctgttcaagaagctgttaaaaatctgtttggaaaagaaccacacaaaggcgtgaatccagacgaagttgttgccattggtgcagcaattcagggcggagttttgtctggcgatagttctttgaaagatgtggtacttttggatgttaccccgctttcccttggcatagaaaccttgggcggagttatgaccaaattgatagaccgcaacacaacaatcccaattcgcaaaagccaagtgttcagcacggcagacgataaccaaagcgcggttacaatacacgttttgcaaggagagagagaattcgcaagggataaccgcacacttggccgctttgatttaactggaattccgccaaagccgcgcggactgccgcaaattgaggtttcttttgatattgatgcaaacggcattgtgcacgttagcgcaaaagataaggaaacaggaaaggaacagagcattaaaattcagagttcttcgggacttagcgaagatgagataaacaaaatggttaaagatgccgaagccaatgcggagaatgatagaaaatcacgtgaattggtggatgcaaaaaaccaagccgagcagatgtactgtccataa

SEQ ID NO: 7338 - protein, 296 aa, Unknown
  Obtained from environmental sample
  DOMAIN (1)...(295): Hsp70 protein
  misc_feature (1)..(296): Xaa is any amino acid
MKKDKMALQRLKDAAEKAKIDLSAATSTNINLPFITADASGPKHLDLTLTRAKFDQLTSFLVEKTLGPCKKALADAKLKASDINEVILVGGSIRIPAVQEAVKNLFGKEPHKGVNPDEVVAIGAAIQGGVLSGDSSLKDVVLLDVTPLSLGIETLGGVMTKLIDRNTTIPIRKSQVFSTADDNQSAVTIHVLQGEREFARDNRTLGRFDLTGIPPKPRGLPQIEVSFDIDANGIVHVSAKDKETGKEQSIKIQSSSGLSEDEINKMVKDAEANAENDRKSRELVDAKNQAEQMYCP

SEQ ID NO: 7339 - DNA, 372 bp, Unknown
  Obtained from environmental sample
  misc_feature (1)..(372): n is a, c, g, or t
atgctctgttcctttcctgtttccttatcttttgcgctaacgtgcacaatgccgtttgcatcaatatcaaaagaaacctcaatttgcggcagtccgcgcggctttggcggaattccagttaaatcaaagcggccaagtgtgcggttatcccttgcgaattctctctctccttgcaaaacgtgtattgtaaccgcgctttggttatcgtctgccgtgctgaacacttggcttttgcgaattgggattgttgtgttgcggtctatcaatttggtcataactccgcccaaggtttctatgccaagggaaagcggggtaacatccaaaagtaccacatctttcaaagaactatcgccagacaaaactccgccctga

SEQ ID NO: 7340 - protein, 123 aa, Unknown
  Obtained from environmental sample
  SIGNAL (1)...(23)
  misc_feature (1)..(123): Xaa is any amino acid
MLCSFPVSLSFALTCTMPFASISKETSICGSPRGFGGIPVKSKRPSVRLSLANSLSPCKTCIVTALWLSSAVLNTWLLRIGIVVLRSINLVITPPKVSMPRESGVTSKSTTSFKELSPDKTPP

SEQ ID NO: 7341 - DNA, 306 bp, Unknown
  Obtained from environmental sample
  misc_feature (1)..(306): n is a, c, g, or t
ttgcaaaacgtgtattgtaaccgcgctttggttatcgtctgccgtgctgaacacttggcttttgcgaattgggattgttgtgttgcggtctatcaatttggtcataactccgcccaaggtttctatgccaagggaaagcggggtaacatccaaaagtaccacatctttcaaagaactatcgccagacaaaactccgccctgaattgctgcaccaatggcaacaacttcgtctggattcacgcctttgtgtggttcttttccaaacagatttttaacagcttcttgaacagctggaatgcgtattga

SEQ ID NO: 7342 - protein, 101 aa, Unknown
  Obtained from environmental sample
  misc_feature (1)..(101): Xaa is any amino acid
MQNVYCNRALVIVCRAEHLAFANWDCCVAVYQFGHNSAQGFYAKGKRGNIQKYHIFQRTIARQNSALNCCTNGNNFVWIHAFVWFFSKQIFNSFLNSWNAY

SEQ ID NO: 7343 - DNA, 774 bp, Unknown
  Obtained from environmental sample
  misc_feature (1)..(774): n is a, c, g, or t
ttggaaacggcgcttgaggccgccgaggccgccagccgcgccaagtcggctttcctcgccaacatgagccacgagatacggacgcccatgaacgccataataggcttctcggagctggcgctcgattgcgagatatcggaagaagccaaggggtacatacacaaagtaatggagaattcaaacgggctcctgcagataatcaacgacatactcgacgtctcaaagatagaggcgggcaaaataacgctcgaaaacatcactttcgacatacacgaggtgttcgccctctgccgcgcggcgaccatgcctatggccatggagaagggtttgaagctccacttctacgcggagccgttcatcggcaggatgctcgtgggcgacccgataaggcttcgccaaatattcatcaacctcatttccaacgccgttaagttcacgaacgtcggcgttgtaaaggtattgagcacggtgatcgcgaccgacgtcggcacaatctcactgcgctttgaggtgaaggactcggggataggcatgactgcgcaggagatggagagggtgatggaaccgttcacgcaggccgaccacagcaccacgcgaaaatacgggggcacggggctgggcctctccatagtcagaaatttggttgacctcatgggcgggaagctgcacgtggagagcacccccggcatcggcagcaagttcagcttcgacttgactttcgacacggttgacacatcagagagcgcggagaacagcctaagcccgccgcgatga

SEQ ID NO: 7344 - protein, 257 aa, Unknown
  Obtained from environmental sample
  DOMAIN (14)...(79): His Kinase A (phosphoacceptor) domain
  misc_feature (1)..(257): Xaa is any amino acid
METALEAAEAASRAKSAFLANMSHEIRTPMNAIIGFSELALDCEISEEAKGYIHKVMENSNGLLQIINDILDVSKIEAGKITLENITFDIHEVFALCRAATMPMAMEKGLKLHFYAEPFIGRMLVGDPIRLRQIFINLISNAVKFTNVGVVKVLSTVIATDVGTISLRFEVKDSGIGMTAQEMERVMEPFTQADHSTTRKYGGTGLGLSIVRNLVDLMGGKLHVESTPGIGSKFSFDLTFDTVDTSESAENSLSPPR

SEQ ID NO: 7345 - DNA, 528 bp, Unknown
  Obtained from environmental sample
  misc_feature (1)..(528): n is a, c, g, or t
atgcgaaaagcgcagacattcggagtggtcgccattgacataatagaaaaagttctcggcgccgaatccgccgcaaagcacgcaaaaacggccgtcaaagacgaggcggagttccgcaggcgggtggaactggagtttgccggttcaacggtgctgggtgtaatgaaggaggtctgcggcgacgattgcacggtgattctgacctccggccacggacacgtactttgccgccgcgccagcgagatttacgagacggcgaataaactaggcccgaacctgcgatgcttcatcggcgaaaaagcgtcggtcgacgatcgggaggtgtttctttttgcggatttgtcgcatctcagattgccgccgaaagcgcaaagcaaggtatgcctcttggcgcgtgagaatttttatctcgcgctgaacgagagcgcaggccccccgtcaaacgtctttcagagcggcggcatatcgccggaggagatggtagtgccgctgtacatctgccgtccgctcgcgggtatggcgcgttag

SEQ ID NO: 7346 - protein, 175 aa, Unknown
  Obtained from environmental sample
  misc_feature (1)..(175): Xaa is any amino acid
MRKAQTFGVVAIDIIEKVLGAESAAKHAKTAVKDEAEFRRRVELEFAGSTVLGVMKEVCGDDCTVILTSGHGHVLCRRASEIYETANKLGPNLRCFIGEKASVDDREVFLFADLSHLRLPPKAQSKVCLLARENFYLALNESAGPPSNVFQSGGISPEEMVVPLYICRPLAGMAR

SEQ ID NO: 7347 - DNA, 741 bp, Unknown
  Obtained from environmental sample
  misc_feature (1)..(741): n is a, c, g, or t
gtggaagccgtattgtccaaagcgggcgggaagggcgttccaatacgtatcggggtgaacgctggcagcctgccccgggaccttcgggtcgaagtggattcgggccgcatggatggcgcggaagcgctggttcaggctgcggaacgggaactggcgattttcagggaatttgattttaaggatgtctgtgtttcagttaaagcctccggaattgccgatactataaaggcgaatcggatattggccggacgtaccgacgttccgctccatgtcggggtaaccgaagccggcccgctgattcccggaaccgtgcggaacgccgccgcgcttctggttctgctgggcgagggcattggggacactatcagggtttccctttccgatacgcccgaaaaggaagtgattgcgggccgggagattgtacgggcagccgctgatcttgcgggcgtgtcaaacagcagcggggtgcggatcgtttcctgcccccggtgcggcaggagcagttttgattccatagcctttgcagaagcctggcagaacaggctttacgcactggacaaggatattacggtggccattatgggctgcgcggtaaacggcccggaggaagcccggcacgccgatttgggtatcaccggaaccggaaacaaggtgctgatattccgccggggaaaactgacgaggacaattgacaagcatgaagccgatgccgcctttcagctggaactggagcggctgtag

SEQ ID NO: 7348 - protein, 246 aa, Unknown
  Obtained from environmental sample
  DOMAIN (2)...(246): GcpE protein
  misc_feature (1)..(246): Xaa is any amino acid
MEAVLSKAGGKGVPIRIGVNAGSLPRDLRVEVDSGRMDGAEALVQAAERELAIFREFDFKDVCVSVKASGIADTIKANRILAGRTDVPLHVGVTEAGPLIPGTVRNAAALLVLLGEGIGDTIRVSLSDTPEKEVIAGREIVRAAADLAGVSNSSGVRIVSCPRCGRSSFDSIAFAEAWQNRLYALDKDITVAIMGCAVNGPEEARHADLGITGTGNKVLIFRRGKLTRTIDKHEADAAFQLELERL

SEQ ID NO: 7349 - DNA, 912 bp, Unknown
  Obtained from environmental sample
  misc_feature (1)..(912): n is a, c, g, or t
ttgatattggcacgactacgcgtttccgctaaacttattgaccttgattccccgctggtactggatactgtttcacagttaaacgatcaacgggccttcggcgcggatgtcataagccgaattgacgcggcaagaaacggcaggacaggggaactctttagcctgataaaccgccagacggatcgtatcctccgtttctttatggaacgccataacattccacaaattgaaaagctcattgtcagcggaaacacggtaatgctgcatctttttcttaatatcgatccttcgggcatgggagaactgccctttaccccggtgtttctcgaagaaaaagaatcaaacgggaaggagctttcgctccttgtggaaaaaataaccgttcttccctctgtttcagcttttataggaggggacatcaccgcggggcttgccgttcttgatattatgaacgtcccctccccttccctgttaattgatattggcactaacggcgaaatggccctagaaagccatggaaccatttactgctgttcaaccgcggcgggtccggcttttgagggggcggaaatttcatgcggagtcggaggaatcaaaggggcgatcagcgcggtggaggccgcgacggaaaccggggcgggtgggaaaccaggagtctcaattacaactatcgggaacgcgtcccctatagggatttgcggttcggggcttattgacgctgtggcattgatgcttaagaggggaataatagacgagacaggatttatgacaggttctgagaaatgtttttatttggcgcctggcatttcgattaacggcagggatatacgtcagtttcagcttgccaaaagcgcaatcttcaccggcatcattttactttgcagaagtgcgaaacttgagctctcggaataa

SEQ ID NO: 7350 - protein, 303 aa, Unknown
  Obtained from environmental sample
  misc_feature (1)..(303): Xaa is any amino acid
MILARLRVSAKLIDLDSPLVLDTVSQLNDQRAFGADVISRIDAARNGRTGELFSLINRQTDRILRFFMERHNIPQIEKLIVSGNTVMLHLFLNIDPSGMGELPFTPVFLEEKESNGKELSLLVEKITVLPSVSAFIGGDITAGLAVLDIMNVPSPSLLIDIGTNGEMALESHGTIYCCSTAAGPAFEGAEISCGVGGIKGAISAVEAATETGAGGKPGVSITTIGNASPIGICGSGLIDAVALMLKRGIIDETGFMTGSEKCFYLAPGISINGRDIRQFQLAKSAIFTGIILLCRSAKLELSE

SEQ ID NO: 7351 - DNA, 384 bp, Unknown
  Obtained from environmental sample
  misc_feature (1)..(384): n is a, c, g, or t
gtgtaccttaataagataggcgttaaattgggagaagatcgctggcgcataagcccggcttcctttatttcaggctgcgaatccaaaaagcaaatagaagatcggattgcccgctttaaggaactgatcgatcctgcgccggctccccattggcttgagctatttgacagggcggttatccgggctggactgtttggccattaccgcaacgatgtgatggtgtacaatttgcccgaagatcgaaaagtgtccgaagagcttcttagagatacgcagttaaagggcatcgcttttcgggccgagggaggaatgcttatcgtgccatcaagaaaccaaaaaaggtttttagctttgttgagcgagcacggaattgcaagcttttaa

SEQ ID NO: 7352 - protein, 127 aa, Unknown
  Obtained from environmental sample
  misc_feature (1)..(127): Xaa is any amino acid
MYLNKIGVKLGEDRWRISPASFISGCESKKQIEDRIARFKELIDPAPAPHWLELFDRAVIRAGLFGHYRNDVMVYNLPEDRKVSEELLRDTQLKGIAFRAEGGMLIVPSRNQKRFLALLSEHGIASF

SEQ ID NO: 7353 - DNA, 816 bp, Unknown
  Obtained from environmental sample
  misc_feature (1)..(816): n is a, c, g, or t
atgttcaaacgctgttatgaaaccgccggcatcaccaacaaggatcgtattcacataacgccgggatacgggctttggacggcgggtataggctttcaggcgggcgccgaactgcttggcgccctggcgattcctatgggaccgggcaacacggacaaacagattaaaatgatgatcgatatgcaatcgacggttatttgcgcgacgtcttcctacgcgctcctgttggctgaagagattgaaaaacgcggagtcaaaagcaagattcacttaagaaaaggcgttatcggatccgagcgctggggcgaaaaaatgcgcaagcgcatcgccgacgaactcggagttgagttatacgacatttacggtttaacggaaatttacggccccggcatcggtattaactgccaaaaacaggacgccatgcatatgtggacggactttttttattacgagattatcgatccgaaaacaggcgaggttttacccgaaggcaaaacgggcgaaattgtcattacaacgctgtgcaaggaaggcgcccccctcatccgctacaggacgcatgatctcacaaaagcgattcacggcaaatgtgaatgcgggcttgagtatccgagaatcggcacgatcatcgggcgaagcgacgacatggtcaaggtccgcggcgctatcatttacccaagccgcgtggatgaacttcttgccgccgtcgacggggtaagcagcgagtatcaaatcatgatcgatcacctgaacggaaaagacatacttacccttttcttgaaacgcgcgaaacaggcgacgccgcccacaatctga

SEQ ID NO: 7354 - protein, 271 aa, Unknown
  Obtained from environmental sample
  misc_feature (1)..(271): Xaa is any amino acid
MFKRCYETAGITNKDRIHITPGYGLWTAGIGFQAGAELLGALAIPMGPGNTDKQIKMMIDMQSTVICATSSYALLLAEEIEKRGVKSKIHLRKGVIGSERWGEKMRKRIADELGVELYDIYGLTEIYGPGIGINCQKQDAMHMWTDFFYYEIIDPKTGEVLPEGKTGEIVITTLCKEGAPLIRYRTHDLTKAIHGKCECGLEYPRIGTIIGRSDDMVKVRGAIIYPSRVDELLAAVDGVSSEYQIMIDHLNGKDILTLFLKRAKQATPPTI

SEQ ID NO: 7355 - DNA, 744 bp, Unknown
  Obtained from environmental sample
  misc_feature (1)..(744): n is a, c, g, or t
ttgtttacccaaaaccttgacgaacaagccgtatattgtatttatgacagtaaagaccgctgtgacgatgtgtttacagattatgaaacgtttatcaaacaaaatgaatggggaattttgaaaagggacggcgattttcgttcccccgaatgtgtcgaattattaaagcagtcagacatagttgttaccaaccccccattttctttattcagggaatatattgcacagcttatggagtataaaaaaaagtttttaatcatcggttcacaaaatgcaattacttataaagatatttttaaatttattaagaatgataaattatggttaggcattaatccttccggtatgtgttttgatgttccggaaggttatacaaaaacaacaaaagtaataaatggaaaagtatttggttggcaggggagtgcgtgttggtttacaaatttaccgcatagtaaacgaaatgaaaagttaatcttatataaaaaatataacaaaatagattataaaaaatatgataattttgacgcaatagaagttagtaaagtttctgacattcctttagattatgatggaataatgggtgttccaattacatttttatataaatataatcctgaacaatttgagattatcggcgttacaaatcacggtgatatgcttggtattccttttaaaaataattgttttgcagaaataaaaggtgaaagaaaatatgtccgcatattaatcagaaaaaggaaataa

SEQ ID NO: 7356 - protein, 247 aa, Unknown
  Obtained from environmental sample
  misc_feature (1)..(247): Xaa is any amino acid
MFTQNLDEQAVYCIYDSKDRCDDVFTDYETFIKQNEWGILKRDGDFRSPECVELLKQSDIVVTNPPFSLFREYIAQLMEYKKKFLIIGSQNAITYKDIFKFIKNDKLWLGINPSGMCFDVPEGYTKTTKVINGKVFGWQGSACWFTNLPHSKRNEKLILYKKYNKIDYKKYDNFDAIEVSKVSDIPLDYDGIMGVPITFLYKYNPEQFEIIGVTNHGDMLGIPFKNNCFAEIKGERKYVRILIRKRK

SEQ ID NO: 7357 - DNA, 633 bp, Unknown
  Obtained from environmental sample
  misc_feature (1)..(633): n is a, c, g, or t
gtgaaacggggaaaccccggacggagcctgctgaaagcgatactggacgtggataacatgttcaaggcgcaggagcgggtaatagcaaacagggggtcagcgggaatagacggtatgacggtcgaagagctgaacggctacttcatcaaacactatctggaattatgcgagagtatacgcggcggatggtacaaaccgaaaccggtgagacgggtggagatacccaaaccggacggggggaaacggctgttaggagtgccgacggtaatagaccggatggtacagcaggcgatggtacaagtcttgcaaccgatatttgaacagacgttttcggattcaagtttcggctttaggccgggacgaagcgcgcatcaggccatagagcgtgcgaagaaatactatgaggaagggcataaatatgttgtagaccttgacttagaaaagtattttgacacggtgaaccatgacctgctgataaagatggtgagggagacggtaaaggacgaagcggtcataggcttgatacgcaagttcttaaagagcggcgtaatggcggacgggctggtgagccaaacggaacagggcgtaccccagggcggcaaccgcgcatcgatgatgcgacgccgttattaa

SEQ ID NO: 7358 - protein, 210 aa, Unknown
  Obtained from environmental sample
  misc_feature (1)..(210): Xaa is any amino acid
MKRGNPGRSLLKAILDVDNMFKAQERVIANRGSAGIDGMTVEELNGYFIKHYLELCESIRGGWYKPKPVRRVEIPKPDGGKRLLGVPTVIDRMVQQAMVQVLQPIFEQTFSDSSFGFRPGRSAHQAIERAKKYYEEGHKYVVDLDLEKYFDTVNHDLLIKMVRETVKDEAVIGLIRKFLKSGVMADGLVSQTEQGVPQGGNRASMMRRRY

SEQ ID NO: 7359 - DNA, 912 bp, Unknown
  Obtained from environmental sample
  misc_feature (1)..(912): n is a, c, g, or t
atgtggattactatggatcgttacggcgcagactgggaaatggtacatcgcggctggcagacccatgtgtttgggaaagcccgccaatttgccacaacgcgggaagcggtcgaaacctaccgcaaagaaatccccgacattatcgatcaggacttaaaagaatttgttatagccgaaaacggcaaacccataggcactattgaggacggggattctcttatctattttaacttccgcggagaccgcgcgctggaaatcacagccgcttttgaagaagacaactttaccaaattcgaccgaggacaacgccccaagatttgttattcgggaatgatggaatacgacggcgacctgcacgctccaaaacgataccttgtcagtcctccctcaattgattgcacaatgggcgagtatctggcggcaagcggcgtgcggacgctcgcgatttccgagacgcaaaagtacgggcatgtcacctactttttcaacggaaaccgcacgggcaagttcgatgaaaaacttgaagattatgttgaaataaaaagcgacgttcttccctttgaacagcgtccttggatgaagtgcgcggaaattaccgatcatgtcatggcagccgtaacctccggcaagtatgattttatcagactgaactatcccaacggcgacatggtgggacacaccggcgtttatcaggctgtcgtatgttcaatggaagcgatggaccttcagcttggcaggcttttaaaagttattgatgaagcgggcgcggtaatggtaatcacagccgaccacggcaacagcgacgatatgtttgagcatgacaaaaagacgggcaatgtttccctgaaagctgacggcacgccgaaagcaaaaacagccacagtcttaatcccgtcccctgcatgtgtatga

SEQ ID NO: 7360 - protein, 303 aa, Unknown
  Obtained from environmental sample
  DOMAIN (1)...(183): BPG-independent PGAM N-terminus (iPGM_N)
  misc_feature (1)..(303): Xaa is any amino acid
MWITMDRYGADWEMVHRGWQTHVFGKARQFATTREAVETYRKEIPDIIDQDLKEFVIAENGKPIGTIEDGDSLIYFNFRGDRALEITAAFEEDNFTKFDRGQRPKICYSGMMEYDGDLHAPKRYLVSPPSIDCTMGEYLAASGVRTLAISETQKYGHVTYFFNGNRTGKFDEKLEDYVEIKSDVLPFEQRPWMKCAEITDHVMAAVTSGKYDFIRLNYPNGDMVGHTGVYQAVVCSMEAMDLQLGRLLKVIDEAGAVMVITADHGNSDDMFEHDKKTGNVSLKADGTPKAKTATVLIPSPACV

SEQ ID NO: 7361 - DNA, 870 bp, Unknown
  Obtained from environmental sample
  misc_feature (1)..(870): n is a, c, g, or t
gtgaacatttttacgaaattacgagatagtttgtttcccagcagaagaaaaaagataaccttgtctttcaaggaatcgttttcacttataaaaatttacgcgtttagcaaaataaaaccgcaatttaaggcggtatttatggttagcgtctttctggcggctgttcagtattttgtgctggatacgcctattaaaaacgcgctttccatagctgtctgcgtggcggcggcgattattgggctgtcttttttccttgagggactttttttggggattatgccccttggcgaacaatgcgggatgagactgccctcaaagataggcgcggccggggttacagttttttcagttattgttggaataacggcgacgctggcggaacccgctgtcgccgtgcttcaacagcagggcagtgtaatcccggcgtggaacgcgccgcttttgtaccttcttctgaaccgcggcacaacgtggcttgttgccgccattgccgtcggggtgggagtttccgtagtgctgggcgtgtaccgctttatgttcggctgggctttcaagccgcctgtattcatcattattcccatcataattgccgtaagctgtatattcgatgaaaatcctattctgcgccctcttgtaaatctggcgtgggatacgggaggcgcggctacaggcgctgttacagtaccgattattctcgctcttggtttgggcgtggctaanatcgggggcaagaattcagacacatcaggacttgggcttgtaactcttgcgtccgccctgcctgtgggcagcgtcctttttctggccgccatgctgggacccaagtaccttccccctgtgacgcggcggctttcttttcggcgatcctga

SEQ ID NO: 7362 - protein, 289 aa, Unknown
  Obtained from environmental sample
  DOMAIN (44)...(273): Protein of unknown function (DUF1538)
  misc_feature (1)..(289): Xaa is any amino acid
MNIFTKLRDSLFPSRRKKITLSFKESFSLIKIYAFSKIKPQFKAVFMVSVFLAAVQYFVLDTPIKNALSIAVCVAAAIIGLSFFLEGLFLGIMPLGEQCGMRLPSKIGAAGVTVFSVIVGITATLAEPAVAVLQQQGSVIPAWNAPLLYLLLNRGTTWLVAAIAVGVGVSVVLGVYRFMFGWAFKPPVFIIIPIIIAVSCIFDENPILRPLVNLAWDTGGAATGAVTVPIILALGLGVAXIGGKNSDTSGLGLVTLASALPVGSVLFLAAMLGPKYLPPVTRRLSFRRS

SEQ ID NO: 7363 - DNA, 534 bp, Unknown
  Obtained from environmental sample
  misc_feature (1)..(534): n is a, c, g, or t
atggaaaatccggaacatgcggcatgggaaggacttgcgctgatactgccccatttcccgccggggtcggttgatgccatctgggctccttatgatagattcgcggaaggctgcgttcaggcgcttgcttcaatagacaggcaggacattaaactgttcagcatcggcatttccaacgatgatatacgcggaatgcagcgttaccgcgaaacatggctggcaaatgtcgcggtcgatcccaaacttgccggtacggtgaatatgcggatactggctgcggcattggcggatgaaaccctgccggatacggttttttttagcccgcagttgttaaaggcggcggatttaaactatgcggtaaatattattaatatttcggttatgcttcccgcctggggagacgcgtggggattgtttgatcattacccgtggatgaacaacctgaaaaaggcggaagaaaaatatttacgtatttcaccggtaacggcgcctcaggcggcgccctcggtggcagcatcctcggtgacaccatga

SEQ ID NO: 7364 - protein, 177 aa, Unknown
  Obtained from environmental sample
  misc_feature (1)..(177): Xaa is any amino acid
MENPEHAAWEGLALILPHFPPGSVDAIWAPYDRFAEGCVQALASIDRQDIKLFSIGISNDDIRGMQRYRETWLANVAVDPKLAGTVNMRILAAALADETLPDTVFFSPQLLKAADLNYAVNIINISVMLPAWGDAWGLFDHYPWMNNLKKAEEKYLRISPVTAPQAAPSVAASSVTP

SEQ ID NO: 7365 - DNA, 342 bp, Unknown
  Obtained from environmental sample
  misc_feature (1)..(342): n is a, c, g, or t
gtgtcncccaaggtcagattcggccgagaattggcgaagaagaaggcggcgaaacgcgggcgcaaagcaaaagcgaagaagcccgcaaaaaaaagcaaaaccgcaaggggcgcgaaaaagacggcgggtaaaaggggcaggccggctaaaagcgcgagcgcgagaaaagcgaaaccggcggcaaaaaaaccggccggcaagcgcggcaggccggcggcaataaaaccagcagcgcgcagaggtcgcccggcatccaaagcgaaagcaaaagcgaaacaacgcccggttaccccgccccctgtcaatcagccggtcggaacagtaaacgaaccgaatatttaa

SEQ ID NO: 7366 - protein, 113 aa, Unknown
  Obtained from environmental sample
  misc_feature (1)..(113): Xaa is any amino acid
MSPKVRFGRELAKKKAAKRGRKAKAKKPAKKSKTARGAKKTAGKRGRPAKSASARKAKPAAKKPAGKRGRPAAIKPAARRGRPASKAKAKAKQRPVTPPPVNQPVGTVNEPNI

SEQ ID NO: 7367 - DNA, 549 bp, Unknown
  Obtained from environmental sample
  misc_feature (1)..(549): n is a, c, g, or t
gtgatctnggcaggaaaatttcattttgacgaggctcacgcgcgccatgtcgcgaatctctgcatgacgctttttgacgcgctggtaaaggaacacggcatggattcccgccggcgcatgatgctgaaaacggccgccattctccacgacataggatcgtttataaaaacgtcgggccacaacaggcacggccagtacattgtttccaattccgaaatattcggcntgccccgcgacgagctggatattatcgccaatgttatacgctaccaccaggggcgcgaaccgtcgcaggccgacatagaatttatcagcctccagagggaagagaggatcatggtcctgaagatggcggctatactgcgggtcgccgacgcccttgacagggggcatacccagcacctgaaaaacctcagcgtggagcgcaggcctgagacaatcgccctgcacgcgcagggaacatatgatatctcgcaggaactcgccgctctggaagaaaaagcggattatttccaggcggtgtttggatataaggtagttctaaactag

SEQ ID NO: 7368 - protein, 182 aa, Unknown
  Obtained from environmental sample
  DOMAIN (10)...(130): HD domain
  misc_feature (1)..(182): Xaa is any amino acid
MIXAGKFHFDEAHARHVANLCMTLFDALVKEHGMDSRRRMMLKTAAILHDIGSFIKTSGHNRHGQYIVSNSEIFGXPRDELDIIANVIRYHQGREPSQADIEFISLQREERIMVLKMAAILRVADALDRGHTQHLKNLSVERRPETIALHAQGTYDISQELAALEEKADYFQAVFGYKVVLN

SEQ ID NO: 7369 - DNA, 510 bp, Unknown
  Obtained from environmental sample
  misc_feature (1)..(510): n is a, c, g, or t
gtggtttctctagccacgggcttcttagccgccggtttcccgcctgtcgtttttttaatcacgggttttttaacggttgattttttatccgccggcttcttgtccggcgcttttttaaccgttgtcttcttagccgccggtttcccgcctgtcgtttttttatcagcgggttttttaaccacgggcttcttagccgccggttttttgtccggcgcttttttatcagcgggtttcttaaccacgggctttttatccgccggtttttcagccggcgcttttttatcagcgggttttttaaccgccggtttttcagccgtcactttttttacggcaggctttttatccgtctgtttttcagccggcgcttttttatcagttggttttttatccgcgggttctttagccgccggtttcccgcctgttgcttttttagccgcggtttttttatctgccgctattacggcagattgttctttggcaagcaatagtatcagtttatccaactggtaa

SEQ ID NO: 7370 - protein, 169 aa, Unknown
  Obtained from environmental sample
  misc_feature (1)..(169): Xaa is any amino acid
MVSLATGFLAAGFPPVVFLITGFLTVDFLSAGFLSGAFLTVVFLAAGFPPVVFLSAGFLTTGFLAAGFLSGAFLSAGFLTTGFLSAGFSAGAFLSAGFLTAGFSAVTFFTAGFLSVCFSAGAFLSVGFLSAGSLAAGFPPVAFLAAVFLSAAITADCSLASNSISLSNW

SEQ ID NO: 7371 - DNA, 600 bp, Unknown
  Obtained from environmental sample
  misc_feature (1)..(600): n is a, c, g, or t
ttggccgaggccattatcgccaattcaggtaacgccaacgcgtgtaccggacaggccggaatggcggcggcccggcgaatggcggaacttgttgcgggcgttttcggcgttaaccccaaagaggtggcggttgcttccacgggggttatcggcgttcccctgccaatcgtggcgatagaaagcaatatcaaggccctggtaaacagtttgcgcaacgatgaggagggacacgccgcctgccttgaggcgattatgacaaccgacacccgcaaaaaggaagtctcggtagaaatcgatattggcggcaagccggttcgtatcggcggcatggtcaagggttcggggatgatccatcccaacatggcgaccatgctctgcttcctgaccacggacgcggcagtatcgcccgaagccctgagccacagcctacgccagagtacaagccgttcctttaaccgcctctccgtagacggcgacacttcaaccaatgacatggtaattgtcatggcnaatggcgaggcgggcaattccccattggctcaggtagcgcggaacacgatctttttacctcggctcttgagggagtctgcgtcaggctga

SEQ ID NO: 7372 - protein, 199 aa, Unknown
  Obtained from environmental sample
  DOMAIN (1)...(199): ArgJ family
  misc_feature (1)..(199): Xaa is any amino acid
MAEAIIANSGNANACTGQAGMAAARRMAELVAGVFGVNPKEVAVASTGVIGVPLPIVAIESNIKALVNSLRNDEEGHAACLEAIMTTDTRKKEVSVEIDIGGKPVRIGGMVKGSGMIHPNMATMLCFLTTDAAVSPEALSHSLRQSTSRSFNRLSVDGDTSTNDMVIVMANGEAGNSPLAQVARNTIFLPRLLRESASG

SEQ ID NO: 7373 - DNA, 357 bp, Unknown
  Obtained from environmental sample
  misc_feature (1)..(357): n is a, c, g, or t
ttgataatgcaaaaggaggacgccggccttctgtactgggccgtggccggcgggctggcggcttactctcttgatatttttgattttaaccttggcatgaaattaactgaatggcggctgatgatacagagggcttatcaactcgatcccgattacaatggggcggcgctggatgaattcctcctgctgttttacgcctcgctgccggaggttatgggcggngacaaggacgcgcaaaagatcacttcaaaaaagccctggaaaaacaggcggaaggtctacgggtgcgtatatttcattcgccccatcatatgcgtgccggcccaggactacaattcatataaaggactgccctga

SEQ ID NO: 7374 - protein, 118 aa, Unknown
  Obtained from environmental sample
  misc_feature (1)..(118): Xaa is any amino acid
MIMQKEDAGLLYWAVAGGLAAYSLDIFDFNLGMKLTEWRLMIQRAYQLDPDYNGAALDEFLLLFYASLPEVMGGDKDAQKITSKKPWKNRRKVYGCVYFIRPIICVPAQDYNSYKGLP

SEQ ID NO: 7375 - DNA, 960 bp, Unknown
  Obtained from environmental sample
  misc_feature (1)..(960): n is a, c, g, or t
atggacagcgccgccgttttgcgtgaccgcgccgctctgcgcgacctggtcagggctgaaacccttgccctcaatggcggcgttcctccctctccattgaccatagcccgttcagtaacacaggcagctgcttttttgacaaataaccccgccggcgccgcatggcttgccgataccctttccaaagattccgccagtgtgctgatttcctccgcatggtatcaaaatcagcttgccgcttttgccgaagttactgcaggggaatccttgtcggcggaaaagcctgatccggctttgccggcaaaccagattcgggtgggcggacttttgtttaccggagtaggcggcggtgttcttgtacagggggaaccttttccccaccgcgtaccggtatccgcctttatgatctgcactacagaaattccggcgcttgcttatgcggactttcttgacgcggttcccggttggcgcgcggatcagcgggaagcattggaacaacaggggctggttactaacgagtaccttgtcgattttgaagataccgtgccggtgggcagaagcaggatagacaagggcgtaaacatggtgtcatggtatgcggcaaaagcctattgcgagtggctcagcggtaaattgcccgcttcatttgcaggctgggagatacggcttcccaccgaggcggaatgggagtacgcggtaaagtcctcataccggtggggcggcgccggaatctttgtctccaacagcggcgtatgggaatggtgcgccgatccttattcccccctgccgntttttgccgcgccgtctgaagctgttgccgctgttggttcaccgggagcgttcactgcgcgggcggatctttcttttaataatacggggaccaacccaccccggaaatcaggggcgtcttttgccccccggcggcctggtcccccctttgtcttctttccgtccgggtaa

SEQ ID NO: 7376 - protein, 319 aa, Unknown
  Obtained from environmental sample
  DOMAIN (99)...(303): Domain of unknown function (DUF323)
  misc_feature (1)..(319): Xaa is any amino acid
MDSAAVLRDRAALRDLVRAETLALNGGVPPSPLTIARSVTQAAAFLTNNPAGAAWLADTLSKDSASVLISSAWYQNQLAAFAEVTAGESLSAEKPDPALPANQIRVGGLLFTGVGGGVLVQGEPFPHRVPVSAFMICTTEIPALAYADFLDAVPGWRADQREALEQQGLVTNEYLVDFEDTVPVGRSRIDKGVNMVSWYAAKAYCEWLSGKLPASFAGWEIRLPTEAEWEYAVKSSYRWGGAGIFVSNSGVWEWCADPYSPLPXFAAPSEAVAAVGSPGAFTARADLSFNNTGTNPPRKSGASFAPRRPGPPFVFFPSG

SEQ ID NO: 7377 - DNA, 627 bp, Unknown
  Obtained from environmental sample
  misc_feature (1)..(627): n is a, c, g, or t
gtgccccttactttaatcggagaagccgttttcggccgttgtctttccgccgccaaggacgaacgcgtaaaggcggcgaaagttttttcttccccaaagattacttccccaaaggacaaggcggtttttatcaaggatttggaaaaagccctttacgcttctaaaattgtctcttacgcccagggttatcttttaatgagggaagcggcaaaagaatacaaatggaaccttaactacggacgtatcgcccttatgtggaggggcggctgtattatacgctcagtctttctgggtaaaataaaagaagcttttgataaaaatcctaatcttgaaaacctgttattagacccttacttttccaaaacaatcgaagacgcgggcgattcctggcggcgcgttgtttccgccgcggttcttaacggaatacccgcccccgccctttcaagcgctctttcctacttcgacggttaccgaagcgaacggcttccggcaaacatccttcaggcgcaaagggattatttcggggcgcatacatacgagcgattggacaagccaaggggcgaattcttccatactaactggacggggcacggcggcgagacaagcgcgtctacctataccgtttaa

SEQ ID NO: 7378 - protein, 208 aa, Unknown
  Obtained from environmental sample
  DOMAIN (1)...(195): 6-phosphogluconate dehydrogenase, C-terminal domain
  misc_feature (1)..(208): Xaa is any amino acid
MPLTLIGEAVFGRCLSAAKDERVKAAKVFSSPKITSPKDKAVFIKDLEKALYASKIVSYAQGYLLMREAAKEYKWNLNYGRIALMWRGGCIIRSVFLGKIKEAFDKNPNLENLLLDPYFSKTIEDAGDSWRRVVSAAVLNGIPAPALSSALSYFDGYRSERLPANILQAQRDYFGAHTYERLDKPRGEFFHTNWTGHGGETSASTYTV

SEQ ID NO: 7379 - DNA, 720 bp, Unknown
  Obtained from environmental sample
  misc_feature (1)..(720): n is a, c, g, or t
atggaaagaatcatgggcaaggcggacactcccgtacgcgccctttttgacgaaggtntgcgccgttattcctcgtatatgccgcccatcctctgggcgcttacggtaataggtccgcgcgatgacggaacactggcggtacgcggtctntacgtcggtttcgggcgcgagtgtttcgagaaagccgccaccctttcacgggaagttaatgttaacctgttaaatgagccgattaacaaagctgtcgtttaccttgaacccgaagaataccgcacaacgtggcttggcaataaggcggtttacaggacaaggatggcgattgcggacggaggggaacttttaatccttgcccccgcccttgaacgtttcggcgaagacatgggcgtggacgccctcataagaaaatacggctacaggccgggaaaggaaattatcgccaaaacaaaaacggacgcggaacttgcgggcaatttaagtgccgccgcccacctgattcacggttcaagcgagggacgctttaaagtccgctattgtccgggcgaaaaacttacccgcagggaaatagaatcggcaggcttcctgtggggcgatttaaaagaatatatgaaacgctacgatattaaagccttatccgcagggtggaacaccgttgaaggcgaaagaatcttttttgtgccgaatcccgcccttggcttgtgggcggaaaaacgtaaattttaa

SEQ ID NO: 7380 - protein, 239 aa, Unknown
  Obtained from environmental sample
  misc_feature (1)..(239): Xaa is any amino acid
MERIMGKADTPVRALFDEGXRRYSSYMPPILWALTVIGPRDDGTLAVRGLYVGFGRECFEKAATLSREVNVNLLNEPINKAVVYLEPEEYRTTWLGNKAVYRTRMAIADGGELLILAPALERFGEDMGVDALIRKYGYRPGKEIIAKTKTDAELAGNLSAAAHLIHGSSEGRFKVRYCPGEKLTRREIESAGFLWGDLKEYMKRYDIKALSAGWNTVEGERIFFVPNPALGLWAEKRKF

SEQ ID NO: 7381 - DNA, 900 bp, Unknown
  Obtained from environmental sample
  misc_feature (1)..(900): n is a, c, g, or t
atgtttccaatcgcggacaggcagggcagaatagtggctttcggaggcagggcaatgccgggcgtcgtgcaaagcgacggaaaagagcctccaaaatacattaattcccctgaaacggaaatttacaaaaaaggtcagaccctctacgcccttgatatggcccttcctgaaattaggaaaacaaagacggtataccttgccgaggggtacatggacgtcatagcgcttcatcaggcggatattacaaacgccgtcgccccccttggaaccgcgtttacggaagaacaagccgctcttttacgccgctgggcggacaaaatcgtccttgttttcgacactgacgatgccggagaaaaggcggcgtataaggcgattatcacctgcaggaaaatagggtttgtctgcgggcttgcttccatgcggcagggcctgaaagatgaggttcctcaggctgatacagtgaaatttaaggatcctgccgatattttacaaaaattcgggcccgagatattgaaaaaagttataaattgtactataaatgactttgagtaccttatttcgcgcagtaaattacagtacaaagcgcaggggagcggaattaaacgcgcttcggaatttatgtttccgtatttggacgcgcttgacactgaagttgaacgggataacggtatcgctcttgtagcggacgctttcagaatagagcgtggcgcgattcaagatgattaccacagatggaagttaaaaggacattcgcaaaaagccctgaaagagacaaaacaagatgttttgcgggacgaaaaaataaaatcgaatgtcgaacttttaatgcttaccgctgtggccgtaaatatggagctgtatccggaattccgtacagctttggaaataaggagattatga

SEQ ID NO: 7382 - protein, 299 aa, Unknown
  Obtained from environmental sample
  DOMAIN (1)...(55): DNA primase catalytic core, N-terminal domain
  misc_feature (1)..(299): Xaa is any amino acid
MFPIADRQGRIVAFGGRAMPGVVQSDGKEPPKYINSPETEIYKKGQTLYALDMALPEIRKTKTVYLAEGYMDVIALHQADITNAVAPLGTAFTEEQAALLRRWADKIVLVFDTDDAGEKAAYKAIITCRKIGFVCGLASMRQGLKDEVPQADTVKFKDPADILQKFGPEILKKVINCTINDFEYLISRSKLQYKAQGSGIKRASEFMFPYLDALDTEVERDNGIALVADAFRIERGAIQDDYHRWKLKGHSQKALKETKQDVLRDEKIKSNVELLMLTAVAVNMELYPEFRTALEIRRL

SEQ ID NO: 7383 - DNA, 471 bp, Unknown
  Obtained from environmental sample
  misc_feature (1)..(471): n is a, c, g, or t
atgatggccgagccgccgggagcgaggcatcngcttaagatagcaagcccaaccgccacggcttccgtgcgcggaaccagttttgaatttgacacaagaaatcttcgcgtacacagcgggacagtggtcttcatgggcaattggggataccaggttacggtacaggaaggccgtaccagcgtagtaacagcatcgggcacagccgcgccgccccaagttacaagcactggtggcggcggttctgcatccacgcaaggcgtgggttccgtgggccagtcgggctttggcaatgatagcacagccgggactactggcgggactggggttgtgagcaagcctcctgttactcctcctgtcacgccgcctcctgtcaccccgcctgttagcccgcccggaggcggcggtggcggcggaaacggaggaggaggagataacaccggcggcacggtcgatataccggtttcgtattaa

SEQ ID NO: 7384 - protein, 156 aa, Unknown
  Obtained from environmental sample
  misc_feature (1)..(156): Xaa is any amino acid
MMAEPPGARHXLKIASPTATASVRGTSFEFDTRNLRVHSGTVVFMGNWGYQVTVQEGRTSVVTASGTAAPPQVTSTGGGGSASTQGVGSVGQSGFGNDSTAGTTGGTGVVSKPPVTPPVTPPPVTPPVSPPGGGGGGGNGGGGDNTGGTVDIPVSY

SEQ ID NO: 7385 - DNA, 513 bp, Unknown
  Obtained from environmental sample
  misc_feature (1)..(513): n is a, c, g, or t
gtggccgcctgtgtaggcggcggcagcaacgcgatgggtcttttttaccattttattcctgatgcgggggtacggcttatcggctgcgaggccgcggggcagggaatcgacacggaaaaacacgccgccgcgattgccaaaggctcggtgggaattttccacggcatgaaatcgtatttttgtcaaaacgaggaaggccaaatcgccccggtgtattcgatttcagcgggactggattatccgggcatcgggccggaacacgcgtggctcaatgacaccaaacgggcggaatacgtgacggtcaccgatgaggaagcggtttccacctttgagtacctcgcgaaagctgagggaattatctgcgccattgaaagcgcccacgcggtggcccatgtgcagaaaatagcgcgccagttcaacaaagacgaaagcgtcatcatctgcctttcgggccggggggacaaggacgtttcggcaatcgcgcggtatcgggggagagaaatcgatgagtaa

SEQ ID NO: 7386 - protein, 170 aa, Unknown
  Obtained from environmental sample
  misc_feature (1)..(170): Xaa is any amino acid
MAACVGGGSNAMGLFYHFIPDAGVRLIGCEAAGQGIDTEKHAAAIAKGSVGIFHGMKSYFCQNEEGQIAPVYSISAGLDYPGIGPEHAWLNDTKRAEYVTVTDEEAVSTFEYLAKAEGIICAIESAHAVAHVQKIARQFNKDESVIICLSGRGDKDVSAIARYRGREIDE

SEQ ID NO: 7387 - DNA, 531 bp, Unknown
  Obtained from environmental sample
  misc_feature (1)..(531): n is a, c, g, or t
atgctggatcttggtcggaagtactgtcgatttaacagcgacgggtttggagaactgcgaattttagcggcggactttgtcaaaaacgataatcaggccggagctttgcttcgctttgaacaggaggttccgccgcagacggcgacggcgtcccctgaattccccatagaaacccttagctccggcagtgaagcgcccttggttctccttagcacaacgagcgcctttccctttacccttcaggccgtattccagggctattgcctgttccgccacgagatcctttttgagcgggacaagcctggccgcaacgagcagttctatcagcgctcggatgaaatcaacattaccgccatgaacggaatccggctgggcatctcaaacgcccaggcggttaagctccaggtgattggcgcaggccggactgtgccttttgaagccggcggcgcgggcgaagttgtagccgcggatctccgctgggtgcgggacgatgaaaaccgttaccgcctggtactgctccggctggaatag

SEQ ID NO: 7388 - protein, 176 aa, Unknown
  Obtained from environmental sample
  misc_feature (1)..(176): Xaa is any amino acid
MLDLGRKYCRFNSDGFGELRILAADFVKNDNQAGALLRFEQEVPPQTATASPEFPIETLSSGSEAPLVLLSTTSAFPFTLQAVFQGYCLFRHEILFERDKPGRNEQFYQRSDEINITAMNGIRLGISNAQAVKLQVIGAGRTVPFEAGGAGEVVAADLRWVRDDENRYRLVLLRLE

SEQ ID NO: 7389 - DNA, 888 bp, Unknown
  Obtained from environmental sample
  misc_feature (1)..(888): n is a, c, g, or t
ttgtcgcgggggcggcgtatacgccaaccatgcgccttctgtggcgttaccggcatcaagccgacttacggttccgtgtcacgttacggacttgtagcgtatgcgtcgtccctcgatcaaatcggtcccatcggacaaaacatagacgactgcgcggcattactgtcgatcatttcaggacctgatacacgggacagcacttgcgtcatagaaaaaccgtttgaattcggcgaggcaaaatcaaaactggaaggcgtgaagatagggcttccccgaaattattttgcaagcggtattgacgatgaagtaaagaccgctgttctggctgtttcaaaagaacttgaatcggcaggtgcaatcatagaagaatttgaaatgccgtttttagattatgtgatcccaacatattacatcatcgcctgcgccgaagcgtcgtcaaatctttcacgttatgacggtttaaaatacggttaccgcagttccaacgcacagtctctttcagaagtgtaccgtctttcacgcaacgaaggttttgggttggaaataaaaagaagaataatgctaggctcgtttgtgctttcgtccgggtactacgatgcctattacaaaaaagccctgcaggtacgcgctcttattaaagacgcttacacaaagttgttcaccaagtacgacatgatactctcccccgtcgcgcccacaacggcgtaccgtatcggggaaaattcaagcgacccgatgaagatgtacatgggagacatttatacggtgtcgatcaatctggcaggactccccgcggcggcgcttccctgcggatttgattccaatggtttgccaatcggctttcaacttatcggtgacgctttttcggagaacaaattattgacgtag

SEQ ID NO: 7390 - protein, 295 aa, Unknown
  Obtained from environmental sample
  DOMAIN (1)...(294): Amidase
  misc_feature (1)..(295): Xaa is any amino acid
MSRGRRIRQPCAFCGVTGIKPTYGSVSRYGLVAYASSLDQIGPIGQNIDDCAALLSIISGPDTRDSTCVIEKPFEFGEAKSKLEGVKIGLPRNYFASGIDDEVKTAVLAVSKELESAGAIIEEFEMPFLDYVIPTYYIIACAEASSNLSRYDGLKYGYRSSNAQSLSEVYRLSRNEGFGLEIKRRIMLGSFVLSSGYYDAYYKKALQVRALIKDAYTKLFTKYDMILSPVAPTTAYRIGENSSDPMKMYMGDIYTVSINLAGLPAAALPCGFDSNGLPIGFQLIGDAFSENKLLT

SEQ ID NO: 7391 - DNA, 963 bp, Unknown
  Obtained from environmental sample
  misc_feature (1)..(963): n is a, c, g, or t
atgtcggtcatgntcagcagggcctgccccgatgtccgggatgggctaaaccccgttcacagaagactgctctatgccatggataccctcggtttgcgcccgggtggaggcacaaaaaaaagcgccctcatcgtcggtgaaacaatgggtaaataccatccacatggcgacttgtcactttatgacgctcttgttcgcatggcgcaggatttttcccttcgctacccattgataaaagggcagggaaacttcggttcaatagacgatgatccccctgcggccatgcgctacaccgaggcgaaaatttctaaaattggcgatgaaatgttgcaggaccttcaaaaagaaaccgtcaattttgttcctaattacgatgagtcttttgatgaaccttcagtactaccttcagcaattcccaacctgttgattaatggctccagcggaatagccgtcggtatggctacaaatatggcaccccacaaccttggcgaaatttgcgacgcaatttgcgcccttatcgataaccccggcgcgactaatgaagacctaatgcattttgttcaaggccccgatttccccacaggtgggacaatttttggcagacatggaattaaagaggcttacaaaacagggcgtggaaaactacttgtccgtggcaagtttaatgtcgaaaccactaaacagggaaaagaaaaaatcgtttttacggaaattccctacaatgttaataaagccctcttactggaaaaaatcggtcaacttatgcgcgataaggttattgatggtatttccaacgcaaatgatgaatccgaccgtgatggtatccgcattgtaatagagttaaaaaaaggcgcgattgtcaaagtcattttaaatcaacttttttctaacacacaacttcaaacaagcttcggtatcatcaatttggcattggtagggggcaagccacagttactcacatga

SEQ ID NO: 7392 - protein, 320 aa, Unknown
  Obtained from environmental sample
  DOMAIN (7)...(320): DNA gyrase/topoisomerase IV, subunit A
  misc_feature (1)..(320): Xaa is any amino acid
MSVMXSRACPDVRDGLNPVHRRLLYAMDTLGLRPGGGTKKSALIVGETMGKYHPHGDLSLYDALVRMAQDFSLRYPLIKGQGNFGSIDDDPPAAMRYTEAKISKIGDEMLQDLQKETVNFVPNYDESFDEPSVLPSAIPNLLINGSSGIAVGMATNMAPHNLGEICDAICALIDNPGATNEDLMHFVQGPDFPTGGTIFGRHGIKEAYKTGRGKLLVRGKFNVETTKQGKEKIVFTEIPYNVNKALLLEKIGQLMRDKVIDGISNANDESDRDGIRIVIELKKGAIVKVILNQLFSNTQLQTSFGIINLALVGGKPQLLT

SEQ ID NO: 7393 - DNA, 933 bp, Unknown
  Obtained from environmental sample
  misc_feature (1)..(933): n is a, c, g, or t
gtgaggtggtcgtcgtatgtgtggggcgatgtgggaaaaagcggcgtaaggtatatggctatgcttgagagggagattgttgattacagcgattctcttgttgttatgggtgataggcctgttcaggacgcgcggtatcagatacgggatttgcgcaacgttgataactcggctgattttttaattattacgcacgctgagtttttgagcgccgcgctcaagtntgcgtcgcacaaggttgggatgggttttagcgctcccaaggtggtgttgctaggcgacatattggatcagttcggcggcggcaacacggatccggcggcgatcaggaactttttgtattatgtgtacgggaattggcgcggcggtgatggagttttgtcgcacgtcatgctcatgggttcaggtcactacgactacaagaatatctcttcccgggtggctaattttatgccggtgccctatataagcggcgggctcaacgaggatttttatgtgtttttcgacacgctggttcatccgaactcgcagcataattgctactattacatcgggcgtatgcctgtgaggagtttgtccgaggcctttgacgtggtggataaggtgatagagatggaggatccgcgcgtggcggagtttgattcgtggcggggtagggtgttgcttaccgccgacgacgaccagcagggcgctgccggcgacaacacacatccggcccacactgcttcggcggagcttattgcgcgcaacataaacaaattgcggccggatatcaaccagaggaaagtttacctatatgagtacgggtgggatgatcgttacttcaagccggcggcgacgagagcgttcataaacgagattaacagcggggtcgcgctggtaaattggtttgggcacggtgcggtagacgttgtgggggacgagaggctttga

SEQ ID NO: 7394 - protein, 310 aa, Unknown
  Obtained from environmental sample
  misc_feature (1)..(310): Xaa is any amino acid
MRWSSYVWGDVGKSGVRYMAMLEREIVDYSDSLVVMGDRPVQDARYQIRDLRNVDNSADFLIITHAEFLSAALKXASHKVGMGFSAPKVVLLGDILDQFGGGNTDPAAIRNFLYYVYGNWRGGDGVLSHVMLMGSGHYDYKNISSRVANFMPVPYISGGLNEDFYVFFDTLVHPNSQHNCYYYIGRMPVRSLSEAFDVVDKVIEMEDPRVAEFDSWRGRVLLTADDDQQGAAGDNTHPAHTASAELIARNINKLRPDINQRKVYLYEYGWDDRYFKPAATRAFINEINSGVALVNWFGHGAVDVVGDERL

SEQ ID NO: 7395 - DNA, 453 bp, Unknown
  Obtained from environmental sample
  misc_feature (1)..(453): n is a, c, g, or t
atgaggcgagtttttctacttttaataatacatttcttttcttgcggtttagttttttcgcagacctatgaaatcaggcgctatgtggctgtacataaagcgccgttaaaagagtccgcgagcttttttgcgaaagatttggtaagcctgtcgctgggggacacggttacgcttgtccgtgaggggggcaaatggactcaagtcagatctggcgcaattacaggctgggttcttagttcaagccttagcgtaaggcggatcctctcgtcaggcagcaacgctacggccacagaaatctctcttgccggaaaaggcttttctcatgagctggaggcggagtatagagaaaacggtctggattattcaattgtggatatgatggaaaacactcttattggcgcggaagagctgtttgaatttatcagcgaaggccgccttgcaaggggtcaatga

SEQ ID NO: 7396 - protein, 150 aa, Unknown
  Obtained from environmental sample
  SIGNAL (1)...(20)
  misc_feature (1)..(150): Xaa is any amino acid
MRRVFLLLIIHFFSCGLVFSQTYEIRRYVAVHKAPLKESASFFAKDLVSLSLGDTVTLVREGGKWTQVRSGAITGWVLSSSLSVRRILSSGSNATATEISLAGKGFSHELEAEYRENGLDYSIVDMMENTLIGAEELFEFISEGRLARGQ

SEQ ID NO: 7397 - DNA, 816 bp, Unknown
  Obtained from environmental sample
  misc_feature (1)..(816): n is a, c, g, or t
ttgctgttatcagatgaagaaaaagaagaatttatcaaaaatgagccaaaagccgagaagtacataaagccgcttatttccgcccgcgaatttctgaacgggatgcggcgctggtgtatatggcttgttgatgtggaacccggcgaacttcgtaaaatgccggaagttttaaaacgtgttgaagcggttaaaaatttccggttggcaagtatcgctccttcaactcgggatcatgctgtaacgcctgctttgttcagagatagaaaccagccggatacgtttattgttattccccgcgtttcatcagagacaagaaaatatatcccaatgggcttttttgacagtaattccattgcgggcgatacttgcatgataatacccgatggtacactctaccattttgggatactgacatctactatgcacatggcatggatgcgttatgtttgcggacgattgaaaagcgattatcgttattcaaaagatattgtgtataataatttcccgtggcccaatcctacagaaaaacagacggctgggatagaaaaagcggcgcaggaagtattggatacccgcgcaaagtttccaaatgacagccttgcggatttatatgaccctgttgcaatgcctcccgctttaaccaaagcccaccaaaagcttgacaaagcggtggaggccgcctacgggcaatcatttggcgatgacagtcagcgagtggcgcatctatttgggctgtaccagaagcttagcggggagttgtttgttgagggtaagcggggggaacaaaaaaagcgccccgtgaaggggcgtgggtga

SEQ ID NO: 7398 - protein, 271 aa, Unknown
  Obtained from environmental sample
  misc_feature (1)..(271): Xaa is any amino acid
MLLSDEEKEEFIKNEPKAEKYIKPLISAREFLNGMRRWCIWLVDVEPGELRKMPEVLKRVEAVKNFRLASIAPSTRDHAVTPALFRDRNQPDTFIVIPRVSSETRKYIPMGFFDSNSIAGDTCMIIPDGTLYHFGILTSTMHMAWMRYVCGRLKSDYRYSKDIVYNNFPWPNPTEKQTAGIEKAAQEVLDTRAKFPNDSLADLYDPVAMPPALTKAHQKLDKAVEAAYGQSFGDDSQRVAHLFGLYQKLSGELFVEGKRGEQKKRPVKGRG

SEQ ID NO: 7399 - DNA, 939 bp, Unknown
  Obtained from environmental sample
  misc_feature (1)..(939): n is a, c, g, or t
atgaaaacgcttaaaatttacatagaagacgaaaacactcaagccgctcttgtatgttttaaccgcccttggcttgataaacagcttatcacagggcaaaaatacatgatttcagggcgtttttactataaatacggcgaattgcagtcaagcgcttttgaagcggagcctgagtcttcaagcgcaagtttcggaaaaatactgcctgtttatccgctaacggcggggatacttcaaaataatatgcggcgttttatttcttccgctataaaaaaatatgttaacgacttggagaacgaacttcccaatgaaataatagaaaaagaatcccttttatcaaagacgcaggcggtaaaagaaatacattttccgacttccgccgatatgcttgagaaagcgaaaaaaactctagtttacgaagaacttttttacatggaggttatggttctgcgaagagcaatagaacggaagagcaaaataaaacttgaacttgcgaacaatgaaggcaaaaacgagaatatttctaaattacagcaaagccttattgaaagactttctttctcgttaacggacgggcaaaaacaggctgttacggaaataaacagggatatgtcgtctaatattccgatggcgcgtcttttacagggtgatgtcggctgcggtaaaactcttgtctcgtttctggcggcgttacgcgctgttgaggataagggacaggcggcaatcatggctcctacggaattgcttgcgcgtcagcacgcggaaaacgccgcgcgtcttttggaaccgcttggagtcagtatcgcttttcttacggggaatataaaagcgcagggacgcaaagaactgctgaanaatcttgccgaacggaacatcggcataataactggaacgcacgctcttttttcaaagatgtcgagtataaaaactttaaactag

SEQ ID NO: 7400 - protein, 312 aa, Unknown
  Obtained from environmental sample
  DOMAIN (190)...(311): DEAD/DEAH box helicase
  misc_feature (1)..(312): Xaa is any amino acid
MKTLKIYIEDENTQAALVCFNRPWLDKQLITGQKYMISGRFYYKYGELQSSAFEAEPESSSASFGKILPVYPLTAGILQNNMRRFISSAIKKYVNDLENELPNEIIEKESLLSKTQAVKEIHFPTSADMLEKAKKTLVYEELFYMEVMVLRRAIERKSKIKLELANNEGKNENISKLQQSLIERLSFSLTDGQKQAVTEINRDMSSNIPMARLLQGDVGCGKTLVSFLAALRAVEDKGQAAIMAPTELLARQHAENAARLLEPLGVSIAFLTGNIKAQGRKELLXNLAERNIGIITGTHALFSKMSSIKTLN

SEQ ID NO: 7401 - DNA, 600 bp, Unknown
  Obtained from environmental sample
  misc_feature (1)..(600): n is a, c, g, or t
atggaactccttgttatcttgcagcaagatccgtttacctattacctggtagacaagcagcaccccctgcctgacggctacgaaccgaacgatttggttagcctgcaagccgggctttaccgccttgaccaaaacggtcttaggttgcgaaaaatggctgtggacgctttgcaggaaatggcaacagcagcggcaaaagacgggattacttttgttataggttcgacctaccgctcggcggcttatcaggctcaggtttatgaacgggctgtgaacaattacggcaaagaaaccgctgaccgcgaatcagcgcaaagcggcaaaagccagcatcagcttggactgaccgtggacttctccccgatagacgacgcttttgccaaaacccccgcctgcaaatggctattggaaaacgcaagccgttttggctggtcgctttctttccctgatggctatgaggaaataacaggctaccgctgggaaagctggcattaccgttttgtgggcaaagatctgaccgcgttcatcgataattattttgacggcatacagcaatacgcccttcagtttattcatgcctggcaggaacaggcggaatga

SEQ ID NO: 7402 - protein, 199 aa, Unknown
  Obtained from environmental sample
  DOMAIN (46)...(170): D-alanyl-D-alanine carboxypeptidase
  misc_feature (1)..(199): Xaa is any amino acid
MELLVILQQDPFTYYLVDKQHPLPDGYEPNDLVSLQAGLYRLDQNGLRLRKMAVDALQEMATAAAKDGITFVIGSTYRSAAYQAQVYERAVNNYGKETADRESAQSGKSQHQLGLTVDFSPIDDAFAKTPACKWLLENASRFGWSLSFPDGYEEITGYRWESWHYRFVGKDLTAFIDNYFDGIQQYALQFIHAWQEQAE

SEQ ID NO: 7403 - DNA, 300 bp, Unknown
  Obtained from environmental sample
  misc_feature (1)..(300): n is a, c, g, or t
atgaattttttggcctaccccgacagcatactcccaaagtttaaacaatacttcgacgattttatttctacttccggtggagagctaaagagcgaatgttaccttcccaaagcgtcggactggctgatcagaaacgattttctaaaaatgcgcgttcttaacgctgattcggagtggttcggcgttacttataaggaagacaaagacatggcaattaaacgccttgcggaacttacaaatcagggggtttatcctgattcgctgtggagcaatcattccgcctgttcctgccaggcatga

SEQ ID NO: 7404 - protein, 99 aa, Unknown
  Obtained from environmental sample
  misc_feature (1)..(99): Xaa is any amino acid
MNFLAYPDSILPKFKQYFDDFISTSGGELKSECYLPKASDWLIRNDFLKMRVLNADSEWFGVTYKEDKDMAIKRLAELTNQGVYPDSLWSNHSACSCQA

SEQ ID NO: 7405 - DNA, 477 bp, Unknown
  Obtained from environmental sample
  misc_feature (1)..(477): n is a, c, g, or t
gtggttgcaatgaatactctgcctgatttgtttggaagcgcggtgttcaatcatgcggtcatgcaggcgcggcttccgaaggatgtttacaaagccctcaaaaaaacgatgtctcagggcacgcatttggagagcgacatcgccaacgttgtcgccaacgccatgaaagactgggccgtggagaggggcgcgacgcatttcacgcactggttccagcccatgaccggcatcacggcggagaagcacgacagcttcatctcgcccaccggagacggcaggatcatcatggagttttcgggcaaagagcttgtccgcggggagccggacgcgtccagcttcccctccgggggctgcgcgccacttttgaagcacggggatacactgtctgggatacgacctcgtatgcctttctcaagggcacgacgctgtatatccccaccgcggtctgctcctacagcggcgaggcggtcgacctga

SEQ ID NO: 7406 - protein, 158 aa, Unknown
  Obtained from environmental sample
  misc_feature (1)..(158): Xaa is any amino acid
MVAMNTLPDLFGSAVFNHAVMQARLPKDVYKALKKTMSQGTHLESDIANVVANAMKDWAVERGATHFTHWFQPMTGITAEKHDSFISPTGDGRIIMEFSGKELVRGEPDASSFPSGGCAPLLKHGDTLSGIRPRMPFSRARRCISPPRSAPTAARRST

SEQ ID NO: 7407 - DNA, 864 bp, Unknown
  Obtained from environmental sample
  misc_feature (1)..(864): n is a, c, g, or t
ttggtcgcggtcatcaaggcggtggacgagtaccaggatttgatcagggtctcggcggccagcgccggcaacgatcacaggctgggcgcgaatgaggcgcctccggcgatcgtgtccatgtttcttggcgaggaactgacaaatatccttgaagccattgatgccggcgtgaattaccgcgacaagaaaaaacgccagatggagatcggcgtgaccgtgctgccgcatttcccgaaggacacgaccgaccgcaaccgcacgtcgcccttcgcgtttaccggcaacaagttcgagttccgcatggtcggctcggcgttttccattgcgggccccaataccatactgaatacggtggtcgcggagatcctgcggcagttcgcggacaagctggaggcttcgaagaatttcaagggcgatctggcggcgcttgtcaaaaaaactttcagcgagcacaagcggattgtttttaacggcaacaactactccgaggaatgggtggcggaagccgcgcggcgcgggctgtcaaatttgaaaaccacggtggccgcgcttcctgtgttcattgcgccgaagagcgtcgccttgtttacaaaacaccatgttttttcagagtcggaactgcattcccgctatgaaatttatatggagaactattgcaagacgctgcacatcgaagcgctcaccatgacagatatggtcaagggcctgatcatcccggcgtgcataacgtatcagaacgagatcgcgcagcttttggaacggaaaaaggcgtgcggggactacgatgtttcgctggatgagcatttgctcgggcgcatcgcgaagctgtccggcagcctgctgaaaaagctgacgccaccttga

SEQ ID NO: 7408 - protein, 287 aa, Unknown
  Obtained from environmental sample
  misc_feature (1)..(287): Xaa is any amino acid
MVAVIKAVDEYQDLIRVSAASAGNDHRLGANEAPPAIVSMFLGEELTNILEAIDAGVNYRDKKKRQMEIGVTVLPHFPKDTTDRNRTSPFAFTGNKFEFRMVGSAFSIAGPNTILNTVVAEILRQFADKLEASKNFKGDLAALVKKTFSEHKRIVFNGNNYSEEWVAEAARRGLSNLKTTVAALPVFIAPKSVALFTKHHVFSESELHSRYEIYMENYCKTLHIEALTMTDMVKGLIIPACITYQNEIAQLLERKKACGDYDVSLDEHLLGRIAKLSGSLLKKLTPP

SEQ ID NO: 7409 - DNA, 909 bp, Unknown
  Obtained from environmental sample
  misc_feature (1)..(909): n is a, c, g, or t
atgtgggagcacgcncttcagaacggcatcntgatggtcgcctcgtccggcaatgcgtcgggcaggctgcaccaataccccgccgcatacgcgggcgtcatggccgtgggctcgaccgacgccggcgacacacggtcgcgcttttccaactggggcggccacatctccgtcgtggcccctggcgaggccgtggtctcgtccgtgggcaacatcacgaacagccacgccgactatgacctgtacagcggcacgtccatggcggcgccccacgtcacgggcctgataggctacatgctgaccttcaaccccgacctgacaccgggccagataaagacgtacatagagcagaacgccgacctcgtcggcggcaagaccaccttcagcgaagagtacggctggggccgcatcaacgtcctgagcaccatccaggccgtcaggggcgatgccggaacgctgcgccccgactactcgtccagcgtgaagataacgctgcccgaacccgaaaacggtctgccggtctatctattcagctgcgacccgtcgggcgagatagccaactacgtcgcgtcctcctacacgggccgatactacgccgcgatagacaccaccaagccgcccgaaacctggacagccgagaacggcgtggcctacttcaacctgctccgccacggccactacgtcgccaaagtgatgctggccggcacactggtgggggcgaccaaggtattccaggtgacgggcggacagggccccgtgacggtgccggtcgggttcggcgagggcgtgacactgctcaccatccagaccatgccgacgcagtccatcaaggccaacgatgcgaccgccgacacggagatcaggtggctcaactccagcggcgggagcagtggggtggctcggccgatctga

SEQ ID NO: 7410 - protein, 302 aa, Unknown
  Obtained from environmental sample
  misc_feature (1)..(302): Xaa is any amino acid
MWEHALQNGIXMVASSGNASGRLHQYPAAYAGVMAVGSTDAGDTRSRFSNWGGHISVVAPGEAVVSSVGNITNSHADYDLYSGTSMAAPHVTGLIGYMLTFNPDLTPGQIKTYIEQNADLVGGKTTFSEEYGWGRINVLSTIQAVRGDAGTLRPDYSSSVKITLPEPENGLPVYLFSCDPSGEIANYVASSYTGRYYAAIDTTKPPETWTAENGVAYFNLLRHGHYVAKVMLAGTLVGATKVFQVTGGQGPVTVPVGFGEGVTLLTIQTMPTQSIKANDATADTEIRWLNSSGGSSGVARPI

SEQ ID NO: 7411 - DNA, 960 bp, Unknown
  Obtained from environmental sample
  misc_feature (1)..(960): n is a, c, g, or t
atgattccgtcgtatatttctcccattacaaatattcccccgggaaagacggtccttgcgttggacgcgggcggaaccaacttaagggcgagccttgtccattttaaagaaaacggcgaagccgtccctcagggaacaaacaagatgccaatgccgggaacttatggccatgtgaacgcgcaacaatattttgaggcaatcgcaaacgttacactacccctgcttaatgacgcgaagatcgaaggcataggttttacattttcctatccaatggaaattacgcaggacgctgacggaatactcttggcgttcagcaaggaagtggacgctcccgatgtaattggaaaagcgataggcaaaggactgcgcgacgctctttctgcaaagggttgtaaatattcaggccccatcgttttgttaaatgatactgtcgctaccctgctctcaggcgttgtctcaatttctccagatggggaagcctcgcgtacaaccgctgactttagcgtaaaaagcggtcccgttatcggatttattttaggaacgggctttaacacggcttacacggaaaccgtcattccaaaaatcggttttaattccccatcttccccgcaaatcgtggtatgcgaaagcggaaatttcaacgtcaaatacagaggcaagcttgacaaagaatatgacggcacgacaaaaaaccccgacggataccttcttgaaaaagcgacggccggagcgtatcttggccctttaacattacacattttaaaacaagcgataaaagataaagttttatgttttagaaagtccgatgaacttttaaatatgccccatcttgaaacaagatttttaaatgagtttacccacgctcccctttcaaatcaaggaccgttaggctccctttttggcgcagatgaaagcgcccgcccttgcctcaatgcaatacattacatcgatagttactga

SEQ ID NO: 7412 - protein, 319 aa, Unknown
  Obtained from environmental sample
  DOMAIN (1)...(154): Hexokinase
  misc_feature (1)..(319): Xaa is any amino acid
MIPSYISPITNIPPGKTVLALDAGGTNLRASLVHFKENGEAVPQGTNKMPMPGTYGHVNAQQYFEAIANVTLPLLNDAKIEGIGFTFSYPMEITQDADGILLAFSKEVDAPDVIGKAIGKGLRDALSAKGCKYSGPIVLLNDTVATLLSGVVSISPDGEASRTTADFSVKSGPVIGFILGTGFNTAYTETVIPKIGFNSPSSPQIVVCESGNFNVKYRGKLDKEYDGTTKNPDGYLLEKATAGAYLGPLTLHILKQAIKDKVLCFRKSDELLNMPHLETRFLNEFTHAPLSNQGPLGSLFGADESARPCLNAIHYIDSY

SEQ ID NO: 7413 - DNA, 951 bp, Unknown
  Obtained from environmental sample
  misc_feature (1)..(951): n is a, c, g, or t
ttgcaccgctattacagccttggcaaacgcgctcttaaactacagaaacttcgccactacgacgtatatgcgcnccttgtccctaccgttaaaaaaaacacaagttggaacgaagccgttgaacttgtaagtggcgcattatctccgttaggtgacgaatacgtctccgtcatgcgcggcgggcttcttggcagatgggccgaccgttacgagaacaaaggaaaacactcaggtgcgttttccgccggaagttttacaggcgacccctatattttgataaactacaaagaagattcaatccgtgatgttttcaccctcgcccatgaaggcggccattcaatgcattcatggtactcagcgcgtaataatccgttcccgcactacaattacacgatattcgaggcggaagttgccagcacttttaacgaagaactgttattccgttatcttgaaaaacgcgcggacaataaggaactgcgtctatacctcgtcaataaacacgccgacgaccttttagccactttgtaccgccaaaccatgttcgcggaatttgaaaaaataacccaccaacttgaagaaggcggcactccgttgaccgtagaacttctccgcggcgagtaccgcaaacttttggaaaaatatttcggagcggaaatggtacttgaagagacaagcgaccttgaaggtttgcgaatcccccacttttacaacgcgttttatgtttacaaatacgcgacgggagtctccgccgccctcgcgttagctgatcgtgtcctgtcaggcggtgaaaaagaaagaaaagactatttcactttccttaaatccggcggctcacgcttcccaattgaatcattaaaagtcgccggagtagacatgagcagccccgaacccataaacgccgcttgtcgtgtttttggtaaattagtggatgaattggaaaagatgttgtga

SEQ ID NO: 7414 - protein, 316 aa, Unknown
  Obtained from environmental sample
  DOMAIN (1)...(304): Peptidase family M3
  misc_feature (1)..(316): Xaa is any amino acid
MHRYYSLGKRALKLQKLRHYDVYAXLVPTVKKNTSWNEAVELVSGALSPLGDEYVSVMRGGLLGRWADRYENKGKHSGAFSAGSFTGDPYILINYKEDSIRDVFTLAHEGGHSMHSWYSARNNPFPHYNYTIFEAEVASTFNEELLFRYLEKRADNKELRLYLVNKHADDLLATLYRQTMFAEFEKITHQLEEGGTPLTVELLRGEYRKLLEKYFGAEMVLEETSDLEGLRIPHFYNAFYVYKYATGVSAALALADRVLSGGEKERKDYFTFLKSGGSRFPIESLKVAGVDMSSPEPINAACRVFGKLVDELEKML

SEQ ID NO: 7415 - DNA, 954 bp, Unknown
  Obtained from environmental sample
  misc_feature (1)..(954): n is a, c, g, or t
atggcaggaccgggcggtattttcagtttcggaaaatcgaaagcgcagttgttgacggggaaaaacggacaaatcactttcaacgatgtagcaggcttggccgaagccaaagtggaagtgatggagattgtcgatttcttgaaaaacccgaagaaatataccgatttgggtggaaaaattccgaagggcgcattgttggtaggtcctccgggaacggggaaaactctgttggctaaggcggttgccggtgaggcgaaagtgccgtttttctcgatttcgggttcggattttgtagaaatgtttgttggggtaggggcttcacgcgttcgggatttgtttcgaaatgcgaaagagaaagcaccctgcattatattcattgatgagattgatgcgattggacgcgcgcgcgcgaaaaacacgtttacgggcggtaatgatgagcgcgagagcacgcttaaccaacttttgacggaaatggacggtttcggcacaaacagcggcgttatcattttggcagcaaccaaccgtgccgatattttggacagagccttgatgcgtgcaggacgtttcgaccgtgaaattcacgttgaactgcccgaactcgaagaacgcaaagctatcttcaacgtgcatttgagaaacatcaagaagtcgccggaattggacattgacttcttggccaaacaaacacccggtttttcgggtgcggacattgccaacgtgtgtaacgagtcggccttgattgcagcccgaaacggcaaaaaagaagtggacaagcaggattttttggatgccatcgaccgcattgtgggcggtttggaacgccgaagcaaattcatttcgcccgaagaaaagaagacgattgcctatcacgaggcgggacacgccaccgtaagttggcttttgaaatatgcgcatccgttgataagctcggccgatctgatccttgtttaa

SEQ ID NO: 7416 - protein, 317 aa, Unknown
  Obtained from environmental sample
  DOMAIN (60)...(192): ATPase family associated with various cellular activities (AAA)
  misc_feature (1)..(317): Xaa is any amino acid
MAGPGGIFSFGKSKAQLLTGKNGQITFNDVAGLAEAKVEVMEIVDFLKNPKKYTDLGGKIPKGALLVGPPGTGKTLLAKAVAGEAKVPFFSISGSDFVEMFVGVGASRVRDLFRNAKEKAPCIIFIDEIDAIGRARAKNTFTGGNDERESTLNQLLTEMDGFGTNSGVIILAATNRADILDRALMRAGRFDREIHVELPELEERKAIFNVHLRNIKKSPELDIDFLAKQTPGFSGADIANVCNESALIAARNGKKEVDKQDFLDAIDRIVGGLERRSKFISPEEKKTIAYHEAGHATVSWLLKYAHPLISSADLILV

SEQ ID NO: 7417 - DNA, 600 bp, Unknown
  Obtained from environmental sample
  misc_feature (1)..(600): n is a, c, g, or t
atgcgcatatttcaaaagccaacttacggtggcgtgtcccgcctcgtgataggcaatcgtcttcttttcttcgggcgaaatgaatttgcttcggcgttccaaaccgcccacaatgcggtcgatggcatccaaaaaatcctgcttgtccacttcttttttgccgtttcgggctgcaatcaaggccgactcgttacacacgttggcaatgtccgcacccgaaaaaccgggtgtttgtttggccaagaagtcaatgtccaattccggcgacttcttgatgtttctcaaatgcacgttgaagatagctttgcgttcttcgagttcgggcagttcaacgtgaatttcacggtcgaaacgtcctgcacgcatcaaggctctgtccaaaatatcggcacggttggttgctgccaaaatgataacgccgctgtttgtgccgaaaccgtccatttccgtcaaaagttggttaagcgtgctctcgcgctcatcattaccgcccgtaaacgtgtttttcgcgcgcgcgcgtccaatcgcatcaatctcatcaatgaatataatgcagggtgctttctctttcgcatttcgaaacaaatcccgaacgcgtga

SEQ ID NO: 7418 - protein, 199 aa, Unknown
  Obtained from environmental sample
  misc_feature (1)..(199): Xaa is any amino acid
MRIFQKPTYGGVSRLVIGNRLLFFGRNEFASAFQTAHNAVDGIQKILLVHFFFAVSGCNQGRLVTHVGNVRTRKTGCLFGQEVNVQFRRLLDVSQMHVEDSFAFFEFGQFNVNFTVETSCTHQGSVQNIGTVGCCQNDNAAVCAETVHFRQKLVKRALALIITARKRVFRARASNRINLINEYNAGCFLFRISKQIPNA

SEQ ID NO: 7419 - DNA, 924 bp, Unknown
  Obtained from environmental sample
  misc_feature (1)..(924): n is a, c, g, or t
ttggaggcttgttttatgaacggggttagggacataaaacaggatatacagcgcgaggtgatagcgacagacgggaagaccgtacgggggatggcgactaaaagccgtttcaaggcagggacggaagtaaaatcaatacatctggtaagcgcgtgggcgacggagaatcaactggtgtttgcccaggtacagacggaggagaaaagtaatgaaataacggctataccggcacttctggaacagatagcgatagcgggctgcatcataacaattgacgctatgggctgccagtatgaaatagcggataaaattgtgggaaaagaggcggattacgtgttttcgctcaaagggaaccaggaaaccctgcatgacgcggtgaaagaatactgggatatgctggacttcaacaaaccggcggcacaggccaaatatatcaggttccgtagcgtatcaacgtatgacgagaaacacggaaggaaagagacccgcgattacgcggtaagtgacgatgtgcagtggctgcgcaagcagtttcccaagtggaagaccgtcaattcgataggggtggtggaatccaccagggatacgggagaggatgccaagaccgagcggcggtattttgtttccagcctcggcgccgatgaaaaacagttcgcccgcgctgtccgggcgcactgggggatagagaaccggctgcattatatgcttgacgtgatatatcgtgaggacgcctgccgggtcaggaaggactacagccctcggacattggcgttgataagaaaaatagcgcttaccatagcaaggtctgacaaggaatcgaaaaccagtgtcaggggccgcgtccaacaaatggcctggtcgcaggattatctggaaagtctgttgttccattcggatttcgcttcggtacaggaagtttcatag

SEQ ID NO: 7420 - protein, 307 aa, Unknown
  Obtained from environmental sample
  DOMAIN (20)...(266): Transposase DDE domain
  misc_feature (1)..(307): Xaa is any amino acid
MEACFMNGVRDIKQDIQREVIATDGKTVRGMATKSRFKAGTEVKSIHLVSAWATENQLVFAQVQTEEKSNEITAIPALLEQIAIAGCIITIDAMGCQYEIADKIVGKEADYVFSLKGNQETLHDAVKEYWDMLDFNKPAAQAKYIRFRSVSTYDEKHGRKETRDYAVSDDVQWLRKQFPKWKTVNSIGVVESTRDTGEDAKTERRYFVSSLGADEKQFARAVRAHWGIENRLHYMLDVIYREDACRVRKDYSPRTLALIRKIALTIARSDKESKTSVRGRVQQMAWSQDYLESLLFHSDFASVQEVS

SEQ ID NO: 7421 - DNA, 333 bp, Unknown
  Obtained from environmental sample
  misc_feature (1)..(333): n is a, c, g, or t
ttgtatgcttttagtcaggtaattattttgtcaaacgcaaaatcaaatataaatgttaagatagatacagagatcaaagaacaagccgtgcaacttttagggcgaatgggaatagaccagacaacggcaatagatatgttttttcggcaaataatagcagaacgccgcttgccattccagccggtagtaaaccttacactggacgagcagatcgtcgcagcaaccctgaatagtgatcataaaaagatcgaactaataactgattcggacggaaatatacttgtagacaaagaaagaaaccctgaaatttatgattgggcggcaaatggttaa

SEQ ID NO: 7422 - protein, 110 aa, Unknown
  Obtained from environmental sample
  DOMAIN (14)...(98): RelB antitoxin
  misc_feature (1)..(110): Xaa is any amino acid
MYAFSQVIILSNAKSNINVKIDTEIKEQAVQLLGRMGIDQTTAIDMFFRQIIAERRLPFQPVVNLTLDEQIVAATLNSDHKKIELITDSDGNILVDKERNPEIYDWAANG

SEQ ID NO: 7423 - DNA, 735 bp, Unknown
  Obtained from environmental sample
  misc_feature (1)..(735): n is a, c, g, or t
gtgcatcaggccatgcgcgtaacaggcggcggcgatccctcaagcggccttcaggacaccataccgggcaaactgccacaaatcaaaattgcccgtgaggcggcggctggttattcgtcctacggcaaccagattggcctcgccacagggcaagtggcagagttttaccacccaggctttatcgcaaaacgaatggaactgggtgcggtaatcggcgctgtaccggaggcctgggtacgcagagaggaacccgtcgcaggcgatctgctgattcttgtgggaggcagaacaggcagggacggcattgggggcgcgactggttcctccaaggttcacaccggagcgtccgtagaaagcgccggggcggaagtgcagaagggaaacgccgtagaagaacgaaaactccagcgccttttccgcaaggccgaggtaagcagacttattaagcgttgcaacgacttcggcgccggcggtgtttccgtggcggttggcgagcttgccaggggccttgaagtcaatctggacgcagtgccaaaaaaatacgccggtttggacggcacggagctggcaatttcggaatcccaggaaagaatggctgtactttgctcagcctgcgatgcggaggcctttataaaggcggcggcagcggaaaacctcgaagcggtaatcatagccaaagtaagcgatgaaaacgaaagccgcctccgcatgaactggcgcggcaaaccatcgtag

SEQ ID NO: 7424 - protein, 244 aa, Unknown
  Obtained from environmental sample
  DOMAIN (85)...(238): AIR synthase related protein, C-terminal domain
  misc_feature (1)..(244): Xaa is any amino acid
MHQAMRVTGGGDPSSGLQDTIPGKLPQIKIAREAAAGYSSYGNQIGLATGQVAEFYHPGFIAKRMELGAVIGAVPEAWVRREEPVAGDLLILVGGRTGRDGIGGATGSSKVHTGASVESAGAEVQKGNAVEERKLQRLFRKAEVSRLIKRCNDFGAGGVSVAVGELARGLEVNLDAVPKKYAGLDGTELAISESQERMAVLCSACDAEAFIKAAAAENLEAVIIAKVSDENESRLRMNWRGKPS

SEQ ID NO: 7425 - DNA, 576 bp, Unknown
  Obtained from environmental sample
  misc_feature (1)..(576): n is a, c, g, or t
gtgtcgctgagagatggcacaaaggcaaagttgaaaataaacagcacctacaaaaatctgctgaaaacaaaaaacgtgagcaacgaagaaaaaacctggataaggggcaagttgaattcggcaagcgtttttatgcggagcatagagagccgcaaagagaccatgcttttagttatgaatgccatagtccgcaggcaatacgatttcttcgctcgcggtcagcagcatttgagacctatgattttgcaagatatagcaaacgaaataaacagggatatcagcactgtaaatagggttacaaacggaaagtatgttcaaaccacttacggagtttttgagcttaaaaaattcttctctgcaggagttgcccaagatgacggcaccgaagttagcaatgtgaaaataaaagacagcatcaaggagcttataaacaacgaaaacaagaaaagacccctctccgaccaagaaatagcggagcttttggaaaagcgcggtttgagggtggcgcggagaacggttaataagtatcgcgaagcgatgggtattttgccggttaaggtgcggagggggtcgtaa

SEQ ID NO: 7426 - protein, 191 aa, Unknown
  Obtained from environmental sample
  DOMAIN (31)...(190): Sigma-54, DNA binding domain
  misc_feature (1)..(191): Xaa is any amino acid
MSLRDGTKAKLKINSTYKNLLKTKNVSNEEKTWIRGKLNSASVFMRSIESRKETMLLVMNAIVRRQYDFFARGQQHLRPMILQDIANEINRDISTVNRVTNGKYVQTTYGVFELKKFFSAGVAQDDGTEVSNVKIKDSIKELINNENKKRPLSDQEIAELLEKRGLRVARRTVNKYREAMGILPVKVRRGS

SEQ ID NO: 7427 - DNA, 975 bp, Unknown
  Obtained from environmental sample
  misc_feature (1)..(975): n is a, c, g, or t
ttgaaagttcgaacattaataaatttaggaatgtatatgaaaaaattgttttttataggttttacgttgctttgcctgatttcgtgcgaaaaacaacctgaagacaacggcattgtgggaattacaatggacaactacccgagcgttgatggttcgacttcgacagacccgcttaattacataattgcaagcaagttactgtatgtgaagtatgaatggtttagcttcggtggaggttatcaagttaggtttaaagattgggatgtacttccacaaagttttacaagcaaatttagatgttctcaaactcacggcgctatcaccaacttgattgactataaacaaaatgtgccagaaataattattgttgcacgaaagatgtcggcagacgaaaaaagttatgcacaagaaaaaggcgtatctttaattgagacgccgattgcacttgatgcgcttgactttatagttaattcgaataacaaagttaattctcttactgttaagcaaattcaagatatttacttggggaacatcacaaattggaaagaagtgggtggttcggatgaggttataattccgtttatcagaaatgcaaattcgggcagtcaggaaatgatgaacgaaattgtaatgggtaacgctggtatgcctgattgggacgtgtcttatgctgacgaattaacaatttattctatgtttatggtttatgcggaattacggcaacatccaaacgcaatttgttttacaccacattactataaggaatatatgattcgcgacacttggggtacgcccgattttctaaaaacgcttgctgttaataacattatgcctgacaaaaattcaataaaacagcaaacatatccttttgttgcgcctgtttatgtttctattcgtagcagcttggacaaaaattctatggcatacaaactatatcaatggttacaaacaagttcggggctcggccgaatctga

SEQ ID NO: 7428 - protein, 324 aa, Unknown
  Obtained from environmental sample
  misc_feature (1)..(324): Xaa is any amino acid
MKVRTLINLGMYMKKLFFIGFTLLCLISCEKQPEDNGIVGITMDNYPSVDGSTSTDPLNYIIASKLLYVKYEWFSFGGGYQVRFKDWDVLPQSFTSKFRCSQTHGAITNLIDYKQNVPEIIIVARKMSADEKSYAQEKGVSLIETPIALDALDFIVNSNNKVNSLTVKQIQDIYLGNITNWKEVGGSDEVIIPFIRNANSGSQEMMNEIVMGNAGMPDWDVSYADELTIYSMFMVYAELRQHPNAICFTPHYYKEYMIRDTWGTPDFLKTLAVNNIMPDKNSIKQQTYPFVAPVYVSIRSSLDKNSMAYKLYQWLQTSSGLGRI

SEQ ID NO: 7429 - DNA, 657 bp, Unknown
  Obtained from environmental sample
  misc_feature (1)..(657): n is a, c, g, or t
ttggcgccgcatcttcttggcgcgattgcggtggcggcatattcttacatgtcgctggtacctttgatccagccgccgattatgaaactaatgacaactcaaaaagaacgcgaagtggtcatggatcagatgcgtaatgttactaaatttgaaagattagctttcccgatcgtaactactattgccatcagtttacttttgccgccgatagcttctttgatgggtatgctgatgctgggcaaccttttccgcgaatcaggcgttacccaacgtttgtccgacaccgcgcaaaactcgcttattaatatagtaactattttcttggcgacaggcactggtcttactatgtcggcggaaaaattccttaatattaaaacaattgagattattattttaggattgattgctttcgcgggcggtaccgctgccggggtgttgcttggcaaagtgcagtactggatgagcggcggcaaggttaatccgctgattggttccgccggcgtatcggctgtgccgatggcggcgcgggtcagccaaattgtcgggcagaaagccaatccggccaatttcctgctgatgcacgcgatggggccgaacgtagccggggttatcggtactgcggttgcggccggaacgatgttggccatgctaaaatag

SEQ ID NO: 7430 - protein, 218 aa, Unknown
  Obtained from environmental sample
  DOMAIN (1)...(218): Na+-transporting methylmalonyl-CoA/oxaloacetate decarboxylase, beta subunit
  misc_feature (1)..(218): Xaa is any amino acid
MAPHLLGAIAVAAYSYMSLVPLIQPPIMKLMTTQKEREVVMDQMRNVTKFERLAFPIVTTIAISLLLPPIASLMGMLMLGNLFRESGVTQRLSDTAQNSLINIVTIFLATGTGLTMSAEKFLNIKTIEIIILGLIAFAGGTAAGVLLGKVQYWMSGGKVNPLIGSAGVSAVPMAARVSQIVGQKANPANFLLMHAMGPNVAGVIGTAVAAGTMLAMLK

SEQ ID NO: 7431 - DNA, 522 bp, Unknown
  Obtained from environmental sample
  misc_feature (1)..(522): n is a, c, g, or t
atgggttccggcggtatgattgtcatggacgaagacgactgcatggttgacgtgaccaagttctaccttgagttcacggttgacgagtcgtgcggcaagtgctccccgtgccgtgtgggagggcgtcagctcttcaaccacttggagaagatcacgaacggagatggcacggaggaggacatccgcaagatgcgcctcataggcaaggccatgcagaaagcgtcgctttgcgctcttggccagaccgcgccgaatcccgtcgtttccacgctccagtatttcgagagcgagtacatggcccacataaaggagcgcaggtgtccggcgggcaagtgcaagaagatgttgcgctactctatcgtggccgatatgtgcaagggttgcggcttgtgcgcgaagaagtgtccggcgggctgtatcaagggcgagataaagaagccgtacgtgatagactcagcggcgtgcataaagtgcggcgcgtgcgaggaggcgtgtaaattcaaggcagtcgtcaagaactaa

SEQ ID NO: 7432 - protein, 173 aa, Unknown
  Obtained from environmental sample
  DOMAIN (148)...(171): 4Fe-4S binding domain
  misc_feature (1)..(173): Xaa is any amino acid
MGSGGMIVMDEDDCMVDVTKFYLEFTVDESCGKCSPCRVGGRQLFNHLEKITNGDGTEEDIRKMRLIGKAMQKASLCALGQTAPNPVVSTLQYFESEYMAHIKERRCPAGKCKKMLRYSIVADMCKGCGLCAKKCPAGCIKGEIKKPYVIDSAACIKCGACEEACKFKAVVKN

SEQ ID NO: 7433 - DNA, 660 bp, Unknown
  Obtained from environmental sample
  misc_feature (1)..(660): n is a, c, g, or t
atgaaaaagattatctttacggtgatttttattacaatggttgttacaggagcgttttgtcagaatggcgttattagggaattaaccggcgaggttgaattaaaacgttccggttcctccgcttttgttccggcttccgcgggagacgcagtttcttccaacacgattatttcaacaggttttagaagcaccgccatcatcgtgattggcagttctgttattacagtgcgtccgctgacgcgccttacccttgctgaaatacaatccatggaaaataccgaaaacgtcaatgttaatttgcagtcgggaagggtaagagtcgaagtaaagcctccggcgggaacaaaaactaaccttaacgtacaaagccccagcgcgacagcttccgttcgcggaacaacttttgaaatggatacccataatctgatagggattgaaggtaaaattttattaagcggcgtatccggcgcgggcgtaatggtaacaggtggaaattcaagttccgtaaatgttgacggaaccgtttctaaccctgcaattaacgctgaacagtcagttcgtgtacaaccgcctgtcggaacgggtatcgaaaccccattaacagttcaatcaaataaaagcgatttaaatattatattggattatacaaaaaataattaa

SEQ ID NO: 7434 - protein, 219 aa, Unknown
  Obtained from environmental sample
  SIGNAL (1)...(22)
  misc_feature (1)..(219): Xaa is any amino acid
MKKIIFTVIFITMVVTGAFCQNGVIRELTGEVELKRSGSSAFVPASAGDAVSSNTIISTGFRSTAIIVIGSSVITVRPLTRLTLAEIQSMENTENVNVNLQSGRVRVEVKPPAGTKTNLNVQSPSATASVRGTTFEMDTHNLIGIEGKILLSGVSGAGVMVTGGNSSSVNVDGTVSNPAINAEQSVRVQPPVGTGIETPLTVQSNKSDLNIILDYTKNN

SEQ ID NO: 7435 - DNA, 840 bp, Unknown
  Obtained from environmental sample
  misc_feature (1)..(840): n is a, c, g, or t
gtggcgctggcggcggaggctaagagcgggtatgagtttgtcggctggtctggggctgagacgtacgcgaactccgcgcctacggtcactatggacgccaataaaccgatggtcgcgatattcaaacctattgacaacagcgctacgcgcacgctgatagccgccgcgtttcctgagaacggcggcgacatagcccgcaatcccgacaagcccgcctacagcgccggggaatctgtgacggtgacggcagccgcgagattcggttacacctttgaggggtggtctggcgcgggggcgtcggtgtctaagtcggcctccgttaccgtggagatgtctgaaagcaaaacgcttgtcgccgtgttcgcgccagtcctctatacaattacagctagcgtttcgccgcgtgacggcggggcggtgtatgtcaacaccaccgcgttggacggttcggcgcgttacaacgccgggtcggacataatattttgggcgaaaccagcggacggttactctttttcgggctggtccgggccggcgtccggcattacggacaatccggccgtaataaacgtgtctgaggacaatatgacgattaccgcgaacttccggcgcggcagcacgggcggggaaattgtcgagccgcctccgcagacagcgacgcttacgctcgttacctcggagggcgggagcgtgacgctcagcccgaacgatcccaacggggcgggttacagcatagggacgaacgtngaagccgccgccgttccggacgcgggatatgcgtttgcgggctggtcggggggctctgattctaaagacccgggttgtgactatttttatggatga

SEQ ID NO: 7436 - protein, 279 aa, Unknown
  Obtained from environmental sample
  misc_feature (1)..(279): Xaa is any amino acid
MALAAEAKSGYEFVGWSGAETYANSAPTVTMDANKPMVAIFKPIDNSATRTLIAAAFPENGGDIARNPDKPAYSAGESVTVTAAARFGYTFEGWSGAGASVSKSASVTVEMSESKTLVAVFAPVLYTITASVSPRDGGAVYVNTTALDGSARYNAGSDIIFWAKPADGYSFSGWSGPASGITDNPAVINVSEDNMTITANFRRGSTGGEIVEPPPQTATLTLVTSEGGSVTLSPNDPNGAGYSIGTNVEAAAVPDAGYAFAGWSGGSDSKDPGCDYFYG

SEQ ID NO: 7437 - DNA, 357 bp, Unknown
  Obtained from environmental sample
  misc_feature (1)..(357): n is a, c, g, or t
atgatttcgggaaggtttttcacacaagatgttttagagaacgccattcaatgcaaactctgtccaagacgttgcgtcatgcctgatggcaaagcgggtagctgcaaggtcaggtttaaccgcggtgggaaaggcgagatcccctactgcggatacatcacagcccttgcccttgaccccatcgaaaaaaagccgctttaccacttccgccccggcaccgagatactttcgctgggttttgccgggtgtaacctccactgtccgttttgccaaaactggcgaatttcccagagcgcggatgctcccggcaaggtttattcaccggcagagatcatgacgcggcctcggccgatctga

SEQ ID NO: 7438 - protein, 118 aa, Unknown
  Obtained from environmental sample
  misc_feature (1)..(118): Xaa is any amino acid
MISGRFFTQDVLENAIQCKLCPRRCVMPDGKAGSCKVRFNRGGKGEIPYCGYITALALDPIEKKPLYHFRPGTEILSLGFAGCNLHCPFCQNWRISQSADAPGKVYSPAEIMTRPRPI

SEQ ID NO: 7439 - DNA, 366 bp, Unknown
  Obtained from environmental sample
  misc_feature (1)..(366): n is a, c, g, or t
ttgatggccggcggccgagaagggttattgcttttggataactggcttgaattgcgtattcccattgttcaaggaattttagcgtgggattttttctttgacgcggccggcgttgagactacgcaaggttattattttggaagggatggaaacggggaatccaattttacccttgataatatgcgcttcagcttcggcggaggcttaaggtttaccataccgcagtttcctttccgcctggggctggcaaaacgtttcaggtttatagacggggcgttgaactgggagccgggagaattgttcggggatccaaataatcccaaaaagggactcgatcttgtaatatcgtttgtgttatcatattag

SEQ ID NO: 7440 - protein, 121 aa, Unknown
  Obtained from environmental sample
  misc_feature (1)..(121): Xaa is any amino acid
MMAGGREGLLLLDNWLELRIPIVQGILAWDFFFDAAGVETTQGYYFGRDGNGESNFTLDNMRFSFGGGLRFTIPQFPFRLGLAKRFRFIDGALNWEPGELFGDPNNPKKGLDLVISFVLSY

SEQ ID NO: 7441 - DNA, 486 bp, Unknown
  Obtained from environmental sample
  misc_feature (1)..(486): n is a, c, g, or t
atgaaagaacataacgctaatctttgtctttcgcttttagaaaaatcttttgaaagcaatgtaaatataagaaaaatgcttgtgaacgagctgacgccagatggtatttataacacgtatcccttctttttctatcactttcctgctcaagactcaaagaaatactatgagcagggtctggctcatgcaaaattaaatttgcacaatgcggcaataagatacttttcacaatcaataaaactttcaccaaatagagcacctccttatttctaccgcggattttcatatttattaataaaaaaatacgacaaagcaatagatgattttacacaagcaataaactttaatacggaagattcagatgcacttacgcttcgtagttttgcctataaggttactgatgattttgataaggccataatggatctcgctaaatcgctggaattaaatccaagtgacagaatgtcgcttgctttaaaggattga

SEQ ID NO: 7442 - protein, 161 aa, Unknown
  Obtained from environmental sample
  DOMAIN (52)...(85): Tetratricopeptide repeat
  misc_feature (1)..(161): Xaa is any amino acid
MKEHNANLCLSLLEKSFESNVNIRKMLVNELTPDGIYNTYPFFFYHFPAQDSKKYYEQGLAHAKLNLHNAAIRYFSQSIKLSPNRAPPYFYRGFSYLLIKKYDKAIDDFTQAINFNTEDSDALTLRSFAYKVTDDFDKAIMDLAKSLELNPSDRMSLALKD

SEQ ID NO: 7443 - DNA, 489 bp, Unknown
  Obtained from environmental sample
  misc_feature (1)..(489): n is a, c, g, or t
gtgatgatcgctaaaatcgaagacgaagggcatattcccgaccttgcgccgctgattaagatttcgcgggcgttgggggtcaggcttggcacgctgcttgacgatcacgagcagcttgggccggttattacccgcgcgggcgaagaggccgcctcggagcgcttcaagaccgggcttccggctgacgccggcgcaaagaccgagcacaagggacttagtttcaaggcgctggccgcggacaaaaacggccgccacatggagccgttcatcgttgacattgagcccaacgccgtgcaggaaaaatccgcgcacgaaggcgaggaatttatccacgttctcacgggaaaccttaaactggaatacggcacaactgcagaaacgctcaaacccggggattcggtgtattacgattctatcgtgccccaccgtgtaatctccgccgattcacagcccgtaaagatactggccgttatttatactccggtataa

SEQ ID NO: 7444 - protein, 162 aa, Unknown
  Obtained from environmental sample
  DOMAIN (89)...(158): Cupin domain
  misc_feature (1)..(162): Xaa is any amino acid
MMIAKIEDEGHIPDLAPLIKISRALGVRLGTLLDDHEQLGPVITRAGEEAASERFKTGLPADAGAKTEHKGLSFKALAADKNGRHMEPFIVDIEPNAVQEKSAHEGEEFIHVLTGNLKLEYGTTAETLKPGDSVYYDSIVPHRVISADSQPVKILAVIYTPV

SEQ ID NO: 7445 - DNA, 492 bp, Unknown
  Obtained from environmental sample
  misc_feature (1)..(492): n is a, c, g, or t
gtgcttcagaatgaaatttcaaatacagctttgataatggaaaaggcaaaaagctccggtcttaaagtcgcgttaaatccgtctccctggaatgaagaggccggaaaattaccgatagatcttgcggatattctttttattaatgaaattgaaggagcgggattggcgggccttgaaaacacaatccctgtaacggagattttggatcagctttgtacatgttatccaaaaacagagattattttaacagccgggtcacggggcgcttattacggtttcggaaaaatcagggctaaaggagaaatattggatattcctgtagtggatacaaccggagccggagattgtttttcaggatattatcttgccgcgcgggaacgcgggttatcagttcaggcttcattggatatcgccagcaaagcggcggctattaccgtctcaaaaaaaggggcaatggagtctatacctttcaaagatgaagtgtttgtttaa

SEQ ID NO: 7446 - protein, 163 aa, Unknown
  Obtained from environmental sample
  misc_feature (1)..(163): Xaa is any amino acid
MLQNEISNTALIMEKAKSSGLKVALNPSPWNEEAGKLPIDLADILFINEIEGAGLAGLENTIPVTEILDQLCTCYPKTEIILTAGSRGAYYGFGKIRAKGEILDIPVVDTTGAGDCFSGYYLAARERGLSVQASLDIASKAAAITVSKKGAMESIPFKDEVFV

SEQ ID NO: 7447 - DNA, 420 bp, Unknown
  Obtained from environmental sample
  misc_feature (1)..(420): n is a, c, g, or t
gtgcatgacgaaaaaggctggcttcattcaggcgaccttggtgtgaaggacgataacggcttcttcaaagtcaccggcgncatcaaagacatgatcatccgcggcggcgaaaacgtgtaccccaaagaaatcgaagacttcttgtacaccatgcccggaatcaaagacgtgcaggtggtaggcatcaccagcaaaaaatacggcgaggaagtgggggcctttgtcatccttcatcccggcgttaccatgaacgaggaagatgtccgcgatttctgccggggtcagataagtcgcttcaagatccccaaatacgtgttctttgtcagcaacttcccgctgacttcatcaggcaaaattcagaaatacctgctgagggaacaaggcgtaaaaaaagtcgaggaacttggaatagctacttaa

SEQ ID NO: 7448 - protein, 139 aa, Unknown
  Obtained from environmental sample
  misc_feature (1)..(139): Xaa is any amino acid
MHDEKGWLHSGDLGVKDDNGFFKVTGXIKDMIIRGGENVYPKEIEDFLYTMPGIKDVQVVGITSKKYGEEVGAFVILHPGVTMNEEDVRDFCRGQISRFKIPKYVFFVSNFPLTSSGKIQKYLLREQGVKKVEELGIAT

SEQ ID NO: 7449 - DNA, 603 bp, Unknown
  Obtained from environmental sample
  misc_feature (1)..(603): n is a, c, g, or t
atggagatttacgcggtgaaggagtttgagagagggatgccggaggatcatgatgaccagccgccggcgaagatcaaggttatcggggtcggcggcggcgggtgtaacgcagtgaatcggatgatagacagcagtctgtcaggcgtcgagtttatcgccgttaataccgataaacaggatcttttgaaaaaaagcaaggccgagaccaaactgcaaattggcgccaaaattaccggcggaaggggagccggcagcaaaccaaccatcggagaggaagcggccaaagaagatcaggaggagatcggcgatgtctcgcgcggcgcggacatggtgtttgtcaccgccggcatgggcggcggcaccggcaccggagccgctcccgtaatcgccaagatcgccagagatcacgagtcgctggttgtcggggtggttacaaagcccttcgagttcgagggcgaggcgaaaatgcaaaaagccgaagatgggatcaaaaaactgcgcgagtatgttgacaccttgataataattccgaatgagaacctcttcaaaatggtgacagcaaaacgagttcgctgcaggcttatgctcctcggccgaatctga

SEQ ID NO: 7450 - protein, 200 aa, Unknown
  Obtained from environmental sample
  DOMAIN (23)...(198): Tubulin/FtsZ family, GTPase domain
  misc_feature (1)..(200): Xaa is any amino acid
MEIYAVKEFERGMPEDHDDQPPAKIKVIGVGGGGCNAVNRMIDSSLSGVEFIAVNTDKQDLLKKSKAETKLQIGAKITGGRGAGSKPTIGEEAAKEDQEEIGDVSRGADMVFVTAGMGGGTGTGAAPVIAKIARDHESLVVGVVTKPFEFEGEAKMQKAEDGIKKLREYVDTLIIIPNENLFKMVTAKRVRCRLMLLGRI

SEQ ID NO: 7451 - DNA, 759 bp, Unknown
  Obtained from environmental sample
  misc_feature (1)..(759): n is a, c, g, or t
ttgcaatatatccgcgatgaaggtaaacaaagacacatgggagcgcgactcatggctgttgtcgccgaaggtcagggcgggcgcatctatctttcgccggatgaaacacaggcaaaagtagcggatgtctctaaaccgaatgaatatcctgatggagcattgtttggaaaagttgcagttaatgtccctttatacggttttaaaaacttctccgaccttttcactccccgccagcttaccgctttggtaacatttagcgatctggtaggcgatgcgattacgcaaatagaaaaggatgcaaaagagtcaacgaattacactaatgaaacgaataacgcaaatgaacaaaaattagatgatgatggtaccggcgcaagagcttatgctgagacagtgggggtttatttaacctgtgctgttgataaactactagatagaaactgttcattttcaagttggcaaaatatcggtgacaaaatacgcggagtctttgcaagacaagcaattcctatggtttgggattatgctgaatgtaatttattctcagattcatcaggtagttttgataattattttaaattattattaaaatgtatccagaatcttccagcaataaaaaaagcaaaagtaaaccagaatgatgcaacaaaaatatcctccgaaagtccaatcgtgatttccactgatccgccttattacgacaatataggatatgccgatttgtcagatttcttttatatttggctccgccgttcttga

SEQ ID NO: 7452 - protein, 252 aa, Unknown
  Obtained from environmental sample
  misc_feature (1)..(252): Xaa is any amino acid
MQYIRDEGKQRHMGARLMAVVAEGQGGRIYLSPDETQAKVADVSKPNEYPDGALFGKVAVNVPLYGFKNFSDLFTPRQLTALVTFSDLVGDAITQIEKDAKESTNYTNETNNANEQKLDDDGTGARAYAETVGVYLTCAVDKLLDRNCSFSSWQNIGDKIRGVFARQAIPMVWDYAECNLFSDSSGSFDNYFKLLLKCIQNLPAIKKAKVNQNDATKISSESPIVISTDPPYYDNIGYADLSDFFYIWLRRS

SEQ ID NO: 7453 - DNA, 522 bp, Unknown
  Obtained from environmental sample
  misc_feature (1)..(522): n is a, c, g, or t
ttgtcggtaatttttgaaacagatgacaatacaatgcttattaattctttgcatatcagcgacggacttttgcgaattattgcatttgtagttatttcaatggaaaagaaaataaagtatcttgccgcaaatgatggtgctttattattaactagtagcggcaaagcattagttgttagtaatgatatccttaagaacggtatggttcttttggatgaaatagaagatggaataaatccgtacatgactgagcagatagtatctttgctgcgtgagattaatgaaaaacaaaaaaggcaggtaattattactactcatagtccggttatattaaatgactttaatcaggaagaaattatcttcttgtggaaagataaaaacggttctgcccattcaagaaaattttttgatactgaagaaatgaaatcacttctggaagctctcaacccaggtgaaatttggataaatttagaaaaggaagacattttagaaagactttcctttaaggaagaagggaagtaa

SEQ ID NO: 7454 - protein, 173 aa, Unknown
  Obtained from environmental sample
  misc_feature (1)..(173): Xaa is any amino acid
MSVIFETDDNTMLINSLHISDGLLRIIAFVVISMEKKIKYLAANDGALLLTSSGKALVVSNDILKNGMVLLDEIEDGINPYMTEQIVSLLREINEKQKRQVIITTHSPVILNDFNQEEIIFLWKDKNGSAHSRKFFDTEEMKSLLEALNPGEIWINLEKEDILERLSFKEEGK

SEQ ID NO: 7455 - DNA, 939 bp, Unknown
  Obtained from environmental sample
  misc_feature (1)..(939): n is a, c, g, or t
atgcccttcggacggcggagtagcggtcgcgcagcttttgctttagttcggtcgcggagttcacgtctaaccatatacattacgccaaggggtcaaatattatattctaatatctgtaaggtattgataaaaatatcaacgaacatcggggtattgatgcctaatccggggcgaaaagaacatttccttgaccgaatcgcgacctctttcggcgcctccgcccgcgaggctgtggagcttgtggggtctatattcatcttttacctgaagatgcttcaggcgctgccctcctcgctcatgcggccgcacctgctcacggagcagatgatgatcttgggggtgcagtcgatcccaatcgtgctactcacctcaatcttcgtgggggcggtgagcgcttggcaggttcagtacatcttcggcgacgcggtgccgctgacgtacctcggggcgggcgtgggcaaggcggtcttcacggagctcgggccggttctgaccgcccttgtgatcaccgggcgcataggcgcgaagctggcggcggagttgggcaccatgaaggtcaccgagcagatcgacgccatggtctgcctctcgctcaacccgtatacctaccttcttaccccgcgtttggcggcctcctgcgtgatggtgcccatgctgacggtcttcgccgtggccttggccatcgtcagcgcccaggtgatagccgagacgttcctcggcttgagcttcgccgccttctacaagggcgtacgtctgctgttcaaaacgcaggatatccagatttgcatggcaaaatcgttcgttttcggcatggtgatatcgctttcgggctgttactacggttttcacgccaagggtggggcggtgggcgtcgggtcgtataccaagaaggccgtcgtggcggcaatggtcatggttttagtcagtaacctatattag

SEQ ID NO: 7456 - protein, 312 aa, Unknown
  Obtained from environmental sample
  DOMAIN (74)...(312): Domain of unknown function DUF140
  misc_feature (1)..(312): Xaa is any amino acid
MPFGRRSSGRAAFALVRSRSSRLTIYITPRGQILYSNICKVLIKISTNIGVLMPNPGRKEHFLDRIATSFGASAREAVELVGSIFIFYLKMLQALPSSLMRPHLLTEQMMILGVQSIPIVLLTSIFVGAVSAWQVQYIFGDAVPLTYLGAGVGKAVFTELGPVLTALVITGRIGAKLAAELGTMKVTEQIDAMVCLSLNPYTYLLTPRLAASCVMVPMLTVFAVALAIVSAQVIAETFLGLSFAAFYKGVRLLFKTQDIQICMAKSFVFGMVISLSGCYYGFHAKGGAVGVGSYTKKAVVAAMVMVLVSNLY

SEQ ID NO: 7457 - DNA, 834 bp, Unknown
  Obtained from environmental sample
  misc_feature (1)..(834): n is a, c, g, or t
gtgatctcggcgctcatagcctactacataacgctggagaagagggcgctaccgggaataatccgggcggccgaccacctgcgcggggctttctcgcttatcatagcaagcagcaaaaacaaactgatagcggtccgcgacccaaacggcttcaggccgctgtgcctcggcaaaaacgaattgggctacgccgtggcgtcggagagctgcgcgttggaaatatgcgggtttgaatttatcagagacgtgaaacctggcgagatcataacaataaaaaacggcgtgataacgtatgagagtataagtctgcacaacaaagaagaggggcgcgggttttgcatattcgaatacgtttacttcgccagacccgactccgtactcgacggtctctcgatctacgaggcgcgctacaacatgggcgcgatcctagctaaggagtacccggtggacgccgacatggtctgcggcgtgccggacagcggcttggtcgcggcaagcggctacagcgcggtgagcggtattccgctcgcgtcgggctttgtcaagaacaggtacatcgggcgcagcttcatctatcccacgcaaatacaacgcgacagcgccgtgcggcagaagctcaacccgctctccgcaaacgtgaaggggaaaaaggtcgttctcgtagacgactccatagtacgcggcaccacctgcgagaagatcatcagaagcctcagaaacgccggggcggcggagattcacatgagagtgtcgtcgccgccgttccgccacacttgccactacggaaccgacatangcagcgaagataatcttatagcgaacaaaatgggttag

SEQ ID NO: 7458 - protein, 277 aa, Unknown
  Obtained from environmental sample
  DOMAIN (124)...(266): Phosphoribosyl transferase domain
  misc_feature (1)..(277): Xaa is any amino acid
MISALIAYYITLEKRALPGIIRAADHLRGAFSLIIASSKNKLIAVRDPNGFRPLCLGKNELGYAVASESCALEICGFEFIRDVKPGEIITIKNGVITYESISLHNKEEGRGFCIFEYVYFARPDSVLDGLSIYEARYNMGAILAKEYPVDADMVCGVPDSGLVAASGYSAVSGIPLASGFVKNRYIGRSFIYPTQIQRDSAVRQKLNPLSANVKGKKVVLVDDSIVRGTTCEKIIRSLRNAGAAEIHMRVSSPPFRHTCHYGTDIXSEDNLIANKMG

SEQ ID NO: 7459 - DNA, 807 bp, Unknown
  Obtained from environmental sample
  misc_feature (1)..(807): n is a, c, g, or t
atggctaaaaaatccctgttagaaaaatattttcccagcggaaaatcattggaaaaaatatcctccgtcggaaaatcagttgaaaaacccgtagaaaaaaaacaacagaatgttccggttcttaaattgatattttttatcgttgactggcacaatgcgaatatcgtttccgacgtttgctcggaagaaaacgtgcgtttccattttactactcttggaaaaggaacggctacatcggaagtgcttgatcttttgggtattggcgcaattgaaaaagccgtcgtcacctgtcttgagcaggaagtgggcgtaccattactgatgaaagaagtgcgaaaaaaattaaaaaattacggaccgggtgcgggcatcgctttttccgttccactttccgcaattaacgatcctattctgcttatttttaaacagagtattttaaagaatgaaaaaattaccgttgatgatattaaacgcgaaggagaaaatatggcaaataattattcccatgaccttatcatttctataattaatcagggattcagcgatgaattaatgaataccgcaaatgaagcgggcgccacgggaggaacggtaatacactccagaggcacggcgcataggggagctgtaagagtctttggcgtttccgtgcaggacgaaaaagaattaattttaattttaaccgagcgtgaaaaaaaggaaactattatgcgctccatttgcgaagcccacggtcttaacagtaaagctcagggaattattttctccgtgcctgtggataatgttatggggttaacttcggattag

SEQ ID NO: 7460 - protein, 268 aa, Unknown
  Obtained from environmental sample
  misc_feature (1)..(268): Xaa is any amino acid
MAKKSLLEKYFPSGKSLEKISSVGKSVEKPVEKKQQNVPVLKLIFFIVDWHNANIVSDVCSEENVRFHFTTLGKGTATSEVLDLLGIGAIEKAVVTCLEQEVGVPLLMKEVRKKLKNYGPGAGIAFSVPLSAINDPILLIFKQSILKNEKITVDDIKREGENMANNYSHDLIISIINQGFSDELMNTANEAGATGGTVIHSRGTAHRGAVRVFGVSVQDEKELILILTEREKKETIMRSICEAHGLNSKAQGIIFSVPVDNVMGLTSD

SEQ ID NO: 7461 - DNA, 759 bp, Unknown
  Obtained from environmental sample
  misc_feature (1)..(759): n is a, c, g, or t
gtggacgatataattgcattcataaaaaaacatttaaaaattgaatacattatcacaggtgcaccacagcatactgaacgttttgattatccattggatgctattcgcgaaatagttgtgaatatggtagttcaccgcgactacagagatagttccgcaagcattattaaaatctttgataacagaattgaattttataatcccggaaaattatatggcggaataaccgtacaaaatttgctatctggcaattatgtttcaaaatcacgcaataaattgatagctagagcttttaaggcggcaaatgttatagaacgctatggttctggtattatgcgaattcgtaaaatctgcaaagattatggcgtaaaagaacccgattttgatgaaatatccaatggatttcaagtgattttgtacaacgaaaaaattaatgtcaccgataatgtcaccgataatgtcaccgataatgtcaccgataatgtcaccgataatgtcaccgatgtcaccgataatgtcaccgatgtcaccgataatgtcaccgatgtcaccgataatgtcaccgatagcgatattgatagggcaaaaaaaatattaaatcttattgcagaaaataataaaataacagcttcggaaatagcaaaatgcatgaaagttaccaagcggacaattttgcgtgatattgaaaagttgaaaagcgagaattcactggaaagaatcggttctgaaaaaggtggttattggaaagtgaaggtgtga

SEQ ID NO: 7462 - protein, 252 aa, Unknown
  Obtained from environmental sample
  DOMAIN (194)...(248): HTH domain
  misc_feature (1)..(252): Xaa is any amino acid
MDDIIAFIKKHLKIEYIITGAPQHTERFDYPLDAIREIVVNMVVHRDYRDSSASIIKIFDNRIEFYNPGKLYGGITVQNLLSGNYVSKSRNKLIARAFKAANVIERYGSGIMRIRKICKDYGVKEPDFDEISNGFQVILYNEKINVTDNVTDNVTDNVTDNVTDNVTDVTDNVTDVTDNVTDVTDNVTDSDIDRAKKILNLIAENNKITASEIAKCMKVTKRTILRDIEKLKSENSLERIGSEKGGYWKVKV

SEQ ID NO: 7463 - DNA, 561 bp, Unknown
  Obtained from environmental sample
  misc_feature (1)..(561): n is a, c, g, or t
gtgaaaagtccgcctgacattcttgggaaaatcgcttcacaaaccgttcttcgcgcagaaaaagcaaaagaatcgctttctttagaacaggcgcggacgcaggcgcttgcgttagccgcaaaagatacgcgcgtgtctcccctcccctttgaaagcgccattgccgcacccggtctttcattcatctgtgaggtgaaaaaagcgtctccgtcaaaaggcataattgcaactgatttcccctggttgaaaatcgctcaggattatgaagaggcgggagcggccgcgatttccgttcttacagagcctgagttttttttgggaagcgatcaatatttacgcgaaatttccgccgccgtgaaaattccaacgctaagaaaagattttattattgatgaataccagatttacgaagcgaaattattgggagcaaaagccgtattattgatctgcgccctgcttgagaaagaggctctctcatcatttatttctaccgcggacaaacttgcccttgactgccttgtggaaatccacagcngaagaagaagcgcgggaagccattga

SEQ ID NO: 7464 - protein, 186 aa, Unknown
  Obtained from environmental sample
  DOMAIN (7)...(185): Indole-3-glycerol phosphate synthase
  misc_feature (1)..(186): Xaa is any amino acid
MKSPPDILGKIASQTVLRAEKAKESLSLEQARTQALALAAKDTRVSPLPFESAIAAPGLSFICEVKKASPSKGIIATDFPWLKIAQDYEEAGAAAISVLTEPEFFLGSDQYLREISAAVKIPTLRKDFIIDEYQIYEAKLLGAKAVLLICALLEKEALSSFISTADKLALDCLVEIHSXRRSAGSH

SEQ ID NO: 7465 - DNA, 807 bp, Unknown
  Obtained from environmental sample
  misc_feature (1)..(807): n is a, c, g, or t
ttgcaagaacgcatagaaagcatggagagcgagctgcaagtattgatggttcctccagacccctttgacaaccgcaatgcgattttggaaatcagggcagggacaggcggcgatgagtcctctctttttgccggcgatttattcaggatgtacagagcgtatttggagaacagaggttttaaagtagaagtgaccgacataagcgaaggaacggttggcggctttaaggaaatttgcctttttgttagcggaaccgatgcctacggggttttgaaatttgagagcggtgcgcacagagtgcagcgtgtgccagaaaccgaatctcaaggaagggtgcatacatcggcggcaacggtagcggttatgccagaagcggaagaagttgatgttgacattcgcaccgaagatttaaaagtggatgtgtacagggcaagtggcgcgggcggccagtacataaacaaaacggattcagcggttcgcataacccatatcccaagcggcgtggttgtggcttgccaaacagaacgtagccaaattcaaaaccgctcaaaagccatggaactattgcgttcccgcctattagaccacgctatctccgaaaagcagagaaaagaagcagccgaaagaaagagccttgttggcaccggagaccgcagcgacaaaattcgcacttacaactttccccagaacagggttacagatcaccgcataaacttaaccctctacaatctggacaaaataatagcaggggatttacagggaattatagacgcttgcattggcgactcggccatcaacgnnnaataa

SEQ ID NO: 7466 - protein, 268 aa, Unknown
  Obtained from environmental sample
  DOMAIN (1)...(94): PCRF domain
  misc_feature (1)..(268): Xaa is any amino acid
MQERIESMESELQVLMVPPDPFDNRNAILEIRAGTGGDESSLFAGDLFRMYRAYLENRGFKVEVTDISEGTVGGFKEICLFVSGTDAYGVLKFESGAHRVQRVPETESQGRVHTSAATVAVMPEAEEVDVDIRTEDLKVDVYRASGAGGQYINKTDSAVRITHIPSGVVVACQTERSQIQNRSKAMELLRSRLLDHAISEKQRKEAAERKSLVGTGDRSDKIRTYNFPQNRVTDHRINLTLYNLDKIIAGDLQGIIDACIGDSAINXX

SEQ ID NO: 7467 - DNA, 597 bp, Unknown
  Obtained from environmental sample
  misc_feature (1)..(597): n is a, c, g, or t
gtgttaaaaggctcccctactgcttatagattgtgcaacggaatagcggacggtttagatggcgttgctgttgataaatacaacgattgctatcaaattcaattcttcaacaaaaatctgctcgggcaggaagaggaattaatacaactattgaaagaacggttttcccctaaattcatcgcggtaaaatacaggtttgcagaccatagtagtattaaagcggtgtttggggataattccaaaaccattgttgaagaatacggctgcaaatttgctgttgacctgctggacaccctgaacccaggtctttttttggatatgcgcgaagcgcggcactgttttgcgcagctgtgcaaaggaaaggaaatgctgaacctgtttgcatatacgtgctccttcagcgttcacgcccggaaaaacggagcgacaaaggccgtgaatgtggacattagcaaaaaaaatctgagcaaaggcaaggagaattacctcttaaatgaaatggagattaaacaaggggaatttttttgcggtagttccgaagaatatgtggattggtgtataaaaaaagngaaagaaattcggggccattgcaattga

SEQ ID NO: 7468 - protein, 198 aa, Unknown
  Obtained from environmental sample
  misc_feature (1)..(198): Xaa is any amino acid
MLKGSPTAYRLCNGIADGLDGVAVDKYNDCYQIQFFNKNLLGQEEELIQLLKERFSPKFIAVKYRFADHSSIKAVFGDNSKTIVEEYGCKFAVDLLDTLNPGLFLDMREARHCFAQLCKGKEMLNLFAYTCSFSVHARKNGATKAVNVDISKKNLSKGKENYLLNEMEIKQGEFFCGSSEEYVDWCIKKXKEIRGHCN

SEQ ID NO: 7469 - DNA, 588 bp, Unknown
  Obtained from environmental sample
  misc_feature (1)..(588): n is a, c, g, or t
ttggcctacgtgctttccgttaaaaccctgccgggcagaaaaattttaaccgtgatagttcttattccctatctgttcaacgtaggattgatccccacctatctggtggtaaaccgcctggggctttccaatcatcttgccgcgatatttttacccgccgcgatcaatacctacaactgccttattatgcgcggtttttttgaaggtattcccgaagagttaaaagagtccgccagaatagacggcgctcctgagataactgttctgttacggatcattctgccgctttcaaagccaatcattatgacgataggcctgtactacggggtgcatttctggaatgacttttttaacgccatgctttacattaacaacaacgcgctccagcccctgcccatacttctgcgtaatattctgatggcaagcggaatgaatgaatttgtcgaagtcagcgcgtttggagaggctcccgttcaggcgataaaagccgccagcgtttttttggccgctatcccgatgatcattgcttatccgtttattcaaaaatattttacaagaggtactctgttgggaagcgtgaaaggatag

SEQ ID NO: 7470 - protein, 195 aa, Unknown
  Obtained from environmental sample
  misc_feature (1)..(195): Xaa is any amino acid
MAYVLSVKTLPGRKILTVIVLIPYLFNVGLIPTYLVVNRLGLSNHLAAIFLPAAINTYNCLIMRGFFEGIPEELKESARIDGAPEITVLLRIILPLSKPIIMTIGLYYGVHFWNDFFNAMLYINNNALQPLPILLRNILMASGMNEFVEVSAFGEAPVQAIKAASVFLAAIPMIIAYPFIQKYFTRGTLLGSVKG

SEQ ID NO: 7471 - DNA, 582 bp, Unknown
  Obtained from environmental sample
  misc_feature (1)..(582): n is a, c, g, or t
atggaacgcgcaaagcaggccgcaggagacaagcccctgttaaagttgctgcccatgaagccgaaaaaatacggccttgtcattaccggcggcgaggtttttcataaacggatacaggatgccttcacgccggttattcaggaaaaactggcggagtacggctgcgagatgacagcccatgaaattatcgacgatgatcacgaaaaaattaccgctgtgattaacagtatgctggacaaaagcgttgaaatggttttctgtaccggcggcatgagcgttgatcctgacgacagaacgcccatggcaatcaggaacgcggcgggcaatgttgtaagttacggcgccccggtactgcccggttcaatgttcatgcttgcgtacactgcggacaaaaggccggtctgcggtcttcctggctgcgtaatgtacgcccgcaggactatcttcgatctggttctgccgtatctgttggcggacgcgcctgtaagcgccgaatggctggcgggacttggaaacggcggcttgtgccttgactgcgctgaatgtcattttccgaactgctcgtttggaaaaggcgcataa

SEQ ID NO: 7472 - protein, 193 aa, Unknown
  Obtained from environmental sample
  DOMAIN (25)...(158): Probable molybdopterin binding domain
  misc_feature (1)..(193): Xaa is any amino acid
MERAKQAAGDKPLLKLLPMKPKKYGLVITGGEVFHKRIQDAFTPVIQEKLAEYGCEMTAHEIIDDDHEKITAVINSMLDKSVEMVFCTGGMSVDPDDRTPMAIRNAAGNVVSYGAPVLPGSMFMLAYTADKRPVCGLPGCVMYARRTIFDLVLPYLLADAPVSAEWLAGLGNGGLCLDCAECHFPNCSFGKGA

SEQ ID NO: 7473 - DNA, 372 bp, Unknown
  Obtained from environmental sample
  misc_feature (1)..(372): n is a, c, g, or t
atgtcattttccgaactgctcgtttggaaaaggcgcataattatggactggtatcctttatggaattccgtgcgcatagcggcaataagctgcgtttttgtctttttcctcgggatattttgcgcttactatatcgcgaaactgccgcgccttgtcaaagggcttcttgatgtaatactgaccttgccccttgtcctgccgcctacggttatgggctatcttcttctgcttctcctgggggtaaggcgtcccttangcgttttttttatgcaattcggaatcaaattcgtgatgacctggtacggcggtataataacttctgctgtggcggcgttcccgctgatgtaccgcacagcgcgggggcgcttttga

SEQ ID NO: 7474 - protein, 123 aa, Unknown
  Obtained from environmental sample
  misc_feature (1)..(123): Xaa is any amino acid
MSFSELLVWKRRIIMDWYPLWNSVRIAAISCVFVFFLGIFCAYYIAKLPRLVKGLLDVILTLPLVLPPTVMGYLLLLLLGVRRPLXVFFMQFGIKFVMTWYGGIITSAVAAFPLMYRTARGRF

SEQ ID NO: 7475 - DNA, 465 bp, Unknown
  Obtained from environmental sample
  misc_feature (1)..(465): n is a, c, g, or t
atgagcaacatatcagacctcttagaccccggttgcatccggctggaactcggcacctacntcaaggaagccgtgatcaaggaactcgtgcaactcctcgccaaggcggggaaattgaaagaagacacggtcgatcgctacgttgaagaggtgatgggacgcgagaagatctcgtccaccggcatcggcaaaggaatcgcgatcccgcacgtgctcgtcaccgaggtaagcgagataatgatggccgtgggccgtagcgtcaagggagtgccattcaactccgtggacggcaaacccgcccacctgatcttcctcataataggcccccaaggacaaaacaacgaatacctgaaaatcctaagcaaactctcaagatacctaaacgaccgcgccttctttgaaacgctgatgaaaatcgaagacccggcggaagtagtagagctggtcaaggagcgggagcgctag

SEQ ID NO: 7476 - protein, 154 aa, Unknown
  Obtained from environmental sample
  DOMAIN (6)...(152): Phosphoenolpyruvate-dependent sugar phosphotransferase system, EIIA 2
  misc_feature (1)..(154): Xaa is any amino acid
MSNISDLLDPGCIRLELGTYXKEAVIKELVQLLAKAGKLKEDTVDRYVEEVMGREKISSTGIGKGIAIPHVLVTEVSEIMMAVGRSVKGVPFNSVDGKPAHLIFLIIGPQGQNNEYLKILSKLSRYLNDRAFFETLMKIEDPAEVVELVKERER

SEQ ID NO: 7477 - DNA, 747 bp, Unknown
  Obtained from environmental sample
  misc_feature (1)..(747): n is a, c, g, or t
ttgcagggtaagccctggcgcggggggaaaagcctgagccttggggctggtgatgttctcaggcagatccaaaccctggaacaacgtggtattgcngaagccgtcctacccggggtgaatatatgccagtatcatgatcagtcgatgggtcttccggaacttctggaatttcttttaaaaggaactgcgaccatacggctaaggctttcttcgctggagccggagccagggctgttttcagacgcgtttctatatgtcctggaaaacaggaggataaggccccatttccatctatccattcaatcgggtagctcggcgatactagccaagatgggcaggctgtatagcccgtacgatattgaacaaattgtcggcctactccgtcgtctccgccacgatccttttttggcctgcgatatcattgccgccttccctggtgaaacagagtgcgaatttgaaaagacctacgctttaatggaaaagctctcctttgcgtggatacacgcctttccgtattccaggcggccgggaacagcggctttcgatttccccgctaatgtaagcggaaaggccgcgttaaagcgggttgagcttctaacaaatctggccaggaaaggccgtcgggagtatatgaagcactggaaaggcgaagaagtggaagccgttgtggaagcaggtgaaaatctgccggaaggcatggttcaggcgcttaccgaaaactacctgaaagtcctggaaatgcggtga

SEQ ID NO: 7478 - protein, 248 aa, Unknown
  Obtained from environmental sample
  misc_feature (1)..(248): Xaa is any amino acid
MQGKPWRGGKSLSLGAGDVLRQIQTLEQRGIAEAVLPGVNICQYHDQSMGLPELLEFLLKGTATIRLRLSSLEPEPGLFSDAFLYVLENRRIRPHFHLSIQSGSSAILAKMGRLYSPYDIEQIVGLLRRLRHDPFLACDIIAAFPGETECEFEKTYALMEKLSFAWIHAFPYSRRPGTAAFDFPANVSGKAALKRVELLTNLARKGRREYMKHWKGEEVEAVVEAGENLPEGMVQALTENYLKVLEMR

SEQ ID NO: 7479 - DNA, 636 bp, Unknown
  Obtained from environmental sample
  misc_feature (1)..(636): n is a, c, g, or t
atgcaacggcgcgaagctgaagtgctcgatgggctccaaagagtccgacctgggcgtaatgccggtcagacggtcgctggtgcgcatcaaagggaacctcatgggcacaatcatggacaacaaacccatggtcaacatacgccccttcggccaatgccaatccctggccaaccccgtggtagcggccgccaccgccgcggccaacggcaaactgcagaagatgccctgcatccccaacaccgccacgccgtggatcggcggcaaaatgcgcgtgcgcatttgcggggagccgaccctgctgaacaacagcaaactgacctgtatgtgggccggaataatcgaaatcacaaacccgggccaaaacttcgtccaagagggcagctcgtccccgctaaacgccgacatcaaatccgtaacctccgaaaaagaggccgcggaggtcgaaatcgaggtcggagaggccgtgccggacgaagagatcgaaaaactgatggtgaaagacattgccgaaatcttcgaagaaatagagagcaaacaaggatacgaagccgccagatactacgcctcanattgcgtcaactactggatagtcaacaaattagccaagaaattcgtcaacggcacagacgaagataa

SEQ ID NO: 7480 - protein, 211 aa, Unknown
  Obtained from environmental sample
  misc_feature (1)..(211): Xaa is any amino acid
MQRREAEVLDGLQRVRPGRNAGQTVAGAHQREPHGHNHGQQTHGQHTPLRPMPIPGQPRGSGRHRRGQRQTAEDALHPQHRHAVDRRQNARAHLRGADPAEQQQTDLYVGRNNRNHKPGPKLRPRGQLVPAKRRHQIRNLRKRGRGGRNRGRRGRAGRRDRKTDGERHCRNLRRNREQTRIRSRQILRLXLRQLLDSQQISQEIRQRHRRR

SEQ ID NO: 7481 - DNA, 333 bp, Unknown
  Obtained from environmental sample
  misc_feature (1)..(333): n is a, c, g, or t
atgctgaacgaagtaaacaaaggaagactgacccttaacgactatgcgcgtctttcaagtgaagcccccgccagagtttgggatatgtaccctcaaaagggaaatttgagcgacggcgcggacgctgatattaccattgttgacatgaacatgaaaaaagtaatcacctcaggcgaacttcattcaaaaagcaaaacaaccccttatgagggaatggaagcgcaaggctgtcccgtcgcgacaatagtaaggggaaaatttgtaatgaaggacggaaagctcacgggtattaaagggcatggaatacacgttaaaccaaaaggcttatgttaa

SEQ ID NO: 7482 - protein, 110 aa, Unknown
  Obtained from environmental sample
  misc_feature (1)..(110): Xaa is any amino acid
MLNEVNKGRLTLNDYARLSSEAPARVWDMYPQKGNLSDGADADITIVDMNMKKVITSGELHSKSKTTPYEGMEAQGCPVATIVRGKFVMKDGKLTGIKGHGIHVKPKGLC

SEQ ID NO: 7483 - DNA, 411 bp, Unknown
  Obtained from environmental sample
  misc_feature (1)..(411): n is a, c, g, or t
ttggcccatccaaatatctgcctaatgcagaagggactgtggagcaagaaatttgaaactcacgctacgcttggatttactgctggcagcaaggtgggcggtgacggctcagacatggtttcgcttgtgtcgctggacgaggtatttgccgacctgccgcagggtgaatatccgacattcatcaaaatggacgtcgagggctcggagagggaagccctcatgggtgcggaaagggtcatcagcaccgctcgcccaaaacttgccatctgtgtgtaccacaagccagaggacatatatgaactcccgcgcataattcaacgatacggaccaaattaccatttcatcctaaagcaccatagcccttacagatgggacacagtgctatatgcttggcaaaaggaggcacgttga

SEQ ID NO: 7484 - protein, 136 aa, Unknown
  Obtained from environmental sample
  misc_feature (1)..(136): Xaa is any amino acid
MAHPNICLMQKGLWSKKFETHATLGFTAGSKVGGDGSDMVSLVSLDEVFADLPQGEYPTFIKMDVEGSEREALMGAERVISTARPKLAICVYHKPEDIYELPRIIQRYGPNYHFILKHHSPYRWDTVLYAWQKEAR

SEQ ID NO: 7485 - DNA, 846 bp, Unknown
  Obtained from environmental sample
  misc_feature (1)..(846): n is a, c, g, or t
ttgattaaccccatctacgaaacggaaataatgacggaggccgctaaaaaatccgtgatgatgggccttgtccgccatcgcccgatgatggggccgtctatcttccttccgacaagagaccggggcggggtacagcttaactggcttacggcttacggccaaaaaatcgaggggagtaagcccaaaggtgcggagcgtgtcgagctaaaagcctacactttggcgggttacattccgtggtttgacgaatttgaagaggacgtttttgtcgatttgggggctatgttcgtggatgaattccttgaaacctacgggcaggaatttgacaggcaatgcctgttagccgataacgatccgttcacaggggctatgaagtgcgccgatgttacagaggtaacaatcaagggaaacaccatagaggatttgacttggaaggatttccgagatgcagtatacaaggttccagcagaggaaaggaaagactgcgcttggttcatcaatgaaacaatcctaaaccatgtcgccaatatcgaggacaccacgggccgcccgatttggcggcggcctacggaggcaatgccggggcggctggacttgtacccctatcacgaggtttcaatacttccgcagattgcggacattgaggaagaccaggcgtttgcaatctttatgaacccgaagcggatacagcacggaaacaggcggggcatcgagcttaaaaagtttgacgctactactgaaagcctggaatatggggaattgtttttgaggttccgcaagcgtgatgggtttctcgttacaagaccgaaagggaacatggtcatattaaaaactaaagcttcttaa

SEQ ID NO: 7486 - protein, 281 aa, Unknown
  Obtained from environmental sample
  DOMAIN (7)...(278): Phage capsid family
  misc_feature (1)..(281): Xaa is any amino acid
MINPIYETEIMTEAAKKSVMMGLVRHRPMMGPSIFLPTRDRGGVQLNWLTAYGQKIEGSKPKGAERVELKAYTLAGYIPWFDEFEEDVFVDLGAMFVDEFLETYGQEFDRQCLLADNDPFTGAMKCADVTEVTIKGNTIEDLTWKDFRDAVYKVPAEERKDCAWFINETILNHVANIEDTTGRPIWRRPTEAMPGRLDLYPYHEVSILPQIADIEEDQAFAIFMNPKRIQHGNRRGIELKKFDATTESLEYGELFLRFRKRDGFLVTRPKGNMVILKTKAS

SEQ ID NO: 7487 - DNA, 792 bp, Unknown
  Obtained from environmental sample
  misc_feature (1)..(792): n is a, c, g, or t
atgatgagcgcgataggcacagggacagtgcgggacggcttccttacaatgagcctgggaacttccggcacgcttttcggtttttcaaacaaacctgtcatagacccgacaggaaacctggccgctttttgctcttcttcggggggctggctgccgctgctctgcaccatgaactgtactgtagcaagcgaggaattccgcaagctttttgatctggatgtaaaagcctttgatgcggaagcctcaaaggctcccataggcgcggacggcatagttgtcctgcctttcttcaacggcgagcgcacacccaacctgcccaacggcagggccggaataaacggcattacagccgccaacttcaagcgggaaaaccttgcccgcgccgcgctggaatctgcaatcttcggcatgagaataggccttgaaggctttaataccctgggtttcaaagccagggaaatccgtcttacaggcggcggctcaaaaagccctatctggcagaacatcgcggccagtgtgacgggcctccccgtaaaagttccggcaagcagcgaagccgcagcaatgggcggggcaattcaggccctttggtgcctgctcaaaaattcggatgataaatcatcttctgagaaaaatacaaaaggtaatacgatagaggctctgacggatgagcatgttgttcttgaaggcggaaaggttataaagcctgaaaagaaggacgtggcggcctataataaggcttatgaagtttattcacggtatctaggggcattaagcccattatacanatag

SEQ ID NO: 7488 - protein, 263 aa, Unknown
  Obtained from environmental sample
  DOMAIN (9)...(224): FGGY family of carbohydrate kinases, C-terminal domain
  misc_feature (1)..(263): Xaa is any amino acid
MMSAIGTGTVRDGFLTMSLGTSGTLFGFSNKPVIDPTGNLAAFCSSSGGWLPLLCTMNCTVASEEFRKLFDLDVKAFDAEASKAPIGADGIVVLPFFNGERTPNLPNGRAGINGITAANFKRENLARAALESAIFGMRIGLEGFNTLGFKAREIRLTGGGSKSPIWQNIAASVTGLPVKVPASSEAAAMGGAIQALWCLLKNSDDKSSSEKNTKGNTIEALTDEHVVLEGGKVIKPEKKDVAAYNKAYEVYSRYLGALSPLYX

SEQ ID NO: 7489 - DNA, 885 bp, Unknown
  Obtained from environmental sample
  misc_feature (1)..(885): n is a, c, g, or t
ttgagcggcataaaaaacgcgtctgtatttaactgcgacggcgtctgccgcgttgaagggcaaaaatgccaaatatcgttaaattatgtttatgacaaatttgacgaaatgatatgtaccgttgtgatagtaaccgacattactgaaaaagaagatttaatcaggcagcttaatgagtctaacgcgaaaattgaacgttttaacaaagaattgcagtcagaggttgacaggcagactgaaagtatacgcaatcttcaaaaagcgattgtatattcgatgagcgatttgattgaaaaaaaagacggctacacgggagtgcacacaaggcgggtaagcgaatatgtagctattttactgcgtgaattggcgcgcaggggctatcaatttaccgaatcggaaattcaaagaatagcggaatcttcgctgctgcatgatatgggaaaaattgccatacctgacagtatccttcttaaaaacggaagattgacagataatgagtttgacgtaatgaaaagacacagtactacaggggcggattctttgcagaaatcaatgcagtttgcgaatgacgacgactttttgaaaaacgcgtttgtaatggctaaacatcaccacgaaaaatggaacggcggcgggtatcccgacggcaaaaaagaaaatgagatacctctccttgcccgtgtaatagccattgccgacgtttatgacgcgttacgctcggaacgttcgtataaaaagccgttcagccgcgaaaaggccaaatcaatcatattggaagaaaacgggcggcaatttgatccggaactggttgacgctttcctgggcgtagaacctgaatttgacgagttctgtaaatccgcgcaaatcgatcatttcggtttatga

SEQ ID NO: 7490 - protein, 294 aa, Unknown
  Obtained from environmental sample
  DOMAIN (104)...(238): HD domain
  misc_feature (1)..(294): Xaa is any amino acid
MSGIKNASVFNCDGVCRVEGQKCQISLNYVYDKFDEMICTVVIVTDITEKEDLIRQLNESNAKIERFNKELQSEVDRQTESIRNLQKAIVYSMSDLIEKKDGYTGVHTRRVSEYVAILLRELARRGYQFTESEIQRIAESSLLHDMGKIAIPDSILLKNGRLTDNEFDVMKRHSTTGADSLQKSMQFANDDDFLKNAFVMAKHHHEKWNGGGYPDGKKENEIPLLARVIAIADVYDALRSERSYKKPFSREKAKSIILEENGRQFDPELVDAFLGVEPEFDEFCKSAQIDHFGL

SEQ ID NO: 7491 - DNA, 867 bp, Unknown
  Obtained from environmental sample
  misc_feature (1)..(867): n is a, c, g, or t
ttggggatgaacgcttttataatgtgcgccaaacttgccagcataacaatacctaacagcgttaccagcattggaaggggtgcttttagcagatgcggccttaccagcgtaacaatacccaacggagttaaaagcattgagagtcagacttttgccagttgctcagaccttgccagcataacaataccgaacagcgttaccagcattgggactaatgcttttaacggttgccgcagccttactagcgtaaccttcggaggctcaattccatcaagcggtttaaacgctaacgcttttggttctggtacggcctcacaaggcgacatccgtgacaagtaccttgccgccggcggagatgcagggacttacacgagaccagccggcggaacaacatggacaaaaagcgcatcagctaccgctgcgccagccgccgctcccaagcttgagtttacgcttaccgcagacaaaaagggttacagcgtcagcaaagacacgggatcagtcagcgatgtggttatacccgcctcgtacaataacctaccggtaacagaaatcgccaatcaagcgttctctagtcataatacaaatattaacagcgtaatcataccaaacagcgttaccaaaattggaagcctggcttttcaagggtgcgtggctcttaaaagcgtaacaataggaaacggcgttatagatattaatagaaacgcttttgcaagttgcatcgtacttaacagcgtaacctttgggggagcaaatactagatttagcgataccgaattccccaacggaggcgacttactcaccaagtacnaagcaggaggagcaggaacatacacgagaaacggcancacatggacgaaaaagtag

SEQ ID NO: 7492 - protein, 288 aa, Unknown
  Obtained from environmental sample
  misc_feature (1)..(288): Xaa is any amino acid
MGMNAFIMCAKLASITIPNSVTSIGRGAFSRCGLTSVTIPNGVKSIESQTFASCSDLASITIPNSVTSIGTNAFNGCRSLTSVTFGGSIPSSGLNANAFGSGTASQGDIRDKYLAAGGDAGTYTRPAGGTTWTKSASATAAPAAAPKLEFTLTADKKGYSVSKDTGSVSDVVIPASYNNLPVTEIANQAFSSHNTNINSVIIPNSVTKIGSLAFQGCVALKSVTIGNGVIDINRNAFASCIVLNSVTFGGANTRFSDTEFPNGGDLLTKYXAGGAGTYTRNGXTWTKK

SEQ ID NO: 7493 - DNA, 684 bp, Unknown
  Obtained from environmental sample
  misc_feature (1)..(684): n is a, c, g, or t
gtgtcggggggaacgggtttttatttaaaaaactttattcttggattgagcgaagctccccccagcgacaaatcaatccgcgaacaattaaaacgggaattaagcgaaaaaggcgcagctttcctcttggaagaactcgcctcctgcgacagcataagcgcaaatcgcatccacataaacgatgaataccgtcttcttcgcgctttggaagttcaccgctcctgcggcaagcccctttcatcatttgaaatcaacaccgctaaaaaccgtcccaacttccattttcttatcatcggcctttcccgccccagggaagaattataccatcgcataaacttacgctgcgccgatatgttcaaacagggtcttgccgccgaagtaagctcgcttttcaagtcaggctacactcctgaagaccctggtttacgagccattggctacagagaattttttgtcgaggcgacgcaagacggcgatttttccgcagacaaacaatgcaagtggcggctttcggaagatatcgaaggagtgcaggctttgattgcgcagaacagcagacgttatgcgaaacgtcaaatcacatttttttcaggtatccccaatgtaaattggctgaagcccggacatgacgacgcggagaccacgaacaaaatcagaatattattaagtagccaatttatttga

SEQ ID NO: 7494 - protein, 227 aa, Unknown
  Obtained from environmental sample
  DOMAIN (1)...(208): IPP transferase
  misc_feature (1)..(227): Xaa is any amino acid
MSGGTGFYLKNFILGLSEAPPSDKSIREQLKRELSEKGAAFLLEELASCDSISANRIHINDEYRLLRALEVHRSCGKPLSSFEINTAKNRPNFHFLIIGLSRPREELYHRINLRCADMFKQGLAAEVSSLFKSGYTPEDPGLRAIGYREFFVEATQDGDFSADKQCKWRLSEDIEGVQALIAQNSRRYAKRQITFFSGIPNVNWLKPGHDDAETTNKIRILLSSQFI

SEQ ID NO: 7495 - DNA, 921 bp, Unknown
  Obtained from environmental sample
  misc_feature (1)..(921): n is a, c, g, or t
ttggcaaagnaagagcttccggcaataatgagcgggcacctggcatttcccaacaccatggccggtgcgactcctgcctccctttcttcctggtttttaaaagatatcttgcgggacaaaatcgcttacaagggccttgttattaccgatgacttgatgatgaacggggccaccgaatatgccggaagcctttcgcgggccgcaaagcaggcgcttcttgccggcaacgacatcatcatgctctcaaaaaccccaagtctgaacgataccgtatggacatatctgatctcttccatggagaatgagccggaatttcgggagcgtgtgcgggacgcctgccgccgtatactgcttttgaaactggagtaccttaggggtgaaaaaaaagttccctttattcccgatttaaaaaaggtagatgacgggcttgttgatcccgaagggactgctttttttctcggcctggcggcccgaagcgttacccttgtggatagcagggatgtttttccccttagtccggaaagggcgggccgggtgcttcttgcggggaactttacggattttttcacttatgggaagaaagcttttccgggagcggtttcatactggtacgatactacgcaagccgccacggaaattatctcatacgccaggaatgtcgataccgtgatcttctgtctttccagcaaggccggaatcagaataattcaacagttgcggggcttaaataaaagggtaattgttttttcagtgctgagtccggcttatcttgacgatgtttcctgggcggatggcgcggtggcggtttacagttacgctccggaatcgtttatagcgggcttttcggccattcttggcagaataaaggcagaagggaagctccctttcgcgttgaatacgcgttcttcatccggaaactag

SEQ ID NO: 7496 - protein, 306 aa, Unknown
  Obtained from environmental sample
  misc_feature (1)..(306): Xaa is any amino acid
MAKXELPAIMSGHLAFPNTMAGATPASLSSWFLKDILRDKIAYKGLVITDDLMMNGATEYAGSLSRAAKQALLAGNDIIMLSKTPSLNDTVWTYLISSMENEPEFRERVRDACRRILLLKLEYLRGEKKVPFIPDLKKVDDGLVDPEGTAFFLGLAARSVTLVDSRDVFPLSPERAGRVLLAGNFTDFFTYGKKAFPGAVSYWYDTTQAATEIISYARNVDTVIFCLSSKAGIRIIQQLRGLNKRVIVFSVLSPAYLDDVSWADGAVAVYSYAPESFIAGFSAILGRIKAEGKLPFALNTRSSSGN

SEQ ID NO: 7497 - DNA, 396 bp, Unknown
  Obtained from environmental sample
  misc_feature (1)..(396): n is a, c, g, or t
ttgccaaggatcagatcggccgaggaggatcatgacgacataatgcaaatgcccgaagcttatcagacgcagataggggaacgcggcgttaaattgtccggcggacaaaagcagcgtatagcaatagcaagggcggtactgtgcaagtctccggtgcttattcttgacgaggcgaccgcgtctgtagacgttcacaccgaagagcagatacaacaggcgatcaacgaaatagcaggaagccgcacaatcgtaaccatcgcgcacaggctttctaccattcgcaacgcggacgttatttatgtttttgaaaaggggcgcattattcaatcgggaagccatgacgagttgattgggcaggaaggactttacagaaatttatgcagaacagggaaataa

SEQ ID NO: 7498 - protein, 131 aa, Unknown
  Obtained from environmental sample
  DOMAIN (2)...(105): ABC transporter
  misc_feature (1)..(131): Xaa is any amino acid
MPRIRSAEEDHDDIMQMPEAYQTQIGERGVKLSGGQKQRIAIARAVLCKSPVLILDEATASVDVHTEEQIQQAINEIAGSRTIVTIAHRLSTIRNADVIYVFEKGRIIQSGSHDELIGQEGLYRNLCRTGK

SEQ ID NO: 7499 - DNA, 504 bp, Unknown
  Obtained from environmental sample
  misc_feature (1)..(504): n is a, c, g, or t
atggcgtttaccgttgtgtttgccctgtacaggggattcccgaatatcctggtgcttctggggtttcttgttattgggtatcagtttatagcctcaaggacagtgcagggccgtcatatttacgcaatgggggggaacgcgaaagcggcaaaactttcaggggtcaagaccgaatgggtgatgttctggatttataccaatatggcggttcttgcctctgttgcggctgtagtttttgcggcccgtctgaacgccgccaccccgaaagccggtcagggcttcgaaatggacgctattgccgcttgttatgtgggcggttccgcggtttcaggcggtatcggcaccattatcggcgcggtggtaggcggcctttttatcggcgttttgaacaacggaatgtcaatactgggagtcagcacggactggcagcaggcaatcaagggctttgtccttcttgcggcagtcgcgtttgatttgtattccaaaagaagaagcggtaaataa

SEQ ID NO: 7500 - protein, 167 aa, Unknown
  Obtained from environmental sample
  DOMAIN (1)...(155): Branched-chain amino acid transport system / permease component
  misc_feature (1)..(167): Xaa is any amino acid
MAFTVVFALYRGFPNILVLLGFLVIGYQFIASRTVQGRHIYAMGGNAKAAKLSGVKTEWVMFWIYTNMAVLASVAAVVFAARLNAATPKAGQGFEMDAIAACYVGGSAVSGGIGTIIGAVVGGLFIGVLNNGMSILGVSTDWQQAIKGFVLLAAVAFDLYSKRRSGK

SEQ ID NO: 7501 - DNA, 363 bp, Unknown
  Obtained from environmental sample
  misc_feature (1)..(363): n is a, c, g, or t
ttgcacgatatgcgggagatcaaggggccgctatctgaattgatcagcgacatggtctcctccctagccgataaaaatgactatctgcgcgttatacttacggacaaggaaggtacgataaccgacccgatgggaaaagcccgcagcgtttatcccaacgtgatggcgcttagctttgagagcacgtgggagagggttgacgtcgccaagaccggagcaaatttggagcgattgtcgtcgctgtcgccgtatgatttgttttgcgaattctttctcaatagaaccggttcaacaatgaacaacgaggagacggtgattgtgagaaaattaatggacgggaggccgatggatgaagccgattaa

SEQ ID NO: 7502 - protein, 120 aa, Unknown
  Obtained from environmental sample
  misc_feature (1)..(120): Xaa is any amino acid
MHDMREIKGPLSELISDMVSSLADKNDYLRVILTDKEGTITDPMGKARSVYPNVMALSFESTWERVDVAKTGANLERLSSLSPYDLFCEFFLNRTGSTMNNEETVIVRKLMDGRPMDEAD

SEQ ID NO: 7503 - DNA, 552 bp, Unknown
  Obtained from environmental sample
  misc_feature (1)..(552): n is a, c, g, or t
atgaagccgattaagttgacaatgagcgcgttcggttcttacgccggggttgagacgcttgactttaccaaactaggcgacagcgggctgtatcttatcaccggcgagacggggtcaggcaagacgacgatattcgacgcgatctctttcgcgctctttggagatggtagcgggtcggggcggagcaagtatcagatcctatgttccgactttgtggatgagaaagtgaaaacttccgttgagcttgacttcatggccggtagcgggatataccatataaagcgagaggtaaagagaaccggagggcatgatgttcatctcagactgcctgacggcacatccttgagcggtgtgaacgataccaactataagatcgccgagattattggactcgaccgcaatcagttcacgcagatcgtgatgatcgcgcagaacgattttctgcgttttttgcatagcgacacggataaacgtaatgatattttgcgacgaatttttaatacggacgcgctgaaaaattttcaggcaaggcttaaaacttacgcgaaatag

SEQ ID NO: 7504 - protein, 183 aa, Unknown
  Obtained from environmental sample
  misc_feature (1)..(183): Xaa is any amino acid
MKPIKLTMSAFGSYAGVETLDFTKLGDSGLYLITGETGSGKTTIFDAISFALFGDGSGSGRSKYQILCSDFVDEKVKTSVELDFMAGSGIYHIKREVKRTGGHDVHLRLPDGTSLSGVNDTNYKIAEIIGLDRNQFTQIVMIAQNDFLRFLHSDTDKRNDILRRIFNTDALKNFQARLKTYAK

SEQ ID NO: 7505 - DNA, 315 bp, Unknown
  Obtained from environmental sample
  misc_feature (1)..(315): n is a, c, g, or t
atgcggtggaaggaaggagaacctttcgaatattggataggtatttttatgccggaaaatacatccgttcctgccggttatgaatatcatgattttccaaaggctgcattgggtgtttgctgggtatatggcaaagagccagatatttatatgtgtgaagaagattacgtgaaaaagttaaaagaaaatgggtatgaggttataaaagacaaagaaaatgcccaatggttttttgagagatatggctgtccgcgatttacaacacctgatgaaaatggcaaagttattctggatatttgttattttataaaataa

SEQ ID NO: 7506 - protein, 104 aa, Unknown
  Obtained from environmental sample
  misc_feature (1)..(104): Xaa is any amino acid
MRWKEGEPFEYWIGIFMPENTSVPAGYEYHDFPKAALGVCWVYGKEPDIYMCEEDYVKKLKENGYEVIKDKENAQWFFERYGCPRFTTPDENGKVILDICYFIK

SEQ ID NO: 7507 - DNA, 717 bp, Unknown
  Obtained from environmental sample
  misc_feature (1)..(717): n is a, c, g, or t
gtgaaaaaacttgacgcacagcgaattttgaacgccctgcgggaagggggcagcatcgcttcccgccttgaatactttgaaccgaggcaggcgcagcttgatctcatggaactggtcatccgttgctttaacgaaaaagccataggcgcggcggaagcgggaacgggggtggggaagtctttcgcgtacttgctgccggctatgcattttgccgttgaaacaggcgagagggttgttgtttccaccgcgacaataaccctgcagcagcagcttttcggcaaagacataccgctggtaaaagacgcgattaaagccaaaataaaggccgtattggtgaagggcaggggaaactacctttgccggcggcggcttctggacagtctgcgcgagcctgagctttcgggctcagatgaacaggaacagcttgaggatataagccgctgggcggaaaccagcaagagcgggggcagggaagagcttgcctttgtgcctcttgaacaggtttggtcaagggtctgttccgacgcggaactgtgtatgggaaaagcctgcccggagcagggccgttgttttgtgcttgccctgcgaagggaagccgccgccgcccgtattcttgttgtgaaccaccatctgctctttgcggatctggcancgcggcgcggcggcgcgggttatgaggcggctgcggttctgcctcctattcagggtggttattga

SEQ ID NO: 7508 - protein, 238 aa, Unknown
  Obtained from environmental sample
  misc_feature (1)..(238): Xaa is any amino acid
MKKLDAQRILNALREGGSIASRLEYFEPRQAQLDLMELVIRCFNEKAIGAAEAGTGVGKSFAYLLPAMHFAVETGERVVVSTATITLQQQLFGKDIPLVKDAIKAKIKAVLVKGRGNYLCRRRLLDSLREPELSGSDEQEQLEDISRWAETSKSGGREELAFVPLEQVWSRVCSDAELCMGKACPEQGRCFVLALRREAAAARILVVNHHLLFADLAXRRGGAGYEAAAVLPPIQGGY

SEQ ID NO: 7509 - DNA, 402 bp, Unknown
  Obtained from environmental sample
  misc_feature (1)..(402): n is a, c, g, or t
atggacagaatcggccgagtttcatatttttacggaaatttattcagaccgaattattgtctttccagtgacggtatgaacgcgttttgtattgatcttgctatgaaaaatatgtctaatcccggcagttataccggcaatatgtctttgttagactcaaagataaattatacccgttatcatcaaattggtattgattacgcgcaggttcttttaggattaaatgttcgcgctgaagccgccattaatataactgaagattttgaaggcgatgacggttctcttcaaaatccttttgtcgcgtgggcgctcggttttgacagggatttgtttttgggaattaaacgtcatgtgcaattcgatgaaaacatccgccttttagatgataaagtcgggggataa

SEQ ID NO: 7510 - protein, 133 aa, Unknown
  Obtained from environmental sample
  misc_feature (1)..(133): Xaa is any amino acid
MDRIGRVSYFYGNLFRPNYCLSSDGMNAFCIDLAMKNMSNPGSYTGNMSLLDSKINYTRYHQIGIDYAQVLLGLNVRAEAAINITEDFEGDDGSLQNPFVAWALGFDRDLFLGIKRHVQFDENIRLLDDKVGG

SEQ ID NO: 7511 - DNA, 309 bp, Unknown
  Obtained from environmental sample
  misc_feature (1)..(309): n is a, c, g, or t
atggaactaaaactggttgtaaaccgggcgcgcggggcggcggaagcgaatatcgtcgcggataaaatgataaatgttaccggccagtttcttcatgttaaaatggaatacttgggtttcatttatgaagaccataccgtgctgaacgcggtgaggcagcagaaaccgtttatggtggttgatccaaaatgcaaggcaagccaaagcatccagcaccttgtggtaagaatggacaaaaacgctgcaaatgaaccttccggtctgggcgctatgttcaggaagatgttcaaccgttcacagggggaataa

SEQ ID NO: 7512 - protein, 102 aa, Unknown
  Obtained from environmental sample
  misc_feature (1)..(102): Xaa is any amino acid
MELKLVVNRARGAAEANIVADKMINVTGQFLHVKMEYLGFIYEDHTVLNAVRQQKPFMVVDPKCKASQSIQHLVVRMDKNAANEPSGLGAMFRKMFNRSQGE

SEQ ID NO: 7513 - DNA, 447 bp, Unknown
  Obtained from environmental sample
  misc_feature (1)..(447): n is a, c, g, or t
ttggcatatcaaaacgcagtatccacttataaagagaccaagataaaaacggccggtcaaggccagcttattatcatgctgtatgacacggcgataaggcagcttgacgaggcgttgtttttattgcaggcaaacaacaccggaaagaaagatccgggcaaaatcgaaaaaatcggcaaggccgtggtcaagacacaggaaatcatatccgaactgatggtctccctggattttgaacagggcggtgaaattgctgtcaacctcttttctttatatacctggttcaaccgggaacttatggaagccaacatcagccaggacgcgagacgcatattaattgtaaaaaaccatatcgaaagcctccgcaacgcgtggcaggaagtcgtatcctcagcctcttttgaaaccgccggcaccgaggttttgggcgttaacatcgcgatgtga

SEQ ID NO: 7514 - protein, 148 aa, Unknown
  Obtained from environmental sample
  DOMAIN (3)...(132): Flagellar protein FliS
  misc_feature (1)..(148): Xaa is any amino acid
MAYQNAVSTYKETKIKTAGQGQLIIMLYDTAIRQLDEALFLLQANNTGKKDPGKIEKIGKAVVKTQEIISELMVSLDFEQGGEIAVNLFSLYTWFNRELMEANISQDARRILIVKNHIESLRNAWQEVVSSASFETAGTEVLGVNIAM

SEQ ID NO: 7515 - DNA, 534 bp, Unknown
  Obtained from environmental sample
  misc_feature (1)..(534): n is a, c, g, or t
atgagtttatctggcttatgctgcttaaaacagatcaggctatgccttgatacgggacatttccaccccaccgaaaccatcgcggacaaaatttccgcaattttgctttntgtgccgggcctcttgattcacttcagcaggggagtccgctgggattcggatcacgtcgcgattttttccgacgagcttcgggaagtttgccgcgaaataaccaggcacaaataccttaaccgcgtgaacatcgcccttgattattttgatgcgtcgatcaaccgtatcgcggcgtggacaatagggagcagaagtttgcggaagggccttttggaagcgcttcttgagccggtggaacttttgaagaaagctgaattggcgggcaggtaccacgagcgccttgctttgatggaggagctaaagactctgccgttcccggcagtctgggataaattgtgccttaacgccggagttcccgttggcatcgactggctggaaaaagtgaatcagtacgagaaaactgttttggaaaaacggagatga

SEQ ID NO: 7516 - protein, 177 aa, Unknown
  Obtained from environmental sample
  DOMAIN (1)...(176): L-rhamnose isomerase (RhaA)
  misc_feature (1)..(177): Xaa is any amino acid
MSLSGLCCLKQIRLCLDTGHFHPTETIADKISAILLXVPGLLIHFSRGVRWDSDHVAIFSDELREVCREITRHKYLNRVNIALDYFDASINRIAAWTIGSRSLRKGLLEALLEPVELLKKAELAGRYHERLALMEELKTLPFPAVWDKLCLNAGVPVGIDWLEKVNQYEKTVLEKRR

SEQ ID NO: 7517 - DNA, 312 bp, Unknown
  Obtained from environmental sample
  misc_feature (1)..(312): n is a, c, g, or t
gtgaaaacaattactaaaaagaaaataaacgtaaaatcctctaaaaaaccaacaaaaaagacaaaaataacaaaaaccacccaaaaggtaaaaaaagccgtatctgctaaaaaaacaatgaaaaaaccggtaaaaaaagcatcggcggtaaaaaaatcaacggtaaaatcaataaaaaaaacagtcgctaaaaagacaactggaaaaaccgcaaagaaaacggctgtatctacaaaaaaaatgactgcaaaacctatttctgcgaaaaaaccaacaatttcaaaaacggtaaatancaaaagctttacctga

SEQ ID NO: 7518 - protein, 103 aa, Unknown
  Obtained from environmental sample
  misc_feature (1)..(103): Xaa is any amino acid
MKTITKKKINVKSSKKPTKKTKITKTTQKVKKAVSAKKTMKKPVKKASAVKKSTVKSIKKTVAKKTTGKTAKKTAVSTKKMTAKPISAKKPTISKTVNXKSFT

SEQ ID NO: 7519 - DNA, 312 bp, Unknown
  Obtained from environmental sample
  misc_feature (1)..(312): n is a, c, g, or t
ttgntatttaccgtttttgaaattgttggttttttcgcagaaataggttttgcagtcattttttttgtagatacagccgttttctttgcggtttttccagttgtctttttagcgactgttttttttattgattttaccgttgatttttttaccgccgatgctttttttaccggttttttcattgtttttttagcagatacggctttttttaccttttgggtggtttttgttatttttgtcttttttgttggttttttagaggattttacgtttattttctttttagtaattgttttcactattatctcctaa

SEQ ID NO: 7520 - protein, 103 aa, Unknown
  Obtained from environmental sample
  misc_feature (1)..(103): Xaa is any amino acid
MXFTVFEIVGFFAEIGFAVIFFVDTAVFFAVFPVVFLATVFFIDFTVDFFTADAFFTGFFIVFLADTAFFTFWVVFVIFVFFVGFLEDFTFIFFLVIVFTIIS

SEQ ID NO: 7521 - DNA, 960 bp, Unknown
  Obtained from environmental sample
  misc_feature (1)..(960): n is a, c, g, or t
atggcgaggatcttncgcagctgtccatgcggacacctgcttataaattcagctccaatgattgcagtgttggcggtttccgcgaaaaggggaatacttataaaaaattcatcgtttgtagaacatcttgccgaaacggattatcttatttttgataaaacgggaaccataactaacggaattctggaggcaagtaattttcatttggatcatgcccgtgattttaacgaacttgttagaacagcttcttgtgttgcgcatggatcgctccacccaatatcaaagtcaattgtttcgttatgcgaaaaaaaagacatagaaagagattatgaaataaaggaatatatcggcaaaggaattgaaggcaaaaaaggagacgatacaatttatcttggcagttataactggatacgctcgcttggttacgatgtggatgacaaatacgaaaatgccggaacttgcgactgggttgtaaaaaacgataaaatactcggatgtatcgtatttaaggatacgccgcgagatgacgccttgcaggcggtaagccaactgaaaagccttggcgtgtcaaagacctgtcttttaacgggggatcattttcaatcggcaaaaaaaatacaaaacgccgttggaattgacgaaatgcaatgcgaattattgccggagcagaaacttaatcatgtcgaggaaatgatgaaaaagcataccgttacggttatcggagacggtatcaatgacgctcttgccctgtcacgagcgcatgtagggatagcgatgggagctatgggttcggatacggcgatacaaagtgcggacattgctttaatgaacaataatcttaccaatattccatatataatcaaactggcacaaaaaacaaaacacactatttatcaaaatattattttagcattttctataagtattattatgatatttttggcgggagcggaatcataa

SEQ ID NO: 7522 - protein, 319 aa, Unknown
  Obtained from environmental sample
  DOMAIN (46)...(263): haloacid dehalogenase-like hydrolase
  misc_feature (1)..(319): Xaa is any amino acid
MARIXRSCPCGHLLINSAPMIAVLAVSAKRGILIKNSSFVEHLAETDYLIFDKTGTITNGILEASNFHLDHARDFNELVRTASCVAHGSLHPISKSIVSLCEKKDIERDYEIKEYIGKGIEGKKGDDTIYLGSYNWIRSLGYDVDDKYENAGTCDWVVKNDKILGCIVFKDTPRDDALQAVSQLKSLGVSKTCLLTGDHFQSAKKIQNAVGIDEMQCELLPEQKLNHVEEMMKKHTVTVIGDGINDALALSRAHVGIAMGAMGSDTAIQSADIALMNNNLTNIPYIIKLAQKTKHTIYQNIILAFSISIIMIFLAGAES

SEQ ID NO: 7523 - DNA, 564 bp, Unknown
  Obtained from environmental sample
  misc_feature (1)..(564): n is a, c, g, or t
atggaagtggacgggacttttgaaaacctcaccaaaaaagagatcgcgtcattgggcaaagagcgggcaaaactccagaaaaacctcggcggtatcaaagagatgaaggagcttcccggcatactgttcatcattgacacccgcatggaggcgattgcggtcgcggaagccaagcgcatgggcatacccattgtcgcggtggttgacaccaactgcaacccggaaaacatagactatcccatccccggcaacgacgacgcgatccgcgccatcaccctgtttacatcgatcatcgccaacgcggtagtggaggccgataacgaggtgggcttaaagattatcgaaaccctgggcgacgaggacgaagatcaggaagggctgatgtcggaaatgtcgaacaaggaagacgatcaggaagttgatattgccgccgcaattgaaaaatattctacagaaatcccgaatgacgcggacagggacagggacgaggaaccggcggatgaaaaagaagggcaccgcatccaggtggacgtggacaaaatttacggagatataggagaataa

SEQ ID NO: 7524 - protein, 187 aa, Unknown
  Obtained from environmental sample
  DOMAIN (2)...(106): Ribosomal protein S2
  misc_feature (1)..(187): Xaa is any amino acid
MEVDGTFENLTKKEIASLGKERAKLQKNLGGIKEMKELPGILFIIDTRMEAIAVAEAKRMGIPIVAVVDTNCNPENIDYPIPGNDDAIRAITLFTSIIANAVVEADNEVGLKIIETLGDEDEDQEGLMSEMSNKEDDQEVDIAAAIEKYSTEIPNDADRDRDEEPADEKEGHRIQVDVDKIYGDIGE

SEQ ID NO: 7525 - DNA, 561 bp, Unknown
  Obtained from environmental sample
  misc_feature (1)..(561): n is a, c, g, or t
atgttcacggaaatttcagattacctaaaagaaattgactgggtttatattgccagcagattaggattaacgcttgttgtagtagttgggcagattgtattttatttgcttgttaagaaaatttttataaaagtgataaatccatttataacaaataaaagcgggcactatctcaaagacattaaagttctcaactacacattgctcaactcggcgcgtttgctaagtatgggattttttgtttcgcgttgcataatgtatgcgagttacataatttcattttacatttcacttactcttttggcatttatttaccccggcacaagaggctgggcttgggctttgctgcatggattgatagacccgtttttatctattttgcacagctttgtggcttatatcccgaacttgctgcaaatagctgttattgtggctgttacgcattactttgtgaaaatcatgaggtttgtatcaaaggaaatagctacagagaggctggttctgccgggtttttatccagactgggctcacgcaacttttaatcttctcgtgccgatctga

SEQ ID NO: 7526 - protein, 186 aa, Unknown
  Obtained from environmental sample
  misc_feature (1)..(186): Xaa is any amino acid
MFTEISDYLKEIDWVYIASRLGLTLVVVVGQIVFYLLVKKIFIKVINPFITNKSGHYLKDIKVLNYTLLNSARLLSMGFFVSRCIMYASYIISFYISLTLLAFIYPGTRGWAWALLHGLIDPFLSILHSFVAYIPNLLQIAVIVAVTHYFVKIMRFVSKEIATERLVLPGFYPDWAHATFNLLVPI

SEQ ID NO: 7527 - DNA, 645 bp, Unknown
  Obtained from environmental sample
  misc_feature (1)..(645): n is a, c, g, or t
gtggttatttcttttgtccaagcgataagtccgtttttcccaatagtatttgtttccagaatattggagggtatatcccatttgggaatagtagtttcagccccgataattatgatattgttgtcttcagaagaacacctatcaattgtaatgggcttgtggagtaccttttttggcatagcgttttctgttacagcatgggcagggaaacccatcatagaaatatattccgcttccgggttgttcttaattcacgcgatatttctgttcgtaatattcctaatcttgtttttctcaataaggaaactggatattccgcatggtgaaaatagcaaaatatcgtttttaacagcgcatataaaagtttattcaaattggagaacgctctcaccgggagtactctttttctttcatacctttatgtacattgcgttattcacattcctgccaagactatcccaaaatgaaaacacaaaggatttattgcttgctatcttgcccttaataagcattattggcacgatgattgccggaataatatcccaatattttgtatcaccttcgaaattaagtgttgccgcgtatatatcattatttatattgatttttgtgattaaattcattgctgtccggtttagcatttga

SEQ ID NO: 7528 - protein, 214 aa, Unknown
  Obtained from environmental sample
  misc_feature (1)..(214): Xaa is any amino acid
MVISFVQAISPFFPIVFVSRILEGISHLGIVVSAPIIMILLSSEEHLSIVMGLWSTFFGIAFSVTAWAGKPIIEIYSASGLFLIHAIFLFVIFLILFFSIRKLDIPHGENSKISFLTAHIKVYSNWRTLSPGVLFFFHTFMYIALFTFLPRLSQNENTKDLLLAILPLISIIGTMIAGIISQYFVSPSKLSVAAYISLFILIFVIKFIAVRFSI

SEQ ID NO: 7529 - DNA, 402 bp, Unknown
  Obtained from environmental sample
  misc_feature (1)..(402): n is a, c, g, or t
gtgtggcatgacgatatctattacacgggcgatgtcgcgtggaaagacgaagacggctacttctggtttgtcggcagaaatgacgacgtgatcaaaagctccggctatcgcatcggcccgtttgaggtggaaagcgcacttatggaacatcccgccgtgcttgagtgcgcgataaccggcgtccccgacgaagatcgcggagcggtagtaaaagcgacggtaatactcgcaaaaggatttgaagcttcagaagaattaaaggttgaattgcagaatcatgtgaagaaaacaaccgcgccttacaaatatccgcgaattattgaatttacagacgagcttcccaaaaccataagcggaaaaatccgccgcgtgcagattcgggatgaagataaaaccaaatga

SEQ ID NO: 7530 - protein, 133 aa, Unknown
  Obtained from environmental sample
  misc_feature (1)..(133): Xaa is any amino acid
MWHDDIYYTGDVAWKDEDGYFWFVGRNDDVIKSSGYRIGPFEVESALMEHPAVLECAITGVPDEDRGAVVKATVILAKGFEASEELKVELQNHVKKTTAPYKYPRIIEFTDELPKTISGKIRRVQIRDEDKTK

SEQ ID NO: 7531 - DNA, 327 bp, Unknown
  Obtained from environmental sample
  misc_feature (1)..(327): n is a, c, g, or t
atggtttccttgaataatttcctgtcctcggctttgtcaattgtttcaggtgaagaaccgagcagccgcacattcattttttcaagaaaaccatcgcgggcaagctgcatacaaagagtgagccctgtctgccctccgagtccggataatatgctgtcgggacgttctttttcgataatacgctttactgtggcaagcgtcagcggttcgatatatattatatcagcgatatttttatcggtcataatggttgcgggattggagtttacaaggacaatctcaattccgtcctcacgcagcatccggcacgcctgtgttcccgcatag

SEQ ID NO: 7532 - protein, 108 aa, Unknown
  Obtained from environmental sample
  misc_feature (1)..(108): Xaa is any amino acid
MVSLNNFLSSALSIVSGEEPSSRTFIFSRKPSRASCIQRVSPVCPPSPDNMLSGRSFSIIRFTVASVSGSIYIISAIFLSVIMVAGLEFTRTISIPSSRSIRHACVPA

SEQ ID NO: 7533 - DNA, 423 bp, Unknown
  Obtained from environmental sample
  misc_feature (1)..(423): n is a, c, g, or t
ttgttatttgttagggggttaaaaaggaggaagaaagacaaagcggagttcaatgaaaggcttgggaattatatcaatcttttcggcgattttactgaatatatgatggctcccaaattgcgtgagaaatttaaggagttcgggcttttttttcccaaaacatccagaaatgtcagcgtgaaagatgaaaataaaaatattattcttgaaactgacgctatgctggaaaacggcgataaagctatgatggttgaaataaaaaccaaacttaccgttgaacgcataaataaacatatagaacggcttgagaaaatgcgaaaacacgccgatttacacggcgacagcggactaaagtccgagcgtgcttttttgggtgcggttgccggtgttgtagtagatgatgaatcaagagagtatccttaa

SEQ ID NO: 7534 - protein, 140 aa, Unknown
  Obtained from environmental sample
  misc_feature (1)..(140): Xaa is any amino acid
MLFVRGLKRRKKDKAEFNERLGNYINLFGDFTEYMMAPKLREKFKEFGLFFPKTSRNVSVKDENKNIILETDAMLENGDKAMMVEIKTKLTVERINKHIERLEKMRKHADLHGDSGLKSERAFLGAVAGVVVDDESREYP

SEQ ID NO: 7535 - DNA, 486 bp, Unknown
  Obtained from environmental sample
  misc_feature (1)..(486): n is a, c, g, or t
ttgttatgcacaaattttaaagagcattttgtcggcaaagcggataatctttttgggcccgcatacaaaggcatcccgctctgcgctgcaacagccgccgcactgcacaaggaatacggcataaatgcgagttttacctataatcgcaaagaggcaaaagaccacggcgaagggggagttctcgtaggcgatacctataaggagaaaagacgcattgttataatagaagatgttataaccgcaggcacttccatagaggaaacgatgcgaactatgtctgctattccaaatgcggagattgcgggtttaatagtggcaatagacagaagggaaaaactcggagatggcaaaagtgcgttgcagcaggtcaaggaaaaatacggaatagaaacccattcaatagcgagcattgaggatattttgaaattcgccccggaagaacacagagaaagtattgagaagtatagacttgagtggggagtttaa

SEQ ID NO: 7536 - protein, 161 aa, Unknown
  Obtained from environmental sample
  DOMAIN (1)...(123): Phosphoribosyl transferase domain
  misc_feature (1)..(161): Xaa is any amino acid
MLCTNFKEHFVGKADNLFGPAYKGIPLCAATAAALHKEYGINASFTYNRKEAKDHGEGGVLVGDTYKEKRRIVIIEDVITAGTSIEETMRTMSAIPNAEIAGLIVAIDRREKLGDGKSALQQVKEKYGIETHSIASIEDILKFAPEEHRESIEKYRLEWGV

SEQ ID NO: 7537 - DNA, 906 bp, Unknown
  Obtained from environmental sample
  misc_feature (1)..(906): n is a, c, g, or t
ttggactttatatgcaaaaatactgcggctgcatttttcnagagaaagaacgatacgaaaataccctttcgggcggaattgatgacaaaaaacaaaacgagttatcaatacgctatgccagcgatcaacaatccccacctccccactccctactccctactccctgatcaattccaacgcttagccctgcttaccggcacagatgtgttagaaaaactaaaacaaacaaatgtgataatttttggcgtgggcggagtgggaagctggtgcgcggaagctctggttcgctcaggcatagggaaaataggcatagtagattacgatacagtaaacgactccaatataaaccgccaaattcaagccacatataatactatagggcgctcaaaggttgaggttatgaaacagcgtctgctggaaataaaccccggctgcgaagtgagcgtatgggcaaaaaatttttcccgtgaaactgccgcggaattcggcatagaaaaagcgaactacgccattgacgccattgacacatttccccataaacttgatttgattgaattccttttcaacgcgggagttacatttttttcatcaatgggaatggcgttaaaaattgatcccactcgtataaaaacagccagtatatgggaatccaggggctgcgctcttgcaaggcttgtacggcagcgtttacgtacacgcggctttaccggcgactttaccgtagtgtacagcgacgaaccgcctgttaactcgggcagcagccccgcggggctgagtgaagacgagccggggagcaaaaaacgaacaaacggcagttgtgtcactgttaccgctccggcgggtatggcgctggcgagcctttgttacgcgacattcaaatcaagatccggcgagactcgccgataa

SEQ ID NO: 7538 - protein, 301 aa, Unknown
  Obtained from environmental sample
  DOMAIN (74)...(209): ThiF family
  misc_feature (1)..(301): Xaa is any amino acid
MDFICKNTAAAFFXRKNDTKIPFRAELMTKNKTSYQYAMPAINNPHLPTPYSLLPDQFQRLALLTGTDVLEKLKQTNVIIFGVGGVGSWCAEALVRSGIGKIGIVDYDTVNDSNINRQIQATYNTIGRSKVEVMKQRLLEINPGCEVSVWAKNFSRETAAEFGIEKANYAIDAIDTFPHKLDLIEFLFNAGVTFFSSMGMALKIDPTRIKTASIWESRGCALARLVRQRLRTRGFTGDFTVVYSDEPPVNSGSSPAGLSEDEPGSKKRTNGSCVTVTAPAGMALASLCYATFKSRSGETRR

SEQ ID NO: 7539 - DNA, 651 bp, Unknown
  Obtained from environmental sample
  misc_feature (1)..(651): n is a, c, g, or t
gtgggagaaggcgaaaaaacttatgaacagcagtgcgggcgcatggaagcggcaatcgccgataacaccgccgctctggaactaaagcctgatatggaaaccgccttcttcaaccgcggccaggcccatttttacagccatgaattcccgcaggcaatagaagactttaaccgcgcccttgccataaatcccaactgggacatggccttaggctcaagggggcttgccttttataaaatggaagaaacagaaaaggccctcgccgattacaacgcggcattggcggttaacccctgtctgtatcaggttctggtgaaccgcggcaccctctatgctgataagaaggaagagccggagaaagcggtagaagattacaccgcggcgcttgaaataaattccgacatggtcgaggccctgtactcaagaggcctcgccctttacgcaatggacgaagaagataaggccattgccgattttaaccgggcgcatgaacttgcgccaaatgacgcgaatgttctcgctttcagggggctggtttattaccagacaggcgatgatgaaaaagccctcgccgattttcaggctgctctaaaccttgaccctgaaaacaagaacgcccttagcggcatgaagttgataaaggagcaatga

SEQ ID NO: 7540 - protein, 216 aa, Unknown
  Obtained from environmental sample
  DOMAIN (33)...(66): Tetratricopeptide repeat
  misc_feature (1)..(216): Xaa is any amino acid
MGEGEKTYEQQCGRMEAAIADNTAALELKPDMETAFFNRGQAHFYSHEFPQAIEDFNRALAINPNWDMALGSRGLAFYKMEETEKALADYNAALAVNPCLYQVLVNRGTLYADKKEEPEKAVEDYTAALEINSDMVEALYSRGLALYAMDEEDKAIADFNRAHELAPNDANVLAFRGLVYYQTGDDEKALADFQAALNLDPENKNALSGMKLIKEQ

SEQ ID NO: 7541 - DNA, 639 bp, Unknown
  Obtained from environmental sample
  misc_feature (1)..(639): n is a, c, g, or t
ttgaaacatggaatcattgacggcgttcaagtggttctgctggcgcgtcatgggcgggaacataccattccccccactcaggtaaattaccgcgccaatattgccgccctcaaagcggcagggtgtacccacattgtcgccagtacggcggtaggttctctcagggaagaaatccaccgcggcgatctggtcattattgatcaattcattgactttaccaaacagcgaaaaatgacgtttcacgaatcttttgctccccataatcccgttcattgccccatggcggatccgtacgacagccggcttcggcagattcttattgatgagtgtaagagcaggggatacccttttcacgatcatggcgtcgtggtaaccattgagggcccccgcttttcaacccgggccgagtccttaatgttccgcattttgggggccgatattatcaatatgtccatcgctaccgagaccgttcttgccaatgaaattggtattccctatgcggcagttgccatgagtaccgattatgattgctggaaaagcgatgaagagccggtaagctgggaagcgatcctgaaggtcttttccgagaatgccgccagggtaacggcgttgcttaaaggtattgtttccagaatataa

SEQ ID NO: 7542 - protein, 212 aa, Unknown
  Obtained from environmental sample
  DOMAIN (2)...(210): Phosphorylase family 2
  misc_feature (1)..(212): Xaa is any amino acid
MKHGIIDGVQVVLLARHGREHTIPPTQVNYRANIAALKAAGCTHIVASTAVGSLREEIHRGDLVIIDQFIDFTKQRKMTFHESFAPHNPVHCPMADPYDSRLRQILIDECKSRGYPFHDHGVVVTIEGPRFSTRAESLMFRILGADIINMSIATETVLANEIGIPYAAVAMSTDYDCWKSDEEPVSWEAILKVFSENAARVTALLKGIVSRI

SEQ ID NO: 7543 - DNA, 417 bp, Unknown
  Obtained from environmental sample
  misc_feature (1)..(417): n is a, c, g, or t
atgggaataaaacaaatatcagtttttctggaaaacacgacgggcaggttaagcgaggttacaaaaactctcgccaacgccggagtaaaccttagggcaatcagtattgccgacaccgcggactttggaattttacgcatcatcgccgataagaccgaaaaagcggttgaaactctgacacaggcgggatttaccacgcggcagaccgacgtggtagcggtggaaattgaagacgtaccgggcagccttgccaaactgatggaactgttccagcagtcactggtaaatatcgagtatctttatgcttcgcttgaaggacaggttggaaaggccgtagtcattttcaagttgaaggatcatgaaaagggacagcaaatactgagcgctaagggctttaaattagcggataacttctaa

SEQ ID NO: 7544 - protein, 138 aa, Unknown
  Obtained from environmental sample
  DOMAIN (4)...(71): ACT domain
  misc_feature (1)..(138): Xaa is any amino acid
MGIKQISVFLENTTGRLSEVTKTLANAGVNLRAISIADTADFGILRIIADKTEKAVETLTQAGFTTRQTDVVAVEIEDVPGSLAKLMELFQQSLVNIEYLYASLEGQVGKAVVIFKLKDHEKGQQILSAKGFKLADNF

SEQ ID NO: 7545 - DNA, 621 bp, Unknown
  Obtained from environmental sample
  misc_feature (1)..(621): n is a, c, g, or t
gtgctcgacgggctctcaatctatgaggcgcgctacaatatgggcgcgattctagcaaaggagtatccggtagacgccgacgtcgtctgcggcgtgccggacagcggcttggtcgcggcaagcggctatagcgctgtaagcggtatcccgctcgcgtcaggatttgtcaagaacagatacatcgggcgtagtttcatctacccaacgcagacgcaacgcgacagcgcggtgcggcaaaaactcaacccgctggcggcaaacgtgaaagaaaaaaaggtcgttctcgttgacgactccatagtacgcggcacgacctgcgagaaaattatccgcagcctcagaagcgccggagccgcggaagtccacatgagagtatcgtcgccgccgttccgttacacttgccactacggaaccgacataggcagcgaagataatcttatagcgaacaaaatggctgtagacgacatccgccaaaaattcggcgccgatagtttggggtacataagtatagaggggctgaaaaaagcctgtgaaaaatgcgttctgccgttttgcacggcctgcttcacaggccacgacgaaaacgcaaccgcgagcaccagaaaagatattttcgaataa

SEQ ID NO: 7546 - protein, 206 aa, Unknown
  Obtained from environmental sample
  DOMAIN (3)...(135): Phosphoribosyl transferase domain
  misc_feature (1)..(206): Xaa is any amino acid
MLDGLSIYEARYNMGAILAKEYPVDADVVCGVPDSGLVAASGYSAVSGIPLASGFVKNRYIGRSFIYPTQTQRDSAVRQKLNPLAANVKEKKVVLVDDSIVRGTTCEKIIRSLRSAGAAEVHMRVSSPPFRYTCHYGTDIGSEDNLIANKMAVDDIRQKFGADSLGYISIEGLKKACEKCVLPFCTACFTGHDENATASTRKDIFE

SEQ ID NO: 7547 - DNA, 432 bp, Unknown
  Obtained from environmental sample
  misc_feature (1)..(432): n is a, c, g, or t
atgcggggcggcagtatttttgtaaaaggcaatgcagggtacagaacgggcatccacatgaaggaatacaaggagaaaaaaccggtaatcgtcattggcggcaaagtgggcagttttctgggcgagtaccttgccggcggggtgatagtcgtgcttggcattgattcggaggaagcccctgtctttaattttacgggaaccggtatgcatggcggacacatttttatccggacaaccaaagaccttctgagcctgccggcacaggttgccttatcaaacgctacggcggaagacttaaacgagattaagccatacctttccgaatttacgagttatttcggaatagatacagattcgcttttaaaagacaatttttatttgttaaagcccaatacaaaaaacccgtacaaacagctatatacagcaaattga

SEQ ID NO: 7548 - protein, 143 aa, Unknown
  Obtained from environmental sample
  misc_feature (1)..(143): Xaa is any amino acid
MRGGSIFVKGNAGYRTGIHMKEYKEKKPVIVIGGKVGSFLGEYLAGGVIVVLGIDSEEAPVFNFTGTGMHGGHIFIRTTKDLLSLPAQVALSNATAEDLNEIKPYLSEFTSYFGIDTDSLLKDNFYLLKPNTKNPYKQLYTAN

SEQ ID NO: 7549 - DNA, 810 bp, Unknown
  Obtained from environmental sample
  misc_feature (1)..(810): n is a, c, g, or t
atggactttaatcgttgcggagtgccgcttttggaaattgtctcgcagcccgacttccgcaattctgccgaggtaatcgcctatctggagaaactgcgcgagacgcttttataccttgacgtgtgcgactgtaaaatgcaggaaggttccattcgcgccgatgtcaatctgtccgtgcgcctagagggcgctgaattgggaacgcgtaccgagacaaaaaacatgaactcttttaaggcgattgcgcgcgccattgaatacgaaacggcgcgtcagatcgaaatactggaagacggcggacaggttgttcaggaaacgcgccgttgggacgacgaaaaacttgaatcttacagtatgcgctcaaaggaaaacgcgcaggactaccgttactttccggagcctgacctcttgccgattgacattgatgacgcgtggcttgcaagcgtcaaaaaaaatctgcctgaattggcgaatcaaaaacgtgaacgctactgcaatgatttcaagatacccgaatcagaggctgcggttcttactgtccacaaaaatatctgcgacctgtttgagatcgttgcgaagaaaagcggacagcctgttgaagcggctcatctcttaaccggagaaataatgcggctgatgaacaacaccaatgtactgcctgaagatttggttatagacgcaggtaaattatctacgctcattacccttgttgcagacgggaagatcaaccgaaacgcctataaagaaaccgtcgaggcggtattcacgcgcaatgtcgatcctgaaagctatatcgccgaaaaaggttaa

SEQ ID NO: 7550 - protein, 269 aa, Unknown
  Obtained from environmental sample
  DOMAIN (1)...(99): PET112 family, N terminal region
  misc_feature (1)..(269): Xaa is any amino acid
MDFNRCGVPLLEIVSQPDFRNSAEVIAYLEKLRETLLYLDVCDCKMQEGSIRADVNLSVRLEGAELGTRTETKNMNSFKAIARAIEYETARQIEILEDGGQVVQETRRWDDEKLESYSMRSKENAQDYRYFPEPDLLPIDIDDAWLASVKKNLPELANQKRERYCNDFKIPESEAAVLTVHKNICDLFEIVAKKSGQPVEAAHLLTGEIMRLMNNTNVLPEDLVIDAGKLSTLITLVADGKINRNAYKETVEAVFTRNVDPESYIAEKG

SEQ ID NO: 7551 - DNA, 789 bp, Unknown
  Obtained from environmental sample
  misc_feature (1)..(789): n is a, c, g, or t
atggacagcctgataaccatggtcaaagaaggcgaatatccttcccccgaatatgtccgcgcccttaccggaaccggcgatgcctcgggcgaacctctcctgggcgagtcagaagaagcgtttattcacattcctaacggatttggtcgggtttatcccaaaagcaaaaaccaggccgcttatattcggggaatgaggaagttcgatattagttttggcatagggcccgccgggacgggcaaaacctaccttgcgattgcccaggctttgagtctggttttgtccaagaagatgagaaaactggttctgacccgcccggtggtagaagccggggagagccttggctttcttcccggagaccttgcccagaaaataaatccttacctcaggcccctttacgacgcaatggaatccctcgtccccttcgatataattcaccgtatggaagagaacaggacaattgaaattgctcccctggcgtatatgcggggaaggagcctcaacgactgcgtggttatccttgacgaggcgcaaaacaccacaaaagagcagatgaaaatgttcctgaccagaattgggcagggcgcaagggcagtggttacaggggacataacccaaattgacctgccgaggcggaacgattcaggccttttgcacgcggtttcaatactttcgggtgtagagggattgtgcttttcgtatcttcatacaatggatgtggttcgcaaccctcttgtaaaaaaatcatccaggcctatgagatttctctttcagagaaatctcatttaa

SEQ ID NO: 7552 - protein, 262 aa, Unknown
  Obtained from environmental sample
  DOMAIN (50)...(254): PhoH-like protein
  misc_feature (1)..(262): Xaa is any amino acid
MDSLITMVKEGEYPSPEYVRALTGTGDASGEPLLGESEEAFIHIPNGFGRVYPKSKNQAAYIRGMRKFDISFGIGPAGTGKTYLAIAQALSLVLSKKMRKLVLTRPVVEAGESLGFLPGDLAQKINPYLRPLYDAMESLVPFDIIHRMEENRTIEIAPLAYMRGRSLNDCVVILDEAQNTTKEQMKMFLTRIGQGARAVVTGDITQIDLPRRNDSGLLHAVSILSGVEGLCFSYLHTMDVVRNPLVKKSSRPMRFLFQRNLI

SEQ ID NO: 7553 - DNA, 504 bp, Unknown
  Obtained from environmental sample
  misc_feature (1)..(504): n is a, c, g, or t
gtgggagccacccgcgccatggacgaactatatttgacaacctgcgcagagcggcgaatgtacggaagaaccgcgcctgcacagccatcgctgtttttgcgcgagatagacagaagctgtctgcaaataaaagaacttccgccgacacaaaacgacactgcgccgcaatacgctggcaaaagatcattcatcgggagaaattttaatccgcttaatccgcaaagcctgcgcgcaagcggcgttggcaggggaacaagtagcgaagcaggcaacagcgcaggtagcggcgcaaaaagcaaagcaaatgtagaacttgaagaacgcgcgggttggcgaatagggcagcgtttgtttcacgaggatcacggttacggcgcagttgtgggaataaaagacagcgaggacggacccgtcgttcatgttcgttttgattcagggttagacaaacgatttttaagcgacattcagggcagagcctatgaaaaagtaggagaggaatattaa

SEQ ID NO: 7554 - protein, 167 aa, Unknown
  Obtained from environmental sample
  misc_feature (1)..(167): Xaa is any amino acid
MGATRAMDELYLTTCAERRMYGRTAPAQPSLFLREIDRSCLQIKELPPTQNDTAPQYAGKRSFIGRNFNPLNPQSLRASGVGRGTSSEAGNSAGSGAKSKANVELEERAGWRIGQRLFHEDHGYGAVVGIKDSEDGPVVHVRFDSGLDKRFLSDIQGRAYEKVGEEY

SEQ ID NO: 7555 - DNA, 840 bp, Unknown
  Obtained from environmental sample
  misc_feature (1)..(840): n is a, c, g, or t
ttgtatttacaggaggcggaaatgtataatatagataaactttttgaagcggtcaacgcgaagggccatgtgtgcgtgggccttgatacctcggttgaatatgttcccccgctggaacggaagcgggccgcttccgacgccgaagcggtactggcttttaacaaggctcttgttgactctgcttttgacgcctgcgcctgctacaaggtgcagatcgcctactacgaggagatggggctggaagggctgggttgttacgcgaagactctgcggtacatacgcgaaaaaggcggcctggttatagccgacataaaacgcggcgatattgccgataccgccctgcgttacgcgaaagcccatttcgccggcgactttgatgccgattttgtcacgctttccccctacatgggcatggactcaattgagccctggctttcctacgccgaacaaggcggcaaaggcgcttttgtgcttatgaggacgagcaacaagggcatgagggatttcgagtaccttgaattgtttcctgacaagaaacgtttgtaccacgcggtgggtgacaaactcgcgggtcttgccacagtgcattgcggcaaatacggttacggggcctttggcgccgttgtcggatgtactgagcgtgacgaggccgccgaaatccgtaaaaattaccccaatctgtttttccttatacccggctacggggctcagggaggcgcggcggatgacgcggctctgcttttgcgcgaaggaaacggcggggtagtgaacgcatcgcgttcgatactgaaagcctgggaagcggagttaaaaaaacaggcggggatgtgtcggcagtga

SEQ ID NO: 7556 - protein, 279 aa, Unknown
  Obtained from environmental sample
  DOMAIN (22)...(273): Orotidine 5'-phosphate decarboxylase / HUMPS family
  misc_feature (1)..(279): Xaa is any amino acid
MYLQEAEMYNIDKLFEAVNAKGHVCVGLDTSVEYVPPLERKRAASDAEAVLAFNKALVDSAFDACACYKVQIAYYEEMGLEGLGCYAKTLRYIREKGGLVIADIKRGDIADTALRYAKAHFAGDFDADFVTLSPYMGMDSIEPWLSYAEQGGKGAFVLMRTSNKGMRDFEYLELFPDKKRLYHAVGDKLAGLATVHCGKYGYGAFGAVVGCTERDEAAEIRKNYPNLFFLIPGYGAQGGAADDAALLLREGNGGVVNASRSILKAWEAELKKQAGMCRQ

SEQ ID NO: 7557 - DNA, 954 bp, Unknown
  Obtained from environmental sample
  misc_feature (1)..(954): n is a, c, g, or t
atgacctacccggacgaaaaattcataggcagacaattgcgtgattanggcggcgattaccgtgacatagcccgaatctgcgtcgggaaaagaaatgtccgatgtaaaaataaaaattcaaacggcatttccgcaatcgttttcttcagacgtatctttaacaactggtatatagggatcacaacccccttgtccaggtttaattacgatctgtataattccgcgcgtatactcataatattagggctggttctcgcactggctatgtgtataatacttctgcgtttagccatagagaaaacccgcgccgtggaaaaatctgtcagccttgaacacgccctcataaaaacaatggcggaactggtagaatgcagagattgcataacaggcggacacatagacagaacacagcgcggaatgaaaatactgttagacgcaatccgaaagaaaggcgtttataaggaaaaaacaaaaggctgggatatagacctgataatccaatccagccagttacacgacataggaaaaatctccatagaagacaggatattaaaaaaacccggcaggcttgatgaagatgaatttaacgaaatgaaaaagcacgctatattcggagagcaaataataattaaaattgaatccatgacaaaagaaagcgaatttctggaatacgcaagaattctcgccgtaagccaccatgaaaaatgggacggcacaggttacccgcacgggttaaaggaagatgaaatcccattattgggacgcatcatggcgattgccgacgtatacgacgcgcttgtttccgcaagatcatacaaaaagccgtttacgcacgaagaagccgtaaaaataatggtagacagcagaggaaaacaatttgacccctgccttattgatttatttctggaagttgctgacaattttaaaaaaactattcccggcgaacagccctaa

SEQ ID NO: 7558 - protein, 317 aa, Unknown
  Obtained from environmental sample
  DOMAIN (129)...(266): HD domain
  misc_feature (1)..(317): Xaa is any amino acid
MTYPDEKFIGRQLRDXGGDYRDIARICVGKRNVRCKNKNSNGISAIVFFRRIFNNWYIGITTPLSRFNYDLYNSARILIILGLVLALAMCIILLRLAIEKTRAVEKSVSLEHALIKTMAELVECRDCITGGHIDRTQRGMKILLDAIRKKGVYKEKTKGWDIDLIIQSSQLHDIGKISIEDRILKKPGRLDEDEFNEMKKHAIFGEQIIIKIESMTKESEFLEYARILAVSHHEKWDGTGYPHGLKEDEIPLLGRIMAIADVYDALVSARSYKKPFTHEEAVKIMVDSRGKQFDPCLIDLFLEVADNFKKTIPGEQP

SEQ ID NO: 7559 - DNA, 588 bp, Unknown
  Obtained from environmental sample
  misc_feature (1)..(588): n is a, c, g, or t
atggaagctttgctcgcccaaaagaggcggattcgcagcccggttggtgccggaatgttttatcccgaagacagaaaggaaattctcaactatttaaggtcatttggtttggaagaagggcagggcggcaatgcgcgggcaattattgcccctcatggggcgtggagctactccgggacgctggttgcaaaggctttttcctcggctatgggcagaagcgacagcataaaacgggtggtaattttagggccaatccatgataaaagggaaaaagggctgtttttatcaaattctcactcttttcatacccctattgggaatattccagttgaccgagaaatgtccgaagaactggaatttcacggtaattcctttgaaatcaatgatattccacacttggcagaacattccatagaaatccttctgccttttgtaaaatactgcttccccaatgcgtcgattgttcctattttgatgggacaaccgaaggctcaatatatttacgaccttgcccaggctttaaaaaccagtagttgcgcctgttttggacgaaacattgatagtagtttcctgcaatctttcctgtaa

SEQ ID NO: 7560 - protein, 195 aa, Unknown
  Obtained from environmental sample
  DOMAIN (13)...(194): Protein of unknown function DUF52
  misc_feature (1)..(195): Xaa is any amino acid
MEALLAQKRRIRSPVGAGMFYPEDRKEILNYLRSFGLEEGQGGNARAIIAPHGAWSYSGTLVAKAFSSAMGRSDSIKRVVILGPIHDKREKGLFLSNSHSFHTPIGNIPVDREMSEELEFHGNSFEINDIPHLAEHSIEILLPFVKYCFPNASIVPILMGQPKAQYIYDLAQALKTSSCACFGRNIDSSFLQSFL

SEQ ID NO: 7561 - DNA, 906 bp, Unknown
  Obtained from environmental sample
  misc_feature (1)..(906): n is a, c, g, or t
ttggggcggatcccggaacaaaaccatagacttccgccttgtttcaaccacaggtccagccgcgagattctcggggtgttccttgaaacccccggcgtctacaacgagatcatcgcccactcggtaggaacaacctacttcgattctggggtggaaacgatttttgagataggcggccaggacgcgaagtatgttttgctaaagaacggcgtgcccatcgactacgccatgaacgaggcctgctctgcgggtactggttccttcctggaggaaagcgctgccggggatctttccatacacagcgcgaaggatatcggtcccattgcgcttaacgctgacgcgccgcttaagttcggggagcactgctcggcgttcatcaacagcgacatccgcaaggcagttcagcagggcgcaagccgcgagaacataaccgcagggatcgtgtgctcgattgtcgccaactaccttaaccgtgtggtgggaaaccgcaccataggcgggaaagttttccttcagggcggcgtagcgaaaaaccccgcggtgccccttgctttcgccatgctcctggacaaggaaatccttgtaccgccttccccggaactcatgggctgttttggcgttgcgctgctttcaaaacgaaaacacgtagacggccttctggaagaacgtccggttgtaatcgacgatctgctaaaccgcgaaatcggttacgagcgggtcttcatctgccaggcctgcgagaatctctgttccattcaggttttgtctattgcttcagctgataaatctgtaagccataagtatatgttcgggggccgctgcaacaagtacaccaatatgcgaaagcaggttaaagatgtgccggtctttgactatgtggaaaaacnggcagaagatgatctttga

SEQ ID NO: 7562 - protein, 301 aa, Unknown
  Obtained from environmental sample
  DOMAIN (2)...(211): BadF/BadG/BcrA/BcrD ATPase family
  misc_feature (1)..(301): Xaa is any amino acid
MGRIPEQNHRLPPCFNHRSSREILGVFLETPGVYNEIIAHSVGTTYFDSGVETIFEIGGQDAKYVLLKNGVPIDYAMNEACSAGTGSFLEESAAGDLSIHSAKDIGPIALNADAPLKFGEHCSAFINSDIRKAVQQGASRENITAGIVCSIVANYLNRVVGNRTIGGKVFLQGGVAKNPAVPLAFAMLLDKEILVPPSPELMGCFGVALLSKRKHVDGLLEERPVVIDDLLNREIGYERVFICQACENLCSIQVLSIASADKSVSHKYMFGGRCNKYTNMRKQVKDVPVFDYVEKXAEDDL

SEQ ID NO: 7563 - DNA, 654 bp, Unknown
  Obtained from environmental sample
  misc_feature (1)..(654): n is a, c, g, or t
atgatcgcaaagcaagttgaaggcattgtctatgtgggctaccattgccgggaaatagcataccttccttcaagggtacaggttccctttgtatacgcctactgttatccaaaagaggaaatctatccgtcggtgatgtacgatgacgaaaaggccgcaaaggacgtaactacgctgctcattattaaaagccataagcgcatcggtgtaatttgcggcccagcctcgagctaccacactcaggcgaggcttaagggctattacgcggccctggtggaacacggcatcacgcccgattcaaaactcgttgtatacggcgattgggaacgcccctcaggctaccatttggccgccttcctcctggatcaaaaggtctcagcgattttctctttcaacgatttgatggcttccggggtttacgaacgcgcctccgagcggaggctgcaaatagggaaagatatttcactttttggttttgacaaccgggatatcagccagggctatatcccggcgctctccaccgtggagccgccgcttaacgaaatcggccgtcgttctgccgggatagtctttaaccagataaaaaaccacaaaaccggtaaaaagcgggtataccttccctgtaccattttagaacggaattccgctatgtag

SEQ ID NO: 7564 - protein, 217 aa, Unknown
  Obtained from environmental sample
  misc_feature (1)..(217): Xaa is any amino acid
MIAKQVEGIVYVGYHCREIAYLPSRVQVPFVYAYCYPKEEIYPSVMYDDEKAAKDVTTLLIIKSHKRIGVICGPASSYHTQARLKGYYAALVEHGITPDSKLVVYGDWERPSGYHLAAFLLDQKVSAIFSFNDLMASGVYERASERRLQIGKDISLFGFDNRDISQGYIPALSTVEPPLNEIGRRSAGIVFNQIKNHKTGKKRVYLPCTILERNSAM

SEQ ID NO: 7565 - DNA, 885 bp, Unknown
  Obtained from environmental sample
  misc_feature (1)..(885): n is a, c, g, or t
atgggccagccgagacattcatcgcccccgccaagacagggtcagggttttcggcagagtcccggcgcccctcagcacaacgcgccgcgtcccggctttcagggcaggccgggctttacgccgcgtccccctcagggtcgaggggggcagtcttccggttctccgcccccaagcatattgccggaaggaaagagcggagcgaagcgcagtttcagggcaaaaaagcccacttataaccgtaaagaaaaagaacttgagatggaggagaaactccgccagaccagaaaaaaaataacatacgttgccaacccggtacccaagtcaatcgaaataatggaaatgatttcggtgtcggaattggcgagaaaaatgaatctgaaggcgtcggacttaatacaaaagctgatgaagcttggcatgatggtcactataaaccagcagatagacgccgataccgcgacgatactggccgccgaattcggagccgacgtaaaaatcatcagcctgtatgacgagaccatcattgacaccggaacggacgaaggcgcggatatgctgccgcggccgccggttgtcaccgttatgggacacgttgaccacggtaaaaccaagctgttggacgcgatacggaaagcggatgtagtgtcgggtgagtttggcgggataacacagcacatcggcgcatacatggtagaaacgccgcacggcagaatcacatttcttgacacgcccggtcacgaggcgttcacgcgcatgagggcgcggggcgcgcaggtaacggacatcgtggtgctggtcgtggcggcggatgatggggtcatgccccagaacattgaggcgatcaaccacgcgaaggaagcaggggtccaatcattgtcgcggtaa

SEQ ID NO: 7566 - protein, 294 aa, Unknown
  Obtained from environmental sample
  DOMAIN (190)...(290): GTPase of unknown function
  misc_feature (1)..(294): Xaa is any amino acid
MGQPRHSSPPPRQGQGFRQSPGAPQHNAPRPGFQGRPGFTPRPPQGRGGQSSGSPPPSILPEGKSGAKRSFRAKKPTYNRKEKELEMEEKLRQTRKKITYVANPVPKSIEIMEMISVSELARKMNLKASDLIQKLMKLGMMVTINQQIDADTATILAAEFGADVKIISLYDETIIDTGTDEGADMLPRPPVVTVMGHVDHGKTKLLDAIRKADVVSGEFGGITQHIGAYMVETPHGRITFLDTPGHEAFTRMRARGAQVTDIVVLVVAADDGVMPQNIEAINHAKEAGVQSLSR

SEQ ID NO: 7567 - DNA, 480 bp, Unknown
  Obtained from environmental sample
  misc_feature (1)..(480): n is a, c, g, or t
ttggacccctgcttccttcgcgtggttgatcgcctcaatgttctggggcatgaccccatcatccgccgccacgaccagcaccacgatgtccgttacctgcgcgccccgcgccctcatgcgcgtgaacgcctcgtgaccgggcgtgtcaagaaatgtgattctgccgtgcggcgtttctaccatgtatgcgccgatgtgctgtgttatcccgccaaactcacccgacactacatccgctttccgtatcgcgtccaacagcttggttttaccgtggtcaacgtgtcccataacggtgacaaccggcggccgcggcagcatatccgcgccttcgtccgttccggtgtcaatgatggtctcgtcatacaggctgatgatttttacgtcggctccgaattcggcggccagtatcgtcgcggtatcggcgtctatctgctggtttatagtgaccatcatgccaagcttcatcagcttttgtattaa

SEQ ID NO: 7568 - protein, 159 aa, Unknown
  Obtained from environmental sample
  misc_feature (1)..(159): Xaa is any amino acid
MDPCFLRVVDRLNVLGHDPIIRRHDQHHDVRYLRAPRPHARERLVTGRVKKCDSAVRRFYHVCADVLCYPAKLTRHYIRFPYRVQQLGFTVVNVSHNGDNRRPRQHIRAFVRSGVNDGLVIQADDFYVGSEFGGQYRRGIGVYLLVYSDHHAKLHQLLY

SEQ ID NO: 7569 - DNA, 744 bp, Unknown
  Obtained from environmental sample
  misc_feature (1)..(744): n is a, c, g, or t
ttggcgcgaagaacccccaaagctcagatgctgcgcttccacactcaaacggcgggctgcactttgacggctcaacaacccgagaacaacattattcgcgtcgccatgcaagcgctggcctccgttctaggcgggacgcagtcgttgcacaccaacagcatggacgaagctctggcccttcccaccgagaagagcgtggaagtcgcactccgcacccagcagattatcgcttacgaaagcggcgtgacgaataccatcgatcccttagccggcagttacgttatcgagaagctgaccaatgacattgaagcgggcgccagagagtacattaaaaaaatcgacgacatgggcggtatgctggtcgccatcgaaaagggttttccgcagaagcatatccaggacgccgcatacgagtatcagaaatccatcgaatccaaggacacgatcgttgtgggagtcaatcagttccatacccaggagtcaggagcaggcggacgaaagttattgcgagtggatgcctccgtcgagcagagacagatcgagaagctcaagaaactccgcgagagccgcgacaacgtggcggttaaagagcggctcgaaagcatccgtaagggtgcccgcgatgaaaacgtaaacttgatgccgctgatcttggacgcggtgcgcgtctacgccacggagggcgaaatttgcggcgttcttcgcgaagaattcggcgaatatgtcgagaacatcgttctttaa

SEQ ID NO: 7570 - protein, 247 aa, Unknown
  Obtained from environmental sample
  DOMAIN (1)...(241): Methylmalonyl-CoA mutase
  misc_feature (1)..(247): Xaa is any amino acid
MARRTPKAQMLRFHTQTAGCTLTAQQPENNIIRVAMQALASVLGGTQSLHTNSMDEALALPTEKSVEVALRTQQIIAYESGVTNTIDPLAGSYVIEKLTNDIEAGAREYIKKIDDMGGMLVAIEKGFPQKHIQDAAYEYQKSIESKDTIVVGVNQFHTQESGAGGRKLLRVDASVEQRQIEKLKKLRESRDNVAVKERLESIRKGARDENVNLMPLILDAVRVYATEGEICGVLREEFGEYVENIVL

SEQ ID NO: 7571 - DNA, 477 bp, Unknown
  Obtained from environmental sample
  misc_feature (1)..(477): n is a, c, g, or t
ttggcgcacaattcgaaaacgctggctgccatgttcaaaccatcaatgaatgcacaattccccattttgggcgtcacaggcggcatcgctgccggcaaaagtaccgtttctgccatattgaaggagatggggtggacagtcatagattcggacagcgtggcgcgggacgtggtggcgcgtggcacagggggcttggacagcctcgcccgaacatttggcacaggagtaatcgatggtgaagggggcctaaacagggcttacttggccaaaatggtttttcctgatgccgaactcaggcgcaaactggagggtttgctgcaccccctgatagaagcagaaatcgaaaaacgcatttgcgccctgccgccttcgacaaagggggccgcgctggaagccgcactatggatagagataggcaaaggacacacatttgatgcgctatgggttgttgancgcgcctgtgctcggccgatctga

SEQ ID NO: 7572 - protein, 158 aa, Unknown
  Obtained from environmental sample
  DOMAIN (21)...(156): Dephospho-CoA kinase
  misc_feature (1)..(158): Xaa is any amino acid
MAHNSKTLAAMFKPSMNAQFPILGVTGGIAAGKSTVSAILKEMGWTVIDSDSVARDVVARGTGGLDSLARTFGTGVIDGEGGLNRAYLAKMVFPDAELRRKLEGLLHPLIEAEIEKRICALPPSTKGAALEAALWIEIGKGHTFDALWVVXRACARPI

SEQ ID NO: 7573 - DNA, 489 bp, Unknown
  Obtained from environmental sample
  misc_feature (1)..(489): n is a, c, g, or t
ttggccttccgctacgccggcactcccaaaagcgtactgacagtgttgagcggaatggtgtacatggaacacntgcaagaaaacatccgcacatattctccactcgagccactgaacgaaatagagtacagtgcgctgggtgaagtcaccgaaataacgctaaatagcgactacgtgcagtgcaccgaatgtcagtactgtatgccttgcccatacggcgtggacattccgggcgtttttggccactacaaccgcatcgttggagccgaccaaagattaaaaagttctaaggacgaaaattacaaggcggcccgacgggcattccttgtgggctacgacagaagcgttccaaaacttcgccaggcaaaacactgcatcggctgtccatcgatttgcaaaaaaacatgcccgcagaccttggacataccaaacgaaatgcgccgcatagaccaatatgtcgaattattgaagcaaaagagcgatttttga

SEQ ID NO: 7574 - protein, 162 aa, Unknown
  Obtained from environmental sample
  misc_feature (1)..(162): Xaa is any amino acid
MAFRYAGTPKSVLTVLSGMVYMEHXQENIRTYSPLEPLNEIEYSALGEVTEITLNSDYVQCTECQYCMPCPYGVDIPGVFGHYNRIVGADQRLKSSKDENYKAARRAFLVGYDRSVPKLRQAKHCIGCPSICKKTCPQTLDIPNEMRRIDQYVELLKQKSDF

SEQ ID NO: 7575 - DNA, 966 bp, Unknown
  Obtained from environmental sample
  misc_feature (1)..(966): n is a, c, g, or t
atgccctggaaatgcgggattgagcagtctgctgtcccggcccgccgtggcgtttataccgggcggctccggcgaggggataagcggcatcctttcctttttgaaaaagccgccggtgaaaaaaccgccccttacgttatgcgcaaccggacgctgaccggtctggatgagcaatggtacgcctcagtggaaaaccgtatccgcggttgggcgatgcgggatgatgtcaacgcggcgacgctgaaaaaattcggcaggcgctggatacgcaacctttcccgcaacatgagcgccattcgggatatgccgggtatttcccgatttgcgggactggcggcggatgatccatcggctcatgagccgccggttcatgatccgctgccggtttttcttgccgccgccgggccggggctggacagcatagcatccctgctgccggaaatacaccggcgctgtatcgtggtggcggttgacaccagcctgcgcttcctgttgaggaacggcgttgatcctgattttacgctggtggttgatccccaattttggaacagccgccaccttgaccgctgtataagcccccacacccgaattatcgccgaatccgccgtatacccgccggtgctgcggcttcctttcaaagacttgtacctttgcggctcgttgtatcccctgggaagttttattgaacagcgggtagaccccaaggggattttaggcgcgggcggctcggttgcgaccagcgcctgggatttttcccgaattctgggggcgcggcagatatggatcgccggtttagaccttgcctttcccggccttaaaacccatttccggggagcgcagtttgaagaaaaggcccttgccgaatcagaccgcctgaaccccgccgagacctggctgctccacgccctgcaaagcggcatcccctttacgcgccgtcaatttcggcacgagctcgtgccgatctga

SEQ ID NO: 7576 - protein, 321 aa, Unknown
  Obtained from environmental sample
  DOMAIN (106)...(267): Protein of unknown function DUF115
  misc_feature (1)..(321): Xaa is any amino acid
MPWKCGIEQSAVPARRGVYTGRLRRGDKRHPFLFEKAAGEKTAPYVMRNRTLTGLDEQWYASVENRIRGWAMRDDVNAATLKKFGRRWIRNLSRNMSAIRDMPGISRFAGLAADDPSAHEPPVHDPLPVFLAAAGPGLDSIASLLPEIHRRCIVVAVDTSLRFLLRNGVDPDFTLVVDPQFWNSRHLDRCISPHTRIIAESAVYPPVLRLPFKDLYLCGSLYPLGSFIEQRVDPKGILGAGGSVATSAWDFSRILGARQIWIAGLDLAFPGLKTHFRGAQFEEKALAESDRLNPAETWLLHALQSGIPFTRRQFRHELVPI

SEQ ID NO: 7577 - DNA, 330 bp, Unknown
  Obtained from environmental sample
  misc_feature (1)..(330): n is a, c, g, or t
ttgacagggagagggaaaatggcaaagaaaaacaaggaaaggcggtcttatacgaaggaattcaagaccgaggctgtagcactggcggaaaagaaagacaagccgacaagccaagtcgctaaggatttgggtttaaatgaaaacgtgctaaggcggtggatccatcagacaaaggatgctgaaggaaccaacatcagagtgtttccagggcatggaagggcaagggacgcagagcttatccgcctgcggaaagagaacaaagcgcttcggaacgcgaatgaaatcctaaaaaaagcggcggtcatcttcgcacaagaagacccccagtga

SEQ ID NO: 7578 - protein, 109 aa, Unknown
  Obtained from environmental sample
  DOMAIN (14)...(96): Transposase
  misc_feature (1)..(109): Xaa is any amino acid
MTGRGKMAKKNKERRSYTKEFKTEAVALAEKKDKPTSQVAKDLGLNENVLRRWIHQTKDAEGTNIRVFPGHGRARDAELIRLRKENKALRNANEILKKAAVIFAQEDPQ

SEQ ID NO: 7579 - DNA, 654 bp, Unknown
  Obtained from environmental sample
  misc_feature (1)..(654): n is a, c, g, or t
ttgcctggagcctctgattcgcttaccgtgctgggcgcggctgtttcagcttttgccgctgtttccgaaatcaggattatcgtcatagttgtgccgaatgaacccgaaaccggggaaactgcggcgcgaaacgccctgtccccaaaaatttttgccggaatagagccgtcagtgcgttttgtcaccggcggcagtacccgccgcgcttcggttttcaacgcccttcgcgcccttgccgctgacgcgccaagttatgtgcttatccatgacggagcccgcccctggatcagctctgctctaattgagcgcgtgattaagggtgtgaaacaataccacgccgttatcccgctgctccctctggcggaaacccccaaagaaacggacttgccgcttgacggctttgttggttgcgactcttggggccctgtttttatcaagcggcagctaaagagagcctttataggaaccgcccagacgcctcaagcctttgcttttcctgaaattctcgccgcccatgaaagggccgctgcacaggatggcagggatttcaccgatgatgccgaagtctgggctgagttttacggtcctgtcgcggtcattcccggcgagatcggcaaccgcaaaataactttcaaggaagacatatcatgttga

SEQ ID NO: 7580 - protein, 217 aa, Unknown
  Obtained from environmental sample
  SIGNAL (1)...(19)
  DOMAIN (6)...(216): Uncharacterized protein family UPF0007
  misc_feature (1)..(217): Xaa is any amino acid
MPGASDSLTVLGAAVSAFAAVSEIRIIVIVVPNEPETGETAARNALSPKIFAGIEPSVRFVTGGSTRRASVFNALRALAADAPSYVLIHDGARPWISSALIERVIKGVKQYHAVIPLLPLAETPKETDLPLDGFVGCDSWGPVFIKRQLKRAFIGTAQTPQAFAFPEILAAHERAAAQDGRDFTDDAEVWAEFYGPVAVIPGEIGNRKITFKEDISC

SEQ ID NO: 7581 - DNA, 441 bp, Unknown
  Obtained from environmental sample
  misc_feature (1)..(441): n is a, c, g, or t
atggcttttgcttcccttgccgattataacggtgagattgacgtaatttttttccccaacgcatgggaaaaataccagaacgagattgcgccggaaaaaatcgtaatattaaagggaaaaatagattatcaaaaagacaaggataaatattcgtttatagctgacagcattattgacaaacaggacgcggactctgaaataccgacagaagaaatacacataaaactaaaaactgaggctgttgactgtgatgaaaatctgtaccctctgcgggattatcttgcggaaaatacaggttcgtgtttaacgtttatccatgttccggtgcaggacggagaaaaaacagtccgtattttttccggaataaattttttaggcaacgctaatgttattgacgaattgaaaaataacaaatgtgtagccgaagtatggaggaattaa

SEQ ID NO: 7582 - protein, 146 aa, Unknown
  Obtained from environmental sample
  misc_feature (1)..(146): Xaa is any amino acid
MAFASLADYNGEIDVIFFPNAWEKYQNEIAPEKIVILKGKIDYQKDKDKYSFIADSIIDKQDADSEIPTEEIHIKLKTEAVDCDENLYPLRDYLAENTGSCLTFIHVPVQDGEKTVRIFSGINFLGNANVIDELKNNKCVAEVWRN

SEQ ID NO: 7583 - DNA, 594 bp, Unknown
  Obtained from environmental sample
  misc_feature (1)..(594): n is a, c, g, or t
gtgcaaggctccgccgaggccttgcgttcaagtttagagaagctttcaacaaaagaaataagacttcatgttatccaggccctgccgggagccattaacgaaggggacgtggatctttcaattgcgtctaatgccatcataatcggctttaacgtgcggcctgttccaaaagccaaagcccttgcggaacaggagaaggtagaaatacgccgctataatgtaatttacaaagcggtagaagagatccagcaggcaatggaaggaatgctcaagcctgaaaccaaagaagaaataatcgcgactgtggaagtaagggatacgtttaaaacgccgaaattcggcgttgtcgccggctgctacgtgctgaccggaaatgtcaaacgaagcgccagcattcatattgtccgcgatgacattgaaatttataccggaaaaatcggctcgctaaggcgctttaaggacgatgtaaaggaagtcgccgcgggttatgaatgcgggataggccttgaaggcttcgacgatgtaaaaacaggggatcagtttgaagtctttgagatgatagaaattgccagaaagctaaaagattcaacttaa

SEQ ID NO: 7584 - protein, 197 aa, Unknown
  Obtained from environmental sample
  DOMAIN (114)...(182): Elongation factor Tu domain 2
  misc_feature (1)..(197): Xaa is any amino acid
MQGSAEALRSSLEKLSTKEIRLHVIQALPGAINEGDVDLSIASNAIIIGFNVRPVPKAKALAEQEKVEIRRYNVIYKAVEEIQQAMEGMLKPETKEEIIATVEVRDTFKTPKFGVVAGCYVLTGNVKRSASIHIVRDDIEIYTGKIGSLRRFKDDVKEVAAGYECGIGLEGFDDVKTGDQFEVFEMIEIARKLKDST

SEQ ID NO: 7585 - DNA, 582 bp, Unknown
  Obtained from environmental sample
  misc_feature (1)..(582): n is a, c, g, or t
gtggtctatcttgaaaacagcattgttgaagaacctacccatgttgaggcctttttatatcttggcatcgtatacgagcaaatgggtcgaaccgatgaagccattgcggtataccggcagattttgggccgcgccggggctttaaccgccaatgtgacaaccaatcttggcaacgcttattttaagaaaggttcaatcgcggaagcggaaatgctgtacacccaggctttgaacgcggatatggtgtatgctcttgcctatcttggcagggcgaacgcgagaataaaaaggaacgcgctgatggaagccgtttccgattacgagcagtaccttacgcttgctccgcggtccccccagcgccagacaatcgaacggcttattcttctaataaagagtgaatatgccgaggcggaaagaaaacggctggttgctgaggaagtggcccggcttgaggcggagcgaaagcagcgccttttggacgaaatttcggcttcgcttcagggcgccgcgggggcaagtaagggactttccaccggcgccgaggatattgaaggatatgagggggtattcgaacttgagtaa

SEQ ID NO: 7586 - protein, 193 aa, Unknown
  Obtained from environmental sample
  misc_feature (1)..(193): Xaa is any amino acid
MVYLENSIVEEPTHVEAFLYLGIVYEQMGRTDEAIAVYRQILGRAGALTANVTTNLGNAYFKKGSIAEAEMLYTQALNADMVYALAYLGRANARIKRNALMEAVSDYEQYLTLAPRSPQRQTIERLILLIKSEYAEAERKRLVAEEVARLEAERKQRLLDEISASLQGAAGASKGLSTGAEDIEGYEGVFELE

SEQ ID NO: 7587 - DNA, 636 bp, Unknown
  Obtained from environmental sample
  misc_feature (1)..(636): n is a, c, g, or t
atgtctgtggtaaagcttgcccttaagaagaacaacgaggcgctttcttatgcccgtcatgccgttgaaagcaatccttccagcgctgtatatacctataccctggggcttgcccttgaagccacaggcaacaacgacgccgccattgccgcataccaaaaatccgcttcgcttgataaaaaatacctgaggccccgcataaacctgggaaacctctatctgtcccataataatgttaacgaggggatacgttttctttccgaggcttatgcaatagagccgtcaaattttgaagtgaataacaatcttggcgctgtatacgcaaaaatggagaactggttgaaaagtgttgagcattatgaacgggcgcttactatggattcaagaaatcccactgtacatttgaatctggcaagagcctacaccagcgccggcgattttgccaaggcgcagaattcataccaggccgtactgcggcttactcccgataactgggatgctctttatgaactgggaaaaacttatgtcagcatgggaagaccggacgaggctaaaaaacatctcagggatctgttgcagcgtaatgccacatacggcgcaagggctgacgcggaaaggatactcgcgggactatga

SEQ ID NO: 7588 - protein, 211 aa, Unknown
  Obtained from environmental sample
  DOMAIN (29)...(62): Tetratricopeptide repeat
  misc_feature (1)..(211): Xaa is any amino acid
MSVVKLALKKNNEALSYARHAVESNPSSAVYTYTLGLALEATGNNDAAIAAYQKSASLDKKYLRPRINLGNLYLSHNNVNEGIRFLSEAYAIEPSNFEVNNNLGAVYAKMENWLKSVEHYERALTMDSRNPTVHLNLARAYTSAGDFAKAQNSYQAVLRLTPDNWDALYELGKTYVSMGRPDEAKKHLRDLLQRNATYGARADAERILAGL

SEQ ID NO: 7589 - DNA, 459 bp, Unknown
  Obtained from environmental sample
  misc_feature (1)..(459): n is a, c, g, or t
gtgttccgtgaagaaaaggggcttattcccgaattcattaaactcgtcggccttgagggttttgaaaaatcctacccgcatcaactgtcgggcggcatggctcagcgggccagccttgcccgtaccttggtaaacaaccccaaggtgatgctgctcgacgaaccgcttggcgcattagacgcgtttacccgtatgaacatgcaggacgagattctcaaaatatgggagaagcggcgtatgacaacggtgatggtgacccacgatgtagacgaggcaatctacatggccactcaaatcgtggtgatgtccgcccgtcctgcgaagatagagagggtgatcaaggtggaaataggccgtccccggcagcgggatgatcccgagtttttgaaactgagggcggatatattgaaaattttacacttcgccggcaaccgggaggaattgcaatactatttgtaa

SEQ ID NO: 7590 - protein, 152 aa, Unknown
  Obtained from environmental sample
  DOMAIN (1)...(105): ABC transporter
  misc_feature (1)..(152): Xaa is any amino acid
MFREEKGLIPEFIKLVGLEGFEKSYPHQLSGGMAQRASLARTLVNNPKVMLLDEPLGALDAFTRMNMQDEILKIWEKRRMTTVMVTHDVDEAIYMATQIVVMSARPAKIERVIKVEIGRPRQRDDPEFLKLRADILKILHFAGNREELQYYL

SEQ ID NO: 7591 - DNA, 732 bp, Unknown
  Obtained from environmental sample
  misc_feature (1)..(732): n is a, c, g, or t
ttgtcctctggaacgatctcaagtcctccgaagcgcgggggccgggcgaatggcggagcgtctatttgccggagcccagggggaaaaaaatattacaaaaggctctgcacgacgcctntgatccaggacgcgcgttcggaaaccatgcccaccctaattgtccccgcgcttgttcacgaaaaaaaagccgagaaagtaataagaacaattccatttgttccgaggaaggaaggacaattaaccttgtacccctttgatggaatcggcatctacgacagggagcgatttattcgcctgaacggattcgatccttacattaaaaatttctactggcagctcatggattttggtttccgttccagcctttggggagaagaaatcgcctctacggcactgattaagctttcatacgaagggcttgttcccgaagaggacagcacggccgatgaaggttttttaagattttttctgaaaaatctggctccggtttttaagggcgactacgcccacattccgttgcggcgttttccgggatacctaaaaatgaggggtggccttttagccgcatgggacgaattttcttccgcccgtacctgggtcaaaaccaaccgctttcgttttagctctgacgctggaattatgacagagcttttcgcttcgattgaaactgaagctgagactgaagctgaaagcggggacgagcgagatgagttagcaatggagggaaagtga

SEQ ID NO: 7592 - protein, 243 aa, Unknown
  Obtained from environmental sample
  misc_feature (1)..(243): Xaa is any amino acid
MSSGTISSPPKRGGRANGGASICRSPGGKKYYKRLCTTPXIQDARSETMPTLIVPALVHEKKAEKVIRTIPFVPRKEGQLTLYPFDGIGIYDRERFIRLNGFDPYIKNFYWQLMDFGFRSSLWGEEIASTALIKLSYEGLVPEEDSTADEGFLRFFLKNLAPVFKGDYAHIPLRRFPGYLKMRGGLLAAWDEFSSARTWVKTNRFRFSSDAGIMTELFASIETEAETEAESGDERDELAMEGK

SEQ ID NO: 7593 - DNA, 306 bp, Unknown
  Obtained from environmental sample
  misc_feature (1)..(306): n is a, c, g, or t
atgttcgtgttcgaagacatcgttatgctcgacgaccgcgccattcagaaagttatgcgcgaagtggactctcaggaactcgcaaaagcgctcaaatccgtcgattcggaagtacaggacaagattttcaagaatatgtcaaagcgcgcagcaagcatgctcaaggaagacatggagtatatgggcccggtacgcttgaaagacgtggaagaatcgcagcagaagattgtgtccatcatccgccacttggaggatacgggcgaaatcgtcgttgcgcgcgccggagaagacgaattagttgtataa

SEQ ID NO: 7594 - protein, 101 aa, Unknown
  Obtained from environmental sample
  DOMAIN (1)...(92): FliG C-terminal domain
  misc_feature (1)..(101): Xaa is any amino acid
MFVFEDIVMLDDRAIQKVMREVDSQELAKALKSVDSEVQDKIFKNMSKRAASMLKEDMEYMGPVRLKDVEESQQKIVSIIRHLEDTGEIVVARAGEDELVV

SEQ ID NO: 7595 - DNA, 903 bp, Unknown
  Obtained from environmental sample
  misc_feature (1)..(903): n is a, c, g, or t
atgtccacgcaagccgctgagatcaatcaggtaatcaaggacgccaacccccacgtcttcgatatgctttcccgcaagggtaagcgtatatttttcccgactgccggcattttggcgcagaccgcccaagccgccggagttgcaataaacgccactatcgggatcgccctcgacgacgtcgggggggtcatgcagctcccctccgtggcctcacaggtacccggcggcggggcggatatcctgtcgtatgcgcccaacctcggcaagccggaactcagaaacatgtggcgcggcatgatcctaaaaaagaacccgaccctgcgccccgacgggatcagcacccccatagtgaccgccgcgctcacccacgggcttcacgccgccgcatacctcttcctagacgagggcgacagcgtgattaccccggatcttttttgggagaactacaacttagtcttcacatacgcctacggggctaagctcgacacttttccaatgttcaacgcctcaaacggcttcaacaccgacgccctgcgcgacaagctcatgtccggcccgccgggcaagagggtcgtagtcctcaacttccccaacaacccgacaggctacactcccaccgtcgccgaggccaaggtcatagcgggcatcattatagaggcggcgaacaagggcaacaacatcgtcgcgctaatcgacgatgcctacttcggcttggtttttgaggagggcatcatcaaggagtctatcttcaccctcttggccgacgcccacgagcgcatcttggcggtcaagatagacggccccacaaaagaggactacgcttggggtatgcgcataggcttcgtaacattcgctacgtccaatggcgacgccgccttctacaaggcgatggaatcaaactag

SEQ ID NO: 7596 - protein, 300 aa, Unknown
  Obtained from environmental sample
  misc_feature (1)..(300): Xaa is any amino acid
MSTQAAEINQVIKDANPHVFDMLSRKGKRIFFPTAGILAQTAQAAGVAINATIGIALDDVGGVMQLPSVASQVPGGGADILSYAPNLGKPELRNMWRGMILKKNPTLRPDGISTPIVTAALTHGLHAAAYLFLDEGDSVITPDLFWENYNLVFTYAYGAKLDTFPMFNASNGFNTDALRDKLMSGPPGKRVVVLNFPNNPTGYTPTVAEAKVIAGIIIEAANKGNNIVALIDDAYFGLVFEEGIIKESIFTLLADAHERILAVKIDGPTKEDYAWGMRIGFVTFATSNGDAAFYKAMESN

SEQ ID NO: 7597 - DNA, 609 bp, Unknown
  Obtained from environmental sample
  misc_feature (1)..(609): n is a, c, g, or t
atgcgcgttnatcgccgcgtcgtaggccgacgtgtgacgaaaagcctntacggcgaggcgccggcgggtatcaagcgtaaccgcaccgccattggccgacagctcacgcacaatcaacgcataatccgccggatcgacgaccaccgtcacaaaagcatggttcttggccgcgctgcgcaccatagccggcccgccgatgtcgatgttttcaacgcattccgcaatatccgcgccgccggcgacagtcctctcaaacgggtacagattcaccgccacaatgtctacggcgcctatcccgcactcccccatctccttaacatgcgtagggttatccctgacagccagtatcccgccgtgcaccttgggatgcagcgtcttcacccgtccgtccattatctccggatgtccggtatacgcctccacggcgaccgccggcaccccgctctcggagaggagcttgtgcgtccccccggtcgaaacaatctccacgccgcggtcggcgagggcgcgggcgaactcaacgacgccggacttgtcggaaacgctgataagggcgcgcttaaccggtatcaacgcgtccgcgccggattgcgccggggttttggctga

SEQ ID NO: 7598 - protein, 202 aa, Unknown
  Obtained from environmental sample
  misc_feature (1)..(202): Xaa is any amino acid
MRVXRRVVGRRVTKSLYGEAPAGIKRNRTAIGRQLTHNQRIIRRIDDHRHKSMVLGRAAHHSRPADVDVFNAFRNIRAAGDSPLKRVQIHRHNVYGAYPALPHLLNMRRVIPDSQYPAVHLGMQRLHPSVHYLRMSGIRLHGDRRHPALGEELVRPPGRNNLHAAVGEGAGELNDAGLVGNADKGALNRYQRVRAGLRRGFG

SEQ ID NO: 7599 - DNA, 783 bp, Unknown
  Obtained from environmental sample
  misc_feature (1)..(783): n is a, c, g, or t
atgatcaaaaaagtaaaatccgccgacctaaaagtcgggatgtacgtccacgacatcaacgtgccgtggctagagcacagctttgcccgcaaccgatttctgattcaggatgagaagcagatccaaaaaatcttggccatcaacaaattagacgtgctaattgacacatcgaagggcgacgacgcgacccacgcgcagaccctgcaagagtcggaaacagaattgatgggcaagctgctggacatcgcgtctaaaccagcggaagagccgcccgcccaccttgaggagctgcccacacattacatagattaccaatggctggagtctagccatgttcgcgaagaggccatggaagtcgtgggcaacatcctcgccgatgcgcgaatcggcaagcagattgatgtcaagcaagcgggatcggtggtttctagcatcacggactcagtgttgagcaacgatggcaccttggtgagcctttgcaggctcaaagaaagggacaaatacactttccagcactcagtgagcatttctgcgctattggtgacattctgccactcgatgggagggttcagcaaaaacgatctgcacgaaattgggcttggcggactgttccacgatgtcggcaagatgaaaatccctgatgaaatcctgaataagcctgggcggctcaccgacgaagaatatcaaatcatgatgacccatgtccgagagggggtcagctacctcagcgaaaactacgtattgggtcaatcggcgatgaagatagtgtcggagccaccatga

SEQ ID NO: 7600 - protein, 260 aa, Unknown
  Obtained from environmental sample
  misc_feature (1)..(260): Xaa is any amino acid
MIKKVKSADLKVGMYVHDINVPWLEHSFARNRFLIQDEKQIQKILAINKLDVLIDTSKGDDATHAQTLQESETELMGKLLDIASKPAEEPPAHLEELPTHYIDYQWLESSHVREEAMEVVGNILADARIGKQIDVKQAGSVVSSITDSVLSNDGTLVSLCRLKERDKYTFQHSVSISALLVTFCHSMGGFSKNDLHEIGLGGLFHDVGKMKIPDEILNKPGRLTDEEYQIMMTHVREGVSYLSENYVLGQSAMKIVSEPP

SEQ ID NO: 7601 - DNA, 504 bp, Unknown
  Obtained from environmental sample
  misc_feature (1)..(504): n is a, c, g, or t
atgaatataaagacgggcacttcgtggtgtcacggcgacgcggaatcaaactgcaaaaaatacggcaggctgtacaattggtcaacggcgacgaagatggtttgcccgaccggctggcatctgccgacccgcgacgagtgggcggttttggctaaagccgccggaggttccggcccttacggaggcggcggcatagccggcaagacgctgaaatcaaagagcggatggagtgatttttgcggccctgacggcgataaaccgtgtaaaaacagtaacggcacggatgatttcgggttcaacgccttgtccggctccagccgcatgcttttcaacgacgaatacaaccgcctcggcgaaggcggcggctggtggacggccacagaggaaggcaacctcagcgcctacggccggcacgcgagctttatcgacgaccgtctggaagagcaaagcaatcaccgggactgcgggctttctgtccgatgcgtacaagatgttgagaaatag

SEQ ID NO: 7602 - protein, 167 aa, Unknown
  Obtained from environmental sample
  misc_feature (1)..(167): Xaa is any amino acid
MNIKTGTSWCHGDAESNCKKYGRLYNWSTATKMVCPTGWHLPTRDEWAVLAKAAGGSGPYGGGGIAGKTLKSKSGWSDFCGPDGDKPCKNSNGTDDFGFNALSGSSRMLFNDEYNRLGEGGGWWTATEEGNLSAYGRHASFIDDRLEEQSNHRDCGLSVRCVQDVEK

SEQ ID NO: 7603 - DNA, 672 bp, Unknown
  Obtained from environmental sample
  misc_feature (1)..(672): n is a, c, g, or t
atgtcaaaggaaaaatttgatcgcggcggcaagccccacgtaaacgtcggtactatcgggcacgttgaccacggaaaaaccaccctcacggccgccatcacgcgcgtcatggcgaccaaggggctctccaaatacgtcgcctacgacgaggtcgccaaagcctccgagtcgcagggccgtcgcgacgacactaagatcctgacgatcgccacgtcgcacgtcgaatactcgacggagaagcgccactacgcgcacgtcgactgcccgggccacgccgactacgtcaaaaacatgatcacgggcgccgcccagatggacggagccatcctcgtcgtcagcgccgccgacggccccatgccgcagacccgcgagcacatcctgctcgcccgtcaggtcggcgtcccctgcatcgtcgtcttccttaataaggtagacgtcgtggacgaccccgaattgctcgaactcgtagagcttgaggtccgcgagctcctaaacaaatacgacttcccgggcgacgacacgcccatcatccgcggcagcgccatcggggcccttaccaaccccgaagacgccgcgaaagcaaagtgcatctaccacctgatggaagccgtcgatactttcatacccacccccgcagcgcgaggtggacaagcccttcctcatgtcggttga

SEQ ID NO: 7604 - protein, 223 aa, Unknown
  Obtained from environmental sample
  DOMAIN (11)...(212): Elongation factor Tu GTP binding domain
  misc_feature (1)..(223): Xaa is any amino acid
MSKEKFDRGGKPHVNVGTIGHVDHGKTTLTAAITRVMATKGLSKYVAYDEVAKASESQGRRDDTKILTIATSHVEYSTEKRHYAHVDCPGHADYVKNMITGAAQMDGAILVVSAADGPMPQTREHILLARQVGVPCIVVFLNKVDVVDDPELLELVELEVRELLNKYDFPGDDTPIIRGSAIGALTNPEDAAKAKCIYHLMEAVDTFIPTPAARGGQALPHVG

SEQ ID NO: 7605 - DNA, 372 bp, Unknown
  Obtained from environmental sample
  misc_feature (1)..(372): n is a, c, g, or t
gtgctcgcgggtctgcggcatggggccgtcggcggcgctgacgacgaggatggctccgtccatctgggcggcgcccgtgatcatgtttttgacgtagtcggcgtggcccgggcagtcgacgtgcgcgtagtggcgcttctccgtcgagtattcgacgtgcgacgtggcgatcgtcaggatcttagtgtcgtcgcgacggccctgcgactcggaggctttggcgacctcgtcgtaggcgacgtatttggagagccccttggtcgccatgacgcgcgtgatggcggccgtgagggtggtttttccgtggtcaacgtgcccgatagtaccgacgtttacgtggggcttgccgccgcgatcaaatttttcctttga

SEQ ID NO: 7606 - protein, 123 aa, Unknown
  Obtained from environmental sample
  misc_feature (1)..(123): Xaa is any amino acid
MLAGLRHGAVGGADDEDGSVHLGGARDHVFDVVGVARAVDVRVVALLRRVFDVRRGDRQDLSVVATALRLGGFGDLVVGDVFGEPLGRHDARDGGREGGFSVVNVPDSTDVYVGLAAAIKFFL

SEQ ID NO: 7607 - DNA, 642 bp, Unknown
  Obtained from environmental sample
  misc_feature (1)..(642): n is a, c, g, or t
atggcacgagcttatctttcccaattccttcatgatcagcaccgccgccgggggcgttttggtgatgaacgtgaacgatttgtcggagtagaccgtgattacgaccgggatcgtcatccccgcagagtccttggttttcgcgttgaacgccttacagaactccatgatgttcacgccctgctgacccagcgccggacctacggggggagccggcgtcgccgcgccgcccgtgatctgcaactttacctgacccacaactttcttagccacttttcaaccactccttgtacgtttaatcaactgattggagcaacatgtataaagtcgacttcgaccggcgtagaacggccgaagacgctgaccatcaccattaccttgcccttttcgggcgaaaccttgtccacaacgccgtcgaaatccttgaacggcccctctttgatcttgacggcgtcgccaacctcgaaaggcacttcggagacctgctggcgcggccccttctccgccgcctggcccaaaatcctcctcgcctcgtcgtcgcgtatagcctgcggcttatccccgcccacaaacccggtaacgccggcgatctcacgcacaatgtgcatggtctcccgcgtcatttccatctccacgagcacataa

SEQ ID NO: 7608 - protein, 213 aa, Unknown
  Obtained from environmental sample
  misc_feature (1)..(213): Xaa is any amino acid
MARAYLSQFLHDQHRRRGRFGDERERFVGVDRDYDRDRHPRRVLGFRVERLTELHDVHALLTQRRTYGGSRRRRAARDLQLYLTHNFLSHFSTTPCTFNQLIGATCIKSTSTGVERPKTLTITITLPFSGETLSTTPSKSLNGPSLILTASPTSKGTSETCWRGPFSAAWPKILLASSSRIACGLSPPTNPVTPAISRTMCMVSRVISISTST

SEQ ID NO: 7609 - DNA, 534 bp, Unknown
  Obtained from environmental sample
  misc_feature (1)..(534): n is a, c, g, or t
atggcggctaaatggtatgtcgtgcacacgtactcggggcaggaaaccaaggtatttgattacctaaacgggattatcgcgtcgggtgattacggcgagttgataaagagcgttctcatgcccacccaagacgtggtgcaggtgaaggacgggaagaagataaaaaccacgcgtaagtttttcccgtcttatgtgctcgtggagatggaaatgacgcgggagaccatgcacattgtgcgtgagatcgccggcgttaccgggtttgtgggcggggataagccgcaggctatacgcgacgacgaggcgaggaggattttgggccaggcggcggagaaggggccgcgccagcaggtctccgaagtgcctttcgaggttggcgacgccgtcaagatcaaagaggggccgttcaaggatttcgacggcgttgtggacaaggtttcgcccgaaaagggcaaggtaatggtgatggtcagcgtcttcggccgttctacgccggtcgaagtcgactttatacatgttgctccaatcagttga

SEQ ID NO: 7610 - protein, 177 aa, Unknown
  Obtained from environmental sample
  DOMAIN (123)...(160): KOW motif
  misc_feature (1)..(177): Xaa is any amino acid
MAAKWYVVHTYSGQETKVFDYLNGIIASGDYGELIKSVLMPTQDVVQVKDGKKIKTTRKFFPSYVLVEMEMTRETMHIVREIAGVTGFVGGDKPQAIRDDEARRILGQAAEKGPRQQVSEVPFEVGDAVKIKEGPFKDFDGVVDKVSPEKGKVMVMVSVFGRSTPVEVDFIHVAPIS

SEQ ID NO: 7611 - DNA, 453 bp, Unknown
  Obtained from environmental sample
  misc_feature (1)..(453): n is a, c, g, or t
atgtataaagtcgacttcgaccggcgtagaacggccgaagacgctgaccatcaccattaccttgcccttttcgggcgaaaccttgtccacaacgccgtcgaaatccttgaacggcccctctttgatcttgacggcgtcgccaacctcgaaaggcacttcggagacctgctggcgcggccccttctccgccgcctggcccaaaatcctcctcgcctcgtcgtcgcgtatagcctgcggcttatccccgcccacaaacccggtaacgccggcgatctcacgcacaatgtgcatggtctcccgcgtcatttccatctccacgagcacataagacgggaaaaacttacgcgtggtttttatcttcttcccgtccttcacctgcaccacgtcttgggtgggcatgagaacgctctttatcaactcgccgtaatcacccgacgcgataatcccgtttag

SEQ ID NO: 7612 - protein, 150 aa, Unknown
  Obtained from environmental sample
  misc_feature (1)..(150): Xaa is any amino acid
MYKVDFDRRRTAEDADHHHYLALFGRNLVHNAVEILERPLFDLDGVANLERHFGDLLARPLLRRLAQNPPRLVVAYSLRLIPAHKPGNAGDLTHNVHGLPRHFHLHEHIRREKLTRGFYLLPVLHLHHVLGGHENALYQLAVITRRDNPV

SEQ ID NO: 7613 - DNA, 867 bp, Unknown
  Obtained from environmental sample
  misc_feature (1)..(867): n is a, c, g, or t
gtgatcggcgagtacgcccgggaaatttttcggagtnaatccgcgctgggacactatccccgtgaagaaaatgcagttgcgttatctgacacgactgtaatggtttttaccgttcctgaatttgaagctgttgctatggcaaattccagaataatccttaaaatgctcaaagttttttccaaccagatgagacgcgttcataaacaggtatccaagttaatggcaagggaagaacagccgcctgaagacggtttatacaacataggggaattttatctcaagaataagcgtttttcgcatgcaaaacacgtattcagccgttatttgacattttatccgtctgggaaaaatgcggctcaagcttcaaaaaatcttgagattgcggaaaatgcgctgtcccgttacggagacggtaaaggccccggcgtttcagtaagcgatggagctgcgctgccgccggtacaagcggcgccgcaggattcagaaaaaacatcaaaagtctattacgatgccgtaagccttgtgtcgcagggaaaatatcaggaagcgtttatggctttcaaaacaatagtagattccaatgcagatacggagttagcggctaaagcatcttttgaaataggccgctgtatgttccttatgaataaatttgaagatagtttaaagtatataacaaaaatgctgacaaagtttccgaaacatccggatctaaaagatgcgatgtttattatgggtcaatgtaatgaaaaaatcgggagaaaagaacaggcgggggctttctataaaaaaatattaagcatgggcggcgatgatgatgacggtactatagtaaaaacgaaacgggcgttaagcgccttgggagcgtaa

SEQ ID NO: 7614 - protein, 288 aa, Unknown
  Obtained from environmental sample
  misc_feature (1)..(288): Xaa is any amino acid
MIGEYAREIFRSXSALGHYPREENAVALSDTTVMVFTVPEFEAVAMANSRIILKMLKVFSNQMRRVHKQVSKLMAREEQPPEDGLYNIGEFYLKNKRFSHAKHVFSRYLTFYPSGKNAAQASKNLEIAENALSRYGDGKGPGVSVSDGAALPPVQAAPQDSEKTSKVYYDAVSLVSQGKYQEAFMAFKTIVDSNADTELAAKASFEIGRCMFLMNKFEDSLKYITKMLTKFPKHPDLKDAMFIMGQCNEKIGRKEQAGAFYKKILSMGGDDDDGTIVKTKRALSALGA

SEQ ID NO: 7615 - DNA, 777 bp, Unknown
  Obtained from environmental sample
  misc_feature (1)..(777): n is a, c, g, or t
gtgttgattcctgagcctgaggcaaaaaacaccgcacccgcgatagcctgtgccatagaattcgccggaaaaacccgcaactggaaccgtacaatgatggtgcttaccagcgaccacatcataaagccgcctgatgtctttttgaaagatgtaaatttcgctgcacagtttgcggaacaagaaaagcttgttgtctttggtatttccccattgggaccggaaacaggtttcggttatattgaagcggcggaaaaaatctccggggatgtttacgcagttacagcgtttcgtgaaaaaccaaatattgaaacggcagaacaattcttagcttctaaaagacatttctggaattccgggatgtttgcttttcgctgtgattttttggcggatgaataccgccgtctggcttcagaagtaatctgcccctttgaagctcttaaaactccagacaaaaagtcatataccagattaaatgacctcttagttttaaataaatggacaggattggaaaatgcttataatcaggaaaaacctatttcttttgattacgccattgccgaaaagtgtactcgaactgttatgctccgtgcttcttttgactggattgatataggcagttgggacgattatgcccgcctcatttcagataattcctctgcaaataataacggtactgatgttttttttgccgggcaagcggttgttttgtcgattccgacattcccgttgcccctgnccggagttgaaaatcttattggcgtaatccgctcaaggtaa

SEQ ID NO: 7616 - protein, 258 aa, Unknown
  Obtained from environmental sample
  DOMAIN (1)...(220): Nucleotidyl transferase
  misc_feature (1)..(258): Xaa is any amino acid
MLIPEPEAKNTAPAIACAIEFAGKTRNWNRTMMVLTSDHIIKPPDVFLKDVNFAAQFAEQEKLVVFGISPLGPETGFGYIEAAEKISGDVYAVTAFREKPNIETAEQFLASKRHFWNSGMFAFRCDFLADEYRRLASEVICPFEALKTPDKKSYTRLNDLLVLNKWTGLENAYNQEKPISFDYAIAEKCTRTVMLRASFDWIDIGSWDDYARLISDNSSANNNGTDVFFAGQAVVLSIPTFPLPLXGVENLIGVIRSR

SEQ ID NO: 7617 - DNA, 663 bp, Unknown
  Obtained from environmental sample
  misc_feature (1)..(663): n is a, c, g, or t
atggtaattagagagagcagcctggaattttccactgaaggagcaaatgtcaggcatttcaaggccgatataagccctgtctttgataaggataataaacgtatagggatgatcattctggtttcggacgttaccgaacatgtaaatttcgttaaagaactggaaaaggccgcctacacggacagccttacggggctttataacaggaagcatttttcggaacttgcggtagcggaaattcaaagggcgttcagacttggccaattattatatatgatcatgctggattttgattttttcaaaagcataaacgataactacggccacaccgcgggagatttggttttaaaaacagcttcggaagttatccataaaagcattcgttcctacgatctgctttgccgttacgggggcgaggaatttgtcctgctttttgccgtcaggaatgaagccgaagcgtccattgtggcggaaagaatcagaaaaggcatagaaaattgcgttattaactacgaagaacacatattaaatattacatgcagcataggcatggcgaaattcctgagcaacgataacatagaaaccgccataaagaaagccgacgaagccctttacgctgcgaaaaaagcgggacgtaatcaggtaaaaatatatgagccgtaa

SEQ ID NO: 7618 - protein, 220 aa, Unknown
  Obtained from environmental sample
  DOMAIN (54)...(214): GGDEF domain
  misc_feature (1)..(220): Xaa is any amino acid
MVIRESSLEFSTEGANVRHFKADISPVFDKDNKRIGMIILVSDVTEHVNFVKELEKAAYTDSLTGLYNRKHFSELAVAEIQRAFRLGQLLYMIMLDFDFFKSINDNYGHTAGDLVLKTASEVIHKSIRSYDLLCRYGGEEFVLLFAVRNEAEASIVAERIRKGIENCVINYEEHILNITCSIGMAKFLSNDNIETAIKKADEALYAAKKAGRNQVKIYEP

SEQ ID NO: 7619 - DNA, 408 bp, Unknown
  Obtained from environmental sample
  misc_feature (1)..(408): n is a, c, g, or t
atgagcgcgctagaaatcaagcacttgctcggcttgcgaggcgttagcgcaaacgatatcagggctattttagacaatgcagctgaattcagaaaagtattggaacgcaaggtaaaaactttgcccacgctccgtggcacaaccattgtgaatttattttttgaaagctccacccgcacccgcataagctttgagcttgcggaaaaacgcctttccgcagatattgtgaatttcgcaacctctggttctagcgttcaaaaaggcgaaactttgctggatacccttaaaaacatagaagcgatgaaaatagatgtggttgttgtgcggcacaaaggcacaggtgtcccaaaattttatcggaacacaccaacgccgttatgtaacgccggagacgagccctcgcgataa

SEQ ID NO: 7620 - protein, 135 aa, Unknown
  Obtained from environmental sample
  DOMAIN (7)...(132): Aspartate/ornithine carbamoyltransferase, carbamoyl-P binding domain
  misc_feature (1)..(135): Xaa is any amino acid
MSALEIKHLLGLRGVSANDIRAILDNAAEFRKVLERKVKTLPTLRGTTIVNLFFESSTRTRISFELAEKRLSADIVNFATSGSSVQKGETLLDTLKNIEAMKIDVVVVRHKGTGVPKFYRNTPTPLCNAGDEPSR

SEQ ID NO: 7621 - DNA, 504 bp, Unknown
  Obtained from environmental sample
  misc_feature (1)..(504): n is a, c, g, or t
atggcagaaaaagtggtagcttggcaaaagtcgtctcaagattctgtgattcttatgggaatggcgagccgcggcgtgccaatagccaagaatttagctgaaatactcagcagcaagcataatttgaatgttgcggttggtaccatagacaattcttattatagagacgattttcattatcgcaaacgcacaaacaatccctccattaaaataatagaaatgccagccgaggtggagggcaaaaccgtgattttgatagacgatgttctttacacaggtcgctctgtgcgtgctgctttgcaggctattttagaccttggcaggccagctgcggtgaaactctgcgtaattgtggatagaggttgccgcgaattgccaatagcccccgattatgtaggcatttcaatagagacaaagcacaaccaagaagtaaaagtttgcctaagcccctacgacaaagaaactgcggtttggctcgttgaaatagagggggaatctgcatga

SEQ ID NO: 7622 - protein, 167 aa, Unknown
  Obtained from environmental sample
  DOMAIN (1)...(137): Phosphoribosyl transferase domain
  misc_feature (1)..(167): Xaa is any amino acid
MAEKVVAWQKSSQDSVILMGMASRGVPIAKNLAEILSSKHNLNVAVGTIDNSYYRDDFHYRKRTNNPSIKIIEMPAEVEGKTVILIDDVLYTGRSVRAALQAILDLGRPAAVKLCVIVDRGCRELPIAPDYVGISIETKHNQEVKVCLSPYDKETAVWLVEIEGESA

SEQ ID NO: 7623 - DNA, 729 bp, Unknown
  Obtained from environmental sample
  misc_feature (1)..(729): n is a, c, g, or t
atgaaattctgctcttttgaattaatctcctgggcgaaggaacatgacgcggctttgattttaacggcgcatgttacaaaagagggcgttatatcgggaccaaaaacattggaacatatggtggacaccgttctttattttgaggaaaacgataaaaccgccggattaaacggaaacgccgattgccgatttttgcgggcgtcaaaaaacaggtttggctctacagatgaaatcggaatttttacaatgggagaaaaagggcttacccccgtggaagatacggggcgaatgttccttgtaaggcgcgaaggggaactgcccgccggagtagcgaccgctgcggttcttgaggggacaggacgatacttgtggaattcaggcgcttacattcccgcaaagggacaatcagccgtgtttttccgaaaaattgatcgggcagggtttccgccatgcccccgcattgaaaaccctttaaacttctcgggaaacccggataaagcttgcggaacaaaattttatgaaaaggcccccggggcttccaaaaaaccaggttggagggggaattacccctggcccggccctttttttcccccaaaaaggggttttggcttccccccaaaaaaaccaacccccgggggaaattcccccctaacggggaaaaatttccccccaaaacccgttttttttttagggggggaaaaaacccccccccggggggggggggtttaa

SEQ ID NO: 7624 - protein, 242 aa, Unknown
  Obtained from environmental sample
  misc_feature (1)..(242): Xaa is any amino acid
MKFCSFELISWAKEHDAALILTAHVTKEGVISGPKTLEHMVDTVLYFEENDKTAGLNGNADCRFLRASKNRFGSTDEIGIFTMGEKGLTPVEDTGRMFLVRREGELPAGVATAAVLEGTGRYLWNSGAYIPAKGQSAVFFRKIDRAGFPPCPRIENPLNFSGNPDKACGTKFYEKAPGASKKPGWRGNYPWPGPFFPPKRGFGFPPKKPTPGGNSPLTGKNFPPKPVFFLGGEKTPPRGGGV

SEQ ID NO: 7625 - DNA, 909 bp, Unknown
  Obtained from environmental sample
  misc_feature (1)..(909): n is a, c, g, or t
atgatggacagggactggcctatccccccggcggcgcaggagggaggcatcccctactggaacgcgggaatgatcaagggcgaatacctgacagatatgatcatttcatttgcccttcttgagaaaaacgatgtatccgtcccctacattcccgaactgaaaccgcttcccggccagcctatgttcagcaatatctgggatgaagtcgccgctctcaaggaaaagtatccgcatcttaaggttactttttccgtcggcggatacggcgctgacggtttttccgatatggccaacgatccgaaactgcgcgcggcctttgtcgccaatgtgtgcaaatggctggaaaattacaacctggacggcatggatgttgactgggaatatcccgtggggccggaatgggggcaggaaattaaatcgcggcctgcggacaagcaaaattacattaccctgctgcaggagttgcggaacgcgatggatcaattaggcgcaaggaccggcaaacgctacggcctttccactgcggttccggcaagcggctggtttcccaaagccaatgatgtaaaggcggcggcacgaatcgtggattcgctcaagctcatggcctatgactattatggcggatggagcgctactacagggcatcacgccaatctgagcaacaattcgcatgatcccgcatggggaggctggagcaccaggcaggctctggatgaatacctgtggtccggagtgccgcccgaaaaaataatgctgggcatcggattctacggacgcgcatggcagggcgttgcacgaagcagctatgaggatacccccggcctgttccagtcctacaagtctgttccccattctccgccctttgatccaggaactataagctggactgaaataaaagaaattccttaa

SEQ ID NO: 7626 - protein, 302 aa, Unknown
  Obtained from environmental sample
  DOMAIN (13)...(296): Glycosyl hydrolases family 18
  misc_feature (1)..(302): Xaa is any amino acid
MMDRDWPIPPAAQEGGIPYWNAGMIKGEYLTDMIISFALLEKNDVSVPYIPELKPLPGQPMFSNIWDEVAALKEKYPHLKVTFSVGGYGADGFSDMANDPKLRAAFVANVCKWLENYNLDGMDVDWEYPVGPEWGQEIKSRPADKQNYITLLQELRNAMDQLGARTGKRYGLSTAVPASGWFPKANDVKAAARIVDSLKLMAYDYYGGWSATTGHHANLSNNSHDPAWGGWSTRQALDEYLWSGVPPEKIMLGIGFYGRAWQGVARSSYEDTPGLFQSYKSVPHSPPFDPGTISWTEIKEIP

SEQ ID NO: 7627 - DNA, 861 bp, Unknown
  Obtained from environmental sample
  misc_feature (1)..(861): n is a, c, g, or t
ttgccacatccggccccgggcgcgacaaaccttataacaggaattgccacggcgtacatgatttcaattccgatggtagccattacgggcaacgtacccacggggattttgggcaaagacagttttcaggaagtggacattacaggcgtctccatgcccgtagtaaagcacaactggattgtaaaaaatgttaacgatcttgcggaagtgatacgcgaagcgtttgagcttgcctcttccggccgccaggggcccgtgctcatcgacataccgaaagatattaccgcgctgaccgccgaatggagtccgaaaagaaaaagcgaattaaaggacgaggctctttccgcgcgggccaggcgtcttgatgagcgcacgacaagagtcagattcactgacaaggaaatagaaaccgccgccgccatgataaaaaaagcaaaacgccccctgctctacgcgggagggggggtcatcagctccggcgcggaagatgaacttgtcgcgcttgcggaaaggcttaacgcccctgtggcgctgagcctcatgggaataggggccattccgaaagaccacaggctctgcaccggccttgtcggaatgcacggaaccgtggcgagcaacaaggcgactcagaaaacagatttgctcatcgcgattggcgcgcgcttttccgaccgggttacaagcaaggcggatatgttcgcaaagaccgcgaaggtgattcactttgacattgatcccgcggaaatcagcaagaacattgaaacccacgcgtgggttgtgggaaatttaaaagacacccttaaatgcctgttgttaaaacttccggcgcgcctaaaaccgaatggaacggcgaaattataa

SEQ ID NO: 7628 - protein, 286 aa, Unknown
  Obtained from environmental sample
  DOMAIN (1)...(103): Thiamine pyrophosphate enzyme, N-terminal TPP binding domain
  misc_feature (1)..(286): Xaa is any amino acid
MPHPAPGATNLITGIATAYMISIPMVAITGNVPTGILGKDSFQEVDITGVSMPVVKHNWIVKNVNDLAEVIREAFELASSGRQGPVLIDIPKDITALTAEWSPKRKSELKDEALSARARRLDERTTRVRFTDKEIETAAAMIKKAKRPLLYAGGGVISSGAEDELVALAERLNAPVALSLMGIGAIPKDHRLCTGLVGMHGTVASNKATQKTDLLIAIGARFSDRVTSKADMFAKTAKVIHFDIDPAEISKNIETHAWVVGNLKDTLKCLLLKLPARLKPNGTAKL

SEQ ID NO: 7629 - DNA, 663 bp, Unknown
  Obtained from environmental sample
  misc_feature (1)..(663): n is a, c, g, or t
atgttcggtgcgatactcggctataaggtgcagctttttatgccttcaaatgcgagtgcggaacgcaaaaaactcatcaaggcttacggagcggaaatagttgagactaatccgatggaaggttcggatggggcatataaggctgtccttgaaaaagcgaatagcgagccggataaatacttttttccaaaccagtacgacaactttgaaaatgtacgctcgcattacgaaagcacgggtgttgaactatatgagcaatgcaagccaacgcattttgtggctggcacaggcacatcggggacttttaccgggacttctaaaaggctcaaagattatgattcgtccatacaaattgcccttatgcagcccaactcgccttttcacgggctagaggggatgaagcacatgggtgcaaccataaaaccaaaaatatttgacgaaagcatcgcggatattcgcattgaagttaaaaccgaagatgcttataaaacagcgcgaaggcttgccgcagaagaaggtatatttgtgggcgtaagctccggtgcaaacgtttatgccgcattggaacttgcaaaaacattgcccaaaggctcacgcattgccaccatactttgcgacaacggctaccgttatatgacagaacctttatggagagatatctaa

SEQ ID NO: 7630 - protein, 220 aa, Unknown
  Obtained from environmental sample
  DOMAIN (1)...(207): Pyridoxal-phosphate dependent enzyme
  misc_feature (1)..(220): Xaa is any amino acid
MFGAILGYKVQLFMPSNASAERKKLIKAYGAEIVETNPMEGSDGAYKAVLEKANSEPDKYFFPNQYDNFENVRSHYESTGVELYEQCKPTHFVAGTGTSGTFTGTSKRLKDYDSSIQIALMQPNSPFHGLEGMKHMGATIKPKIFDESIADIRIEVKTEDAYKTARRLAAEEGIFVGVSSGANVYAALELAKTLPKGSRIATILCDNGYRYMTEPLWRDI

SEQ ID NO: 7631 - DNA, 591 bp, Unknown
  Obtained from environmental sample
  misc_feature (1)..(591): n is a, c, g, or t
gtgccttcgtgtgccgaaggcggggtgatgggagttttgcccggcattataggtaccatacaggcggcggaaaccataaaactcatagttggcggagcaaagccgcttgtgggacgtttgctgcattttgacgcttggcgtatggcgttccgtgaactcaaactggataaagatgagaactgccccgtgtgcggaaaaaatccatccatccgtgagcttatagattacgagcaattctgcggattaaaaaagaaccaggacagcgaacccatagaaacaattaccgctattgatttaaaacagcgtttggataaaggtgacaacattcaattcatagatattcgcgaaccgcacgaacgtgctattgtaaaattcccaaatgccaaaattatgccgcttggccaattggtgcggcgaatggacgaattagatacaagcatagattccgtatttttatgtaaaataggtcaacgcagcattctgggaataagagccttgcgcgaagcgggatacaaaggcaagctcttaaatctgcaagacgggctgaatgcttgggcaagaaacgttgatacgtcgatgccggtgtattaa

SEQ ID NO: 7632 - protein, 196 aa, Unknown
  Obtained from environmental sample
  DOMAIN (95)...(188): Rhodanese-like domain
  misc_feature (1)..(196): Xaa is any amino acid
MPSCAEGGVMGVLPGIIGTIQAAETIKLIVGGAKPLVGRLLHFDAWRMAFRELKLDKDENCPVCGKNPSIRELIDYEQFCGLKKNQDSEPIETITAIDLKQRLDKGDNIQFIDIREPHERAIVKFPNAKIMPLGQLVRRMDELDTSIDSVFLCKIGQRSILGIRALREAGYKGKLLNLQDGLNAWARNVDTSMPVY

SEQ ID NO: 7633 - DNA, 864 bp, Unknown
  Obtained from environmental sample
  misc_feature (1)..(864): n is a, c, g, or t
ttgcaagatgctggagagagaggctacattgattgcctggttaaagagaaaatcgctattgaaatgaaaagcagaggcgagaacttagataaggcatttacgcagttgaaagagtacgtgcagtggctgcccgaaagttttatccctgaaattttgatggtttgcgattttgagacaattattttggatattgacaagaaaaaaattgaattcaaaacgaaagatttgcgaaagcatttggatttgttcggttgtcttttggaaaaaaccaaggatttgcatttgcaagaacaaattgaagtaaatgtgaaagccgctgagaaaatggcaaagctccacgatgctctgaaagactgcggctatgctgggaatcatcttgaggtttatctggtaaggctgctgttttgcctttttgcggaagacacgggtattttccccaagtactcatttctggaatatatagaacgcacgaaaaaagatggttccgatttgtcggaaaaaatagcgaggctttttcaagttttgaatatctcggataaagacaggagcaaaaagacgaatttatccagcgagctgcttgattttcagtatataaatggcggtttgttttccgataatttggatattgcggactttactgagaaaatgcggaacactttgattgagtgtgccaaatttgactggagccatatttcgcctgcgattttcggggcgatgtttcaaggcgttgtggataaggaacacaggcgcgaacttggcgtgcattacacgagcgaagagaatatattgaagctcataaatcctctttttatggatggcttgcgagagggatttgagagcgtaaaaattcaccgaaaaacttga

SEQ ID NO: 7634 - protein, 287 aa, Unknown
  Obtained from environmental sample
  misc_feature (1)..(287): Xaa is any amino acid
MQDAGERGYIDCLVKEKIAIEMKSRGENLDKAFTQLKEYVQWLPESFIPEILMVCDFETIILDIDKKKIEFKTKDLRKHLDLFGCLLEKTKDLHLQEQIEVNVKAAEKMAKLHDALKDCGYAGNHLEVYLVRLLFCLFAEDTGIFPKYSFLEYIERTKKDGSDLSEKIARLFQVLNISDKDRSKKTNLSSELLDFQYINGGLFSDNLDIADFTEKMRNTLIECAKFDWSHISPAIFGAMFQGVVDKEHRRELGVHYTSEENILKLINPLFMDGLREGFESVKIHRKT

SEQ ID NO: 7635 - DNA, 714 bp, Unknown
  Obtained from environmental sample
  misc_feature (1)..(714): n is a, c, g, or t
atgcgtcttctatcttaccgctttacggcatttatgggaatatatgccataaaaaacctagaaacagtctccaatgcaacagacaccatgtacgacattggagccgttccgctgggtgtttttgtggatctggccgataatgtacaggagctaagggttttcgcccgtgacgcgcgccttgccaagacacaagcagatcgtgatgtgattttgaagaaattagacgagaaaaacaacgaaataaacaagaacgtggaagaacaggcgaaaacatcgcttgctgcagggcaggaaattttgaaaaaagtgggggatttgacggacaaatatattgaacaaattcgtggttatataagaagttgcaagaattatagcccatcgggtacgtgcgaagatgatttttccgcagagatgagcgagactgcaagcaaaatgagtgaagctgtggctgcagccaaagaatccaaagtcaaaagggttagcaacatttcggacgaggcatcggcacaggctgctgctagcataagagcagcgattatcattttagtagtggtacttattctagccgtaggtcttggcatattcttgacattctccataacaacccccttgaaagtggttgttgatgtcctttccaagaatgaaaaaggcgacatgaccgtccgttccaatttggatcgcggagacgaacttggcatactccccaagcactga

SEQ ID NO: 7636 - protein, 237 aa, Unknown
  Obtained from environmental sample
  misc_feature (1)..(237): Xaa is any amino acid
MRLLSYRFTAFMGIYAIKNLETVSNATDTMYDIGAVPLGVFVDLADNVQELRVFARDARLAKTQADRDVILKKLDEKNNEINKNVEEQAKTSLAAGQEILKKVGDLTDKYIEQIRGYIRSCKNYSPSGTCEDDFSAEMSETASKMSEAVAAAKESKVKRVSNISDEASAQAAASIRAAIIILVVVLILAVGLGIFLTFSITTPLKVVVDVLSKNEKGDMTVRSNLDRGDELGILPKH

SEQ ID NO: 7637 - DNA, 633 bp, Unknown
  Obtained from environmental sample
  misc_feature (1)..(633): n is a, c, g, or t
atgaaaacggttttgactgaggctgggaaagttaatttgcaaaaagtgatggatttgacggatgtatatattgctgaaatacgtaaatttgcaaaaaacaccaaaggttatagcgttgagggtcttagcacagaagaatttccagacgctttgaataatgctgcgaatgcaatgacaaaggctatggaagcagctaaagaatctagagtaagcggagtaagcaagctttcagacgatgcttcagcacaggcttcccaaagcataaacacggcaattatcgttttaatagtggtggttattctagccgtggctcttggcatattcttaacattctccataacaacccccttgaaagttgttgttgacactctttccaagattgagaaaggggatgtgacagtccgttccaatttggatcgcggagacgaactaggcattctctccaaagcactggacagcgtagcttcaaggctccaagccatattcagaaatctccgccagaatgcagacacacttgcaggttcggcagaggagctttccagcgtaggcaggcaaatagccagctccgcagaagagaacgttgcacagagcacttctgttgccagctccacagagcaaacctccggaacataa

SEQ ID NO: 7638 - protein, 210 aa, Unknown
  Obtained from environmental sample
  DOMAIN (91)...(160): HAMP domain
  misc_feature (1)..(210): Xaa is any amino acid
MKTVLTEAGKVNLQKVMDLTDVYIAEIRKFAKNTKGYSVEGLSTEEFPDALNNAANAMTKAMEAAKESRVSGVSKLSDDASAQASQSINTAIIVLIVVVILAVALGIFLTFSITTPLKVVVDTLSKIEKGDVTVRSNLDRGDELGILSKALDSVASRLQAIFRNLRQNADTLAGSAEELSSVGRQIASSAEENVAQSTSVASSTEQTSGT

SEQ ID NO: 7639 - DNA, 363 bp, Unknown
  Obtained from environmental sample
  misc_feature (1)..(363): n is a, c, g, or t
gtgaacctagaggacgcaaagcctgggggcgcaaagaggttcagcgaagctatggggcgcatccgcgcttcgggcctgggcgactttgcgggggaaaaggttgccagttgggaagactatctcacatgcgaacaccacgagggcgacaaggtggggccgatattggacaggcccgactgccccgacatagcccgcccgatagaatccagcaacgtgctgaagttccgctttgaatccggggcctttgtagcattcaggcccagcggcaccgagcccaagttgaaggtgtacctgcaaagcaggacaacgccggaactcttggacagcatggaggcagcggccaaaaagttgttggggctgtaa

SEQ ID NO: 7640 - protein, 120 aa, Unknown
  Obtained from environmental sample
  misc_feature (1)..(120): Xaa is any amino acid
MNLEDAKPGGAKRFSEAMGRIRASGLGDFAGEKVASWEDYLTCEHHEGDKVGPILDRPDCPDIARPIESSNVLKFRFESGAFVAFRPSGTEPKLKVYLQSRTTPELLDSMEAAAKKLLGL

SEQ ID NO: 7641 - DNA, 597 bp, Unknown
  Obtained from environmental sample
  misc_feature (1)..(597): n is a, c, g, or t
atggcaactacaaaaaacacccccggcaaaggaatagtcgagctgtgcaaaacctacaacgtttcgagagaagccctgtcggaaagaagcggggttccgatagaactgattcgccagattgaggaagatgaacatatccccgacctcgcccctctggtaaaaatatcccgcgctctgggggttcggctgggaacgcttatggacgatcacgaggagcttgggccggtaatcaccaaagcgggaaccgcaggagataccgccaggtttatcaccggcctgccgggtacaataccgcaggcccaggacaacgaacatcacggcttaaccttcagggcgcttgcgccggacaaaagtggccgccacatggagcccttcatcgtcgatatagaaccggacgcggagcaggaaaaatcaacccacgaaggcgaggaattcatctacgttctttcaggaaaccttgcggtggattacggctcaacgttcacagttatccacgagggggattcggtgtactacgattcgattgtgccgcatagggtggtttccgccgacaacaagcccgtgaagatactcgcggtcatttacacaccagtctaa

SEQ ID NO: 7642 - protein, 198 aa, Unknown
  Obtained from environmental sample
  DOMAIN (12)...(66): Helix-turn-helix
  misc_feature (1)..(198): Xaa is any amino acid
MATTKNTPGKGIVELCKTYNVSREALSERSGVPIELIRQIEEDEHIPDLAPLVKISRALGVRLGTLMDDHEELGPVITKAGTAGDTARFITGLPGTIPQAQDNEHHGLTFRALAPDKSGRHMEPFIVDIEPDAEQEKSTHEGEEFIYVLSGNLAVDYGSTFTVIHEGDSVYYDSIVPHRVVSADNKPVKILAVIYTPV

SEQ ID NO: 7643 - DNA, 771 bp, Unknown
  Obtained from environmental sample
  misc_feature (1)..(771): n is a, c, g, or t
ttggcgcagagtttaagggaacgcaccctaaaccgcctaaaagagggcaagatagacattgtggttgcaacggatgtagccgctcgcggtttggatgtggacagaataacccacgtgctaaactacgacattccctacgataccgaatcttacgttcaccgcatagggcgcacgggacgtgccggcagggacggcaatgccatattgtttgtaaccccaagggaaacccgcttgctcactatgatagaaaaggaaacccgtcaaaaaattgaaaagatgaatttaccgaccggcgagcaaatcagcaataaaagggtagccaaattcaaggaagaaattgcaaaaacagttcatgaaaaaaacgatttaaaggatttcagggatttaatagaaaacctggctatggaacaagccatggacattgcggatattgccgctgcccttgcctatatgaaccaagaagagcaacctcttttcccaaaaatggagcctttggaagcagatgtttcgcgcaaaagggacagggagttttctgggcaaggagcaagggaaggcagggggtacgagagagccgagaggaggagccgtggttctgatagggggcacagagatggcagctttagcgatatggaatccccagaaagcggaatggagcgttactatcttggcgtaggcagaatggacaatgtttccccaagggacatagttggagccattgcaaacgaaagcaaatctggaatcaaaaatcatagggcatataaagctatttga

SEQ ID NO: 7644 - protein, 256 aa, Unknown
  Obtained from environmental sample
  DOMAIN (1)...(62): Helicase conserved C-terminal domain
  misc_feature (1)..(256): Xaa is any amino acid
MAQSLRERTLNRLKEGKIDIVVATDVAARGLDVDRITHVLNYDIPYDTESYVHRIGRTGRAGRDGNAILFVTPRETRLLTMIEKETRQKIEKMNLPTGEQISNKRVAKFKEEIAKTVHEKNDLKDFRDLIENLAMEQAMDIADIAAALAYMNQEEQPLFPKMEPLEADVSRKRDREFSGQGAREGRGYERAERRSRGSDRGHRDGSFSDMESPESGMERYYLGVGRMDNVSPRDIVGAIANESKSGIKNHRAYKAI

SEQ ID NO: 7645 - DNA, 639 bp, Unknown
  Obtained from environmental sample
  misc_feature (1)..(639): n is a, c, g, or t
ttgatcgcgagatatttcctggctggtcggaaggccgggggcaggggcaaggacattgccaacgcattagtcgccattgccggcatgaagctgaacgaggataatcccgctgtggcggcttttgccggcgcgtatacccgcattgttatttatccaagccgttcgctgcatgggatggatccagaaaaaaagaaaatagaagtgccgcgcagtatggccattaaccgcgccgcgatgaaagcgctggatacggttaaaacgcagggcaaaatagtgctgttatttccgtcgggaacccgttaccgcccctgggacccgtcgaccaaaaaaggagtgcgcgaaatcgattcatatatccatagtttcgattatatgtgctgtgttgcgcttaacggtatgatactccatgtacagcaatccgatatgatgaacgataaggttggcagtgatattgtccgtgtcaccgccggaccgatttattcatgcgccgaattccgcaaaaaggcgcgttcacaagccgatgcagccggagttgaagacaaaaaacaagccgttgttgacgcgattatggcggaattggaacgcctgcataatgaaactgaagataaaagaaaaaaactgttggaggtaaaagcatga

SEQ ID NO: 7646 - protein, 212 aa, Unknown
  Obtained from environmental sample
  misc_feature (1)..(212): Xaa is any amino acid
MIARYFLAGRKAGGRGKDIANALVAIAGMKLNEDNPAVAAFAGAYTRIVIYPSRSLHGMDPEKKKIEVPRSMAINRAAMKALDTVKTQGKIVLLFPSGTRYRPWDPSTKKGVREIDSYIHSFDYMCCVALNGMILHVQQSDMMNDKVGSDIVRVTAGPIYSCAEFRKKARSQADAAGVEDKKQAVVDAIMAELERLHNETEDKRKKLLEVKA

SEQ ID NO: 7647 - DNA, 450 bp, Unknown
  Obtained from environmental sample
  misc_feature (1)..(450): n is a, c, g, or t
atgggcagtttcgccatgcgcggctggacatacattcaactgctgctgccgttttttatcatagggactgcgggtatactccgttatgccaaagaaatggacattatgtcctttgatgatgatcaggcgaaatcggcgggtgtggaaaccaatgggttgcgaaaaagattactggtattgtgcgccctattgacaggcacggctgttgcgttaagcggcattatcggcttcgttgatcttatcgccccgcacgcggcgcggagaatcatcggttcgaagcaccggtacatgatccccatgtcgtttatcctcggcggctcattaatggtaataaccgatttaatcgccagaacgatcatttcgccgtcggaactgcctgtgggggcaatcaccgcccttatcggagctccgttttttgcatggatttattttcgaggacgcagacgatga

SEQ ID NO: 7648 - protein, 149 aa, Unknown
  Obtained from environmental sample
  DOMAIN (1)...(145): FecCD transport family
  misc_feature (1)..(149): Xaa is any amino acid
MGSFAMRGWTYIQLLLPFFIIGTAGILRYAKEMDIMSFDDDQAKSAGVETNGLRKRLLVLCALLTGTAVALSGIIGFVDLIAPHAARRIIGSKHRYMIPMSFILGGSLMVITDLIARTIISPSELPVGAITALIGAPFFAWIYFRGRRR

SEQ ID NO: 7649 - DNA, 798 bp, Unknown
  Obtained from environmental sample
  misc_feature (1)..(798): n is a, c, g, or t
atgagcaaacgctggctcttaaaacttgtgcaggacaagcgcgttacaggctgggacgatccgcgtatgccgacaatagcgggacttcgccgccgaggttacacaccggaagctatacgcggttttgtttcacagattggaatcgcgaagacggacagcatggtagacatcgccttccttgaatactgcctgcgcgaagatttgaacaagcgggcattgcgcgtaatggcggtcttgcgccccctcaaacttattatcgaaaattgggaagaaaataaaaccgaagaaatggaagcggtaaacaatcccgaggacgaaggcgcgggcaagcgccttgtgcccttctcccgcgaactttggattgagcgcgaagattttgaggaagtccctccccctaaatattaccggctcttccccggcaattccgtccgccttcgatacgcgtacattgttacctgcaccggctttgacaaagacgcaaacggcaatattacagccgtgcgctgcgcttacgatccccagacaaggggcggtaacgcgcccgataacaagaaaatcaaaggcacaattcactgggtttccgcggcgcattcagtcactatacaggcgcgtctttacgattacctgttcagcgttgaaaaaccgatggaagtctctccccgcccggacggctctcccggcgaatttaccgacaacttaaaccccaattcgcttgaggttattgaaaacgcgcaaggcgaaccttcgcttgcaaacgtttcgccgggcaaggctttccatttcgagcgcctcggctaa

SEQ ID NO: 7650 - protein, 265 aa, Unknown
  Obtained from environmental sample
  DOMAIN (72)...(265): tRNA synthetases class I (E and Q), anti-codon binding domain
  misc_feature (1)..(265): Xaa is any amino acid
MSKRWLLKLVQDKRVTGWDDPRMPTIAGLRRRGYTPEAIRGFVSQIGIAKTDSMVDIAFLEYCLREDLNKRALRVMAVLRPLKLIIENWEENKTEEMEAVNNPEDEGAGKRLVPFSRELWIEREDFEEVPPPKYYRLFPGNSVRLRYAYIVTCTGFDKDANGNITAVRCAYDPQTRGGNAPDNKKIKGTIHWVSAAHSVTIQARLYDYLFSVEKPMEVSPRPDGSPGEFTDNLNPNSLEVIENAQGEPSLANVSPGKAFHFERLG

SEQ ID NO: 7651 - DNA, 807 bp, Unknown
  Obtained from environmental sample
  misc_feature (1)..(807): n is a, c, g, or t
gtggccgaggtttccgatgacgatgattacacgccctacgcgctcctactggacgaaatcgcttcggaactgggcattgattttgtggggggcttttccgccctggtgcacaagggtttttccctgggggacaaaaaacttgtagactccattcccgccgcccttgcttccacggaacgagtctgcgcttcggtaaatgtggccaccaccaggaacgggatcaacatggacgcggtccgccgcatgggcgaaataatcaaggagacggccctgaaaactgcggatcgggacggcctgggctgcgccaaactggtcgtgttttgcaacgccccggaggacaacccctttatggccggcgctttccatggtccgggtgaaggggaaagctgccttaatgtaggggtttcgggaccgggggtgatcaaggccgccctggaatccaggaaaaacgccagctttgacgaaattgccgaaatcatcaaaaagaccgcctttaaaattacccgcatgggtgagctcgtgggaatggaagcggccaaacggctgggggttccgtttggcatcctcgacctttccctggcccctaccccggaagtgggggattcggtggcccgaattctggaagaaatgggccttgaaaaggcgggaacccacggtactaccgcagccctggcgctgcttaccgacctggtaaaaaaggcggggttatggccggttcccggattgggggtttctccggcgcttttataccggtatcggaagatgagggcatggcagcctcggttgcctccagcgccatcagcctga

SEQ ID NO: 7652 - protein, 268 aa, Unknown
  Obtained from environmental sample
  DOMAIN (1)...(268): Uncharacterized ACR (DUF711)
  misc_feature (1)..(268): Xaa is any amino acid
MAEVSDDDDYTPYALLLDEIASELGIDFVGGFSALVHKGFSLGDKKLVDSIPAALASTERVCASVNVATTRNGINMDAVRRMGEIIKETALKTADRDGLGCAKLVVFCNAPEDNPFMAGAFHGPGEGESCLNVGVSGPGVIKAALESRKNASFDEIAEIIKKTAFKITRMGELVGMEAAKRLGVPFGILDLSLAPTPEVGDSVARILEEMGLEKAGTHGTTAALALLTDLVKKAGLWPVPGLGVSPALLYRYRKMRAWQPRLPPAPSA

SEQ ID NO: 7653 - DNA, 498 bp, Unknown
  Obtained from environmental sample
  misc_feature (1)..(498): n is a, c, g, or t
atgatcgctttggacgcgcaatacgagttgcgcagctctcagtcgacccggtgggtttccgcttccaggttttcctcccagccgggaccgcccatcctcgccaggcaggaatgccttacacgtatcagggttcctttggagccatggactttcacatggtaccgtaagttcaatttctcgctcgcaagcaagcctgggggctgtatcctgttaattttcaggaaccaaaaggatatacttaccgatatacgggttttatactccaaccaggcaatttatagggaaaaggatgctgaatccatgcttataggcaagcatttacccctggatcgcagggacgcttcggcgtttacagagagatggaaaacatatttatcatccatccatgaggagaataacccggtattttccggcgaatacggcaatttagacccaggcttgataaaagcccagattttacgctttattgaatctacattattgcatatttctgattaa

SEQ ID NO: 7654 - protein, 165 aa, Unknown
  Obtained from environmental sample
  misc_feature (1)..(165): Xaa is any amino acid
MIALDAQYELRSSQSTRWVSASRFSSQPGPPILARQECLTRIRVPLEPWTFTWYRKFNFSLASKPGGCILLIFRNQKDILTDIRVLYSNQAIYREKDAESMLIGKHLPLDRRDASAFTERWKTYLSSIHEENNPVFSGEYGNLDPGLIKAQILRFIESTLLHISD

SEQ ID NO: 7655 - DNA, 666 bp, Unknown
  Obtained from environmental sample
  misc_feature (1)..(666): n is a, c, g, or t
gtgctgagcaatgaggagtatacgctgtatttttcgcataagaagcggggcaatgaagcggacagggaaaccggcatactgcccgtgtacagcggggttctggtacacgaccacctcaaagggctgtacagtttcccatgcgggcatgctgagtgcaacgcgcatgttttacggtatctgaaagccgctgcggaaacaaataaatgcgcgtgggcggctgccatgacagcgcttttggttgacgccaataataccgtgaaggaccataaggcaaagaatattccggcgcttgacgatgcggtagcggccaaataccgcgcccgttacgatgagattcttgaacaggggcgacttgagtttcttcaaaaagaaaagaaggataacaacagcgaaggcatgaagcttttgcggcggctgaaagaatataaaagcgaacacttgaggttcctgtcagatttccaggttccgtttgacaacaatcttgcggaacgggatctgaggatgataaagagcaagacaaaagtgtccggctgtttcaggggcgatgagggcggcaccgttttcgctaatatcaaaagctacacctcaacattgagaaagaattccatgaatattttcaacggcttaaaggctgccttctcgggtctgcctttttcctgggcttga

SEQ ID NO: 7656 - protein, 221 aa, Unknown
  Obtained from environmental sample
  misc_feature (1)..(221): Xaa is any amino acid
MLSNEEYTLYFSHKKRGNEADRETGILPVYSGVLVHDHLKGLYSFPCGHAECNAHVLRYLKAAAETNKCAWAAAMTALLVDANNTVKDHKAKNIPALDDAVAAKYRARYDEILEQGRLEFLQKEKKDNNSEGMKLLRRLKEYKSEHLRFLSDFQVPFDNNLAERDLRMIKSKTKVSGCFRGDEGGTVFANIKSYTSTLRKNSMNIFNGLKAAFSGLPFSWA

SEQ ID NO: 7657 - DNA, 477 bp, Unknown
  Obtained from environmental sample
  misc_feature (1)..(477): n is a, c, g, or t
gtgctatgcggacggcaggcgatagacggagacaccgcgcaggtaggcccccagaccgcggaaaagctgggcgtcaaccagatcacctgtgtctccaaattcgaagcccttgacgccgcaaagaaagagatcatcgcggtacgttccatcgagggcggctgggaaagggtgaaggcgaagcttcccgttctcgttaccttcaacgccgaaggcgaaatgccccgcccggcgtcggctattaagacaatgacttacaagcgcgcggctcctgttcctgacgccgtacccatggccctttggaacattcccgccatcaacgccgacccgcagcagtgcggtcttgccggttctcccaccaaagtaaagcatatcaattccgtggtgctgaccgccgcggacatcaggtacatcgatcccggcgaagcgggaatcacagagctgatccacggcctcatcgcggatcatactttcggttaa

SEQ ID NO: 7658 - protein, 158 aa, Unknown
  Obtained from environmental sample
  misc_feature (1)..(158): Xaa is any amino acid
MLCGRQAIDGDTAQVGPQTAEKLGVNQITCVSKFEALDAAKKEIIAVRSIEGGWERVKAKLPVLVTFNAEGEMPRPASAIKTMTYKRAAPVPDAVPMALWNIPAINADPQQCGLAGSPTKVKHINSVVLTAADIRYIDPGEAGITELIHGLIADHTFG

SEQ ID NO: 7659 - DNA, 465 bp, Unknown
  Obtained from environmental sample
  misc_feature (1)..(465): n is a, c, g, or t
atggctacaggctggtatgttcttcatatctattcaggttatgagaacaaaattgaaaagacaatccgcaatatgctcgagatgggagaactcgacaaggaagtcgtccgcgatgtgaagattccctccgaggaagttactgaggtaaaagacgggaagaaacgtaccataaccaaaaaattccttcccggttatatcctggtggaaatggatctccccgacgtggatatgggctggaaggaaccttgttcaaaaattaagaaaatccaaggtgttaccggttttgtgggtaccccggccggacgcaagccccagccgcttagcggcgacgaggcgcgtgccattttgcagaaatcgggtgagattaaaggtgagcgcccggtccgctcccgccacagctttaccagggagaaacaggtaaaattgtcgatgggccgtttgagactttaccggtacagtcgatga

SEQ ID NO: 7660 - protein, 154 aa, Unknown
  Obtained from environmental sample
  DOMAIN (3)...(110): Transcription termination factor nusG
  misc_feature (1)..(154): Xaa is any amino acid
MATGWYVLHIYSGYENKIEKTIRNMLEMGELDKEVVRDVKIPSEEVTEVKDGKKRTITKKFLPGYILVEMDLPDVDMGWKEPCSKIKKIQGVTGFVGTPAGRKPQPLSGDEARAILQKSGEIKGERPVRSRHSFTREKQVKLSMGRLRLYRYSR

SEQ ID NO: 7661 - DNA, 648 bp, Unknown
  Obtained from environmental sample
  misc_feature (1)..(648): n is a, c, g, or t
gtggagtacgacgggctcaagcccaagcgtatagacacgatagtcatctctacccagcacgacgaaaacgtcaaacacgccactatcaagcaggatatgatagcgaaggtcattaagaaggtgatcccggcgaagtttttggatgccaagaccaattaccacatcaacccgaccggtaagtttgtggtaggcggcccgcacggggacaccggggtgacggggcggaagatcatcgtcgacacctacggcggctacggcgcccacggcggcggcgcgttctccggcaaggatccctccaaggttgacagaagcgccgcctacgccgcccgctgggtggctaaaaatatcgtggccgccggactcgcgacccactgcgtaatccagctctcctacgccataggcgtggcgaagccgatttcgatacacgtggacacctacggttcgggcaaaatagccgacggcgagatagtgcgcattataacaaagctgttcgacttgacccccgccggcataatcaagcgtttggacctgaagcgcccgatataccggaagacggcgagaaacggccacttcggccgcgagctgccggagttcacttgggaaaagctggatatggttgataagattaggaaagaggctaagctgtag

SEQ ID NO: 7662 - protein, 215 aa, Unknown
  Obtained from environmental sample
  DOMAIN (1)...(61): S-adenosylmethionine synthetase, central domain
  misc_feature (1)..(215): Xaa is any amino acid
MEYDGLKPKRIDTIVISTQHDENVKHATIKQDMIAKVIKKVIPAKFLDAKTNYHINPTGKFVVGGPHGDTGVTGRKIIVDTYGGYGAHGGGAFSGKDPSKVDRSAAYAARWVAKNIVAAGLATHCVIQLSYAIGVAKPISIHVDTYGSGKIADGEIVRIITKLFDLTPAGIIKRLDLKRPIYRKTARNGHFGRELPEFTWEKLDMVDKIRKEAKL

SEQ ID NO: 7663 - DNA, 591 bp, Unknown
  Obtained from environmental sample
  misc_feature (1)..(591): n is a, c, g, or t
gtgctcgattcccacaaaggcgattttgtcgccccggtttaccaacagcgaaaagtctttaagaagcgttgtcccctcaaacgagaaattgagtttttccgcgcgcagcacgttgtttcctatctcgcggtccggcttgaatccgacgtaggggaatttgcggctggtaaccggcacattatcaagatcgagtttttccagaacttttttgcggcttgtcgcctggcggcttttgctggcgttggacgcaaagcgctgaataaactctttaagctcccgcgccttgtcttcccgctttttcagctgatcccgcgcctggcgctggaggatttggctcatctgataccagaaatcgtagttgcccgaatagggcgtaatcctgccatagtcgatgtcgcagacatttgtacacaccgcgttgaggaagtggcggtcgtgggagactacaatcaccgtattgggaaaatccataagaaagccttccagccaggaaatggattccaggtcaaggccgttggtcggttcatccagaagcagaatgtcaggattgccgaacagggcctgggccagaaggaccctcactttttttga

SEQ ID NO: 7664 - protein, 196 aa, Unknown
  Obtained from environmental sample
  misc_feature (1)..(196): Xaa is any amino acid
MLDSHKGDFVAPVYQQRKVFKKRCPLKREIEFFRAQHVVSYLAVRLESDVGEFAAGNRHIIKIEFFQNFFAACRLAAFAGVGRKALNKLFKLPRLVFPLFQLIPRLALEDLAHLIPEIVVARIGRNPAIVDVADICTHRVEEVAVVGDYNHRIGKIHKKAFQPGNGFQVKAVGRFIQKQNVRIAEQGLGQKDPHFF

SEQ ID NO: 7665 - DNA, 351 bp, Unknown
  Obtained from environmental sample
  misc_feature (1)..(351): n is a, c, g, or t
atggaagcgataaagctgtttatgaccaaaatcccgtacgacttgtttcaaaaacgtgaaaacttcttccaatccgtgatatacgtggtattctcaatgctcggcctcgactgccgtaccgaggaaagaatcgccaccgggcggatcgacatggtcgtcgagacccagaacttcgtttactgcttcgagttcaaattagacggtagcgcggaggccgcgcttgcgcagatcgacagcaaaggatacgcgatcccgtggacgggtcgcggaaaaaaggtcttcaaggtcggggtgaattttgattttgagaagaagaacatcggggagtgggtatctgtgcctattgagtag

SEQ ID NO: 7666 - protein, 116 aa, Unknown
  Obtained from environmental sample
  misc_feature (1)..(116): Xaa is any amino acid
MEAIKLFMTKIPYDLFQKRENFFQSVIYVVFSMLGLDCRTEERIATGRIDMVVETQNFVYCFEFKLDGSAEAALAQIDSKGYAIPWTGRGKKVFKVGVNFDFEKKNIGEWVSVPIE

SEQ ID NO: 7667 - DNA, 399 bp, Unknown
  Obtained from environmental sample
  misc_feature (1)..(399): n is a, c, g, or t
atgaacaaaattgaaacgtcgttaaaatactggaatttgattcttgaacaggaccccagaaacaagatgatcttaacgcgcatgggagacgcgtaccgcaacttgaatgattatgaaaaagcaaaagattattatgaaagagcccttaatattgaattcgatacatacgcggtaatgggccttgcgttaatcgcgaaagaacaaggtaaatatgacgaagccataacctctttcaggcggctgatccagcaggactccagaaatttccgcctttacattgaactttccgactgttatctgaaatccggcgaccgcagaaaagcggtggaaattctggaagattttcaaagattgggaattaaaaatcaaaaaatagctgaacttttggaaagcatgtaa

SEQ ID NO: 7668 - protein, 132 aa, Unknown
  Obtained from environmental sample
  DOMAIN (22)...(55): Tetratricopeptide repeat
  misc_feature (1)..(132): Xaa is any amino acid
MNKIETSLKYWNLILEQDPRNKMILTRMGDAYRNLNDYEKAKDYYERALNIEFDTYAVMGLALIAKEQGKYDEAITSFRRLIQQDSRNFRLYIELSDCYLKSGDRRKAVEILEDFQRLGIKNQKIAELLESM

SEQ ID NO: 7669 - DNA, 387 bp, Unknown
  Obtained from environmental sample
  misc_feature (1)..(387): n is a, c, g, or t
atgaaaaccattccggcgagtcttgcgggctttcttcctgcggaacttgaaaacattctccttcccctgccgcgaatgcgcgcctcccaaatatacaaatggataacccgcggcgttccggattttgatcaaatgaccgacctgcccgcctccttgcgcgaagatttaaaaagccgcttccggctttattcctccgctgtagacagccgccatgaagataaatcatctgaaaaaacagttatcgcgcttgaagacggcttaaaaattgagtctgttcttctaaaagacggaaaatcgcgctttaccgcctgcctttctacccaagccggctgtccggctgggtgcgttttttgcaaacaggaagcctcggcttttcccgcaatctga

SEQ ID NO: 7670 - protein, 128 aa, Unknown
  Obtained from environmental sample
  misc_feature (1)..(128): Xaa is any amino acid
MKTIPASLAGFLPAELENILLPLPRMRASQIYKWITRGVPDFDQMTDLPASLREDLKSRFRLYSSAVDSRHEDKSSEKTVIALEDGLKIESVLLKDGKSRFTACLSTQAGCPAGCVFCKQEASAFPAI

SEQ ID NO: 7671 - DNA, 627 bp, Unknown
  Obtained from environmental sample
  misc_feature (1)..(627): n is a, c, g, or t
atggcctcgattgaccgtgccggagagttattttccaatattaggccgattattaagcgccgactcagcgtaaaattacgaataggttacaaggacgattttgattatttggtacgcttctgccgccgccttgaagcggaaggggtggaacttattacccttcacccacggctggttacggaaaagttcaaacgccttgcccgctgggagtatgttgggcggctaaagcgggagttgaaaatcccggtagccggaaacggggacatatccacccctgaggagcttgtccgtcgggcggcggatggctcatgtgacgcggttatggttggacgggcggcggtgcgtcagccgtggatttttgcccaagcgcgggaaattgaaggcgcatgttcaaatttatctaaaattgattttgtcccgaatatcgaagaaatcggacttcgttttttagaacttttaacccgataccagccccccgattttcacctttcccgagccatgcgcttttttaactttttctgcgacaacttaaaatggggtaattatttgaagacacaactgaaccgcgaaaaaacattgtctgggattgagatggtttggaaagaatattttataaataacaaataa

SEQ ID NO: 7672 - protein, 208 aa, Unknown
  Obtained from environmental sample
  misc_feature (1)..(208): Xaa is any amino acid
MASIDRAGELFSNIRPIIKRRLSVKLRIGYKDDFDYLVRFCRRLEAEGVELITLHPRLVTEKFKRLARWEYVGRLKRELKIPVAGNGDISTPEELVRRAADGSCDAVMVGRAAVRQPWIFAQAREIEGACSNLSKIDFVPNIEEIGLRFLELLTRYQPPDFHLSRAMRFFNFFCDNLKWGNYLKTQLNREKTLSGIEMVWKEYFINNK

SEQ ID NO: 7673 - DNA, 858 bp, Unknown
  Obtained from environmental sample
  misc_feature (1)..(858): n is a, c, g, or t
ttgtttccccgtttcccccatcattctattcttgattatctcggtaatgaagggactttggtgttagttgacagggaaaggctggataacgcccaggagagcatagaccgcgagtaccagagtttgtatatgcgctcgcggagggaggcggatggccgggaatttcctttgcccgaccgtttgctgttgaatttcaaagaattgattgaaaggttccaggcggagaagacgcggaaaattatttcgtatctttccatcaagagtgaggcgaaagcggggatacgccggatcagtattctttgtgagccgtcgcggagttttttcggcaacatcaattacatgaaggatgaattcgccgcgttatacgcaagcggctggcatatagcagtggccgcggaatccgaagtgcaggcccagcgcatagagtcaatccttgccccgcatacggcccttaccataatcgcctcgccgctttcctctgggttctccctgccggaaatcaaactcatggtaattcaggagaacgagatattcggcaggcgcaaacggccgccgcgttccctcaagaccgcccgctccagccccatcgacactttcgtggaactcaatcccggcgattacgttgtgcatgttaaccacggcataggcctgttcaagggcatagagcggctcaacaccctgggctttgagcgcgattacatacagcttgagtacgcgggggacgagactgtttttgtcccggtggaacagttgaacatggtgcagcgttacatcggcaatgagggcaatcccccgaggctggataccatcggatcaaaaagttgggaaaaccggaagcagcgggaaaaaaatcagtga

SEQ ID NO: 7674 - protein, 285 aa, Unknown
  Obtained from environmental sample
  DOMAIN (201)...(285): CarD-like/TRCF domain
  misc_feature (1)..(285): Xaa is any amino acid
MFPRFPHHSILDYLGNEGTLVLVDRERLDNAQESIDREYQSLYMRSRREADGREFPLPDRLLLNFKELIERFQAEKTRKIISYLSIKSEAKAGIRRISILCEPSRSFFGNINYMKDEFAALYASGWHIAVAAESEVQAQRIESILAPHTALTIIASPLSSGFSLPEIKLMVIQENEIFGRRKRPPRSLKTARSSPIDTFVELNPGDYVVHVNHGIGLFKGIERLNTLGFERDYIQLEYAGDETVFVPVEQLNMVQRYIGNEGNPPRLDTIGSKSWENRKQREKNQ

SEQ ID NO: 7675 - DNA, 447 bp, Unknown
  Obtained from environmental sample
  misc_feature (1)..(447): n is a, c, g, or t
gtgcgcaaattagggcgcattatcggcgttgacgaagaaattgtaaggcgccatccgtttccggggccgggtcttgcggtgcgcatacttggggaagtaacaagagaaaagtgcgatattctgcgcgaagcggacgctatttatatagaagaactaaaaacccgccgcggcccgtccggaaagagtctgtacgacgaaatttggcaggcgttcgctatccttctgccgatacgttccgtaggcgtggctggagacgttcgcaaatacggctgggttcttgcgttacgcgcaatcacgagcgccgacggcatgaccgcggacgtctacccgttcgaaacccgcgatctattggaaatatccacgcgcattaccaactcggtaaaagagataggtcgcgtaacctacgacatttccagcaagccgccggctacgattgagtgggaatag

SEQ ID NO: 7676 - protein, 148 aa, Unknown
  Obtained from environmental sample
  DOMAIN (49)...(147): GMP synthase C terminal domain
  misc_feature (1)..(148): Xaa is any amino acid
MRKLGRIIGVDEEIVRRHPFPGPGLAVRILGEVTREKCDILREADAIYIEELKTRRGPSGKSLYDEIWQAFAILLPIRSVGVAGDVRKYGWVLALRAITSADGMTADVYPFETRDLLEISTRITNSVKEIGRVTYDISSKPPATIEWE

SEQ ID NO: 7677 - DNA, 483 bp, Unknown
  Obtained from environmental sample
  misc_feature (1)..(483): n is a, c, g, or t
gtggagcttatcgatcaggaagaacgggattttttccttagacgcgccatggaacctgcccgtccgctttatgattacatactgattgattgtcccccttccctcggagtgctgaccttaaacggaatggccgccgcagacgaggtttttatccccatgcagtgcgagtattttgccatggaaggccttagccaccttcttcaggcagttaaaagaattcagaagaatttgaattccaatttggacatcggggggatattttttacaatgtacgatcccaggacgcggctggcccagcaggtggtaaaggaagtaagcacttactttaaaaacaaggtgttcactaccattattccccggaacgtccggctttccgaagctccttcccacggccttcccatttctctatacgatcccaactgcaacggggcaaaggcttataaaagcctgaccaaggaggtactgggccgtggcggcaattaa

SEQ ID NO: 7678 - protein, 160 aa, Unknown
  Obtained from environmental sample
  DOMAIN (1)...(126): CobQ/CobB/MinD/ParA nucleotide binding domain
  misc_feature (1)..(160): Xaa is any amino acid
MELIDQEERDFFLRRAMEPARPLYDYILIDCPPSLGVLTLNGMAAADEVFIPMQCEYFAMEGLSHLLQAVKRIQKNLNSNLDIGGIFFTMYDPRTRLAQQVVKEVSTYFKNKVFTTIIPRNVRLSEAPSHGLPISLYDPNCNGAKAYKSLTKEVLGRGGN

SEQ ID NO: 7679 - DNA, 369 bp, Unknown
  Obtained from environmental sample
  misc_feature (1)..(369): n is a, c, g, or t
atgtcaaaagcggaatggaatgcctttattgagaagatggataaattgcttcaggaagaaaaagcggaaataattaataccctgattgccaacaataacgatttcaaagaaattgttgacgagaaggatcccaaagattttgcggatatagcatccgacgatattgacagaaaaatgatcgaaatgcttggttctcaggagctaaagcgcctcaaattaatagaatcggctcaaacccgcataaagcagggtaaatacggacactgcattaaatgtgacaggactatcccccctgaacggctggaagctatcccctacgcgcttatgtgtattgattgcaaatcagaagaggaaagacggaacaggtaa

SEQ ID NO: 7680 - protein, 122 aa, Unknown
  Obtained from environmental sample
  DOMAIN (51)...(121): Prokaryotic dksA/traR C4-type zinc finger
  misc_feature (1)..(122): Xaa is any amino acid
MSKAEWNAFIEKMDKLLQEEKAEIINTLIANNNDFKEIVDEKDPKDFADIASDDIDRKMIEMLGSQELKRLKLIESAQTRIKQGKYGHCIKCDRTIPPERLEAIPYALMCIDCKSEEERRNR

SEQ ID NO: 7681 - DNA, 510 bp, Unknown
  Obtained from environmental sample
  misc_feature (1)..(510): n is a, c, g, or t
gtggaaatacctaaagaaaaattagatgaatacccccagcttgtgaattatataaaaaacaaacgccttaaatatataatttttatggatgatttatcgtttgaagccggcgatttggggtataaaaatttaaaagttattttagacggaagaattgaacggcagcctcagaacattttaatttacgcgacttcaaacagatttcatattatcaatgaaacctggaaagaccgggaaggtgacgaaattcatttccgggataccatgagcgaaaagttatcgttatctgaacgatttggaattcgtgtaagctttgttacaacaagaatgaacgatgattattataagataattgaaggaattttatcggtcgaaaacattcaatttacagaagaaataaaagaagaagcgtcgcgctgggaaactttatataatggacgctcaggcagaaccgccgcacaatttgcaaaaaccataattgcttcgaatagaaagcgaatatacccttga

SEQ ID NO: 7682 - protein, 169 aa, Unknown
  Obtained from environmental sample
  DOMAIN (63)...(156): Protein of unknown function (DUF815)
  misc_feature (1)..(169): Xaa is any amino acid
MEIPKEKLDEYPQLVNYIKNKRLKYIIFMDDLSFEAGDLGYKNLKVILDGRIERQPQNILIYATSNRFHIINETWKDREGDEIHFRDTMSEKLSLSERFGIRVSFVTTRMNDDYYKIIEGILSVENIQFTEEIKEEASRWETLYNGRSGRTAAQFAKTIIASNRKRIYP

SEQ ID NO: 7683 - DNA, 306 bp, Unknown
  Obtained from environmental sample
  misc_feature (1)..(306): n is a, c, g, or t
atggcaactatatacgattacattcagtggaggggagatctgggttttgaccggtcgccttttaacccggttgataatttaattttttcccagcttgcgtacctgccgatggacgggattgtccccggccccaaagaaaagggcagcgtcagcatacaggaattggcggaacggtatttcaaaaataaaaccgaanacccgtccacccagcctgaggacataatcataaaagaaaccgaaaatacggtacaggctattcggaatgcccttcggtatatgcgggtgcaaactggttcggctaagtaa

SEQ ID NO: 7684 - protein, 101 aa, Unknown
  Obtained from environmental sample
  misc_feature (1)..(101): Xaa is any amino acid
MATIYDYIQWRGDLGFDRSPFNPVDNLIFSQLAYLPMDGIVPGPKEKGSVSIQELAERYFKNKTEXPSTQPEDIIIKETENTVQAIRNALRYMRVQTGSAK

SEQ ID NO: 7685 - DNA, 411 bp, Unknown
  Obtained from environmental sample
  misc_feature (1)..(411): n is a, c, g, or t
gtgcatttgcccccgggcatgaagtttttcgccggttcatcaaancagcgcggcataatcattcgcgcagacaaaaaaagcccgcgctcatcgcaggacgcggacttttcatggcttgtaaaaataggttcgctgaaaataagtttcccggaaagcgagctaatacccgcagaatccgcaaagtcagccgcagcccacaccggcaaaaaaaccgcgtttaaatcatgggaagcggaatacggcgagtcaacacaagccgcttacgaaataatgatccgcggtatgcgttttgaggacgctatggaagccgtccgcaaacaggtagacgcggcggtgcttttcggcttgaaaaatttcgccattattcacggcaaaggatacggtttctgcggaaggggctcggccatctga

SEQ ID NO: 7686 - protein, 136 aa, Unknown
  Obtained from environmental sample
  misc_feature (1)..(136): Xaa is any amino acid
MHLPPGMKFFAGSSXQRGIIIRADKKSPRSSQDADFSWLVKIGSLKISFPESELIPAESAKSAAAHTGKKTAFKSWEAEYGESTQAAYEIMIRGMRFEDAMEAVRKQVDAAVLFGLKNFAIIHGKGYGFCGRGSAI

SEQ ID NO: 7687 - DNA, 570 bp, Unknown
  Obtained from environmental sample
  misc_feature (1)..(570): n is a, c, g, or t
ttgatagataagtgtctgcaagcgggcatcccgattgacgtaatcggcatacaatcgcaccaacatcaaggctattggggggcggaaaaggtacgcgatgtgcttgaacgtttttcccgtttcggcctacccctgcattttacggaaaacacgttaatttcaggcgaaataatgcccccgcacatagttgaccttaacgattggcaggtggaaaaatggcctactacccccgaaggggaagatcggcaaatgcgtgaaatagttgaaatgtacgaaatacttttctcccatcccaaagtccaagcaattacgacatggtcaggctctgacgacgcatggctccacgcgcccgcaggtctccttcgtaccgacaacagcgaaaaacccgcgtacaaagcgttacgcgacaaaatagaaaacgaatggcgcacggtaaaaaacgggcgcacggacgcgaacggctgtttagaactggaaggctttaaaggcgcgtatgaagtttcatgcatggaaaaaaccgccctctttgaacttaatgggaatgacacgcttgaactacgattaatttaa

SEQ ID NO: 7688 - protein, 189 aa, Unknown
  Obtained from environmental sample
  misc_feature (1)..(189): Xaa is any amino acid
MIDKCLQAGIPIDVIGIQSHQHQGYWGAEKVRDVLERFSRFGLPLHFTENTLISGEIMPPHIVDLNDWQVEKWPTTPEGEDRQMREIVEMYEILFSHPKVQAITTWSGSDDAWLHAPAGLLRTDNSEKPAYKALRDKIENEWRTVKNGRTDANGCLELEGFKGAYEVSCMEKTALFELNGNDTLELRLI

SEQ ID NO: 7689 - DNA, 564 bp, Unknown
  Obtained from environmental sample
  misc_feature (1)..(564): n is a, c, g, or t
atgtttataataaaagtaaataatttagttaaaacttacacaacatttaagcgcggaagcggcatgaaagaaactttacagagttttttcaagcgggaaaaagtaattgttaacgcggttgataatatttcgtttaatgttaaggcgggcgaaatatgcggcgttctgggtcccaacggcgcgggcaagtccactgcgataaaaatgctctgcggcgcgctctaccccacttccggggaaattgacgttatgggatattcgcccagcagagatcgaaagaggtatgtgagggaaatcggcgcggtattcgggcagcgttcgcaattaatctgggatattcccccggttgacagttttaacatgaaccgcgccatttacggaataccgcaggcggattacaaaacgcgccttgacgagttagccgaaatgtttgatgtcacggaagttatgcacaaacctacgagggtgctgtctctcggcgagcgcatgaagtgtgaattcataatggctatgctccataagccgaaaattgtctttctggacgagcctacaataggggcttga

SEQ ID NO: 7690 - protein, 187 aa, Unknown
  Obtained from environmental sample
  DOMAIN (50)...(186): ABC transporter
  misc_feature (1)..(187): Xaa is any amino acid
MFIIKVNNLVKTYTTFKRGSGMKETLQSFFKREKVIVNAVDNISFNVKAGEICGVLGPNGAGKSTAIKMLCGALYPTSGEIDVMGYSPSRDRKRYVREIGAVFGQRSQLIWDIPPVDSFNMNRAIYGIPQADYKTRLDELAEMFDVTEVMHKPTRVLSLGERMKCEFIMAMLHKPKIVFLDEPTIGA

SEQ ID NO: 7691 - DNA, 708 bp, Unknown
  Obtained from environmental sample
  misc_feature (1)..(708): n is a, c, g, or t
atggaaaagaaatccgtccacagttcatttttctggaatttggcgatagttttcgcgatagtgtggctgattatagccggcgcgccttttgtatttcagctaatgaccaccttcaagacccagggagaatttatcaccaatggtattttctcactgcccaattctttaaacttaagaaattactttaccgtgttaagcagcggctttcatgtgtattttttaaacagtataatcgtcctcgccgtttccctgaccttgctgttattattgagcgcttttgccgcctaccccctttcgcgtatgcagttcaagctgaacaggcccatatacggcgccatcgtcgcggcgatgtcaatacctattcacataaccctcatacccgtgttcataatgaccatccgttttaacatgtacgaccatgtgtacgggcttataggccccaacgtggcgttcaacctgcccatatccatttttattctgacggcgtttatgcagggcatatccaaagagatggaggaagccgccgagatagacggctgcggcaggttcgcgaccttcttcaagatactgttccccctgtcaaaatcggggcttgcgaccctggcaatttacaacggcgtagtaatatggaacgaatttgtgttcgccatggtgctgacccagacccaggacgtgcgcacgctgccgctggctatctcggccatctga

SEQ ID NO: 7692 - protein, 235 aa, Unknown
  Obtained from environmental sample
  DOMAIN (69)...(229): Binding-protein-dependent transport system inner membrane component
  misc_feature (1)..(235): Xaa is any amino acid
MEKKSVHSSFFWNLAIVFAIVWLIIAGAPFVFQLMTTFKTQGEFITNGIFSLPNSLNLRNYFTVLSSGFHVYFLNSIIVLAVSLTLLLLLSAFAAYPLSRMQFKLNRPIYGAIVAAMSIPIHITLIPVFIMTIRFNMYDHVYGLIGPNVAFNLPISIFILTAFMQGISKEMEEAAEIDGCGRFATFFKILFPLSKSGLATLAIYNGVVIWNEFVFAMVLTQTQDVRTLPLAISAI

SEQ ID NO: 7693 - DNA, 828 bp, Unknown
  Obtained from environmental sample
  misc_feature (1)..(828): n is a, c, g, or t
atggccgggagcttgaggagtagtggcctttttgagaatccccagaagtttacaaagatgggggcaaggatccccaaaggcgtcctgcttgtagggatgcccggaaccggcaagactctgatggcccgctcggtcgcgggggaagccggggttgcttttttccacatgtccggttccgattttgtcgagatgttcgtgggcgtgggggcaagccgcgtcagggacctttttgatcagggcaggcgcagcgccccctgcattatttttattgacgagctggacgccgtgggccggacaaggggcgcgggctacggaggcggccatgatgagcgcgagcaaaccctgaatcaactgttagttgaaatggacggctttgattcaaaagacggggtgataatcctcgccgccacaaaccgtcccgatgtccttgaccctgccctgttgcgtcccggccgcttcgacaggcaggtggttgtagcgatgccggacatcaaggagcgtgaggcgatattgcagatacactccgcgaagatacccctgggaaaggatattgatcttacccgtgtcgcgcgggcgacgccgggtatgagcggggccgatattgccaatctggtaaacgaggccgccctgcacgcggcccgcaaagacaagccggaagtggaaatgcaggactttgaggaggcgcgggacaaggtgctgatgggcgtggcccgcagcaccctggttgtatccgataaagaacgccgtatgaccgctatacacgaagccggccatgccctgctgcattacttcctgaaaaacgccgaccccctgcataagtcccgatag

SEQ ID NO: 7694 - protein, 275 aa, Unknown
  Obtained from environmental sample
  DOMAIN (27)...(161): ATPase family associated with various cellular activities (AAA)
  misc_feature (1)..(275): Xaa is any amino acid
MAGSLRSSGLFENPQKFTKMGARIPKGVLLVGMPGTGKTLMARSVAGEAGVAFFHMSGSDFVEMFVGVGASRVRDLFDQGRRSAPCIIFIDELDAVGRTRGAGYGGGHDEREQTLNQLLVEMDGFDSKDGVIILAATNRPDVLDPALLRPGRFDRQVVVAMPDIKEREAILQIHSAKIPLGKDIDLTRVARATPGMSGADIANLVNEAALHAARKDKPEVEMQDFEEARDKVLMGVARSTLVVSDKERRMTAIHEAGHALLHYFLKNADPLHKSR

SEQ ID NO: 7695 - DNA, 372 bp, Unknown
  Obtained from environmental sample
  misc_feature (1)..(372): n is a, c, g, or t
gtgctgcgggccacgcccatcagcaccttgtcccgcgcctcctcaaagtcctgcatttccacttccggcttgtctttgcgggccgcgtgcagggcggcctcgtttaccagattggcaatatcggccccgctcatacccggcgtcgcccgcgcgacacgggtaagatcaatatcctttcccaggggtatcttcgcggagtgtatctgcaatatcgcctcacgctccttgatgtccggcatcgctacaaccacctgcctgtcgaagcggccgggacgcaacagggcagggtcaaggacatcgggacggtttgtggcggcgaggattatcaccccgtcttttgaatcaaagccgtccatttcaactaacagttga

SEQ ID NO: 7696 - protein, 123 aa, Unknown
  Obtained from environmental sample
  misc_feature (1)..(123): Xaa is any amino acid
MLRATPISTLSRASSKSCISTSGLSLRAACRAASFTRLAISAPLIPGVARATRVRSISFPRGIFAECICNIASRSLMSGIATTTCLSKRPGRNRAGSRTSGRFVAARIITPSFESKPSISTNS

SEQ ID NO: 7697 - DNA, 438 bp, Unknown
  Obtained from environmental sample
  misc_feature (1)..(438): n is a, c, g, or t
atgcagggggtcggcgtttttcaggaagtaatgcagcagggcatggccggcttcgtgtatagcggtcatacggcgttctttatcggatacaaccagggtgctgcgggccacgcccatcagcaccttgtcccgcgcctcctcaaagtcctgcatttccacttccggcttgtctttgcgggccgcgtgcagggcggcctcgtttaccagattggcaatatcggccccgctcatacccggcgtcgcccgcgcgacacgggtaagatcaatatcctttcccaggggtatcttcgcggagtgtatctgcaatatcgcctcacgctccttgatgtccggcatcgctacaaccacctgcctgtcgaagcggccgggacgcaacagggcagggtcaaggacatcgggacggtttgtggcggcgaggattatcaccccgtcttttga

SEQ ID NO: 7698 - protein, 145 aa, Unknown
  Obtained from environmental sample
  misc_feature (1)..(145): Xaa is any amino acid
MQGVGVFQEVMQQGMAGFVYSGHTAFFIGYNQGAAGHAHQHLVPRLLKVLHFHFRLVFAGRVQGGLVYQIGNIGPAHTRRRPRDTGKINILSQGYLRGVYLQYRLTLLDVRHRYNHLPVEAAGTQQGRVKDIGTVCGGEDYHPVF

SEQ ID NO: 7699 - DNA, 567 bp, Unknown
  Obtained from environmental sample
  misc_feature (1)..(567): n is a, c, g, or t
gtgttgtctgacttttacgacacgctgcagtatcctctttcttatttatcttctgatgaagaattggcgcttgtaaagctgtgccgtgaacataataccggcctgcttgccatgaaaggtttatgcggcggattaatttccaacgcgaaggcggcatttgcatttctgcgccagtatgacaatataattcccatttggggaatgcaaaaaatgagtgaattaaacgaatttctgttatacgaaaatgatccgccgccgctggacggaagtctgttaagcgccattgaaaaagacaaaaccgagctttccggtaatttctgccggtgctgcggttactgtctgccttgtcccgccggcattcccataaataacgcggcccgtatcacttttttgctcagcagaatggtcagggaaaactggataacgccggaatggaaaaaaaatatgcgcttgattgataattgtacaaactgcggtcattgcaaggagcattgtccgtacggtttggatataccggcgcttcttaaacgccagcaggcggaatattttaaggcagtgggagagtaa

SEQ ID NO: 7700 - protein, 188 aa, Unknown
  Obtained from environmental sample
  misc_feature (1)..(188): Xaa is any amino acid
MLSDFYDTLQYPLSYLSSDEELALVKLCREHNTGLLAMKGLCGGLISNAKAAFAFLRQYDNIIPIWGMQKMSELNEFLLYENDPPPLDGSLLSAIEKDKTELSGNFCRCCGYCLPCPAGIPINNAARITFLLSRMVRENWITPEWKKNMRLIDNCTNCGHCKEHCPYGLDIPALLKRQQAEYFKAVGE

SEQ ID NO: 7701 - DNA, 906 bp, Unknown
  Obtained from environmental sample
  misc_feature (1)..(906): n is a, c, g, or t
ttgctttgcgcggaatggcggaaggaaaagagccccggctatgattacgtttacgcgtcggcgcagtttagaagtcaagttctgctcgctatggacaggttcccccgcgatccgcgtcccttacggatattttttgaatatgcgtataacagaaaaccgcagccctctgaattgccggaaagcgatattaaccttcttgaactcgctcttaagcggctttcgttcttgcaggaagcagacccggaacttgcgtggatggcggctccgtttatgagaaatattgatgatgccagaagaagcgccgccgcttatagatcgggaaatttatctaatgatgaaaattttaagcctaatccggcttccatacctgtggcgctgaatcttggacttattgatgataaaacggcaatagaagaagtgtttccctcagttacggaaaatgaacccgccattaaaaaagatttaatagtcgatacttacaaattgcttcgcagtgaggaaggacgcgattcatttacccgcaaactccttgttttttcaggttttataattaccgacgatgaaaacgacggctatatagaaaacattgtgcattacaaaactggatttataaattatttagttgataatcttagtaataatattctaagttttaaagttgatttcggaccggacaatgacccggaaaaagtttccgtttttatttcgaaaaataattcttcgcgcgaacgtgatttatcgcggcgtattgatctgcaatgggagcgttatccttccgtaaaacaggctgaattggaaaatgaaacgtttaattttggtcccgtcttttttaattacgcgccgattaattttatagagcttggcgggagcgacaaacttacgggactccgtatccgctcgcgataa

SEQ ID NO: 7702 - protein, 301 aa, Unknown
  Obtained from environmental sample
  misc_feature (1)..(301): Xaa is any amino acid
MLCAEWRKEKSPGYDYVYASAQFRSQVLLAMDRFPRDPRPLRIFFEYAYNRKPQPSELPESDINLLELALKRLSFLQEADPELAWMAAPFMRNIDDARRSAAAYRSGNLSNDENFKPNPASIPVALNLGLIDDKTAIEEVFPSVTENEPAIKKDLIVDTYKLLRSEEGRDSFTRKLLVFSGFIITDDENDGYIENIVHYKTGFINYLVDNLSNNILSFKVDFGPDNDPEKVSVFISKNNSSRERDLSRRIDLQWERYPSVKQAELENETFNFGPVFFNYAPINFIELGGSDKLTGLRIRSR

SEQ ID NO: 7703 - DNA, 729 bp, Unknown
  Obtained from environmental sample
  misc_feature (1)..(729): n is a, c, g, or t
gtgctcaataagggaaaggtacttaacgccgtttccctgttctggtttaattttacaaaagacattattcccaatcacattatctcaagccagctgagagacatgcccgaattttttcaaaaggacgagttcgaagggcggacggttatggttaaaaagctgaagatattgccgtttgaatgtattgtcaggggatatatgttcgggaatatgtggtcggcctattcgaaaggcgaggaattctgcggccagaaaataagaagcggatacaagctggccgaaaggctggacgcacccctctttaccccttcgacaaaagcgcacgtcgggcatgacgagtatatcaccgttaaacatgtcgcagacgcaattggcgcggatttggcaaaaaaaatagagaaagccagttttgaaatttataacgcctgttacaattacgcctacaagaaaaacattataatcgccgatacgaaatttgaattcggtcttgacgcggacagcaacctcgttctggcggacgaggttttaacgccggattcaagcaggttctgggatctttccgattatcaggtgggggtttcgccgaaaagctatgacaaacaatttgtaagggactggctccttaataacaaaaaagacggtgagatgcaatttgacaaagtacccgatgacgttctgcaaaagacatcggagatttacgcggaatgtcttaagaagataaccggatag

SEQ ID NO: 7704 - protein, 242 aa, Unknown
  Obtained from environmental sample
  DOMAIN (2)...(225): SAICAR synthetase
  misc_feature (1)..(242): Xaa is any amino acid
MLNKGKVLNAVSLFWFNFTKDIIPNHIISSQLRDMPEFFQKDEFEGRTVMVKKLKILPFECIVRGYMFGNMWSAYSKGEEFCGQKIRSGYKLAERLDAPLFTPSTKAHVGHDEYITVKHVADAIGADLAKKIEKASFEIYNACYNYAYKKNIIIADTKFEFGLDADSNLVLADEVLTPDSSRFWDLSDYQVGVSPKSYDKQFVRDWLLNNKKDGEMQFDKVPDDVLQKTSEIYAECLKKITG

SEQ ID NO: 7705 - DNA, 546 bp, Unknown
  Obtained from environmental sample
  misc_feature (1)..(546): n is a, c, g, or t
ttggacgcggcgagagacgttgactatctcaccgaccttgaaaaagatttcatcctcgaatgnaatatggtgagaagcaatcctaaacgctacgccgaactttatatacagccgaaattgccgagttacaccggagacaactatgcggcggctcaagagtgcgtcgccgaattgagcggcgcggcgggcgtcgggattctaaggccggaaaaggggatgtatctcgcggcaaaagaccacgcgacggatttggttaaagcggggataaccggccatgtggggagcgatggaagcagggtgggtgacagactcagcagatatgggtcatacaaaggcggctgggcggaaaattgctcttacggcacaataacagcgcgagcgagagtgatcgggttgctcatcgatgtcggagcgccgagcagggggcatcgtaaaaatattatgaacggggcttatacccgcgtcggtttagccgtagcgggaacgcatccgaagatcggcgacgtttgcgtaatggatttcgcgagcgaatacgtaaacaagtaa

SEQ ID NO: 7706 - protein, 181 aa, Unknown
  Obtained from environmental sample
  DOMAIN (55)...(174): SCP-like extracellular protein
  misc_feature (1)..(181): Xaa is any amino acid
MDAARDVDYLTDLEKDFILEXNMVRSNPKRYAELYIQPKLPSYTGDNYAAAQECVAELSGAAGVGILRPEKGMYLAAKDHATDLVKAGITGHVGSDGSRVGDRLSRYGSYKGGWAENCSYGTITARARVIGLLIDVGAPSRGHRKNIMNGAYTRVGLAVAGTHPKIGDVCVMDFASEYVNK

SEQ ID NO: 7707 - DNA, 369 bp, Unknown
  Obtained from environmental sample
  misc_feature (1)..(369): n is a, c, g, or t
ttgagggttcagctgaaaaggcagctaaaaagcttagcaaaacgtttacagaaaaatttgtaccttcgcatcatgaatattcaacaaatcatatccgactactgtagcacgcagcccatcgccaaagcgtggctatttggctcctactcgcgaggcgaagcaacggcgcacagcgatgtggatattatggtttcgtttttacccgacaacaacatcacccttttgagctatgctcatattgtaaacgacttgcaacgcctgctgcataaaaaggtagatttggctgaggaaggacagctgctgccttttgcccaagaaagtgcagcacgcgataaaattttgatttatgagagaaacgctgagagatga

SEQ ID NO: 7708 - protein, 122 aa, Unknown
  Obtained from environmental sample
  DOMAIN (24)...(115): Nucleotidyltransferase domain
  misc_feature (1)..(122): Xaa is any amino acid
MRVQLKRQLKSLAKRLQKNLYLRIMNIQQIISDYCSTQPIAKAWLFGSYSRGEATAHSDVDIMVSFLPDNNITLLSYAHIVNDLQRLLHKKVDLAEEGQLLPFAQESAARDKILIYERNAER

SEQ ID NO: 7709 - DNA, 483 bp, Unknown
  Obtained from environmental sample
  misc_feature (1)..(483): n is a, c, g, or t
gtgaaggcaaaggtgattgacacgcgcaaaaccacgcccggtatgcgcgtacttgagaaaacggcggtaatgcttggcgacggcggcaaccaccgcatggggctttacgacatgattttgataaaggataaccacgtggatttttcgggcggcattgtacaggcggtacaaaacgcgcaggattacctcaaaaaaacggggcgcagcctaccaatagaggttgaggtgcgctcgctttccgacgttgaaaaggtgcttgcgcagggcggcgtacaccgcattatgctcgacaacttttcgcttgaaaacacgcgcaaggcggtagaaatgattggcggaaaatacgaggttgagtcatcgggcggcattacgctcgccacgctgcggcagtacgccgagtgcggcgtggactacatttcggtaggcgccctcacgcaccaaatcaaaagcttggacttgagcttgaaggcttgcgaggggtag

SEQ ID NO: 7710 - protein, 160 aa, Unknown
  Obtained from environmental sample
  DOMAIN (1)...(156): Quinolinate phosphoribosyl transferase, C-terminal domain
  misc_feature (1)..(160): Xaa is any amino acid
MKAKVIDTRKTTPGMRVLEKTAVMLGDGGNHRMGLYDMILIKDNHVDFSGGIVQAVQNAQDYLKKTGRSLPIEVEVRSLSDVEKVLAQGGVHRIMLDNFSLENTRKAVEMIGGKYEVESSGGITLATLRQYAECGVDYISVGALTHQIKSLDLSLKACEG

SEQ ID NO: 7711 - DNA, 867 bp, Unknown
  Obtained from environmental sample
  misc_feature (1)..(867): n is a, c, g, or t
ttggcggataaagccgggatcgcctacgaccgcggcgaggccggcacgccgtttagggttatagccgaccacatccgctcgctcgtcttcgcggtgacggacggcgccttcccgtccaacgaagggcgcggctacgtcttgaggcggctgctgcggcgggcttaccgcttcgggcgtgagataggattcaaggagccgtttttgtacaagctgacgcccattgtgatagagcagatgggcggcgccttcccggaaatcggccagcggcgctcgtacattgaagaagtgatcaaatctgaggaagagcgcttcggggctacgctcgaacaggggatcgaaaagttcggggcgatggttacgggtgcgcggaagggcggaggcaagacgcttgtaggggcggatgtcttcgcgttgtacgatacctacggcttccctatggacctgacccgcctcatggccgcggaaaagggtctgagcgtagacgaggccggatatgacaaactgatggagcagcagagggaacgcgcccgcgatgcccgcaaaggcgagagttcggacgggcttacgccggaggggtggacggaacttaggccgctctccggcactgagtttttggggtacgataacgacagcgcggaggtaaacgtatgccgttacaagaagatcgaagacgtcgacggagacggcgccaacgcgtacctgctgatacttgacaggacgcccttctacgccgaatccggcggccagaccggcgacaagggtgcgatagtcacatcgtgcggcgtcaatatcaccggggaagacaccgtanagtggaacgattcagtcgtccaccgcgtggaagcaaacggcgtgttgacggaataa

SEQ ID NO: 7712 - protein, 288 aa, Unknown
  Obtained from environmental sample
  DOMAIN (2)...(288): tRNA synthetases class II (A)
  misc_feature (1)..(288): Xaa is any amino acid
MADKAGIAYDRGEAGTPFRVIADHIRSLVFAVTDGAFPSNEGRGYVLRRLLRRAYRFGREIGFKEPFLYKLTPIVIEQMGGAFPEIGQRRSYIEEVIKSEEERFGATLEQGIEKFGAMVTGARKGGGKTLVGADVFALYDTYGFPMDLTRLMAAEKGLSVDEAGYDKLMEQQRERARDARKGESSDGLTPEGWTELRPLSGTEFLGYDNDSAEVNVCRYKKIEDVDGDGANAYLLILDRTPFYAESGGQTGDKGAIVTSCGVNITGEDTVXWNDSVVHRVEANGVLTE

SEQ ID NO: 7713 - DNA, 675 bp, Unknown
  Obtained from environmental sample
  misc_feature (1)..(675): n is a, c, g, or t
atgcgcagaggggaaatttttgcgtcctttgctctcatgagccgctccgatgtaaccggttacctgaaagaaaaagatgtttcatggcgtgaagattcctcaaatacagatgaacagtttcttcgtaacaaaattcgccgcaatcttgttccattattggatgaattatttcctgattggaaaaagggcgttgccgctgcggcgcagacccagtcgctgattgcggagttttttaccggaaaagcgcgtaaacttattaaatgggaaaagcagacaggggatattgtgacagacgaagaaaacttttttgctcaaagtaaaattatccgcgaagaagcgctgtttcaaggcattgatacattgtgcgccggcgcgtctttgcacggagaattgccttcccattcaataaaacgttctgttataaggcgttttagcgatggttctgcgaaagcttctgacttaggtccacttcatgtcaggcgcagagacggaaaagtaaccctgtccggtaaaaaaaaagaattcagcgaaagcggattctcactgttgataaaaaagccgggcttatataatcttaataatataagcattgaagcaggtccgtgttccaaagaaggtgattgtatttttttggttacaatgaaagaacctagtatcgggggtgttgatgtttaa

SEQ ID NO: 7714 - protein, 224 aa, Unknown
  Obtained from environmental sample
  misc_feature (1)..(224): Xaa is any amino acid
MRRGEIFASFALMSRSDVTGYLKEKDVSWREDSSNTDEQFLRNKIRRNLVPLLDELFPDWKKGVAAAAQTQSLIAEFFTGKARKLIKWEKQTGDIVTDEENFFAQSKIIREEALFQGIDTLCAGASLHGELPSHSIKRSVIRRFSDGSAKASDLGPLHVRRRDGKVTLSGKKKEFSESGFSLLIKKPGLYNLNNISIEAGPCSKEGDCIFLVTMKEPSIGGVDV

SEQ ID NO: 7715 - DNA, 459 bp, Unknown
  Obtained from environmental sample
  misc_feature (1)..(459): n is a, c, g, or t
atgtgtacgattttggcgatacagccaaaaccacgccngcttttgcgaatgatgactctggggaacggctttattccctctgccaaccacgccggaggactgcgctaccacggcatgagccccattttgagcaagctctaccaggacggccagcttgaagcccgcgccgaggttcaaactgatgtctttgacgccgccgtacgcttcatgaagtccgagggaatactccccgcgcccgaatcttcacacgcgataaaagtagcgattgacgaagctctggaatgcaagaaaaccggtgaaaagaaggtgatcctcttcggcttaagcggcacaggttatttcgatctgaacgcctatattcagtacaatgccaaaaccatgaccgaccatgtcccgactgatgaggaactggcacgtggttttgcaacgattccggatattccgatgaacaagaagtaa

SEQ ID NO: 7716 - protein, 152 aa, Unknown
  Obtained from environmental sample
  misc_feature (1)..(152): Xaa is any amino acid
MCTILAIQPKPRXLLRMMTLGNGFIPSANHAGGLRYHGMSPILSKLYQDGQLEARAEVQTDVFDAAVRFMKSEGILPAPESSHAIKVAIDEALECKKTGEKKVILFGLSGTGYFDLNAYIQYNAKTMTDHVPTDEELARGFATIPDIPMNKK

SEQ ID NO: 7717 - DNA, 330 bp, Unknown
  Obtained from environmental sample
  misc_feature (1)..(330): n is a, c, g, or t
atggctttggaagcagcttttggcgacccccgcttctctcacttgagtgcaggcgaatatccgcaaattgtcattgaaatatccgccctttcgcccatggaactctgtcccgacccgcgctcggtaaaagtgggcgttcatggcctttacctgatttaccgcggccgttcaggtgtacttctgccccaggtgccggtggaacagggctggaatttggacgaataccttgactacatatgcgtcaaggccggcctcccgccacattcctacgaagcacccggagcggagctttacactttcaccgctgtcgtcttcggcgaaagcgaataa

SEQ ID NO: 7718 - protein, 109 aa, Unknown
  Obtained from environmental sample
  DOMAIN (1)...(109): AMMECR1
  misc_feature (1)..(109): Xaa is any amino acid
MALEAAFGDPRFSHLSAGEYPQIVIEISALSPMELCPDPRSVKVGVHGLYLIYRGRSGVLLPQVPVEQGWNLDEYLDYICVKAGLPPHSYEAPGAELYTFTAVVFGESE

SEQ ID NO: 7719 - DNA, 744 bp, Unknown
  Obtained from environmental sample
  misc_feature (1)..(744): n is a, c, g, or t
atggaatttgaatttgaaggccgcaccgaaaaagaagcaattgaaaacgcggcgaaagaactggggcttgaaaaagacgattttgacgtggaaattctggaaacccagaagaacggacttttcaaaaaaggttttgtgcggataagggttcataccggaaacacaacgtttccaagaaacgatgcgcaaggaaacaattttaaatcaatgtccggcgcggaagatactgaagcgaggcaaaggactggaggaagcaaggcgatcttcggcgagcctgtgcctcaaaatgaatttgaggaaaaaatgtctgaatttacaacgggcattattgaaagaatgggatatcccggcaaggttacgattcttttcagggaaaagcacaagcttgggataaaaattgattcagagcattcatctattttaataggaaaaaaaggcaaaaatctggacgctcttcagctcttgctgaacatttacgcgggcaggctcggcagggacgatattcgcgtaattcttgataccgaaaattaccgtatccgcagagaagaatcccttgtgcgcctggcgtataatgtggcggaaaaagtgcgcgaaagccgcgattccatcctgcttgaaccgatgaatccctttgacagatggcttatccatacgacattaaatgatatcaacgatgttgaaaccaaaagcgagggagatggtttatataagcaggtaagggtgttttaccgcggattaaagtaa

SEQ ID NO: 7720 - protein, 247 aa, Unknown
  Obtained from environmental sample
  DOMAIN (189)...(244): R3H domain
  misc_feature (1)..(247): Xaa is any amino acid
MEFEFEGRTEKEAIENAAKELGLEKDDFDVEILETQKNGLFKKGFVRIRVHTGNTTFPRNDAQGNNFKSMSGAEDTEARQRTGGSKAIFGEPVPQNEFEEKMSEFTTGIIERMGYPGKVTILFREKHKLGIKIDSEHSSILIGKKGKNLDALQLLLNIYAGRLGRDDIRVILDTENYRIRREESLVRLAYNVAEKVRESRDSILLEPMNPFDRWLIHTTLNDINDVETKSEGDGLYKQVRVFYRGLK

SEQ ID NO: 7721 - DNA, 834 bp, Unknown
  Obtained from environmental sample
  misc_feature (1)..(834): n is a, c, g, or t
atgatgtcaaagacgtcaacaggagtgtcaaagcgcggaagaaacaccttcgcgcgcaagtttttcaggatagcggccgcaacggcggcgacggcggggcttttgttgttcgcggcgtgccctccggtcgaagcgccggacgacccgactgacccgaccacgccgaccaccccggtcacgccgggcgggaattggtatagcaaggatacttcggcggcgaagtttaccatttccacggcggcggaattggcggagtttgcggaattggtgaatggggggaagacgttcgccaataagacggttacgctggcaaaggatatcgatttgtccgcttatgcttcgtctaacaagaattttaatagcgagaaggggtggattcctatcgggcggtacggtagcggctcatcgaacagaccgtttaacggtatttttgatgggagcgggaaagtcgtcagcgggttgagtataaacgacaacgcgagcgactatatggggctgtttggaaatgtgaacggcgaaattttgaatttaggtgttgagggtatggatatacttggacgtaaatacgttggcggcgtggccggatacgttactgacaacggtattgtgaaaaattgctattccaaaggcgtcgtcagggctaccggtgaagatttgggcggggttgtcggctatttggctggaagcgtaatcgcgtgctattccaccgctacggttgatggtggcgaaagtgtcggcggtttggcgggttacgttaacagcctcataacggaaagttactatgacggtgaggtcaacggtgatagttatgttggagngtgtggccggatatag

SEQ ID NO: 7722 - protein, 277 aa, Unknown
  Obtained from environmental sample
  DOMAIN (186)...(213): The GLUG motif
  misc_feature (1)..(277): Xaa is any amino acid
MMSKTSTGVSKRGRNTFARKFFRIAAATAATAGLLLFAACPPVEAPDDPTDPTTPTTPVTPGGNWYSKDTSAAKFTISTAAELAEFAELVNGGKTFANKTVTLAKDIDLSAYASSNKNFNSEKGWIPIGRYGSGSSNRPFNGIFDGSGKVVSGLSINDNASDYMGLFGNVNGEILNLGVEGMDILGRKYVGGVAGYVTDNGIVKNCYSKGVVRATGEDLGGVVGYLAGSVIACYSTATVDGGESVGGLAGYVNSLITESYYDGEVNGDSYVGXCGRI

SEQ ID NO: 7723 - DNA, 522 bp, Unknown
  Obtained from environmental sample
  misc_feature (1)..(522): n is a, c, g, or t
gtgctatcttcgcggaagggcagggcggtgcgtacccacggggagcatgtcagacccatgggccgttcctcccgtggcgtaaccggcatgaagatgggcgctgacgatgagctcgctgggcttttacgggtagacgctgaggaaaaaatgctcgtgatttccgcctacggtttcgggaagcgcgtggaatttggcgagttcagctcgcatggccgcggcacctcagggcagaaggtctacacggtcagcgagaaaaccggcgagatcgtcggctgtgtcggcgttttggacggtgaagaaataatgtgcatcacaagccagggaaaatccattaagctaaaagtcgcttcaataagggtgatgggccgtagcgcccagggcgtgaaaatactgagcatcgacaagccggactttgtcatcggggttgatcgtatcgttaagaatgaagctgtaaaggaagaagcagagcctcagacagagctctttgcgggagaggaagagcaaataacagataacaaatag

SEQ ID NO: 7724 - protein, 173 aa, Unknown
  Obtained from environmental sample
  DOMAIN (47)...(97): DNA gyrase C-terminal domain, beta-propeller
  misc_feature (1)..(173): Xaa is any amino acid
MLSSRKGRAVRTHGEHVRPMGRSSRGVTGMKMGADDELAGLLRVDAEEKMLVISAYGFGKRVEFGEFSSHGRGTSGQKVYTVSEKTGEIVGCVGVLDGEEIMCITSQGKSIKLKVASIRVMGRSAQGVKILSIDKPDFVIGVDRIVKNEAVKEEAEPQTELFAGEEEQITDNK

SEQ ID NO: 7725 - DNA, 876 bp, Unknown
  Obtained from environmental sample
  misc_feature (1)..(876): n is a, c, g, or t
ttgaatttgacttttttaggagctaataaaaaaatgccagatatgctgaaccagttggacaagaaaacgcaggagatcgcgggagtgtcaatccgtttggcttcccccgagaccatccgcagttggtctttcggcgaggtcaccaagccggagaccataaactaccgttcgttcaagcctgaaaaggacggactcttctgcgagaagatattcggcccggttcgcaactgggagtgtaactgcggcaagtacaagcgcatccgctaccgcggcgtcgtctgcgaccgttgcggcgtggaggttatgcactccaaggtgcggcgcgagcgtatggggcacatcgagcttgccgagccggtcgtccatatctggttcttaaagagcacgccgtcccacatcagttatttgctcggcatcacgaacagcaatctcgagaggatcatctactacgaatcttacgtggtcattgatccgggcgacactaatttgcgcaaggatcagcttcttaccgaggagcagtactcagagttggttgagcagggtaagaagtttgacgcgaagatgggcggtcaggcggttttggagcttttggccaaggtagaggtggagaagctggtgatagagttgcgccacttggtgaagcgcgagacctccgagcagcgccgtttggaacatttgaagcgtctgcgcgtcgccgaggcttttaacagatcgaagaacgatccgcagaatatggtgctgaaggtgctgccggtgctgccgccggacttgcggccgcttgtgccgctggagggcgggcgtttcgcgacatcggatttgaacgatctttaccgccgtgtgataaataggaataaccnggttgaagaaactgcttga

SEQ ID NO: 7726 - protein, 291 aa, Unknown
  Obtained from environmental sample
  DOMAIN (23)...(290): RNA polymerase Rpb1, domain 1
  misc_feature (1)..(291): Xaa is any amino acid
MNLTFLGANKKMPDMLNQLDKKTQEIAGVSIRLASPETIRSWSFGEVTKPETINYRSFKPEKDGLFCEKIFGPVRNWECNCGKYKRIRYRGVVCDRCGVEVMHSKVRRERMGHIELAEPVVHIWFLKSTPSHISYLLGITNSNLERIIYYESYVVIDPGDTNLRKDQLLTEEQYSELVEQGKKFDAKMGGQAVLELLAKVEVEKLVIELRHLVKRETSEQRRLEHLKRLRVAEAFNRSKNDPQNMVLKVLPVLPPDLRPLVPLEGGRFATSDLNDLYRRVINRNNXVEETA

SEQ ID NO: 7727 - DNA, 441 bp, Unknown
  Obtained from environmental sample
  misc_feature (1)..(441): n is a, c, g, or t
atgggcttcggtcttggcgcggcttgcggcgcgaaagtagccaacccgaaaaaacccgtggcgctttttacgggagacggcagtttcagaatgaactgtgcggagatggcgaccctcaccaacaatcaaatccctcttttgataattgtctttaacaacggagtgctcggcatggtaaggcaatggcaaagtttcttttacgaaagccgctactcgcatacaattctcggcgcagccccagactttttaaaactgtgcggcgcttacggcgttgcaggcttccgcgcaggagacagggagtctttcaagaaggcgcttcatgccgccgcagaagaactgtctgccggaagggcggcgttgattgaagcggacatagaccgcgacgagaacgtactgccgatggttccgtccggtaagcctattgacgagcagattttgtaa

SEQ ID NO: 7728 - protein, 146 aa, Unknown
  Obtained from environmental sample
  DOMAIN (1)...(123): Thiamine pyrophosphate enzyme, C-terminal TPP binding domain
  misc_feature (1)..(146): Xaa is any amino acid
MGFGLGAACGAKVANPKKPVALFTGDGSFRMNCAEMATLTNNQIPLLIIVFNNGVLGMVRQWQSFFYESRYSHTILGAAPDFLKLCGAYGVAGFRAGDRESFKKALHAAAEELSAGRAALIEADIDRDENVLPMVPSGKPIDEQIL

SEQ ID NO: 7729 - DNA, 588 bp, Unknown
  Obtained from environmental sample
  misc_feature (1)..(588): n is a, c, g, or t
atgtcatttgttcaattttcccgtatcagccttgcttttggagacagagacatactgaaaaatgtatcactgcgtcttgcggcaggctcgaaatcctgtttaacgggagcgaacggctgcggtaaatcaacattgatgaaaattatcgcgggaaaaaacaacgccgactcgggcgacagagccgtgcaaaaagacactcgtatttcttacctgccgcaatcgggaatagtgcatcacggcaaaacgctccgagatgaagttgaaaccgcttttagttttgttcatgcgttactcgaaaaaatggaaaaaacgggcgggcttcttgaaaaatcgaataacgacgattctgctacgcaaacactgatagaagaacatcacaatttacaggaacagatagaagagacaggctactacaggagagaaggagaaatagcggcggttctttccggtcttggtttttccaataaagacgttgaccgtgatacgggagaattttcaggcggctggcagatgcgtatcgccctcgcaaaagttcttttggaaaaacccggatattctgcttttggacgagcctacaaattatcttga

SEQ ID NO: 7730 - protein, 195 aa, Unknown
  Obtained from environmental sample
  DOMAIN (29)...(194): ABC transporter
  misc_feature (1)..(195): Xaa is any amino acid
MSFVQFSRISLAFGDRDILKNVSLRLAAGSKSCLTGANGCGKSTLMKIIAGKNNADSGDRAVQKDTRISYLPQSGIVHHGKTLRDEVETAFSFVHALLEKMEKTGGLLEKSNNDDSATQTLIEEHHNLQEQIEETGYYRREGEIAAVLSGLGFSNKDVDRDTGEFSGGWQMRIALAKVLLEKPGYSAFGRAYKLS

SEQ ID NO: 7731 - DNA, 741 bp, Unknown
  Obtained from environmental sample
  misc_feature (1)..(741): n is a, c, g, or t
gtgccgctgcccagcgagaaggaactggaacggaggaaaacgatttccagttacggaagggaaatgaacaaccggacgaggctgatcaacacgttacacgcaatattcgtacatcaggggcataccaccatagtgaagaaaaatctcgcgaccgccgaacggcggcgggaggcgattcaggtattggccggacatgagcgggaagaggccgaatggcttttgaaatatctggaattgcacgagcagcggataaaggaattgagggtgaaaataaaggaagaggcgacaaacgacgaagacatgaaacggctgcaaagcatacccggaattggacctatagtcgcatacacctttacggcccatgtgggggacggcagccggttcagcaagggggcgcaagtaagcaattatataggatttgttccgagactggattattccggtacgattcagcggcacgggcatataacaaagcgcggaaacggttatcttcgcggcttattggtgcaggcggcttggacgatgacgctctgcaagaaaggcggggctctaagtacgcgttataaatattatacgttatgccaggaagtaagtaaaaagaagaccatagtttccatagcccgcaagttggctgaacttatgtactcggtattacgcaataaaacgatttacgagatacggaaatgggatggtccgaaaaataatccggctgttttaaccggacaaacaatgtgtgcttaa

SEQ ID NO: 7732 - protein, 246 aa, Unknown
  Obtained from environmental sample
  DOMAIN (76)...(188): Transposase IS116/IS110/IS902 family
  misc_feature (1)..(246): Xaa is any amino acid
MPLPSEKELERRKTISSYGREMNNRTRLINTLHAIFVHQGHTTIVKKNLATAERRREAIQVLAGHEREEAEWLLKYLELHEQRIKELRVKIKEEATNDEDMKRLQSIPGIGPIVAYTFTAHVGDGSRFSKGAQVSNYIGFVPRLDYSGTIQRHGHITKRGNGYLRGLLVQAAWTMTLCKKGGALSTRYKYYTLCQEVSKKKTIVSIARKLAELMYSVLRNKTIYEIRKWDGPKNNPAVLTGQTMCA

SEQ ID NO: 7733 - DNA, 522 bp, Unknown
  Obtained from environmental sample
  misc_feature (1)..(522): n is a, c, g, or t
atgtctgctattgaggcattatactgggttcaatgttatcctgacgaaataaaggcaataattggtatcgatccggcttttccaccttattatgaaaaattagatataactcccataataaaaaaaatgaaaaccttatcaaaaatatttaacaaatattttaaatggcttattccttttattgcaaaacaattatccccaataaaatacaatatattaaataaaatagatacaaaaatatgcaaggctttaaattatcatagattcttaacaaatgatatgtttaatgaatctgaaaaaatcagggaaaatgcaaagaaaataaatattaaaatgataaaaaaaatacctatgttattatttatttcaaatttcagtaaatgggaaaatttaataagggaatatacaaaagattttaaggtagaaatcgtattatataatgcaggacattatttacataatatttttccggatgatatatcaaataggagtaaaatatttataaagaatataataaaataa

SEQ ID NO: 7734 - protein, 173 aa, Unknown
  Obtained from environmental sample
  misc_feature (1)..(173): Xaa is any amino acid
MSAIEALYWVQCYPDEIKAIIGIDPAFPPYYEKLDITPIIKKMKTLSKIFNKYFKWLIPFIAKQLSPIKYNILNKIDTKICKALNYHRFLTNDMFNESEKIRENAKKINIKMIKKIPMLLFISNFSKWENLIREYTKDFKVEIVLYNAGHYLHNIFPDDISNRSKIFIKNIIK

SEQ ID NO: 7735 - DNA, 810 bp, Unknown
  Obtained from environmental sample
  misc_feature (1)..(810): n is a, c, g, or t
atggaaacggactacatagacttttatcacttctgggggatttcgttaaaaagcttcgagtcatggcaggggttaaagttcggccctattgaagcggcgtataaagccaaagaacaaggattaatcaagcacatttcattttcatatcacgacgcggcggaaaattataaaaagatagtggactcaggccattttgaaacgactcttgtccagtacaacatgctggaccgttccaacgaagaaaacatcgcttatgcaaaatcgaaaggcttgggcgttgtggtaatgggacctgtcggcggcgggcggttaggcgcgccaagcgaacaaattcaaagcttattgaaaagtaaatctacaagcaccgcggaaatggctttgcgttttgttcttgcgaacgagaacgtggacatggctctctccggcatgggcaatatggatatgttaaaggaaaattttgagattgcctcacgcacgggacatttaacggaagaagaaataagccatgtaaaatccatgatggaagaaaacaaaaacctcgcaaagttgtactgcacaggctgtaattactgcaaaccctgtccgcagggaatagacattccgtatctttttgaaattatgaaccgctaccgcgtctatgatttgaaagaacacgcaataagcgcgtacaaagaaatgatgaacggctggagctggattaagagcgcggacgcttcaaagtgcgtcgcttgcggaacttgcgaggaaaagtgtccgcagaagattccgattatcaagcagttgaaggagacgcacgaaacgctggcgtaa

SEQ ID NO: 7736 - protein, 269 aa, Unknown
  Obtained from environmental sample
  DOMAIN (234)...(257): 4Fe-4S binding domain
  misc_feature (1)..(269): Xaa is any amino acid
METDYIDFYHFWGISLKSFESWQGLKFGPIEAAYKAKEQGLIKHISFSYHDAAENYKKIVDSGHFETTLVQYNMLDRSNEENIAYAKSKGLGVVVMGPVGGGRLGAPSEQIQSLLKSKSTSTAEMALRFVLANENVDMALSGMGNMDMLKENFEIASRTGHLTEEEISHVKSMMEENKNLAKLYCTGCNYCKPCPQGIDIPYLFEIMNRYRVYDLKEHAISAYKEMMNGWSWIKSADASKCVACGTCEEKCPQKIPIIKQLKETHETLA

SEQ ID NO: 7737 - DNA, 399 bp, Unknown
  Obtained from environmental sample
  misc_feature (1)..(399): n is a, c, g, or t
gtgaaatnatcgggtagccgcgccggaactgtggaatttgcggaaaagcgcttcgacagcgcgggcgaaaaagaaaaaactgaaatagttaaaaaatatataaacatattccgcaaacagggaatagacgcccttgttctgggctgcacccactttctgtatctgctggacgaattccggcgcgaggcggaaccgcaaattaaaatttttgactctcttgagggaataaccaaccgcattgaattccttttgaatgaaaatgaaggcgcccttcgcgcgcaaaaagactgcgcgcacacaaaaaaaattattcttacgggaacacagccgcctgattcttcatggataaaccgcgcgaaatcgtacggatttgatctttgcctgataaacgaattatga

SEQ ID NO: 7738 - protein, 132 aa, Unknown
  Obtained from environmental sample
  misc_feature (1)..(132): Xaa is any amino acid
MKXSGSRAGTVEFAEKRFDSAGEKEKTEIVKKYINIFRKQGIDALVLGCTHFLYLLDEFRREAEPQIKIFDSLEGITNRIEFLLNENEGALRAQKDCAHTKKIILTGTQPPDSSWINRAKSYGFDLCLINEL

SEQ ID NO: 7739 - DNA, 645 bp, Unknown
  Obtained from environmental sample
  misc_feature (1)..(645): n is a, c, g, or t
atgcgttgcattcatcacaaatatttttatcagatcgtcgtatttgggccttcccctaagtgttcagtgctcgaaaacagacagattcaaacccgatccagccgaaccccgcggtcaattatcgacccgggaagtaccgaaaacgaaattttggatacaatcgaaaacgacaacatggatgtaaaaacggttcttataacccatgatcacctaagccatgtgcgcggcctgcgccctttaatgcgcatatacaacattgaggtttttgcggtaaatcaaagtattttagatcacaagacaaccgtggtaaaagacggcgacaaattatttatcggcggatttacggttgaggttatttctatacccggccattcctcggattcagtcgtttaccgcgttggcgacatgcttttcacgggcgatgtgcttacggccggtcttgtcggcagtacggcaagcgcttacggggcggccacgcaaatgaacaatttacgcagccgtcttctttcccttcccggcgattatttagtcctgcccggacacggcccgccctcaacgctggaagcggaacgccgctttaacacggacatctttaactacgatcagaaccgcagcaagcgccccgtcttccgcgtcgaaacttaa

SEQ ID NO: 7740 - protein, 214 aa, Unknown
  Obtained from environmental sample
  DOMAIN (18)...(181): Metallo-beta-lactamase superfamily
  misc_feature (1)..(214): Xaa is any amino acid
MRCIHHKYFYQIVVFGPSPKCSVLENRQIQTRSSRTPRSIIDPGSTENEILDTIENDNMDVKTVLITHDHLSHVRGLRPLMRIYNIEVFAVNQSILDHKTTVVKDGDKLFIGGFTVEVISIPGHSSDSVVYRVGDMLFTGDVLTAGLVGSTASAYGAATQMNNLRSRLLSLPGDYLVLPGHGPPSTLEAERRFNTDIFNYDQNRSKRPVFRVET

SEQ ID NO: 7741 - DNA, 495 bp, Unknown
  Obtained from environmental sample
  misc_feature (1)..(495): n is a, c, g, or t
atgctcctttatcatggcagttatataacagtggaggtccctaatctcaatttgtcccgaaaaaatcttgacttcggagcgggtttttatactaccgagaataggatgcaggctgttgatttttcccaaaaggtgatgatacgaaaaagacagaaaaaacgatctgtaagcgtatatgattttgacatggataccgctgaagccgtcctggatattctacggttccaggctactgacaaattatggctggattttgttcataagaacaggcggggtacatatactgacaaatcgtatgatttagtcatcggaccggttgctaatgatgatgtttttgcaaccttgattgtatatgaacagggtatattaaatgtcgaacaaacccttgaagcccttaaaatcaaaaaactttataatcaattcgtttttaaaaccgaaaaggcgttatctctgttaaagtatgtaaattcctttgagccggaggcaggatcttga

SEQ ID NO: 7742 - protein, 164 aa, Unknown
  Obtained from environmental sample
  misc_feature (1)..(164): Xaa is any amino acid
MLLYHGSYITVEVPNLNLSRKNLDFGAGFYTTENRMQAVDFSQKVMIRKRQKKRSVSVYDFDMDTAEAVLDILRFQATDKLWLDFVHKNRRGTYTDKSYDLVIGPVANDDVFATLIVYEQGILNVEQTLEALKIKKLYNQFVFKTEKALSLLKYVNSFEPEAGS

SEQ ID NO: 7743 - DNA, 846 bp, Unknown
  Obtained from environmental sample
  misc_feature (1)..(846): n is a, c, g, or t
atgacctggacagctggacagacgggggccgccattacccgccagcgttacggcgaattccataaaagcgccaaataccctgaaggcgagccttttccccgcatgatatggcccagcaactacaaccgctacgcggctgcgaccatgttcagcctctttttcggtgggaaaacctacgcgccggatctgagcatagacggcaaaaatgtccaggactggctgcaggggcattacatcgccgctttccgccactgttaccgcagacttaaaagctgttccgccatcgcgggctggggcgttatgaacgagccacacgacggccttattggatgcaaagacctggagaaaaacgataacaacatgatgccgataggtccaaggccaagcccctgggacacgatacgcgccgcttcagggtacccggtcgcggtgccgctatactcaatgaacccctttagcaaaataagcgtaaagcatgaaattttcaatccaggcgccgtttccctgtttaaggaaggattcctctgcccctggaaacaggccggcgtatgggatgaagaaacaggcaaacctcgcctgctgcgtaaagaccatttttcaatgtttgagaaaaggccggcgaatttcatggcggatttccataagccttttgtccttgattttatcaggtcgatcaaagaagcggacgagaaaacgattttctttctggagggaatgccttccggcacaagagcggcgtcgcatcctgaatggggcaaagatgatccgccaaacgtggtaaacgctttccactggtacgacggctttgccctgtttaccaaatttttcagccgctggtttacctaa

SEQ ID NO: 7744 - protein, 281 aa, Unknown
  Obtained from environmental sample
  misc_feature (1)..(281): Xaa is any amino acid
MTWTAGQTGAAITRQRYGEFHKSAKYPEGEPFPRMIWPSNYNRYAAATMFSLFFGGKTYAPDLSIDGKNVQDWLQGHYIAAFRHCYRRLKSCSAIAGWGVMNEPHDGLIGCKDLEKNDNNMMPIGPRPSPWDTIRAASGYPVAVPLYSMNPFSKISVKHEIFNPGAVSLFKEGFLCPWKQAGVWDEETGKPRLLRKDHFSMFEKRPANFMADFHKPFVLDFIRSIKEADEKTIFFLEGMPSGTRAASHPEWGKDDPPNVVNAFHWYDGFALFTKFFSRWFT

SEQ ID NO: 7745 - DNA, 924 bp, Unknown
  Obtained from environmental sample
  misc_feature (1)..(924): n is a, c, g, or t
atggcgaataacgacccaaaaaaaacaacgatagataagccgaggattgagaaagaaatccttgacgaactgagaaaagaattgctggctgacccgctgaacgcgcacggacgtgggaagaaaaaaacggtatcgccgccctatgaaccgaaccaccatgatcaggcgcgggcttttagggaatacacgcaggggcgcattaaatacatatcaagtcttgataaattcgccgtatacaacagcgaaaaaggcatatatgaaaccggggaatttgccttatctgccgcatggcatgtaatagatcggcttgcgcgggcgcgactggaatcgaccgagctatttagcagggacgaggaagacgccgccatatctttcggtaaaaaaatgctgacggggcaggaaggaaaccatgtaaaaaaactgttgaaagaaaaagagttatcctgccgattatctgaatttgacaatgatccgcttctcttgaattgtcagggcgtagcggtaaaccttgcgaccggcgcgagccgaccggcgacgagggacgaccgatttttaaaaactacgggcttccggcccgaaaaaatgaaaacgccggtgttcgacaggtttatgaaatgggtgacgcttgaccgcgccgaccttgctgtgtggattatgcggcttttcggctattgtcttacagggcttaccgcattcgagatattcgcaaactttcacggaggcgggagaaacggcaaagggacattaatacaccttatgcagcgcataatgggtgactaccaattagaattgccgttatccgcaatagtccttgaacagcgcgaaaaccgcaggccatttgaccttgccgaccttccggggcggcgcatggcgacaatttcagacgtgccgaaaaacacgcggtnaacatctcggccgatctga

SEQ ID NO: 7746 - protein, 307 aa, Unknown
  Obtained from environmental sample
  misc_feature (1)..(307): Xaa is any amino acid
MANNDPKKTTIDKPRIEKEILDELRKELLADPLNAHGRGKKKTVSPPYEPNHHDQARAFREYTQGRIKYISSLDKFAVYNSEKGIYETGEFALSAAWHVIDRLARARLESTELFSRDEEDAAISFGKKMLTGQEGNHVKKLLKEKELSCRLSEFDNDPLLLNCQGVAVNLATGASRPATRDDRFLKTTGFRPEKMKTPVFDRFMKWVTLDRADLAVWIMRLFGYCLTGLTAFEIFANFHGGGRNGKGTLIHLMQRIMGDYQLELPLSAIVLEQRENRRPFDLADLPGRRMATISDVPKNTRXTSRPI

SEQ ID NO: 7747 - DNA, 837 bp, Unknown
  Obtained from environmental sample
  misc_feature (1)..(837): n is a, c, g, or t
gtgcctgataaaaaaataatttttttaaacaaaccgcagataaatatttcctgtccaagcgccctcagaatgtggcttgtctgcgcttgcgcgtttctntgcgttattcaatcggctttcagcgacggcggaaagtcgctggttgtcgctcttacggcgtttttttccgcgttgataattgaattgttatttactcacaaaaaatacggagccgctaaaataaaagacggaagcgccgccgctacggcgatgattctttccatgcttttaccgaatcaaatacagcctgttcttgtttttttaggcgtcgcttttgcgattattgttgtaaagtacagtttcggcggacttggatcaaactggcttaaccccgcccttggcggctggttgtttatccggttttcatgggcatcggcttttaaagacgcgtttggcggttcaacgccttcagtttcggaaatggtaacaacagccgatataagtgcgctggatagtcctgttacggaattttttaataactcaatattttccgtcgccggcgtacagcttccgtcgggatatatcaatcttctttttaataatgacgccggtttaattacagacagaggtttattttttcttttaataggaactgtaattattaccgcggtaggaattaaccgaggatgggttccgttggtctttcttgcggtttacggttttcttgtccgttttgccggcgatttaacgggaatgtattggaacggagatatgttatacggcatattttccggcggtacgattgcggcggcgtttattcttgcggcggaaccggcagcagcctcgtgccgattctga

SEQ ID NO: 7748 - protein, 278 aa, Unknown
  Obtained from environmental sample
  DOMAIN (5)...(277): NQR2, RnfD, RnfE family
  misc_feature (1)..(278): Xaa is any amino acid
MPDKKIIFLNKPQINISCPSALRMWLVCACAFLCVIQSAFSDGGKSLVVALTAFFSALIIELLFTHKKYGAAKIKDGSAAATAMILSMLLPNQIQPVLVFLGVAFAIIVVKYSFGGLGSNWLNPALGGWLFIRFSWASAFKDAFGGSTPSVSEMVTTADISALDSPVTEFFNNSIFSVAGVQLPSGYINLLFNNDAGLITDRGLFFLLIGTVIITAVGINRGWVPLVFLAVYGFLVRFAGDLTGMYWNGDMLYGIFSGGTIAAAFILAAEPAAASCRF

SEQ ID NO: 7749 - DNA, 792 bp, Unknown
  Obtained from environmental sample
  misc_feature (1)..(792): n is a, c, g, or t
atggcacagatcactcttataggtatgcttgtattaggggtagtagcccttgttttaatttattttcttgcaagtttctttagcttatggctacaggctttgttttcaaaggcaagcgtgggcattttccagctactcggaatgaggctcaggaaggttaatccgcgtatgattgttgaatctaggattttgagcgttaaagctggtattcctgtggaaacaaatctgctagaggcacattttctctctggtggcaatgtgttgcgtgttgtgcaggctgttatagcggcaaacaaggcaaatatcaatctctcttttgcagaaagcgcagccatagaccttgcaggcagaaatgttcttgaagccgtgcaaatgagcgttaatccaaaagtgattaccactccaaaggttagtgcagttgccttagacggaattcagttgcaggcagttaccagaataaccgtgcgagctagtattcgcaagctggttggtggcgcaggcgaagaaacggttattgcccgcgttggcgagggtattgttagctccataggtagcgcaaaaaatcacaaagaggttttggaaaacccaaatatgatttccaaaaaagtgcttgccagcggcttggatgctggaacggcttttgaaattctctctattgatattgcagatgttgatgttggccataatataggtgcaattttggaaaccgaccgtgccgaggcagataaaaaaatcgcacaggcaaaggcggaagagagacgggcaatggctgctgccgctcggccaatctga

SEQ ID NO: 7750 - protein, 263 aa, Unknown
  Obtained from environmental sample
  SIGNAL (1)...(28)
  DOMAIN (1)...(263): Protein of unknown function (DUF1432)
  misc_feature (1)..(263): Xaa is any amino acid
MAQITLIGMLVLGVVALVLIYFLASFFSLWLQALFSKASVGIFQLLGMRLRKVNPRMIVESRILSVKAGIPVETNLLEAHFLSGGNVLRVVQAVIAANKANINLSFAESAAIDLAGRNVLEAVQMSVNPKVITTPKVSAVALDGIQLQAVTRITVRASIRKLVGGAGEETVIARVGEGIVSSIGSAKNHKEVLENPNMISKKVLASGLDAGTAFEILSIDIADVDVGHNIGAILETDRAEADKKIAQAKAEERRAMAAAARPI

SEQ ID NO: 7751 - DNA, 561 bp, Unknown
  Obtained from environmental sample
  misc_feature (1)..(561): n is a, c, g, or t
atgttctacgacaggggacgcgacggtcttccgcgcgaatggataaaaatgatgaaagactgcatgaaacaaatagggcagtcgatggcgtctcaccgtatgttgatggactactcgaatcaattttacttccccgcgcttaaaaatttccgccgtttcagcaaggacggttatgccgaggcaaaatcgcttgcggcgtatttcagcaaactacagcaatcgtggggaaacctaaagattgttaaaattgattccaacgccaaacctgtaatgcagcgcggcgatatgctgaccgtaacagccttccttgatttaggcaatgtttcgccgaatgatttgcaggttgaactgtaccacggcactgtatcgaaccagaacaaagaaattaccgacgcaagaaaagtagaaatgaaatggctcaggagcgaaggcaatttgaatctgtatcaggttcgcgttgaatgtacagatacgggaatgcaggggcacacagtgcgtatcctgccgaagcacgacgcgttgatacacccgtacagatgcggattaattaagtgggcgtaa

SEQ ID NO: 7752 - protein, 186 aa, Unknown
  Obtained from environmental sample
  misc_feature (1)..(186): Xaa is any amino acid
MFYDRGRDGLPREWIKMMKDCMKQIGQSMASHRMLMDYSNQFYFPALKNFRRFSKDGYAEAKSLAAYFSKLQQSWGNLKIVKIDSNAKPVMQRGDMLTVTAFLDLGNVSPNDLQVELYHGTVSNQNKEITDARKVEMKWLRSEGNLNLYQVRVECTDTGMQGHTVRILPKHDALIHPYRCGLIKWA

SEQ ID NO: 7753 - DNA, 873 bp, Unknown
  Obtained from environmental sample
  misc_feature (1)..(873): n is a, c, g, or t
ttgagggtagcagggctttccgacagcgaagtggaaaagctgctgtccaatctcgccatccgctctttttcttcgcgcgacgaacaagaggtcgccggatatgcggaaactatggagcaaatttttcagtcctgggagtatatcccgctaacggaaaaccatgtccgccagcttcatcgggatttactgcggcacagcgataaagacgagcgccatcgcggcagctacaaaacgtcctcaaacagcgtggcggcctttgacggccaggggcagcaaataggcatcgtctttgaaaccgctacgccctttgatacgcccggcctcatgcgcgagctgatcgagtggacgaatgccgcgctggaaaccaagagcctgcaccctttattggttatcggcgtttttaccgtaacctttcttgccatccatccttttcaggacggcaacgggcgcttgtcgcgcatcctgaccacgcttttgctgctgcgttgcggctacgcctacacaccctatagctcgctcgaaagcgtcattgagaacagcaaagagagctattgcctagccttgcgccagacgcaaacgactatccgcacggatactcccaactggcagccttggcttatcttcttcctgcgcgccctgcaccagcaagtgaagcgtctggaaaagaaagtggagcgagagcatatagtgctggccgccctgccggaactttccctgcaaattttggaatacgcccgcgaacatgggcgcgtgactatgaaaaacatggccatcctgaccggagccaaccgcaacaccctgaaagaacattttcgcaaactgctggagaacaggcagttggttatacagggtaaagggcgcggggcgtggtaa

SEQ ID NO: 7754 - protein, 290 aa, Unknown
  Obtained from environmental sample
  DOMAIN (55)...(194): Fic protein family
  misc_feature (1)..(290): Xaa is any amino acid
MRVAGLSDSEVEKLLSNLAIRSFSSRDEQEVAGYAETMEQIFQSWEYIPLTENHVRQLHRDLLRHSDKDERHRGSYKTSSNSVAAFDGQGQQIGIVFETATPFDTPGLMRELIEWTNAALETKSLHPLLVIGVFTVTFLAIHPFQDGNGRLSRILTTLLLLRCGYAYTPYSSLESVIENSKESYCLALRQTQTTIRTDTPNWQPWLIFFLRALHQQVKRLEKKVEREHIVLAALPELSLQILEYAREHGRVTMKNMAILTGANRNTLKEHFRKLLENRQLVIQGKGRGAW

SEQ ID NO: 7755 - DNA, 660 bp, Unknown
  Obtained from environmental sample
  misc_feature (1)..(660): n is a, c, g, or t
atgggccaggatattttgatccgtaacggttatgaggatcctgtcggcgacctggcttacggcaacgcggggggcgtatccggtccttcaaggtttatagacgtggccgccatggataacgattcctatgcctgctttgacagaacgcgcgggcgtatctttgtgtacgattttcagggcaatctgttatacgcttttggcggccttggcaaccgtgaaggcagcttcctgcagccaacaggccttgcccaaatgggacgctccctgtacgccattgattcccgcgccgccgcccttacccgctttgacatgacgggttacggggtgatgataaacagcgcgctggacgaataccaggccggccgctacgaagcctccgcggaggtttgggaagaagttcttaaaatgaacggcaattatgaccttgcctatataggcataggccgggcggcgctgaggcagggcgaatatcaaaaggcgatgaagtactacaagctaaagcattaccgtgaaggctatggcaaggcttttcagttataccgcaaacaatttacggaagagaacctctggaaaatgctgctggttctggcgattgttttattaacccctccgattattaaaaccgcggtgaaaatcgcaaaggaggtcagggaagcgtga

SEQ ID NO: 7756 - protein, 219 aa, Unknown
  Obtained from environmental sample
  misc_feature (1)..(219): Xaa is any amino acid
MGQDILIRNGYEDPVGDLAYGNAGGVSGPSRFIDVAAMDNDSYACFDRTRGRIFVYDFQGNLLYAFGGLGNREGSFLQPTGLAQMGRSLYAIDSRAAALTRFDMTGYGVMINSALDEYQAGRYEASAEVWEEVLKMNGNYDLAYIGIGRAALRQGEYQKAMKYYKLKHYREGYGKAFQLYRKQFTEENLWKMLLVLAIVLLTPPIIKTAVKIAKEVREA

SEQ ID NO: 7757 - DNA, 585 bp, Unknown
  Obtained from environmental sample
  misc_feature (1)..(585): n is a, c, g, or t
atggtgcggttcaagggcgggcttcccgacaaatcggcctaccgccgctacaagataaagacggtcgaggggcagaacgacttcgcgatgatgatggaaaccgtttcgcggcggctgcggcggctgcaagacgaggggagcgcgtttcccgacttgttgctcattgacggcggcaagggtcagcttcacgcggcaatggaagcgcttaagaatttcgaaaatccgccgcttatcgcctcgttagcaaaaaaagaggaaatcctcttttccccatgcttggacgaaccgctctccctgcctgagacgcatcctgcgcggcggttggtggagcggatccgcgacgaggtgcaccgctacgcgatcacttaccaccgtaaagtaaggggcaaacaattcacacgctccgcgttggagaacctgccgggaatcggaagcgtcagggcgcggctgctgttggcgcgtttcgggtcaatgaagcgtctgatggaagcggaggtaagcgaaatcgcaggcgtacgcggtttttcggaggaagcggcgcaacgcctcaaggaggcgttggcggctttcgaaagcgggcgttga

SEQ ID NO: 7758 - protein, 194 aa, Unknown
  Obtained from environmental sample
  DOMAIN (1)...(121): UvrC Helix-hairpin-helix N-terminal
  misc_feature (1)..(194): Xaa is any amino acid
MVRFKGGLPDKSAYRRYKIKTVEGQNDFAMMMETVSRRLRRLQDEGSAFPDLLLIDGGKGQLHAAMEALKNFENPPLIASLAKKEEILFSPCLDEPLSLPETHPARRLVERIRDEVHRYAITYHRKVRGKQFTRSALENLPGIGSVRARLLLARFGSMKRLMEAEVSEIAGVRGFSEEAAQRLKEALAAFESGR

SEQ ID NO: 7759 - DNA, 633 bp, Unknown
  Obtained from environmental sample
  misc_feature (1)..(633): n is a, c, g, or t
atgcccatgagcgcgcaggccaagctgcttagggctatccaagagaaagagatacagaaggttggcggcgacgacccgctgaaggtcgatgtcaggatattggcaacatcgaaccgcgacctccttgcggagatggacaaggggaatttccgcgaagacctatactaccgcctaaatatcttccacgtggagctaccgccgctgcgcgagaggaaggaggacattgtcgccctggccgagcacttcatagaaaagttcaacgacgaaaacgacttcaatgtcacaggtctcgacgagagttgcgagaaggttctgtgcgcgtacaattggcctggcaatatccgggaattggagaacaaggtggagcgggccgtggtacttacgcgtaacggccagataaagccgacggcgttcgatcttacaaccggcagcgcgcgtgccaaatcctccggcggcgggcttgcagtcggtatgaccattgccgaagcggaaaaagagctcataataaagacgctggaacactgtaacaataataaaaccaaggcggcggagatgctggaattatctgtacggacgctgaggaataagctgaacgagtacgcgctcggggccgatgatgatgaggaaagctga

SEQ ID NO: 7760 - protein, 210 aa, Unknown
  Obtained from environmental sample
  DOMAIN (160)...(200): Bacterial regulatory protein, Fis family
  misc_feature (1)..(210): Xaa is any amino acid
MPMSAQAKLLRAIQEKEIQKVGGDDPLKVDVRILATSNRDLLAEMDKGNFREDLYYRLNIFHVELPPLRERKEDIVALAEHFIEKFNDENDFNVTGLDESCEKVLCAYNWPGNIRELENKVERAVVLTRNGQIKPTAFDLTTGSARAKSSGGGLAVGMTIAEAEKELIIKTLEHCNNNKTKAAEMLELSVRTLRNKLNEYALGADDDEES

SEQ ID NO: 7761 - DNA, 435 bp, Unknown
  Obtained from environmental sample
  misc_feature (1)..(435): n is a, c, g, or t
ttgattatcgccgaggtgatcgggcttgacggcaggaaaatgagcaaaagttacggtaataccattcccctgtttgcgccggaaaaaaccctgcataaaaccattatgcgtgtggtgacaaattcgcaggctgttgaggaacccaaagaccccgactcaagccagatttatatgctctacaaacttttcgcctccaaagaagaacaggccgcgcttgcggcccgttaccgctcaggaggcatggggtggggtgaggccaaagaagaattattccgcgtggcaaaccgcgagcttgcccccatgcgcgagcgttacgaggcaatcatggcggacattcccgctctggacaggattcttgagcagggcgccgaaaaagcccgccccatcgcggcagctacggtcaagcgtttcaggaaggttgcagggatagattga

SEQ ID NO: 7762 - protein, 144 aa, Unknown
  Obtained from environmental sample
  misc_feature (1)..(144): Xaa is any amino acid
MIIAEVIGLDGRKMSKSYGNTIPLFAPEKTLHKTIMRVVTNSQAVEEPKDPDSSQIYMLYKLFASKEEQAALAARYRSGGMGWGEAKEELFRVANRELAPMRERYEAIMADIPALDRILEQGAEKARPIAAATVKRFRKVAGID

SEQ ID NO: 7763 - DNA, 393 bp, Unknown
  Obtained from environmental sample
  misc_feature (1)..(393): n is a, c, g, or t
gtggggggtcgaaaccacagtggtttcgaccgtgtatgtaaattcttcaaaggaagaaaaatgacgattaacgaacttgcctccgccctgggcgcggaaatctgccagaatgaatttacggacggggatgttgccggggcctatacctccgacctgctctccgatgttatggccaacgcaaaaaccggcggggcgctcattacgatacaggcacacaaaaacaccgtagccgtggccacacttgtcaacatttctgtcattgttatatgcaattcacgccccctgcccgacgatatgctggaagctgcaaaagacgaaggcatcgcggttatccgcacaaaagaaaaccagttcaccgtgtcggggaagatttgggaattgctgaaagtataa

SEQ ID NO: 7764 - protein, 130 aa, Unknown
  Obtained from environmental sample
  misc_feature (1)..(130): Xaa is any amino acid
MGGRNHSGFDRVCKFFKGRKMTINELASALGAEICQNEFTDGDVAGAYTSDLLSDVMANAKTGGALITIQAHKNTVAVATLVNISVIVICNSRPLPDDMLEAAKDEGIAVIRTKENQFTVSGKIWELLKV

SEQ ID NO: 7765 - DNA, 801 bp, Unknown
  Obtained from environmental sample
  misc_feature (1)..(801): n is a, c, g, or t
ttggatgacacccttctcaggtcggatttgacaatttcctaccataccagaaacgccatcaaaagggcggaagccgcgggagtaattgtggttctggcttcgggaagggtacccgcggcaatggatcagtttgccggacttttgggaatgcacaaaagacccggttaccttatatgcaacaacggaaccttaattcaggaaagccacacgggaaatattattttcgagaccaggatggacgtggaaaccgcgcttactgcctttgatttagccgatgccgaaggttttccaatacagatttatgaagacgacataatgtacgtatcgcgccataacgaatataccgcttatgatcaaaaacttaccggacttagacaggtagttgtggaaaatttccgggccatggtaagcggcggctgccataaacttcttatccccggagacccgcagctccttgtcccgctggaaagcattttacggacctatcttgaaaacaacgttaccatttttacaagcaaaccctattttctggagatactgcccgccaacaccaacaagggaaccgccctggaaaaagtcgcgaatttactgaagatagatcaaaaaaatgttatggccattggagattcgatgaacgatgaagccatgcttcactgggcaggtacgggcatagcaatggcaaacagcgacgagcgtataaaaaatatcgcggatctggtaacatcaagggacaatgatgatgacggcgttgccgaagtcatcgaaaaatatatcctggctaaaacggcggtttccaaatga

SEQ ID NO: 7766 - protein, 266 aa, Unknown
  Obtained from environmental sample
  DOMAIN (1)...(259): Sucrose-6F-phosphate phosphohydrolase
  misc_feature (1)..(266): Xaa is any amino acid
MDDTLLRSDLTISYHTRNAIKRAEAAGVIVVLASGRVPAAMDQFAGLLGMHKRPGYLICNNGTLIQESHTGNIIFETRMDVETALTAFDLADAEGFPIQIYEDDIMYVSRHNEYTAYDQKLTGLRQVVVENFRAMVSGGCHKLLIPGDPQLLVPLESILRTYLENNVTIFTSKPYFLEILPANTNKGTALEKVANLLKIDQKNVMAIGDSMNDEAMLHWAGTGIAMANSDERIKNIADLVTSRDNDDDGVAEVIEKYILAKTAVSK

SEQ ID NO: 7767 - DNA, 618 bp, Unknown
  Obtained from environmental sample
  misc_feature (1)..(618): n is a, c, g, or t
atgtactccctttcagaatatataggtaaagagataatcattcaattctcggcggacgtaaaacggacaggcgccgcgggaaacctgaactggcaggtgaataatgtaccgtattacccttcggcagcttttattgaaaatgccgcgcagggaatttggcataacatgagtggaaggctttttgtaactcccgcaaatgacgcgccttatttatatttaaccaactgggaaaacaacgcccaaaagactgtttattatatttccgatcctgttgtaattatcctggaaggggacagtttaaatcccgatctttctttgaagccactcaagtcgatatatgaaaaagactttttaataggcaatataacagacggaacatatatgtccggaaaatattttgatcttttgaaacaccattacaacgcggtaactttaactagcacatatccattttttcttgcgccatccaaaggcgcttaccagtgggaaacggcggatcagcagataagccttatgcgcagtaacaatatgtatattcatggccattgccttgtatggcacgagcttgccccaaaatggatgacaaccggaaccagagcggaagttaaaaaaacgtga

SEQ ID NO: 7768 - protein, 205 aa, Unknown
  Obtained from environmental sample
  misc_feature (1)..(205): Xaa is any amino acid
MYSLSEYIGKEIIIQFSADVKRTGAAGNLNWQVNNVPYYPSAAFIENAAQGIWHNMSGRLFVTPANDAPYLYLTNWENNAQKTVYYISDPVVIILEGDSLNPDLSLKPLKSIYEKDFLIGNITDGTYMSGKYFDLLKHHYNAVTLTSTYPFFLAPSKGAYQWETADQQISLMRSNNMYIHGHCLVWHELAPKWMTTGTRAEVKKT

SEQ ID NO: 7769 - DNA, 912 bp, Unknown
  Obtained from environmental sample
  misc_feature (1)..(912): n is a, c, g, or t
ttgggcaggttctcttgccaaaaaaaatggggcaaaacccgagttattgcagaaaccagtgctggacagcacggtgttgcctgtgcaacggcggcagctttgctcggcatggaatgtgaaattttcatgggcaaggaagataccgagcggcaaaaattaaatgtttacagaatggaattattgggcgcaaaggtaaatgctgttgaaagcggaacccaaacattaaaagatgcagtgaacgaaacaatgcgagaatgggtttccagagttgcagacacgcattatgtgcttggctcggttatggggcctcatccctttccgatgattgttagggattttcaaagcgttataagccgcgaagccaaggcgcaaattttggaaaaagagggcaagctaccagcagcggttattgcctgcgttggcggtggctcaaatgcaatgggtagtttttaccattttatagaagacaaatccgtgaagctgataggctgcgaagcggcagggctgggcattgaaacggacaaacacgcagccacaatagcaaaaggggaaattggaattttccacggaatgaaatcttatttttgccaaaattcagaagggcaaattgctcaagtgtattcaatatctgctggcttggattacccaggcattggcccagaacacgcatatttgcacgatatcggtagagcggagtatgttcccgttacagatgaagaagcggttttggcttttgagtatttggctcgcacagaaggaattatcgctgccatagagagttcacacgctgttgcttatgcgagaaaaatagtgccgagtttgccaaaaacagaaagcgttattatttgcctttctggtcgcggcgataaagatgttgcgtcaatagcaaagtacagaggagtaattgcatag

SEQ ID NO: 7770 - protein, 303 aa, Unknown
  Obtained from environmental sample
  DOMAIN (1)...(287): Pyridoxal-phosphate dependent enzyme
  misc_feature (1)..(303): Xaa is any amino acid
MGRFSCQKKWGKTRVIAETSAGQHGVACATAAALLGMECEIFMGKEDTERQKLNVYRMELLGAKVNAVESGTQTLKDAVNETMREWVSRVADTHYVLGSVMGPHPFPMIVRDFQSVISREAKAQILEKEGKLPAAVIACVGGGSNAMGSFYHFIEDKSVKLIGCEAAGLGIETDKHAATIAKGEIGIFHGMKSYFCQNSEGQIAQVYSISAGLDYPGIGPEHAYLHDIGRAEYVPVTDEEAVLAFEYLARTEGIIAAIESSHAVAYARKIVPSLPKTESVIICLSGRGDKDVASIAKYRGVIA

SEQ ID NO: 7771 - DNA, 888 bp, Unknown
  Obtained from environmental sample
  misc_feature (1)..(888): n is a, c, g, or t
atgcgagccttctgcttttcggttttacctgaaacacctactctaccgtcagtgacacttggttcaagaacaataaaagtaagttggacaaaaattgaaggcgcactatcttatgaagtttggtcaggtgtaaccgacaattcggcaaacgctcaaaaatacggcgctgatgtctcaagtacatcggtaacgcttacaggctttactaatgatactacatattatctttggataaaggcaaaaaataatattggcgttagtggattcagtcccatggcaagcggaacaccgtccgcatttgcatcagttcctccttcgccgcaatccgcgccaactgtaactgccggaagcggtcagtttactgtaagctggcaagcagtagaaggagcgttaaattatgaggtttgggtaggaacttccggtaattcaactatagcaacgaagcgaggcgatgatgttaccggactttcctcagtaatcacaggtctgacaaacggaacaacatattatgtttggttaaaagcaaagaatactgagggaacgagtaactttagtccaatgacaagcgtaacgccttcagcctttaatgatacaccacagtctccaacagttccttttgtaaacatcggtaatggacaaataactgtatcttgggtagcagttgaaggcgctacagcgtatgaggtttggatgggaactgtcaacaattctacgtccgccgcgaaaaacggtacggatattatcgcatcagtttctactacaataagcagtttgaccaatggaacaacctattatatctggataaaagctaaaaataattacggtacaagtggatttagttctgttgcaagcggtaagcccattgccaatgctacaacaccaatatga

SEQ ID NO: 7772 - protein, 295 aa, Unknown
  Obtained from environmental sample
  DOMAIN (199)...(280): Fibronectin type III domain
  misc_feature (1)..(295): Xaa is any amino acid
MRAFCFSVLPETPTLPSVTLGSRTIKVSWTKIEGALSYEVWSGVTDNSANAQKYGADVSSTSVTLTGFTNDTTYYLWIKAKNNIGVSGFSPMASGTPSAFASVPPSPQSAPTVTAGSGQFTVSWQAVEGALNYEVWVGTSGNSTIATKRGDDVTGLSSVITGLTNGTTYYVWLKAKNTEGTSNFSPMTSVTPSAFNDTPQSPTVPFVNIGNGQITVSWVAVEGATAYEVWMGTVNNSTSAAKNGTDIIASVSTTISSLTNGTTYYIWIKAKNNYGTSGFSSVASGKPIANATTPI

SEQ ID NO: 7773 - DNA, 681 bp, Unknown
  Obtained from environmental sample
  misc_feature (1)..(681): n is a, c, g, or t
ttgaaccttgcttcggctacaacggccgcgcccaagtacatcaccctctttgccggttcaccgacagatggaaacgcgttcttcttctttgacggcgcgatgagcgttcttaatccttatatcgacaaaggcgtacttaaagtagtcggcccctatcccaaaacatcagcggacagggaaaatttccagagaatcgcgacagaaaactggcaggctcccattgcgaaaacccgcatggaaaacctcctgaacaacgacgccagcaaagtaacgcttgacgcggtactcgcccccaatgacactctcggccgcgccattatcgaagcttgtaaggccgacgccaaataccgcggcaagctgcccgtagtaaccggacaggatgcggaatttgattcagccatgtcgattaaaaacggcgaacaatacagcaccgtattcaaagacacagccaaacttgcggaagccgcgattcttttagcggatcaggctctcaaaggccagcccatcaatattccgggcgcagtccttgcgtcaggcgatctcgcgaagatcggcgacacaggcaagaaagtggtaaaagcttatcttctggatcctatccttgttaccaaagacaatcttaatgtcccggttgacgccgagttctacgacaggccccaagccgtccaacttcagaactag

SEQ ID NO: 7774 - protein, 226 aa, Unknown
  Obtained from environmental sample
  misc_feature (1)..(226): Xaa is any amino acid
MNLASATTAAPKYITLFAGSPTDGNAFFFFDGAMSVLNPYIDKGVLKVVGPYPKTSADRENFQRIATENWQAPIAKTRMENLLNNDASKVTLDAVLAPNDTLGRAIIEACKADAKYRGKLPVVTGQDAEFDSAMSIKNGEQYSTVFKDTAKLAEAAILLADQALKGQPINIPGAVLASGDLAKIGDTGKKVVKAYLLDPILVTKDNLNVPVDAEFYDRPQAVQLQN

SEQ ID NO: 7775 - DNA, 633 bp, Unknown
  Obtained from environmental sample
  misc_feature (1)..(633): n is a, c, g, or t
atgggcgccggacgcacagaattgatgatgagtatcttcggcaactcctacggaaaccgcagcgaaggcgaattaataattaacggcaaaaggcaaaaattcaacagtcctcacgaagcgattagttcaaagcttggttatatctccgaagatcgcaaaagcctggggcttgtgctgattcaggatattaaaacgaatattactcattccagcttgaataaaatatccaatttcctaggaataattgacgaacaaaaagaaattacggaagcggaacgttaccgcaatgacttaaacataaggacgccgtcgataaaccagattgtccgtaacctgtccggcggcaaccagcaaaaagtagttgtaagcaaagcgcttttagctgacccggagatattaatagtagacgaaccgacaaggggtatagacgtaggcgccaaaacggaaatttacggcattatgaacaacatgattaccgccggaaagagcgtcatcatggttacctccgagcttcccgaagccttgggaatggcggacagaatttacgttatgaacgaaggacacattaaaggggtgcttaacaaatcggaagcaacccaggaaaaaataatgcatctggcacttgtcggatga

SEQ ID NO: 7776 - protein, 210 aa, Unknown
  Obtained from environmental sample
  DOMAIN (2)...(187): ABC transporter
  misc_feature (1)..(210): Xaa is any amino acid
MGAGRTELMMSIFGNSYGNRSEGELIINGKRQKFNSPHEAISSKLGYISEDRKSLGLVLIQDIKTNITHSSLNKISNFLGIIDEQKEITEAERYRNDLNIRTPSINQIVRNLSGGNQQKVVVSKALLADPEILIVDEPTRGIDVGAKTEIYGIMNNMITAGKSVIMVTSELPEALGMADRIYVMNEGHIKGVLNKSEATQEKIMHLALVG

SEQ ID NO: 7777 - DNA, 639 bp, Unknown
  Obtained from environmental sample
  misc_feature (1)..(639): n is a, c, g, or t
gtgcgttttactctggaaagtttccccggacgcatgttttcaggagttgttgaaaatctaagattgattcccgtaatgacgaataacgtagtaagttacacggttattattaatgtggaaaaccgcgacggctctttaatgccgggtatgacgtgcgccgttgattttatcgtggaacgcgctgaaaacgtgcttatggtttcaaatgccgccctgcgctaccggccgactcatttaacggcggaacaaatttccgaaatggtttttaacgcaagtcttgcgaacatggacgatgaacagcgcgaggccgcggttgaagcgagaacaaagtctcaggaacagaacaaacaacaggcggcgcaaacaacaggcggcggtattacgggacttatgatggggcagccgggcggcaggacaagaatgatgacaggcggcggccagagacggcggccttcggggcaggggcaggatacggtacgccctgtccagattgttatgcgaaatctgtggtttgtaaacggcgaaggcaaaattgattgtttgcagatacgcgccggcatcagcgacggctcgtctaccgagataatttcggaagaagactttgaagggcggcaggtaattcttagggagaaaatttaa

SEQ ID NO: 7778 - protein, 212 aa, Unknown
  Obtained from environmental sample
  misc_feature (1)..(212): Xaa is any amino acid
MRFTLESFPGRMFSGVVENLRLIPVMTNNVVSYTVIINVENRDGSLMPGMTCAVDFIVERAENVLMVSNAALRYRPTHLTAEQISEMVFNASLANMDDEQREAAVEARTKSQEQNKQQAAQTTGGGITGLMMGQPGGRTRMMTGGGQRRRPSGQGQDTVRPVQIVMRNLWFVNGEGKIDCLQIRAGISDGSSTEIISEEDFEGRQVILREKI

SEQ ID NO: 7779 - DNA, 798 bp, Unknown
  Obtained from environmental sample
  misc_feature (1)..(798): n is a, c, g, or t
atgactctttcaggagatttaggcattcattacaacatcggaaagcttggccccttaaacaattttacatgggcgtttatgttcaggagcatgggactaagttacttcccgacatggctgacaccggcaggcggtgtttcattcgaccttatcagcataaagggaaaagaaggtaaacatgatccgttcgtacttgggtttgcggcggatttaagcgttccctcgcttttctatcctgaatatataaatctgatttttaagacaggcgtcaacatgacgatagcggaaatcatatcgctttcggcatcatggccgggcgggtctggactgaactttcgtgaactgtcagataaaactgcggatttacagacaactccctcaatcggactcagcgtaaatattaatcttccgtcaggcggagagcggattgccggaggacgacttccctctgacggcgacctgaaaatcgcaggagcgtataaacctctttacgacggagttaccgccgtcggcggcggcgtaagctggtatgtcgggcagaaagacacaactccgcctgtaatcgcgcttgtttatcccgaaaccatttatttctctccaaataacgacggcaaagcggactatcttgaatttccagtaagcataaccgatgacaaatatgtcgttagctggaagatggaaataaaggatgaacaaggcaatgtcgtccgcgtaatcgaaaacaaggaacagcggtttacaagttttaatataaaagatgttttcaaacgtcttttctcgaaaaagncggcatattga

SEQ ID NO: 7780 - protein, 265 aa, Unknown
  Obtained from environmental sample
  misc_feature (1)..(265): Xaa is any amino acid
MTLSGDLGIHYNIGKLGPLNNFTWAFMFRSMGLSYFPTWLTPAGGVSFDLISIKGKEGKHDPFVLGFAADLSVPSLFYPEYINLIFKTGVNMTIAEIISLSASWPGGSGLNFRELSDKTADLQTTPSIGLSVNINLPSGGERIAGGRLPSDGDLKIAGAYKPLYDGVTAVGGGVSWYVGQKDTTPPVIALVYPETIYFSPNNDGKADYLEFPVSITDDKYVVSWKMEIKDEQGNVVRVIENKEQRFTSFNIKDVFKRLFSKKXAY

SEQ ID NO: 7781 - DNA, 681 bp, Unknown
  Obtained from environmental sample
  misc_feature (1)..(681): n is a, c, g, or t
ttgatggcgaggtttcatcccgacgaagtctacgaagtttttgcccagcctttgcgcgtatgcgatcttgttatggaaacctttgaaaaagttaccgaagttccttatatctccgacagcgaacgctggtttgtcggagcgggcgtaagttacgaaaacggcaaccctatacaacacatctacataaaaccggagttcccgaatatttccgcctctcttattatcaacacggacaggcgcgtctacaggattattctccgcagttactccgacgttcacatgcccctcgtcaaatggagatataattccggaatgcccaataattatatatctgctccgcaaaccaaaaccgcgggaaaagacaaagaaatcccttcccaggaaaattcataccctggaatagatccgcgtttcctgtctttcaattaccgcgttcaatacggtttttttaataaacccgtatggctgcctactctcgtttttgacgacggctcaaaaacttatatacaatttcccgaccttgttttgcaaagagaaatgccggccgtgtatgaaaacagaaaagacattctcaactaccgcgtaacaggaaaccttatagttatagataaattaattgagcagataactgttaaaatcggccgtaatgaagttgtcgttacaaaaaaaagaggtaaataa

SEQ ID NO: 7782 - protein, 226 aa, Unknown
  Obtained from environmental sample
  DOMAIN (2)...(224): Conjugal transfer protein
  misc_feature (1)..(226): Xaa is any amino acid
MMARFHPDEVYEVFAQPLRVCDLVMETFEKVTEVPYISDSERWFVGAGVSYENGNPIQHIYIKPEFPNISASLIINTDRRVYRIILRSYSDVHMPLVKWRYNSGMPNNYISAPQTKTAGKDKEIPSQENSYPGIDPRFLSFNYRVQYGFFNKPVWLPTLVFDDGSKTYIQFPDLVLQREMPAVYENRKDILNYRVTGNLIVIDKLIEQITVKIGRNEVVVTKKRGK

SEQ ID NO: 7783 - DNA, 666 bp, Unknown
  Obtained from environmental sample
  misc_feature (1)..(666): n is a, c, g, or t
ttggggagtaaagaagtagaaaacatggaaaataaagatatatttgattttaaacttaacaagaacaaggagtattggatcgttacaggttactatgtcagaggtaaagaggtggtttttccggcagtttataaagacaaaccggtaaaaaaaataggagaggcattatttcgttataataaaaaaataaaacgaatcattattcctgaaggttatacttccattggtaaatttgcattctccgattgcgcaaagcttacagagattaggcttcctgatagccttacttctatcggggattttgcattctccgattgcgcagagcttacagagtttaaaattcctgaaggtcttacttccattaagtgtggtgcattctccggttgttcagggcttaaagaaattaaacttcctgatagacttacttcaattgggcatggggcattcagtcattgtaaagagcttaaggagattaaactttctgatagtcttacttctattaagggttttacattctacggttgcagagagattaaagaaattaaacttcctgataaccttacttctataggggtattggcattcggtcattgtacagggcttaaggagattaaacttcctgaaactcttactaccatgaaaaaaatgcattctccttttgcgtaa

SEQ ID NO: 7784 - protein, 221 aa, Unknown
  Obtained from environmental sample
  misc_feature (1)..(221): Xaa is any amino acid
MGSKEVENMENKDIFDFKLNKNKEYWIVTGYYVRGKEVVFPAVYKDKPVKKIGEALFRYNKKIKRIIIPEGYTSIGKFAFSDCAKLTEIRLPDSLTSIGDFAFSDCAELTEFKIPEGLTSIKCGAFSGCSGLKEIKLPDRLTSIGHGAFSHCKELKEIKLSDSLTSIKGFTFYGCREIKEIKLPDNLTSIGVLAFGHCTGLKEIKLPETLTTMKKMHSPFA

SEQ ID NO: 7785 - DNA, 528 bp, Unknown
  Obtained from environmental sample
  misc_feature (1)..(528): n is a, c, g, or t
atgatgggcgtcttgtcgcccgggaagttggtatttgctgaggagctcgcgcacttcaagttttacgagctcgaagagttcgggatcgtccacaacgtccaccttattaaggaatacgacgatgtaggggacgcccacctgacgggcgagcaggatgtgctcgcgggtctgcggcatggggccgtcggcggcgctgacgacgagtatggctccgtccatctgggcggcgcccgtgatcatgttcttgacgtagtcggcgtgtcccggacagtcgacgtgcgcgtagtggcgcttctcggtagagtactcgacgtgcgacgtggcgatcgtcaggatcttcgtgtcgtcgcgccttccctgcgactcggaggctttggcgacctcgtcgtaggcgacgtacttggagagccccttggtggccatgacgcgcgtgatggcggccgtgagggtggtttttccgtggtcgacgtgcccgatggtaccgacgtttacgtggggcttgccgccgcgatcgaatttttcctttga

SEQ ID NO: 7786 - protein, 175 aa, Unknown
  Obtained from environmental sample
  misc_feature (1)..(175): Xaa is any amino acid
MMGVLSPGKLVFAEELAHFKFYELEEFGIVHNVHLIKEYDDVGDAHLTGEQDVLAGLRHGAVGGADDEYGSVHLGGARDHVLDVVGVSRTVDVRVVALLGRVLDVRRGDRQDLRVVAPSLRLGGFGDLVVGDVLGEPLGGHDARDGGREGGFSVVDVPDGTDVYVGLAAAIEFFL

SEQ ID NO: 7787 - DNA, 534 bp, Unknown
  Obtained from environmental sample
  misc_feature (1)..(534): n is a, c, g, or t
atggcggctaaatggtatgtcgtgcacacgtactcgggtcaggagaccaaggtattcgattacctgaacgggattatagcgtccggcgactacggcgagcagataaagagcgtcctcatgcccacccaagacgtggtgcaggttaaggacgggaagaagataaagaccacgcgcaagtttttcccctcctacgttcttgtagagatggagatgacgcgcgagacgatgcacgtcgtgcgtgagatcgcgggcgtgaccgggtttgtgggcggcgagaagccccaggcgatacgcgacgacgaggcgcggaggattttgggtcaggcggcggagaagggcccgcgccagcaggtctccgaggtgccttttgaggtcggcgacgcggtcaagatcaaagagggcccgttcaaggacttcgacggcgtcgtggacaaggtgtcgccggagaagggcaaggttatggttatggtcagcgttttcggccgctctacgccggtcgaggtcgatttcatacatgtcgcgccaatcagctga

SEQ ID NO: 7788 - protein, 177 aa, Unknown
  Obtained from environmental sample
  DOMAIN (123)...(160): KOW motif
  misc_feature (1)..(177): Xaa is any amino acid
MAAKWYVVHTYSGQETKVFDYLNGIIASGDYGEQIKSVLMPTQDVVQVKDGKKIKTTRKFFPSYVLVEMEMTRETMHVVREIAGVTGFVGGEKPQAIRDDEARRILGQAAEKGPRQQVSEVPFEVGDAVKIKEGPFKDFDGVVDKVSPEKGKVMVMVSVFGRSTPVEVDFIHVAPIS

SEQ ID NO: 7789 - DNA, 876 bp, Unknown
  Obtained from environmental sample
  misc_feature (1)..(876): n is a, c, g, or t
atggacggaacggttgtacagataaccgaaaacaggaaaattgcggcgttcattcccaaaaaactgttcaattttaacgaaaaaggctcatattacaagacggttaatatttataaattttcgcgtaacttttcgcaaaatacctatattccttttcttgaagcatattcgcgtactatgggaaataatgagtattatgaggaggttttacgtgttatcgcaacgcttgataaatgcgaactaaaggcttttgttttaacaggtcaaaaatggtacgaaatagatgacattcaggataagaatattgcggaaactattttttgcagctcaccaaaagagaaactaaagcgaatccaaagcgcttatggcggctattggcgctatccttcgatgctggatttttgctaccttgttaacccgtattttccttcttcgcaaatgtcagctgaattgaagacatatttttcagtgcttatatcttcatacccgtccggacaaaatacgcaaaatttactgggcgcaaaactctataatgtggaagaaacgcaaatacttataggtaacggcgcggcggaattaattcgcgcgcttgcggcggttgtcaatggtaaaataggaataatctatcctaccttcaatgaatacgcggaaagttttttagctgctaatactaacggatattccaaaaatgaaatcgtacaatttattcctaacgatttctcatatacggcggacgatctaaaaactctttcgaaaaattcagatgccattatcctgataaatcctgataatccttccggtaattttattccacgggacgatgttataaaacttgccatgtcgcttaaacaacaggggaaaaaaataaatacttga

SEQ ID NO: 7790 - protein, 291 aa, Unknown
  Obtained from environmental sample
  misc_feature (1)..(291): Xaa is any amino acid
MDGTVVQITENRKIAAFIPKKLFNFNEKGSYYKTVNIYKFSRNFSQNTYIPFLEAYSRTMGNNEYYEEVLRVIATLDKCELKAFVLTGQKWYEIDDIQDKNIAETIFCSSPKEKLKRIQSAYGGYWRYPSMLDFCYLVNPYFPSSQMSAELKTYFSVLISSYPSGQNTQNLLGAKLYNVEETQILIGNGAAELIRALAAVVNGKIGIIYPTFNEYAESFLAANTNGYSKNEIVQFIPNDFSYTADDLKTLSKNSDAIILINPDNPSGNFIPRDDVIKLAMSLKQQGKKINT

SEQ ID NO: 7791 - DNA, 750 bp, Unknown
  Obtained from environmental sample
  misc_feature (1)..(750): n is a, c, g, or t
gtgcaggtcataccgcacgtgacagacgaaatccgcacggtgatgaggaaggtcgcaaaggacgtggatgtcgtgatagtcgagattggcgggaccgtcggcgacatcgagagccagccgtttttggaggccatccgtcagcacaaactggattgcggcatcaacaacgcaatcaacgtccacgtcacttacgtcccctacatccgcgccgcaggcgaactgaagtcgaagcccacgcagcacagcgttaaggagatgcgcgccctggggctacagcccgacatcctgctgtgccgggcggagcaggagataccccgcgccctcaaggacaaaatcgcatcgttttgctccgtgacgccggacgccgtcttcagcgcgaaggacgcgggcacgatatacgaagtcccgctgctgctccacgaagagggcctagacacgaaagcagcggcgctgctgggcatccaaagcgtacagccagaccttagaccgtggatagacttagtcaaccgcatcaggaaccccaaggggagcgttaggatagcgatagtcggcaagtatgttgagttcaaggagagctacaagagccttgcggaagccctgcaccatgcggggtacagcctggagacccaggttgacctgaagtgggtcgaggccgaagagttggagacgcagccaccagaaggcttcctaagcgactgcccagggattctagtccccggcggattcggcgtgcgcggggcgaaagcatga

SEQ ID NO: 7792 - protein, 249 aa, Unknown
  Obtained from environmental sample
  DOMAIN (2)...(164): CTP synthase N-terminus
  misc_feature (1)..(249): Xaa is any amino acid
MQVIPHVTDEIRTVMRKVAKDVDVVIVEIGGTVGDIESQPFLEAIRQHKLDCGINNAINVHVTYVPYIRAAGELKSKPTQHSVKEMRALGLQPDILLCRAEQEIPRALKDKIASFCSVTPDAVFSAKDAGTIYEVPLLLHEEGLDTKAAALLGIQSVQPDLRPWIDLVNRIRNPKGSVRIAIVGKYVEFKESYKSLAEALHHAGYSLETQVDLKWVEAEELETQPPEGFLSDCPGILVPGGFGVRGAKA

SEQ ID NO: 7793 - DNA, 891 bp, Unknown
  Obtained from environmental sample
  misc_feature (1)..(891): n is a, c, g, or t
ttgggcggcctctcgctggttgccccccttatgtcccttgcaatggcctttgcaatgctctttgggattggatcggcaaatatgatctccatgcgcctgggccagggacgcaaagaggaagcggaaaacacccttaaccattgcgtccttctccttataggatccggcattttgcttacatttgttgggcttttatttatggacgaaatcctctcagttatgggagcgcaggaaggcagccttgccctggattacagccgcaggtattttaagataatcctttacggttctatacccatgcaggttggttttggcctgtcccattgtaccagggcgcagggtttcccaaccataacgatgattgccatgtttttaggcgccgggctaaacaccatccttgacccgctttttatttttgttttccattggggcgtcgaaggggccgcatgggctaccattatttcacaggctgtttcctgtatctggatactcactttttctttcagcaaaaaagcggtgattcatctcaagccgtcggcttttaacccttcgttaaaaacaaccgttgaaataatgggatttggctcgccccagtttatcatgcacatcgttatgtcagcggtgcaggttatcatcaataccagcctcggttggtacggctcggaagcgctgggcgtcagcaacggcggggacatcgctctttcgggaatgaatataatcggctcaatttcaatgctgatcctcatgcccgtgttcggtataaaccagggcgctcagccaatactgggctacaactacggggcgaaaaaatttaaccgggtgcttagggcgtatctttctcgcaatatccgctgctacattaatttgcctcatcgggtttatcgctgctga

SEQ ID NO: 7794 - protein, 296 aa, Unknown
  Obtained from environmental sample
  SIGNAL (1)...(28)
  DOMAIN (1)...(136): MatE
  misc_feature (1)..(296): Xaa is any amino acid
MGGLSLVAPLMSLAMAFAMLFGIGSANMISMRLGQGRKEEAENTLNHCVLLLIGSGILLTFVGLLFMDEILSVMGAQEGSLALDYSRRYFKIILYGSIPMQVGFGLSHCTRAQGFPTITMIAMFLGAGLNTILDPLFIFVFHWGVEGAAWATIISQAVSCIWILTFSFSKKAVIHLKPSAFNPSLKTTVEIMGFGSPQFIMHIVMSAVQVIINTSLGWYGSEALGVSNGGDIALSGMNIIGSISMLILMPVFGINQGAQPILGYNYGAKKFNRVLRAYLSRNIRCYINLPHRVYRC

SEQ ID NO: 7795 - DNA, 621 bp, Unknown
  Obtained from environmental sample
  misc_feature (1)..(621): n is a, c, g, or t
ttgcttttatcgggaggaattgactctcccgtcgccggttttttaatggcggcgcgcggaatgaacattgacgcggtacattttcatgcgtatccctatacttcaaatgaagcaaaacaaaaagctgtccgccttgctgaaattgtttcctcctactgtccgggcatacgtctttttattttaaactttacgcaaattcaaatgcggataaaagaaagctcagattcacagtggcttaccgtccttttgcgaatggcaatgatggaaacggcggaaaaagccgctttaaaaataaaaagcaaatgtcttataacaggagaaagcctttcgcaggttgcaagccagactatagaaaatttaacctgcacgcagagcaggataaaacttcccgttcttcgtccgcttatcggcatgaacaaggaaagcattatcagggaagcgcggcgtatcggcacttatgaaatttcaatacaaccctttgttgactgctgtacgcttttcagccccgttcatcctgtgctgtacggcgatcccgaacaggcaaatacattatatgaaaaattaactctcgcgccattgattgacgaagcgctggcaaattgcgaaattatcagattgtaa

SEQ ID NO: 7796 - protein, 206 aa, Unknown
  Obtained from environmental sample
  DOMAIN (1)...(151): ExsB
  misc_feature (1)..(206): Xaa is any amino acid
MLLSGGIDSPVAGFLMAARGMNIDAVHFHAYPYTSNEAKQKAVRLAEIVSSYCPGIRLFILNFTQIQMRIKESSDSQWLTVLLRMAMMETAEKAALKIKSKCLITGESLSQVASQTIENLTCTQSRIKLPVLRPLIGMNKESIIREARRIGTYEISIQPFVDCCTLFSPVHPVLYGDPEQANTLYEKLTLAPLIDEALANCEIIRL

SEQ ID NO: 7797 - DNA, 582 bp, Unknown
  Obtained from environmental sample
  misc_feature (1)..(582): n is a, c, g, or t
atgacgaatttcttccagactttggaatctgtcttaaagaaagataagcgtttcttctcaaaagacaatgaaaccctgctacgaaataaagtctatgagtcagcgataaacatggatagtgcccttataaaactgctcctttccaacgatgaaacaaaaagccgctttttcaccgaagtagacggcgtattagtctttgataaaattgcttttggttgggtagtcaataatcaccaatttctccctgacagttacacacgcttcaaaaaccgtattggactttcagacagtaacggcgaacttattaccacttcaaatgatgttgtcttgtccttcccttataaagattgtgtcctcgaaggcggacagacaaaagaagaccaaaaacgagatgaagttttttataatagtacccttgcccccgatgatatagaccgtcttttatatccaaaagtgcttgttggggcaaaacgttatactaaaaatggtgttgaagaaaatattacattcaaagacgatgataacttgataatcaaaggtaataatttgcttgccatttcatcattgttaaaaacgttttga

SEQ ID NO: 7798 - protein, 193 aa, Unknown
  Obtained from environmental sample
  misc_feature (1)..(193): Xaa is any amino acid
MTNFFQTLESVLKKDKRFFSKDNETLLRNKVYESAINMDSALIKLLLSNDETKSRFFTEVDGVLVFDKIAFGWVVNNHQFLPDSYTRFKNRIGLSDSNGELITTSNDVVLSFPYKDCVLEGGQTKEDQKRDEVFYNSTLAPDDIDRLLYPKVLVGAKRYTKNGVEENITFKDDDNLIIKGNNLLAISSLLKTF

SEQ ID NO: 7799 - DNA, 726 bp, Unknown
  Obtained from environmental sample
  misc_feature (1)..(726): n is a, c, g, or t
atgctgatgaatcaacgattcctggttattaagattttatatcttgacccgcctggactcccagctataaagaacataaactttcacctaacgccgggaatgatcatgggcattaccgggaaccgggacagcggttatgaaaccctggaacacgcgataactggttttctgaaaattggcgataaaaacgctaatcacggcagcggttcgattacgcttaacggtcatgacattaccggcatgggcgtccacgctttccgcgacgcgggaggggcctaccttggcgctgaccggctgggcagtaatctggcccgggaacttccgttgtttgaaagcctgatcattcacgcttaccggagagagcggtttgggatttttctgaatatggcctatcttaaagcctggtgcgggaaaatcatgaattgctcaggcgttatgcgctcggtaggggataagccggtttctttttcaggtggtatggtacagcgcattcttttgcagcgggaatttgctgaaaacgcgtcactcttggttttaaccgaacccggaagtgctctggatcaaattaaccgcgccgcgcttgccgatatgcttagggaatatgccggaggaggcagggcagtgctggttttttcttcggatgtcgaagagcttaaattttttaccgatgaaatcatgacgattaaagatgggaccttaattaagtggggcgaagatgaaatttaa

SEQ ID NO: 7800 - protein, 241 aa, Unknown
  Obtained from environmental sample
  DOMAIN (33)...(231): ABC transporter
  misc_feature (1)..(241): Xaa is any amino acid
MLMNQRFLVIKILYLDPPGLPAIKNINFHLTPGMIMGITGNRDSGYETLEHAITGFLKIGDKNANHGSGSITLNGHDITGMGVHAFRDAGGAYLGADRLGSNLARELPLFESLIIHAYRRERFGIFLNMAYLKAWCGKIMNCSGVMRSVGDKPVSFSGGMVQRILLQREFAENASLLVLTEPGSALDQINRAALADMLREYAGGGRAVLVFSSDVEELKFFTDEIMTIKDGTLIKWGEDEI

SEQ ID NO: 7801 - DNA, 642 bp, Unknown
  Obtained from environmental sample
  misc_feature (1)..(642): n is a, c, g, or t
atggcgagacttgcgaatccgtgtcacctttccgctataaccacgggaaaggcttacatggccggatacatcgccgctcttgtttcgcttgataataaccagagcggctcgagaatcatcggccttctggcggcgcaggaatatccagttatgaacaacataattctgccggggtatttggaaggcgcaaaggcagttgacccggcctttaacgtagatttccgcatagtcggcaattggtttgacgccgctaaaggcgccgagcttgccgccggaatgattcgctccggggcaacggtactgcttcccattgcgggcggcgccgggcagggagctgtccaggcggctttcgaggctggggcaaaggtggtctggtttgataccaatggctacgcgattcggccaggcacgattattggcagcgcaattcttaggcaggacaaagccgcttacgaaaaagtaatgctatacctaaagggagaactccccttcggcaaggccgaaatagccggaattgccgatggctttattgattttgtggaggatgatcctctttacattgcggcggtcagccagtcgattcgtgacaagcaggcgcagttaattgcccggcttcgctccggcgaattaaagctcgactaa

SEQ ID NO: 7802 - protein, 213 aa, Unknown
  Obtained from environmental sample
  DOMAIN (1)...(211): Basic membrane protein
  misc_feature (1)..(213): Xaa is any amino acid
MARLANPCHLSAITTGKAYMAGYIAALVSLDNNQSGSRIIGLLAAQEYPVMNNIILPGYLEGAKAVDPAFNVDFRIVGNWFDAAKGAELAAGMIRSGATVLLPIAGGAGQGAVQAAFEAGAKVVWFDTNGYAIRPGTIIGSAILRQDKAAYEKVMLYLKGELPFGKAEIAGIADGFIDFVEDDPLYIAAVSQSIRDKQAQLIARLRSGELKLD

SEQ ID NO: 7803 - DNA, 633 bp, Unknown
  Obtained from environmental sample
  misc_feature (1)..(633): n is a, c, g, or t
ttgtaccatgtatcagatcggccgagggcgtattatgcggaagccccttggcgcggaacatgggaacaggacggagggacactgatgaaccagtgtactcatggtattgatcttcttcaatggatgatgggtgaaaatgctgtgcgggtacaggcgcaaacaaggcgttttatacgtcctatagaagcggaagattttggcgcagctatcgtagagttcaaaagcggcgcggttggaattattgagggaagcgcggatgtttttccgacgaacataaatgaaactctttctatttttggggaaaaaggttcggctattgttggcggacttgcggttaacagaatagatatttggcgatttgctgatgctcagcaagtcggtgatactgaggaaaaagtattaaatcccaatgaaaaagatccgccgacagtttatggttttggacataccgccttgtttaaggattttattgaggctattgaagttgatcgggagccgattatttccggagaaaaaggtaaaaaagcgcttgagattatacttgctgtttataaatcccaaaaaacaggtaaacctgtcgatttaccctgtgatttttctacgcttgatatgaaaggaatatttgataaatga

SEQ ID NO: 7804 - protein, 210 aa, Unknown
  Obtained from environmental sample
  misc_feature (1)..(210): Xaa is any amino acid
MYHVSDRPRAYYAEAPWRGTWEQDGGTLMNQCTHGIDLLQWMMGENAVRVQAQTRRFIRPIEAEDFGAAIVEFKSGAVGIIEGSADVFPTNINETLSIFGEKGSAIVGGLAVNRIDIWRFADAQQVGDTEEKVLNPNEKDPPTVYGFGHTALFKDFIEAIEVDREPIISGEKGKKALEIILAVYKSQKTGKPVDLPCDFSTLDMKGIFDK

SEQ ID NO: 7805 - DNA, 678 bp, Unknown
  Obtained from environmental sample
  misc_feature (1)..(678): n is a, c, g, or t
gtgcttttggaaaaagtcaagcgcttattgctccgtctgctggctggcaaaaaagagcaagagaataaagaggaatccgtaaaattagtgatggattttttgacaaaactcccaaaaatcagggcaagcctcgccaccgacgtcgaggccgcttatgatagcgaccccgcagctataggcaaagaggagattatcatctcttatccgggcatttatgccatatcaatttacaggcttgcgcatgagctttacctattcaacatcccaatgctcccacggataatgaccgaatacgcccattcagtgacgggaatagatattcatcccggagcgcaaataggcgagtattttttcatagaccacggaacaggcattgtgataggcgaaacgacggttataggcgagcacgtgaaaatttaccaaggagtaactttgggtgcgctctccacaaaaggcgggcagagcttgagagggaaaaagagacacccaacggtagaagataatgtgaccatatattccggagcttccatttttggcggagatacggttataggcaaaaattccgtgctgggcagcaatgtgtttgtaacggaatctattccggccgattcaaaattgagcatatatgacagacctattaaaagaaaatcacaaaaatattggtattatgaaatttag

SEQ ID NO: 7806 - protein, 225 aa, Unknown
  Obtained from environmental sample
  misc_feature (1)..(225): Xaa is any amino acid
MLLEKVKRLLLRLLAGKKEQENKEESVKLVMDFLTKLPKIRASLATDVEAAYDSDPAAIGKEEIIISYPGIYAISIYRLAHELYLFNIPMLPRIMTEYAHSVTGIDIHPGAQIGEYFFIDHGTGIVIGETTVIGEHVKIYQGVTLGALSTKGGQSLRGKKRHPTVEDNVTIYSGASIFGGDTVIGKNSVLGSNVFVTESIPADSKLSIYDRPIKRKSQKYWYYEI

SEQ ID NO: 7807 - DNA, 477 bp, Unknown
  Obtained from environmental sample
  misc_feature (1)..(477): n is a, c, g, or t
atgggttccctctttttgttcctgcttgtcgcaaatattatccctgttttatcgcccctgccattgaaagcctttgggcgggtgtttatcccgccctttgaaatccgccccccgacaagggacattaatgtaacggctgcgcttgcggctgtttcaattatactcgttcttgtctgcgggtttgcggcgcgggggtttacgggctggtttaaaaaacttttacaccccattccgtttatgctgccctttaatattatggagtacggaacgcggcttatttcactcgccctgcgcctgttcggaaatattttgggcggctatgtgttgatgtgcatgatcgaaggactgcttcccgtcgcgcttcccgttattttgtcgctctactttgatttctttgacggattgattcaggcggcaattttcgtatttcttaccagcctctacattggcgaggcggttaagattaatgaagagtga

SEQ ID NO: 7808 - protein, 158 aa, Unknown
  Obtained from environmental sample
  DOMAIN (2)...(151): ATP synthase A chain
  misc_feature (1)..(158): Xaa is any amino acid
MGSLFLFLLVANIIPVLSPLPLKAFGRVFIPPFEIRPPTRDINVTAALAAVSIILVLVCGFAARGFTGWFKKLLHPIPFMLPFNIMEYGTRLISLALRLFGNILGGYVLMCMIEGLLPVALPVILSLYFDFFDGLIQAAIFVFLTSLYIGEAVKINEE

SEQ ID NO: 7809 - DNA, 510 bp, Unknown
  Obtained from environmental sample
  misc_feature (1)..(510): n is a, c, g, or t
atgggaggcgacaccctggtaatcgaggcgacctcggttccgggaaaagaagggctgacccttacaggtaaaatgggcgacacgatgaaggaaagcgccgccatagccatgaccgtggcgcggaagcttgccgtggagcgttaccgtgtcgcgcaggactggtttgatttcaaccatatacacctgcatataccggagggcgcgacgcctaaagacggtccctcggctggaataacaatggccacggctctgctttcgcttatgcgcgacaaggtggtaacggagcggctggtaatgaccggcgaactttccctgacaggccaggtgcttcccataggcggccttaaagaaaaaacagtcgccgcgaggcggaacaaagccaggcacataattatcccaaggcagaatgagcgtgatcttgacgagattcccgaccatgtaaagaagggcatcagcttccaccccgtggaacgttttgaagaagtgctggccctggcgctgccggaatag

SEQ ID NO: 7810 - protein, 169 aa, Unknown
  Obtained from environmental sample
  DOMAIN (1)...(169): Lon protease (S16) C-terminal proteolytic domain
  misc_feature (1)..(169): Xaa is any amino acid
MGGDTLVIEATSVPGKEGLTLTGKMGDTMKESAAIAMTVARKLAVERYRVAQDWFDFNHIHLHIPEGATPKDGPSAGITMATALLSLMRDKVVTERLVMTGELSLTGQVLPIGGLKEKTVAARRNKARHIIIPRQNERDLDEIPDHVKKGISFHPVERFEEVLALALPE

SEQ ID NO: 7811 - DNA, 429 bp, Unknown
  Obtained from environmental sample
  misc_feature (1)..(429): n is a, c, g, or t
atgcgtgataacttcatgcttcgcttgatcactcttcactcttcacttttcacttttcactattccggcagcgccagggccagcacttcttcaaaacgttccacggggtggaagctgatgcccttctttacatggtcgggaatctcgtcaagatcacgctcattctgccttgggataattatgtgcctggctttgttccgcctcgcggcgactgttttttctttaaggccgcctatgggaagcacctggcctgtcagggaaagttcgccggtcattaccagccgctccgttaccaccttgtcgcgcataagcgaaagcagagccgtggccattgttattccagccgagggaccgtctttaggcgtcgcgccctccggtatatgcaggtgtatatggttgaaatcaaaccagtcctgcgcgacacggtaa

SEQ ID NO: 7812 - protein, 142 aa, Unknown
  Obtained from environmental sample
  SIGNAL (1)...(27)
  misc_feature (1)..(142): Xaa is any amino acid
MRDNFMLRLITLHSSLFTFHYSGSARASTSSKRSTGWKLMPFFTWSGISSRSRSFCLGIIMCLALFRLAATVFSLRPPMGSTWPVRESSPVITSRSVTTLSRISESRAVAIVIPAEGPSLGVAPSGICRCIWLKSNQSCATR

SEQ ID NO: 7813 - DNA, 366 bp, Unknown
  Obtained from environmental sample
  misc_feature (1)..(366): n is a, c, g, or t
ttggaaaaagaaggaaccggctgcatttgtttttcgccgctggcgcaggggcttttaaccggaaggtatctggacggcgcaattccagacggttcaagagcgtcaaagggcgtttttcttaaaccgtctttaataaccccatcgctggtcgaaaaactcaacgcgctgaacgaaattgcaaaagaaagaaactgctctctttcaacattggcaatcatctggatattgcgcgacgcacgctgtacgtccgtactaaccggcgcaagctcttcggctcagttaaaagataatctggcggcagtttcacaaccgcccctttcagaaaaggaactccaaaatattgaaaaaatcttacaacccccctaa

SEQ ID NO: 7814 - protein, 121 aa, Unknown
  Obtained from environmental sample
  misc_feature (1)..(121): Xaa is any amino acid
MEKEGTGCICFSPLAQGLLTGRYLDGAIPDGSRASKGVFLKPSLITPSLVEKLNALNEIAKERNCSLSTLAIIWILRDARCTSVLTGASSSAQLKDNLAAVSQPPLSEKELQNIEKILQPP

SEQ ID NO: 7815 - DNA, 417 bp, Unknown
  Obtained from environmental sample
  misc_feature (1)..(417): n is a, c, g, or t
ttgtactataattatcctatgtgtctcgacaacattgttgcggaaaacgggaaagccttgccccttggggcggagcttgtcggcgatggcgttaattttgcggttttttcacgaaatgctaccgcgatatcgcttattctttttgagtccgcaaatcccggaagtaaatgggtcgaaattccccttgataaaagaggaaataaaaccggtaatatttggcactgctttatcaaaggattaagcgccggaacctgttatctgtaccgtgcggacggaccgtatttccccgaaaagggactgcgttttaaccggaataaaaccctgctcgatccttacgcanaagctttaacggatatcagtgaatgggattacagcanaagcacgggttatgatcttgaaaaccgggacacgatctga

SEQ ID NO: 7816 - protein, 138 aa, Unknown
  Obtained from environmental sample
  DOMAIN (21)...(113): Isoamylase N-terminal domain
  misc_feature (1)..(138): Xaa is any amino acid
MYYNYPMCLDNIVAENGKALPLGAELVGDGVNFAVFSRNATAISLILFESANPGSKWVEIPLDKRGNKTGNIWHCFIKGLSAGTCYLYRADGPYFPEKGLRFNRNKTLLDPYAXALTDISEWDYSXSTGYDLENRDTI

SEQ ID NO: 7817 - DNA, 504 bp, Unknown
  Obtained from environmental sample
  misc_feature (1)..(504): n is a, c, g, or t
atggcgttctcgcccgacggcgcctttgtgtataccgcgatttacgacgcggcaattgtcgcggtggttgacatgacagctaacaaggtggtaaaaagatggcgctttaacgaaggcgagggggcggcgcggcacatcatttaccgcgatgaaaaactctatgtttcggatatgttcaggggaacggtgaacatactgaacgccgcgacgggcgcgcttataaagtccgcgcggatcggccccaacatcaacaccatcataatgtcacctgacggcaagtatattatagcttcctcgcgcgggcggaataatcccgttgattacacgatacccggcccggatttcggcgcggtttatttattaaacccccaggacttaaccgtaattgacaaggtttggggccgcaatcagcccaccggccttgccgtttcccccgacggaaaactccttgcgtttaccgattttctggacgccaatctggaactgtattcaattaacaattaa

SEQ ID NO: 7818 - protein, 167 aa, Unknown
  Obtained from environmental sample
  misc_feature (1)..(167): Xaa is any amino acid
MAFSPDGAFVYTAIYDAAIVAVVDMTANKVVKRWRFNEGEGAARHIIYRDEKLYVSDMFRGTVNILNAATGALIKSARIGPNINTIIMSPDGKYIIASSRGRNNPVDYTIPGPDFGAVYLLNPQDLTVIDKVWGRNQPTGLAVSPDGKLLAFTDFLDANLELYSINN

SEQ ID NO: 7819 - DNA, 399 bp, Unknown
  Obtained from environmental sample
  misc_feature (1)..(399): n is a, c, g, or t
atgaaccggtttcccatcgactacggctttcgccctcgccttaggggccgacttaccctgggaagattgcctttacccaggaaaccttgggcttccggcggagggggatcccacccctcttttcgtctacttatacctgcattctcccttccgctccctccagcgtactttccaatacgccttcgtcggtctgcggaatgctcccctaccaaccacatattgctatgtgattccgcggcttcggttgcatgcttagccccgttacattgtctgcgcgccgtgactcgaccagtgagctgttacgcactctttcaaggaatggctgcttctaagccaacctcctggctgtcctcgccagggcacatcatttcacactcagcatgctatccgggaccttag

SEQ ID NO: 7820 - protein, 132 aa, Unknown
  Obtained from environmental sample
  misc_feature (1)..(132): Xaa is any amino acid
MNRFPIDYGFRPRLRGRLTLGRLPLPRKPWASGGGGSHPSFRLLIPAFSLPLPPAYFPIRLRRSAECSPTNHILLCDSAASVACLAPLHCLRAVTRPVSCYALFQGMAASKPTSWLSSPGHIISHSACYPGP

SEQ ID NO: 7821 - DNA, 831 bp, Unknown
  Obtained from environmental sample
  misc_feature (1)..(831): n is a, c, g, or t
atgcaactagacaactcttacaaatatggttttgtgaccaatgtggaaaccgaatcttttgaaaaagggctttctgaagacattatccgcagagcgagccgcattcgcaaggaaccggagtttttgcttaaatttcgcctgaaaagctatgaaaagtttttgagcatgaaggctccaaactggggcgaactgaaatatgcccccattgatttgcaaaacatagtttattacagcgcacctaaaaataaaaaagaacacgcaaatatagaagatgttgaccctgagcttttggaaacttttgaaaaactaggcattcctctagacgagcaaaaaagacttgcgggcgttgccgtggatgccgtttttgacagcgtttccatttacaccagccacaaaaaaaaactcttggaacaaggcgttattttttgtagctttggcgaggcggttcaggaatatcccgaactcattgaggaatacttaggctccgttgttcccccaggcgataactattattccgcactcaacagcgcggttttcagcgatggcagttttgtttacattcccgctggaataaaatgtccaatggaattatccacatatttcagaataaacaataaagaagcaggtcaatttgaacgcactcttatcatagcggatgcaaattcacaagtgagctacttggaaggctgcactgctcccgaattttccagcaaccaaatgcacagtgcggttgttgagcttgtggctttggaaaacgcanacataaaatacagcaccgtgcnaaactggtacgcaggcgataagcnaacccggagaaggcggcatatataa

SEQ ID NO: 7822 - protein, 276 aa, Unknown
  Obtained from environmental sample
  misc_feature (1)..(276): Xaa is any amino acid
MQLDNSYKYGFVTNVETESFEKGLSEDIIRRASRIRKEPEFLLKFRLKSYEKFLSMKAPNWGELKYAPIDLQNIVYYSAPKNKKEHANIEDVDPELLETFEKLGIPLDEQKRLAGVAVDAVFDSVSIYTSHKKKLLEQGVIFCSFGEAVQEYPELIEEYLGSVVPPGDNYYSALNSAVFSDGSFVYIPAGIKCPMELSTYFRINNKEAGQFERTLIIADANSQVSYLEGCTAPEFSSNQMHSAVVELVALENAXIKYSTVXNWYAGDKXTRRRRHI

SEQ ID NO: 7823 - DNA, 909 bp, Unknown
  Obtained from environmental sample
  misc_feature (1)..(909): n is a, c, g, or t
atgctcggcacgcagctgcccggcatattaaaaaaaatcggcaatggagcgtttcccataagcggccttatgattgccggctgtatacttttacttacaataatatttgctgttttaaggtttctatggtggataattttagtccgcaaaaagacatatcaggaagctaacagctctgtaagggcggtgaaagcggcgattatcttcagcctcgccggggcccgcggcgccgttacgctggcgagcgtaatgtcaattccccttttgcttaacgacgggacggtgtttcccgaacgcgatctgattattttattggcaagcggggttattgttatttccatgcttatcgctaattttattttacccttagtcacagggcgcaaatcggaggaaacgcggaataatgaggaagcggcggcttgctccgaaataataaagggtgtaatttcacgcctggaaggcgaggcgacggcgaaaaaccgccttgccacggaaattgttatacgcaattacttcaaaaggagcgcggctggacatattgcgggttcacgaaacaatgaaacacaggccgaaaaaatattaagggcaaaagtttttcagtggcagaaggagaacacggccgcgcttcttgaaaacgggaaagcggataaaaaatcggctgaacttgtcatcaacatacttggcgagcatatcanaaacgcggaaagtggaaagagaaccggtttttttaaacagattggatgggttttaaaacataaaattaaatttaaccgcgaccacaagacaacgctggatcgcggtaatattgaagcaattattgtttcgaacacgcagtacgcgcttngaaaactgaacagcataaaaacgaggaaaacaggccatggtagagaaattttcggcctagcttga

SEQ ID NO: 7824 - protein, 302 aa, Unknown
  Obtained from environmental sample
  misc_feature (1)..(302): Xaa is any amino acid
MLGTQLPGILKKIGNGAFPISGLMIAGCILLLTIIFAVLRFLWWIILVRKKTYQEANSSVRAVKAAIIFSLAGARGAVTLASVMSIPLLLNDGTVFPERDLIILLASGVIVISMLIANFILPLVTGRKSEETRNNEEAAACSEIIKGVISRLEGEATAKNRLATEIVIRNYFKRSAAGHIAGSRNNETQAEKILRAKVFQWQKENTAALLENGKADKKSAELVINILGEHIXNAESGKRTGFFKQIGWVLKHKIKFNRDHKTTLDRGNIEAIIVSNTQYALXKLNSIKTRKTGHGREIFGLA

SEQ ID NO: 7825 - DNA, 624 bp, Unknown
  Obtained from environmental sample
  misc_feature (1)..(624): n is a, c, g, or t
atgcgccggcttattgataacgcccacgaattaaaatacggttttctggcggacaggtaccaaggcgatgtaatatccgcggtattggtaaaaacagatcaatcaagatcgccttcgcttctcgcctgggacatacgaaaaaagaatgaaggcgtggaagtgctgatctcgcagggaatattcgcgcgtatcgccgcgactctttccggccttgtaaaatacatacatattttttccatcgcgctttgggcgctggcggttattgtgctggcggcggtgttttcggggacaattcacgagcgtaaaaaagaattcgcgattctgagggtcataggggcgacaaggaaaaaacttgtcggcatcgtgttaagcgaatcgctaattgccggaattgccggaggctgcgccggcattgtcctcgcgggcctcgcggtgtttcccttcagcacctacataagcgaacagcttgaattgccctggctggacgcgcctttcctccatattatcctgcttgttttgggaagccttttgctctccgccattgtgggcccgctttcttctttatattcggcgctgagaataagcaaagcggaaacatactttaccatgagggagggcgaataa

SEQ ID NO: 7826 - protein, 207 aa, Unknown
  Obtained from environmental sample
  DOMAIN (25)...(199): Predicted permease
  misc_feature (1)..(207): Xaa is any amino acid
MRRLIDNAHELKYGFLADRYQGDVISAVLVKTDQSRSPSLLAWDIRKKNEGVEVLISQGIFARIAATLSGLVKYIHIFSIALWALAVIVLAAVFSGTIHERKKEFAILRVIGATRKKLVGIVLSESLIAGIAGGCAGIVLAGLAVFPFSTYISEQLELPWLDAPFLHIILLVLGSLLLSAIVGPLSSLYSALRISKAETYFTMREGE

SEQ ID NO: 7827 - DNA, 756 bp, Unknown
  Obtained from environmental sample
  misc_feature (1)..(756): n is a, c, g, or t
gtgcgcacggaaacgtcccagcagaacagggacgaatttgccgtcgtgcttgccagggaacaaaacggcgcttaccccggctgggctcagggttcctgggttcttacccgcaggctggacaataaccccgcaggtacccgcataaggatttttttaagaagcgattacaacacctatgtccagttccggcctttttccgacgacaagtgtttgatggacgtagtcctttatgacggctaccttatcagggcgctgcccattcctgttccgcttgagaggctatacactatgcccgttgaggaagccttgaccctggcgggaacaaggtttccccgccattattttgatccggaacccggctcttaccgcgacagccgggcttttatcagcgccgtccgctcacggcttccggagcttacatttcttgacgacggcgcgatggacgaaaagggtcaatttgtttttatcaatacccttgctgtccaaaacaatacataccgaaacagcacggtaaaaggcggagtgaattgttcgggattcgcgaaatggatagtggatggcatattaaggccccgcaccggagaacgtcttgccatcgggccgttaaaagcgccgttcggagaaaggggcaatgcctttacagaaacctgggaagtaagggatccctttttcggcctggattggagcagaaaccttgcctcccgtgcgggagctaccctgctttcccctgtttatggaagccctggaagaaattga

SEQ ID NO: 7828 - protein, 251 aa, Unknown
  Obtained from environmental sample
  misc_feature (1)..(251): Xaa is any amino acid
MRTETSQQNRDEFAVVLAREQNGAYPGWAQGSWVLTRRLDNNPAGTRIRIFLRSDYNTYVQFRPFSDDKCLMDVVLYDGYLIRALPIPVPLERLYTMPVEEALTLAGTRFPRHYFDPEPGSYRDSRAFISAVRSRLPELTFLDDGAMDEKGQFVFINTLAVQNNTYRNSTVKGGVNCSGFAKWIVDGILRPRTGERLAIGPLKAPFGERGNAFTETWEVRDPFFGLDWSRNLASRAGATLLSPVYGSPGRN

SEQ ID NO: 7829 - DNA, 597 bp, Unknown
  Obtained from environmental sample
  misc_feature (1)..(597): n is a, c, g, or t
ttgacagatattgagcagtccgtaatggaaggaattatcgtccgtattctgggaaatatgcgagaagcttggacgacggttatcgatctgcgccctcgtcttgggcagattgacactaaccctcagtttgctcagattgttccgcctacggaaatggtagtccttgtaactttggaaaccaaagtaggagatgtggaaggcatgatgaacttctgtattccctaccttacgatagaacccattatcagcaaattgtccgcccagttctggtattcatcggtacggcgcaacgctacgacagagaatcttaatgtactaaaggagaagcttacaacggtcgatgttaatataacggccgaaatcggaaagattaatgttcctgtaagggacgttctttccttacagataggggatgtaatacggctctacaatacacgcatcggcgatccctattcattaaatatcggctcaaggaaaaagtttctgtgccgccccggcgtacttggaaagaaaatggcggtgcagataacgcagaagattgccgagcttggacaggaagaatttgaagagctcgtatctgaaggagatgaattatga

SEQ ID NO: 7830 - protein, 198 aa, Unknown; identical to SEQ ID NO: 1874
  Obtained from environmental sample
  DOMAIN (1)...(85): Flagellar motor switch protein FliM
  misc_feature (1)..(198): Xaa is any amino acid

SEQ ID NO: 7831 - DNA, 684 bp, Unknown
  Obtained from environmental sample
  misc_feature (1)..(684): n is a, c, g, or t
ttgttccttattcataaaaaattgataatcgagattttcggcaaatccgcgatgatattcgcttccgaaatatcgtggatagtttccgaaacattgatgatcgccatgtacaacaggagaggcggcgcggaagttgtcgcgggaatgtccgccggctggactatcgcgaatattttctttttgctgttcggcggtttgtggacggtatcctacgttttggttgggggagcgcttggcggcgggaaacttgacgaagcgcgggatcgggcaaagtggctgaagtggggcggagcggcggcgggacttatttttgccgtgccgggcttttttataacttccgctttggttccgctggtatttcacaacctgagcgccggcgcaagggcgaattgccttggacttgtttttgtaatccttgtctatttgccgttgtggtgttatttaaacgttcaattcgctgtttcccgcgcgggaggagacacggctatgggaatgtatacggacatatccgttaatacactgcttttcgcgccgggttccgttcttctttcgttgtttacaaatcttgcccccgtgccgatgttcgctattcttaaacttaccgatattataaaggtttttatagcgcgtcatcttttacgcaaagaaaaatgggtgcgtaatttaaccataactaaagaataa

SEQ ID NO: 7832 - protein, 227 aa, Unknown
  Obtained from environmental sample
  DOMAIN (17)...(182): MatE
  misc_feature (1)..(227): Xaa is any amino acid
MFLIHKKLIIEIFGKSAMIFASEISWIVSETLMIAMYNRRGGAEVVAGMSAGWTIANIFFLLFGGLWTVSYVLVGGALGGGKLDEARDRAKWLKWGGAAAGLIFAVPGFFITSALVPLVFHNLSAGARANCLGLVFVILVYLPLWCYLNVQFAVSRAGGDTAMGMYTDISVNTLLFAPGSVLLSLFTNLAPVPMFAILKLTDIIKVFIARHLLRKEKWVRNLTITKE

SEQ ID NO: 7833 - DNA, 843 bp, Unknown
  Obtained from environmental sample
  misc_feature (1)..(843): n is a, c, g, or t
atgctacggaacaacggcaacaattacccatttgattatatacgcgatatgctcatgagttcgctaacagaagggttaaacatagactaccaaaaggggcgagctgtggttgtgttttacaatggccaatattacggaatacacaatttgcgggaacgagccaacagtgattactttgaaaccaactacggcatagacgaagaatttatagatttagtgaaagtggagagatataatggagcaccagaagaggtgagcagaggctccgatgctgactatcaggacatcataagctggctgaatggggtttcgctcgcaaacgatgataattttaaacaattggaaaaacggatagatgtggataatttcacaaatcatttccaaagcagaattttttacaaagactgcgactggccgggaaaaaatatgaaaaggtggcgttctaatttgacgcaatcaaaatggagatggcttttatacgacacagaccacggttttggcagctggggtagcagctcggaacggccaacctgtggaacaatggaatatataactgcaacgagtggtccatcttggcccaacccgccgcactcaacattcatgatgcgcaaactcttggaaaatcaaaattataaaaatgcattcataaatcgcttttcactgctcattgcaacatatttcacaaccgatagaatgaatgcaagaaaaaatgaactcatgtctcagataaatagcgaaacatcatacgatcagcaaaaatggggctctaaaagcgaagatatacttcctaagtcaatggatcgttttgccagtgaccgcccagcagatatgcagggcaaataa

SEQ ID NO: 7834 - protein, 280 aa, Unknown
  Obtained from environmental sample
  misc_feature (1)..(280): Xaa is any amino acid
MLRNNGNNYPFDYIRDMLMSSLTEGLNIDYQKGRAVVVFYNGQYYGIHNLRERANSDYFETNYGIDEEFIDLVKVERYNGAPEEVSRGSDADYQDIISWLNGVSLANDDNFKQLEKRIDVDNFTNHFQSRIFYKDCDWPGKNMKRWRSNLTQSKWRWLLYDTDHGFGSWGSSSERPTCGTMEYITATSGPSWPNPPHSTFMMRKLLENQNYKNAFINRFSLLIATYFTTDRMNARKNELMSQINSETSYDQQKWGSKSEDILPKSMDRFASDRPADMQGK

SEQ ID NO: 7835 - DNA, 861 bp, Unknown
  Obtained from environmental sample
  misc_feature (1)..(861): n is a, c, g, or t
atgttaaataaacggggattacagaacatgaaagaacattattccggagagacaagggcggggatactgatacacgcgcttccttatattcaaaatttccaaaataaaataatagtcgttaaatacggcgggaacgccatgcaaagcgaagagctgaaaaaagccgtaatcgacgacataatccttatggcatgcgtgggaattcacacagtgcttgtgcatggcggcggccctgaaatcgaggcaatgctgaaaaagacgggcaaggagagccgctttatcaacgggcttcgatacaccgatgaagagacaatggacatagtccaaatggttttgtgcggcaaagtgaacaaggaaataaccgcccttatcgaaaaaaacgggggcagcgcaataggcttgtgcggtattgacggcggcatgttaaaggcgcgccgtatgaagggcgaggttgatcatgggcttgtcggggaaattgaacaggtaaacgtggaactgttaacctctatcttaaattcaggcgctattccggtcatatcctcagtcgcatacggcacggggcaagacgaaggaaaagccctcaatataaacgccgatattgccgccgcgaaaatagccgcggccttaaaagccgaaaaactggtgcttatgaccgacgtacggggcattttgcgcgatattaacgacgaaaattcccttatgaaagccgtggaaagaccccggttggacgcccttaaaaaagagggcatccttaccaagggaatgatcccaaaggcggactgctgcgctctcgcgctggacagcggagtgaaaaaagcccnatataatcgacggacggattccccatgccatacttgttga

SEQ ID NO: 7836 - protein, 286 aa, Unknown
  Obtained from environmental sample
  DOMAIN (36)...(277): Amino acid kinase family
  misc_feature (1)..(286): Xaa is any amino acid
MLNKRGLQNMKEHYSGETRAGILIHALPYIQNFQNKIIVVKYGGNAMQSEELKKAVIDDIILMACVGIHTVLVHGGGPEIEAMLKKTGKESRFINGLRYTDEETMDIVQMVLCGKVNKEITALIEKNGGSAIGLCGIDGGMLKARRMKGEVDHGLVGEIEQVNVELLTSILNSGAIPVISSVAYGTGQDEGKALNINADIAAAKIAAALKAEKLVLMTDVRGILRDINDENSLMKAVERPRLDALKKEGILTKGMIPKADCCALALDSGVKKAXYNRRTDSPCHTC

SEQ ID NO: 7837 - DNA, 450 bp, Unknown
  Obtained from environmental sample
  misc_feature (1)..(450): n is a, c, g, or t
atggcgggtattatatttgccaacggcggaacagtagacaaatttatgggagacggaataatggcgttttttggcgatccgtttacgatgcccgaccactgcgaacggtgtctgcgggcggctatagagatgcagcggagaatccggttgttagctgaaaaatggaaaccgattgcggatatagaccttaaagtccgcataggcatcaatatcggtaaagtaatagtcggcaatcttggcagcaaaacacggattgaatataccgttatcggggcggatgtcaatctggcgcaacgcatggaaagcaacgctcctgtcgggggcatactggtaacggcggcggtatatgaaaagctcaaagacaagtttgcttttaccgaaaaacgcgctgtcacggttaaaggttatgcggaaccgatagaagcgtatgtggcggcggttagcggttag

SEQ ID NO: 7838 - protein, 149 aa, Unknown
  Obtained from environmental sample
  DOMAIN (1)...(149): Adenylate and Guanylate cyclase catalytic domain
  misc_feature (1)..(149): Xaa is any amino acid
MAGIIFANGGTVDKFMGDGIMAFFGDPFTMPDHCERCLRAAIEMQRRIRLLAEKWKPIADIDLKVRIGINIGKVIVGNLGSKTRIEYTVIGADVNLAQRMESNAPVGGILVTAAVYEKLKDKFAFTEKRAVTVKGYAEPIEAYVAAVSG

SEQ ID NO: 7839 - DNA, 717 bp, Unknown
  Obtained from environmental sample
  misc_feature (1)..(717): n is a, c, g, or t
ttgtggttatcgacaaagatacaaaaacggatcgtttgcaggacgaattgcgccgtaatgatacttactggtctcattaatttgttatgtgaaaatggattgatcatggatatatataaaacattacgggaagaatcatacgaggcgaaccttgaaataaaacgccgcaatcttgccatttacacatggggtaacacttccgcttttgatccaattaaaggtgtattcgcaataaaaccgtccggggtggaatatgatgaattaacgccgaaaaagatggtgttagtcgatcttgagggaaaggttgtcgaaggcaaactcaagccgtcttccgacacaaaaacccatcttgtcctgtaccgcgagtttaagggaatctgcggcgtaacgcacacacactcgccttatgcggtagcctgggcgcagacgggaaaaccaatacctgtctttggcaccactcacgccgatcattgcgcttatgaaataccgtgtactgtctttatgaatccacaggaagtaaaaaacaattatgaactggaaacaggcaatttaattgtcaatacttttaagaacggtaatttggattgttcgcagattacaatgacattggttgccgggcacgggccttttacatggggaaacaacgccgctcaatcggtataccacagcgttattctggaagaaatcagcaaaatggcgctgtttaccgaacgatga

SEQ ID NO: 7840 - protein, 238 aa, Unknown
  Obtained from environmental sample
  DOMAIN (44)...(238): Class II Aldolase and Adducin N-terminal domain
  misc_feature (1)..(238): Xaa is any amino acid
MWLSTKIQKRIVCRTNCAVMILTGLINLLCENGLIMDIYKTLREESYEANLEIKRRNLAIYTWGNTSAFDPIKGVFAIKPSGVEYDELTPKKMVLVDLEGKVVEGKLKPSSDTKTHLVLYREFKGICGVTHTHSPYAVAWAQTGKPIPVFGTTHADHCAYEIPCTVFMNPQEVKNNYELETGNLIVNTFKNGNLDCSQITMTLVAGHGPFTWGNNAAQSVYHSVILEEISKMALFTER

SEQ ID NO: 7841 - DNA, 507 bp, Unknown
  Obtained from environmental sample
  misc_feature (1)..(507): n is a, c, g, or t
ttgatcggcgagcttgataacacgcggattcccgagttacgcataacggtggcagattttgcaaaaaacaacccggaaatgggagctttgctccacttcttcctttcagattcaactattgcattaggcgaagccgaatacagcgctctatatccgaataacgcggtaaacactacaattatccctgcgtctccaagcgcatatccttttaccttacagttgaatttcactgggtactgtatgtttcgctgggaaatcctcaatgaaagggatcgcggcggcaaaaatcaaaactattttcagcgcgcggacgaactaaatattcaggctcaaaacggaatcaggatatggacttcaaacgcgcaggcggcgaagattcaagttatcggcggcggacgggttttcccgatagaaatcggagccgccggtgaagttgttgtcgcagatatccgctgggttgtagagaataaccagtaccgccttgtatttataagattagaaagttaa

SEQ ID NO: 7842 - protein, 168 aa, Unknown
  Obtained from environmental sample
  misc_feature (1)..(168): Xaa is any amino acid
MIGELDNTRIPELRITVADFAKNNPEMGALLHFFLSDSTIALGEAEYSALYPNNAVNTTIIPASPSAYPFTLQLNFTGYCMFRWEILNERDRGGKNQNYFQRADELNIQAQNGIRIWTSNAQAAKIQVIGGGRVFPIEIGAAGEVVVADIRWVVENNQYRLVFIRLES

SEQ ID NO: 7843 - DNA, 684 bp, Unknown
  Obtained from environmental sample
  misc_feature (1)..(684): n is a, c, g, or t
gtggtgctgccggcgatcctgttgctcctgtgcgcttcggccttggccgacgatgcgtccgccgacaaaagcgcttcccccatcaacggcttcttcctgacgccgcaaataggcactctgggcatcggcctgaacgccggctaccagttcaacgatattttcaaggccaggttcaatgcgaattatctggcgctgcacaccgagcgcaaaatcgaagacgtgaagtgcgacctggatttcagcagcctcaccctgggcgttctcgccgacgtgcatcccttcagcggcaacttccgcctgaccggcggcctgtattatgtgaacatgcaggcggatgcgacggccaatctcaagggcgataaagaatataaaataggtgacaacacatatacgggagcgcaactgggaagcggagaaggctccgtgaaatggcagcgctttgcgccttacgtgggtctgggcttcggccccggcgaaggcacggattccggcttcagcttcagcgcggatgtgggcgcgttgattttcggcgaccccaaggtatcgatgtcgtttgcgaacccctcggccaacgctgccttggccggggacataaacaaatacgaaagcgacgccaaaaagggcgtcaagaactatctcccggtctggccggtgctgtcgctgggggtgagttaccgtttctag

SEQ ID NO: 7844 - protein, 227 aa, Unknown
  Obtained from environmental sample
  SIGNAL (1)...(16)
  misc_feature (1)..(227): Xaa is any amino acid
MVLPAILLLLCASALADDASADKSASPINGFFLTPQIGTLGIGLNAGYQFNDIFKARFNANYLALHTERKIEDVKCDLDFSSLTLGVLADVHPFSGNFRLTGGLYYVNMQADATANLKGDKEYKIGDNTYTGAQLGSGEGSVKWQRFAPYVGLGFGPGEGTDSGFSFSADVGALIFGDPKVSMSFANPSANAALAGDINKYESDAKKGVKNYLPVWPVLSLGVSYRF

SEQ ID NO: 7845 - DNA, 609 bp, Unknown
  Obtained from environmental sample
  misc_feature (1)..(609): n is a, c, g, or t
atgtaccggacagtttattggcaccgtcaggtacgcgccgtaaccgctatgttaaaaaaattactgataagcggccttgaatccggtcaaataaagggggaagacctgtataaccttgacgattcgagcctttttacccttcttgtgcaaagaattatcaaaaagaacagcaattcttcaataagtggggtaaaccttttggaatcagtgcttgaaggaaagttttatgcctcagcggtggaaatttcacatgaaaatgtcgattttcaggcaatcaggggtattaaagacagggcaaaatacgaagaaaagctggcggagggactgcgaagccgtgggtttgagattaaaggggaagatataataattgatatacccgaacccgtatcctttgaaacggggcttttcattattgatgaaaaatgcagttttagcgaaagttccagcgcttttaaacctcagacggtaaatgcctttatacagacgctttacacaataagaatatttattaatcaaaaatataaggaaaaaataaagacattctctaaattatgtagtatactatatgaattagcgtctgagattaaaacggcggatactaagcaataa

SEQ ID NO: 7846 - protein, 202 aa, Unknown
  Obtained from environmental sample
  misc_feature (1)..(202): Xaa is any amino acid
MYRTVYWHRQVRAVTAMLKKLLISGLESGQIKGEDLYNLDDSSLFTLLVQRIIKKNSNSSISGVNLLESVLEGKFYASAVEISHENVDFQAIRGIKDRAKYEEKLAEGLRSRGFEIKGEDIIIDIPEPVSFETGLFIIDEKCSFSESSSAFKPQTVNAFIQTLYTIRIFINQKYKEKIKTFSKLCSILYELASEIKTADTKQ

SEQ ID NO: 7847 - DNA, 726 bp, Unknown
  Obtained from environmental sample
  misc_feature (1)..(726): n is a, c, g, or t
atggaaagccgggatttccgctttcccgccggagtttctgaggcggaactgctcgcccttatcgcgaagctgaatcaggagaaaacagtccacggcattctggtacagctccccctacccagacacattgacgaacaacgtctaattgtcgccatcaatccggcaaaagacgttgacggctttcatccggtttcggtggggaatatggttatgggacggccttcttttcttccctgcacgccccacggtgtaatggttcttctgcgtgaactgaatattcccctttccggcgcccacgcggtagtggtcggcagatcaaacattgtgggcaagcctctggcgaatctgctttccaaccggaatgtaaacgcgacagtgacaatctgccatacaggtacaaaggatcttgcccgtcatacacagcaggccgatatattaatcgccgccgcggggaaacccggattaatccgggctgatatggtgcgccccggcgcagtggtgattgacgtaggggtgaaccgcgtggaagatccctcagccaaaaagggctacctgttggtcggtgatgttgaatttgccccggttgcggggaaagcgagttatataacgcctgtgcccggcggtgtcggcccgatgactatcgccatgctgctgcaaaatacagtacaggccgcggaggtctccgcatttacggaggtctccgctaaggcggagagtgcaaaatga

SEQ ID NO: 7848 - protein, 241 aa, Unknown
  Obtained from environmental sample
  DOMAIN (1)...(59): Tetrahydrofolate dehydrogenase/cyclohydrolase, catalytic domain
  misc_feature (1)..(241): Xaa is any amino acid
MESRDFRFPAGVSEAELLALIAKLNQEKTVHGILVQLPLPRHIDEQRLIVAINPAKDVDGFHPVSVGNMVMGRPSFLPCTPHGVMVLLRELNIPLSGAHAVVVGRSNIVGKPLANLLSNRNVNATVTICHTGTKDLARHTQQADILIAAAGKPGLIRADMVRPGAVVIDVGVNRVEDPSAKKGYLLVGDVEFAPVAGKASYITPVPGGVGPMTIAMLLQNTVQAAEVSAFTEVSAKAESAK

SEQ ID NO: 7849 - DNA, 591 bp, Unknown
  Obtained from environmental sample
  misc_feature (1)..(591): n is a, c, g, or t
atgaatgtttttaaaagtgagaccgcaaaaagccgcgttataaatacctataaccagctgcttgccttgtggaatgtcgataaaacagaaagacaaatacttacaacctttggaacaacaaatgtgatagtatgcggggaacaaagcagcccgccgcttgtactctttcacggcgtaggcgacaattccgctcttatgtggctttataacgcggcaagcctttcccgttactttagactctatgccattgatacaatcggagggccgggaaagagctgcccgaacaaaaattacaataaaaattttgatgacgttaaatggattgatgaagttttagcgggattaacgcttaataaagtatatatggctggagtatccaacggagcttatctaatacagtactatgggatccaccggcccgggcgagtaatcaaaatggcttgtttggcaggtaccgtccccgctaaaaattctgataaaaaatccaatcctatgaaaaccatgatgaagatttttttaccggaagctttgtttcctacaaaaaacaacacaataaaacttcttcgtaaactgtgcgctcggccgatctga

SEQ ID NO: 7850 - protein, 196 aa, Unknown
  Obtained from environmental sample
  misc_feature (1)..(196): Xaa is any amino acid
MNVFKSETAKSRVINTYNQLLALWNVDKTERQILTTFGTTNVIVCGEQSSPPLVLFHGVGDNSALMWLYNAASLSRYFRLYAIDTIGGPGKSCPNKNYNKNFDDVKWIDEVLAGLTLNKVYMAGVSNGAYLIQYYGIHRPGRVIKMACLAGTVPAKNSDKKSNPMKTMMKIFLPEALFPTKNNTIKLLRKLCARPI

SEQ ID NO: 7851 - DNA, 387 bp, Unknown
  Obtained from environmental sample
  misc_feature (1)..(387): n is a, c, g, or t
ttgtcaaaagtgctgaaagagtaccggaacatgggctattattccatcagncatacggacggaaacatcatgcccattatcgatcagcttgtcgattgcgcgcccgacgcgcttcattcccttgacccccagggcggggttgacttaaaagcggtgaaacagaaatacaacgaccgggtatgccttatcggcaacgtgaactgcggccttctccagaccggcacggaagaggaagccgccgccgatgtccgccgcgccctgcgtgacggtatgcccggttacggttatattttctcaacatccaactgcgtgtataccggcctggcccttagccgctacaacttgatgaacaagatatggcgggaagaggggatttatccggcttga

SEQ ID NO: 7852 - protein, 128 aa, Unknown
  Obtained from environmental sample
  misc_feature (1)..(128): Xaa is any amino acid
MSKVLKEYRNMGYYSIXHTDGNIMPIIDQLVDCAPDALHSLDPQGGVDLKAVKQKYNDRVCLIGNVNCGLLQTGTEEEAAADVRRALRDGMPGYGYIFSTSNCVYTGLALSRYNLMNKIWREEGIYPA

SEQ ID NO: 7853 - DNA, 387 bp, Unknown
  Obtained from environmental sample
  misc_feature (1)..(387): n is a, c, g, or t
atgctgccgggttttatattttcagtcggcttaagcccggcgcttgccgccgccacgattgaatcgatacggattatcaggaaagataattcgcttgtcaggcaattgcaggaaaacgtcggctattttgtttccaaagccaaggagaagggctttaacctctgtaaagcgggggaaagcccgattgcccccgtgtttatcggcaaagattccgacgcttttgatctttcgcaagccatgtttgaaaagggcatttttgtccctcccgcggtttaccccgcggtccctgtaaacatggcgcgcctgcgtttctgcctgacaagctgccacaataaaaaacagatagactacgcccttgatactctgcaggagttggttaggaaatag

SEQ ID NO: 7854 - protein, 128 aa, Unknown
  Obtained from environmental sample
  SIGNAL (1)...(16)
  misc_feature (1)..(128): Xaa is any amino acid
MLPGFIFSVGLSPALAAATIESIRIIRKDNSLVRQLQENVGYFVSKAKEKGFNLCKAGESPIAPVFIGKDSDAFDLSQAMFEKGIFVPPAVYPAVPVNMARLRFCLTSCHNKKQIDYALDTLQELVRK

SEQ ID NO: 7855 - DNA, 492 bp, Unknown
  Obtained from environmental sample
  misc_feature (1)..(492): n is a, c, g, or t
gtgtacgccaataccgatgggaccggcgacgttacgccgttctccaatatgtcgggatcgggactcgaagaaggagcgccctgttttctgctgtcgctttccggcagtctgaaaccgcttattctgcagcagcgttccgcgccggagtttgaagaaatcaccgacaccaaaaacgacaaggtctttatgcaggacaagtacctgtacggcatccgctaccgcggcagtttcggttacggcctgtggcagcaggcggttggttcaaaaactccgctcaacacggacaattaccagacggcccgcgaaaggattcagtccctcaaacgggacggcggcgatcccctgggcatcgtcccgacccatttggtagtcggcccgtcacatgaagcggcggcgcggagaatcgtggaagcgcagttcctggccagcggcgcgtctaacatccactacaagacggcggaactggtagtcattccgcatctggcggcatag

SEQ ID NO: 7856 - protein, 163 aa, Unknown
  Obtained from environmental sample
  misc_feature (1)..(163): Xaa is any amino acid
MYANTDGTGDVTPFSNMSGSGLEEGAPCFLLSLSGSLKPLILQQRSAPEFEEITDTKNDKVFMQDKYLYGIRYRGSFGYGLWQQAVGSKTPLNTDNYQTARERIQSLKRDGGDPLGIVPTHLVVGPSHEAAARRIVEAQFLASGASNIHYKTAELVVIPHLAA

SEQ ID NO: 7857 - DNA, 951 bp, Unknown
  Obtained from environmental sample
  misc_feature (1)..(951): n is a, c, g, or t
gtggggaaaacggaatatgataacttctttgccgagctttcaaaagcggactcagatnnaaggttcacctgtccatccaaaatctacaaaagcctgcactcgctcagaaaaatttatttccccggctcatgggcatcggcgagttttctggcaaacgaagccaacccccggcagatcctcgcggactacccggaggcaggcggtatntacgccaaaatgatctatgttcatacccttattaataaccagctccggggagacaaaacaaggaaacgtactgccctggaagagctttggaaagcccaggattcgggcatctacagcctgaagccgccgggactctgccatgctccgctgcggaacgccgcttaccactctcttctggaagcggaaaaaatcatcagggaaaaagagaaattaaccccgtcgctttcggtttttgattttgacctggacggggcaggggaatatattttccaggatgacaagctgaactgttttattaagtcgcatggggcgggaatttttgaacttgattatcttccatgcgcctggaattaccttgataccatggctccgaaactcgaatcaattaaaagcaaaaagcgctgctcttttgtcgattggctggccccgcctgaaacgcttcctgaagacttgaaggctgaaggtatcaggagagggcgtttttgcggaaacgaggaatatgaggcggttgatattgaccgtcttcaccgccgcgttgttttttctctgcctcaaaaagcaaattttccctggggagaaattgaaattgggaaaacatggcaactgaaaaaaaattcccttgcattggaatatatgcttaagaactcaggaaccaggattgtcaattttatgtttagcacttcgattgatctttctttttcaggagagtgtgaaaggtttttcaggttattaagctccaattaa

SEQ ID NO: 7858 - protein, 316 aa, Unknown
  Obtained from environmental sample
  misc_feature (1)..(316): Xaa is any amino acid
MGKTEYDNFFAELSKADSDXRFTCPSKIYKSLHSLRKIYFPGSWASASFLANEANPRQILADYPEAGGXYAKMIYVHTLINNQLRGDKTRKRTALEELWKAQDSGIYSLKPPGLCHAPLRNAAYHSLLEAEKIIREKEKLTPSLSVFDFDLDGAGEYIFQDDKLNCFIKSHGAGIFELDYLPCAWNYLDTMAPKLESIKSKKRCSFVDWLAPPETLPEDLKAEGIRRGRFCGNEEYEAVDIDRLHRRVVFSLPQKANFPWGEIEIGKTWQLKKNSLALEYMLKNSGTRIVNFMFSTSIDLSFSGECERFFRLLSSN

SEQ ID NO: 7859 - DNA, 543 bp, Unknown
  Obtained from environmental sample
  misc_feature (1)..(543): n is a, c, g, or t
atgaataaaaacttaattcaaccaataatagttctttcgcttatttgcctctttgtatcgggcgctttgtccgtcgtaaacagtaaaacaagccccgtaataaaaaaagccgccgaagatcgggcggcggcggcaaggcaggaagtaataccgcaggcaagcggatttgaattgttaaatatcgacaaattacgcggcgaaaaaggcataccgcctacaattacggagatttacaaaaccacaaacgggataggttatatttttatgataacatccgccggatacgggggcgatataaaacttatttgcggaattgatcctaaaggaatcataataaaaacttccactctttcccagactgaaaccaaaggtattgcgacccctgtttttgaaaatcaacatcaaagccagtacatcggcaaggataaaaatctgtccgatgttatcgccatctcaggcgcgactatttcgtccaccgcatataaaaaaggtatccgcgacgcgtttacggcgtttgatattataatgagggaaaaattatga

SEQ ID NO: 7860 - protein, 180 aa, Unknown
  Obtained from environmental sample
  SIGNAL (1)...(24)
  DOMAIN (94)...(172): FMN-binding domain
  misc_feature (1)..(180): Xaa is any amino acid
MNKNLIQPIIVLSLICLFVSGALSVVNSKTSPVIKKAAEDRAAAARQEVIPQASGFELLNIDKLRGEKGIPPTITEIYKTTNGIGYIFMITSAGYGGDIKLICGIDPKGIIIKTSTLSQTETKGIATPVFENQHQSQYIGKDKNLSDVIAISGATISSTAYKKGIRDAFTAFDIIMREKL

SEQ ID NO: 7861 - DNA, 429 bp, Unknown
  Obtained from environmental sample
  misc_feature (1)..(429): n is a, c, g, or t
gtgaatctcgccggcctttcttttctgttttcactttttgcattgataatttccattttttcttttttttactttaggtcgtaccttaaacgaagaacaggccaggagcgaatcttatccgagtttcaggaagaagtaaactttatattgaaatcaatcaacgaagtcacggaaagggatataacgctcatcgaagagcgggaaaaagagttaaaaagccttttggaggaaatcgggaagcgcctgaaaacctatatcaaagaagtggatcaaacccgaaacgctgaagagttatacaaagaacttggaaaaaatcgttacaggataagcaagcagcaggcttcgcaatctgcgaaaagcgaaaaggccacggagatagaaaaaacctccnaagccgacgccgctttcccgcttcctgatttcaattaa

SEQ ID NO: 7862 - protein, 142 aa, Unknown
  Obtained from environmental sample
  SIGNAL (1)...(26)
  misc_feature (1)..(142): Xaa is any amino acid
MNLAGLSFLFSLFALIISIFSFFYFRSYLKRRTGQERILSEFQEEVNFILKSINEVTERDITLIEEREKELKSLLEEIGKRLKTYIKEVDQTRNAEELYKELGKNRYRISKQQASQSAKSEKATEIEKTSXADAAFPLPDFN

SEQ ID NO: 7863 - DNA, 315 bp, Unknown
  Obtained from environmental sample
  misc_feature (1)..(315): n is a, c, g, or t
atgaccgccaagctaagcggggtagtgttgaccgggacaaggtctgatcnngtaaccagccttacccgaggaactgtactgtcggcaggtccatacagagttttcggaaaagttgtaattattcaggtagatgggggttatttatatgtntacggcggcctggaaagtttatcgctaaaggagggcgacaaggtaggtccgggttctgaaataggaaaactgggcattgacgcgatgtcaaacaagccgcagttattcttcatggtctacttgagcaattctcctgtggatccggccaaagccccaagggcttaa

SEQ ID NO: 7864 - protein, 104 aa, Unknown
  Obtained from environmental sample
  DOMAIN (3)...(98): Peptidase family M23
  misc_feature (1)..(104): Xaa is any amino acid
MTAKLSGVVLTGTRSDXVTSLTRGTVLSAGPYRVFGKVVIIQVDGGYLYVYGGLESLSLKEGDKVGPGSEIGKLGIDAMSNKPQLFFMVYLSNSPVDPAKAPRA

SEQ ID NO: 7865 - DNA, 708 bp, Unknown
  Obtained from environmental sample
  misc_feature (1)..(708): n is a, c, g, or t
ttggacgataaactcattgtcttaatcgacacccaatcgacaatcaacgaaaatatgccgttgcgtatgcttcactatatntgcgaaatatacaatcacctgtacgacaagaaagatttatacaagaaaaagaagatactcattcccaaacccgtatttatcgttctctacaacggcgaagaggatataacggattttgaggaatacctattatctaatttattcaaagatttcgacatatccaaagatacgctgtttttggaattgagagtattggtatacaatatcaacaaaggccacagcgtagatatagtggagcaaagcccgttgctccgcgattacgtggcgtttgtcgaagaggtacgcgaagtcggcaaagaagaggggataacccccgaatcggcgatggaaagggccatagaaaattgtataaaaaaaggaatattaactagttttttgaaccgccataaagaggaggttatgaaaatgctcgtcgcggaatgggattacgaactagacatggaagtcgcaaaagaagaagcgcgtgaggaaggccggacggaaggccggacggaaggacaggcagagacgttgcggaataacgtcagacacatgcaccaagagggctttgatgtgaagactattgtgagggctttaggacttcccgaacagaccgtcaaagacatcttggatttgcaaacgaagtaa

SEQ ID NO: 7866 - protein, 235 aa, Unknown
  Obtained from environmental sample
  misc_feature (1)..(235): Xaa is any amino acid
MDDKLIVLIDTQSTINENMPLRMLHYXCEIYNHLYDKKDLYKKKKILIPKPVFIVLYNGEEDITDFEEYLLSNLFKDFDISKDTLFLELRVLVYNINKGHSVDIVEQSPLLRDYVAFVEEVREVGKEEGITPESAMERAIENCIKKGILTSFLNRHKEEVMKMLVAEWDYELDMEVAKEEAREEGRTEGRTEGQAETLRNNVRHMHQEGFDVKTIVRALGLPEQTVKDILDLQTK

SEQ ID NO: 7867 - DNA, 600 bp, Unknown
  Obtained from environmental sample
  misc_feature (1)..(600): n is a, c, g, or t
gtggacgatatactttcaacggttttaagcccaatcgcggcggcggcaggactggatcgggttatcttattccgtatatnaaacaaggaggccatgctcagcggagaaaaataccgctgggacagggttgtaggcggaacggctcctattgacgatagtttaagagaattgccgataacctcggcaatcagacgctgggttccgattatgtgggaagattcctgtataagccttaagcgcagcgagttcaaagaagatgaagccgagtttttatctccgcgcggcgttatgtcgattctgatagtgccggttttaaccgaaggcgagttatggggcgttgtcacctgccatgataataccaaggaacgggatttcgacaaggattgtaccgccatgctgcgctcaacagcgcgtttgtgcgtaagcacgattatcagggcggaaaaaacaaaaagcgtcaatctggcgatggaagcgctcgaacgccgtgaaaaaatgtctgacattttaaacaaggtatccattatctttttgtctgaaagcaaaaaaatagccgaagatactatggcggaaggcgtgcganaattgcctcggccataa

SEQ ID NO: 7868 - protein, 199 aa, Unknown
  Obtained from environmental sample
  DOMAIN (1)...(144): GAF domain
  misc_feature (1)..(199): Xaa is any amino acid
MDDILSTVLSPIAAAAGLDRVILFRIXNKEAMLSGEKYRWDRVVGGTAPIDDSLRELPITSAIRRWVPIMWEDSCISLKRSEFKEDEAEFLSPRGVMSILIVPVLTEGELWGVVTCHDNTKERDFDKDCTAMLRSTARLCVSTIIRAEKTKSVNLAMEALERREKMSDILNKVSIIFLSESKKIAEDTMAEGVRXLPRP

SEQ ID NO: 7869 - DNA, 468 bp, Unknown
  Obtained from environmental sample
  misc_feature (1)..(468): n is a, c, g, or t
ttgtgccggattacggatccgtacctgaattggttccgccgtttgggcctgcgagtggggcagttggatatttctcctgtaatcgccctggctgtcctttccatcctaaaccagatcttttcagtcatggcccgttttggaaccatcagcctggggctcatcctggtcatgatcctccaggccctatggtcaatcatttctttttttattattctggttttcattgttctgatactgcggcttatcgcgtacctctgcaactcgaatgtgtacagcggtttttggcggatggtagatgccgtttcccagcctatcctttaccggatcaaccgcctctttttcaggggccggataataaattttcttgcaagccttattctttccgccgtggttatggctgtcctctatttagtatgtaggtttattattattttactttccggttttctgattgcacttccgatatag

SEQ ID NO: 7870 - protein, 155 aa, Unknown
  Obtained from environmental sample
  misc_feature (1)..(155): Xaa is any amino acid
MCRITDPYLNWFRRLGLRVGQLDISPVIALAVLSILNQIFSVMARFGTISLGLILVMILQALWSIISFFIILVFIVLILRLIAYLCNSNVYSGFWRMVDAVSQPILYRINRLFFRGRIINFLASLILSAVVMAVLYLVCRFIIILLSGFLIALPI

SEQ ID NO: 7871 - DNA, 396 bp, Unknown
  Obtained from environmental sample
  misc_feature (1)..(396): n is a, c, g, or t
atgcggatagaaatcccggaaatggccgtggtcgcgctggtaggcgtatcgggcagcggcaaatcaacctttgcgaaaacccacttcaagcctaccgaagtgctttcctccgattacttccgcggcctcgtctcggatgatgaaaataaccagcaggtaacgccgcaggcctttgacgctctctattatgtcgccaacaagcgcctggaattgggactcctgaccgtcattgacgccacaaacgtgcaaagggaagcgcgcgcctccgtactgcgtcttgccaaagagcaaaactgtcttgccgtcgccattgttctggacatacctgaacgaatatgcagggaacgcaatgaaaagcgtccgaccgaagacatggccgccagttttctgccataa

SEQ ID NO: 7872 - protein, 131 aa, Unknown
  Obtained from environmental sample
  misc_feature (1)..(131): Xaa is any amino acid
MRIEIPEMAVVALVGVSGSGKSTFAKTHFKPTEVLSSDYFRGLVSDDENNQQVTPQAFDALYYVANKRLELGLLTVIDATNVQREARASVLRLAKEQNCLAVAIVLDIPERICRERNEKRPTEDMAASFLP

SEQ ID NO: 7873 - DNA, 564 bp, Unknown
  Obtained from environmental sample
  misc_feature (1)..(564): n is a, c, g, or t
atgggatgcggagaggggaatcttttatcgttactcgtcaaagaggggcagtttgtacggatcgcgggtatggatgtttcccatacggcgcttgaacgcgcaagcgataaattgaaactcgacagggccggcgacagcgcgcgggaacgcataacgctgtttcaaagttcgctcatgtataaagattcccgttttaagggttatgacgccgcctgcgtcgtagaagtcattgaacatctggacttgccccgccttgcagcttttgaacgggtgttgtttgaatacgtcaaagcgcctgttgttgttttgaccacgccgaatcgcgaatacaatgtaaaatatgaaaaccttggcggagcgtcgcaaagcgttgatgcgtcgcaggacgcgaacgttctgcggcacggcgaccatcgttttgaatggacacgggttcagttccgcgaatgggcggcgaagacggctgctcagtacggttacgcggttcgaatctccgaaatcggggattctgacgaagctctcggcgcgccgactcagatgggggtgtttacgacatgcggatag

SEQ ID NO: 7874 - protein, 187 aa, Unknown
  Obtained from environmental sample
  DOMAIN (1)...(102): Methyltransferase domain
  misc_feature (1)..(187): Xaa is any amino acid
MGCGEGNLLSLLVKEGQFVRIAGMDVSHTALERASDKLKLDRAGDSARERITLFQSSLMYKDSRFKGYDAACVVEVIEHLDLPRLAAFERVLFEYVKAPVVVLTTPNREYNVKYENLGGASQSVDASQDANVLRHGDHRFEWTRVQFREWAAKTAAQYGYAVRISEIGDSDEALGAPTQMGVFTTCG

SEQ ID NO: 7875 - DNA, 789 bp, Unknown
  Obtained from environmental sample
  misc_feature (1)..(789): n is a, c, g, or t
atggaaaaaatacctgagctcgttattcaccctttcaaagagctggtctggacagaagatcgcattgaggcgttaaaagccaaccttgaaagctttgaggaattcccgtcaaacgggaaagaaatactggaagaactgaacacccgccgcgccattaacggcgaagaataccttttccccctggcctttgaaaaacccgccgcactcgcggattacttttttagttcctcaggcgagagcaaagggaaaggggaagctttaggcggcgccatcgcggtttaccttgagagggaacggcttgagaacgcgcaggaaagccttgagaaagagtaccagagcctgtattccaaaacacgcaggagcaaggaaatcccgcttcccaatcgtatacttctcaacttcaaaaagctttcctcttccatcccccgctgtatttcttttacctcgttaaaaagcggcggggaagaaaacgctcagtatataaacgccgcctgcgatccgccccgaagctttttcggaaacgtgaactacctgaaggaagaattcgcatcccttaaaaagcagagctgggatctggcggtggccgccgagtccgatgtccaggccggacggatcgccgagcttctaaaggacgaggatgtttttgtcggcgcgctgcccttctcgtccggctttgctttgcccgacatcaagttcatgctcatccaggaaaacgagatctttggccgccgccgccgtccgcccaaatccctaaaaccgcgcggagcgccgcaatcgacacctttgtag

SEQ ID NO: 7876 - protein, 262 aa, Unknown
  Obtained from environmental sample
  misc_feature (1)..(262): Xaa is any amino acid
MEKIPELVIHPFKELVWTEDRIEALKANLESFEEFPSNGKEILEELNTRRAINGEEYLFPLAFEKPAALADYFFSSSGESKGKGEALGGAIAVYLERERLENAQESLEKEYQSLYSKTRRSKEIPLPNRILLNFKKLSSSIPRCISFTSLKSGGEENAQYINAACDPPRSFFGNVNYLKEEFASLKKQSWDLAVAAESDVQAGRIAELLKDEDVFVGALPFSSGFALPDIKFMLIQENEIFGRRRRPPKSLKPRGAPQSTPL

SEQ ID NO: 7877 - DNA, 816 bp, Unknown
  Obtained from environmental sample
  misc_feature (1)..(816): n is a, c, g, or t
atgttgtcgtccggtcatgcttttatatgcgacggatataacaatattggtcaatttcatttcaattggggatggggcggtaaatacgacggatattttgcttctaccgtattgaatacaggcatagacggcgccggagcgggtagcggaacttataattataatcaaagcgccattatcaatatcaaacggggcggaccgatgattacttcgcagccggtaaataaaagcgtatcccccggacaggcggcgacattttctgccgcggcgacattgaacggagcagattctatgacttataaatggcagtttagtgcaaacaacggaagtacttggagcaatttgagcaaggacatatttatatacgaagatgatgaaggtgcgacaaatctattgatagtggcgacggcggcaatgaacggttttcgttatcgctgtattgttacgagcgattacggaacggctgacacgtccaacttcgccacgttaacagttaacagcacgccgattcgcgacatcaaaaaaagcgacgggcgttttggtattaaatttacgaacggtaatatcgtttccgacaaagcggagtttgcggttattctccccaacgacaaagccgcagaggtaaaagtcgcaatttacgacaacaccggcaacgttgtatataaaacaaacggcagaaacaccgatacctttgtttgggatttgaagaacacagcaggcagaagtgtagcaaacggtacgtatctcattgtcgccgaggcgagaggcgcanaggggagttacgcttattccgctaaggtgggagtgaaaaggtaa

SEQ ID NO: 7878 - protein, 271 aa, Unknown
  Obtained from environmental sample
  misc_feature (1)..(271): Xaa is any amino acid
MLSSGHAFICDGYNNIGQFHFNWGWGGKYDGYFASTVLNTGIDGAGAGSGTYNYNQSAIINIKRGGPMITSQPVNKSVSPGQAATFSAAATLNGADSMTYKWQFSANNGSTWSNLSKDIFIYEDDEGATNLLIVATAAMNGFRYRCIVTSDYGTADTSNFATLTVNSTPIRDIKKSDGRFGIKFTNGNIVSDKAEFAVILPNDKAAEVKVAIYDNTGNVVYKTNGRNTDTFVWDLKNTAGRSVANGTYLIVAEARGAXGSYAYSAKVGVKR

SEQ ID NO: 7879 - DNA, 351 bp, Unknown
  Obtained from environmental sample
  misc_feature (1)..(351): n is a, c, g, or t
ttgataataagaaaatacaaaccagcagaagccgctatcgaaactctgtactttggcagaaatgtaacaagcgcaattcctgtagcggaagcgcgcggggttatttccgcatgccttgccgaaaacggcatccctctttatgaattgacacctaacgcaattaaaaagggagtaacagggattgcaggcgctggtaaaaagcaggttcaggagatggtgcgcattattcttgctcttgatgaagctccaaagtctgaccatgccgcggacgctttgggagcggccatttgtcttttaaacagcgcttctctggtaacattcggaaaaaaagctaaaaatcccagaggttaa

SEQ ID NO: 7880 - protein, 116 aa, Unknown
  Obtained from environmental sample
  DOMAIN (2)...(98): Crossover junction endodeoxyribonuclease RuvC
  misc_feature (1)..(116): Xaa is any amino acid
MIIRKYKPAEAAIETLYFGRNVTSAIPVAEARGVISACLAENGIPLYELTPNAIKKGVTGIAGAGKKQVQEMVRIILALDEAPKSDHAADALGAAICLLNSASLVTFGKKAKNPRG

SEQ ID NO: 7881 - DNA, 510 bp, Unknown
  Obtained from environmental sample
  misc_feature (1)..(510): n is a, c, g, or t
atgaacattgattactggattgaggaagtgatatcggggactcaaaagttggagaggcgtcagctcggcaaactccttgaaaaaatgcagcgcgacgacattttgatttgctcggagctctcgcgtttgggtaggaatttgcttatgatcatgggcattctgaacgagtgcatgaaccgcgatattcaggtttggactattaaagacaattatcgcttggggagcgacatcaactccaaagttctcgcttttgctttcggcctttccgccgagatagagcgtaacttaatctcgcaacgtacaaaggaggcgcttgcctacaggcgctcggagggtatgacattgggacgtccgatgggtagcaaatcaaaaaccgggaagttgaccggcaaggaggctcagatcagggccttgctggacaagaaggtatcaaagtcggccatagcccgtatcttgggcgttcaccgccttaccgttttggcgtatgtgaggagggcgaggggcaagtaa

SEQ ID NO: 7882 - protein, 169 aa, Unknown
  Obtained from environmental sample
  DOMAIN (2)...(114): Resolvase, N terminal domain
  misc_feature (1)..(169): Xaa is any amino acid
MNIDYWIEEVISGTQKLERRQLGKLLEKMQRDDILICSELSRLGRNLLMIMGILNECMNRDIQVWTIKDNYRLGSDINSKVLAFAFGLSAEIERNLISQRTKEALAYRRSEGMTLGRPMGSKSKTGKLTGKEAQIRALLDKKVSKSAIARILGVHRLTVLAYVRRARGK

SEQ ID NO: 7883 - DNA, 780 bp, Unknown
  Obtained from environmental sample
  misc_feature (1)..(780): n is a, c, g, or t
atgggaccaaactggagccctgtttccgcttgcgcacatctatcattttctattatcacagcggcagaccaaatccgcttgggtagagtggacatagcctgggcaggcggcacggaagaagctgtttgccccataggcttggcaggttttgcttctatgaaagcgttggccacaaacaacgagcatcccgaaaaggcgagccgcccctttgatgttgggcgcaacggttttgtgctctctgagggtgccgggattttggttttggaatctctttcacacgcgaaaaaacgcaacgcaaaaatttatgctcgtttgatgggttatgggatgagctgcgatgcttaccacatgagcgcacctagagaagatggcgaaggtgttcgcttagctattgaaatggcaattaaagaatctggcattagcttggagcaagttggctatgtgaatacgcacggtacaagcaccccgcgcggcgatgttgccgaatgtggtgccattctcaaagccttcaacaaaaagatagacaacgttaagataaacagctcaaagtccatgacagggcacatgctaggtgcagcaagcggaatggaagctatagttacgataaaatccctgatggagcagaaattgcatcaaacgttgaacttggaaaatcaagaccctgatattccatttgactgttgcaaaggcggtaatgtggagcataaatttgaatatgctctttcaaactcctttggttttggtgggcataacagcgttttggttctcggcaaggtctaa

SEQ ID NO: 7884 - protein, 259 aa, Unknown
  Obtained from environmental sample
  DOMAIN (102)...(259): Beta-ketoacyl synthase, C-terminal domain
  misc_feature (1)..(259): Xaa is any amino acid
MGPNWSPVSACAHLSFSIITAADQIRLGRVDIAWAGGTEEAVCPIGLAGFASMKALATNNEHPEKASRPFDVGRNGFVLSEGAGILVLESLSHAKKRNAKIYARLMGYGMSCDAYHMSAPREDGEGVRLAIEMAIKESGISLEQVGYVNTHGTSTPRGDVAECGAILKAFNKKIDNVKINSSKSMTGHMLGAASGMEAIVTIKSLMEQKLHQTLNLENQDPDIPFDCCKGGNVEHKFEYALSNSFGFGGHNSVLVLGKV

SEQ ID NO: 7885 - DNA, 579 bp, Unknown
  Obtained from environmental sample
  misc_feature (1)..(579): n is a, c, g, or t
gtgggcaaccattttagagcgggtagagaagaaagtaggggagtgaggcataagatggatgaaatctctgtattgcaagaaaaatttggcgcggagcaagataaacgcgcagttgataagtgcgtgataatagcaccagaaaaattaaccgatgccataaaatttttaaaagaagaatccgcttatgatgttttgatagacattgctggcgtggattatttaggcatggaaaatcataaagcaccgcgctttgccgttatatattgccttaaaagcactaaaaacatggctcgcctgcgcttaaaggttcaagttgacgagggcgggaaaattcctactctgagcaaagtttaccccatcgcagattggcaagaacgcgaggtttgggaccagtatggaatttcctttgaagggcaccataatctgaaaaggctcttgaatcacgttgattttgaagggcacccgctccgcaaggattatcctgctaaaaaacggcaatggctctcagaaaacgacaaaatgctagaccagcttgaagaacgtttagaaactcttggctataatgttgtagaggcataa

SEQ ID NO: 7886 - protein, 192 aa, Unknown
  Obtained from environmental sample
  DOMAIN (101)...(168): Respiratory-chain NADH dehydrogenase, 30 Kd subunit
  misc_feature (1)..(192): Xaa is any amino acid
MGNHFRAGREESRGVRHKMDEISVLQEKFGAEQDKRAVDKCVIIAPEKLTDAIKFLKEESAYDVLIDIAGVDYLGMENHKAPRFAVIYCLKSTKNMARLRLKVQVDEGGKIPTLSKVYPIADWQEREVWDQYGISFEGHHNLKRLLNHVDFEGHPLRKDYPAKKRQWLSENDKMLDQLEERLETLGYNVVEA

SEQ ID NO: 7887 - DNA, 900 bp, Unknown
  Obtained from environmental sample
  misc_feature (1)..(900): n is a, c, g, or t
atgcgagagcggccgcccgcgattggcatcgaaaggcacgaaaagatcgaagcgtatatgcgttacttcctgacaaccttgactatgctgtccgccgatattcagaacgcccagcagcaggcgggtaaaacaaacgcgcctaaggacgcgcccgtaaacagcttgaaaaacacaaaagaagaaacaaaaatacttgaacgccttcttgaaatatcggaattaaacacagaaaagattgaacaactggatgaagacgagtttttaaattacttacaggttttaaacgaatttacggaaaattatccgaatcaggaagaaaaaataaaagactcgctgaaattaaaggataacgaggctttgataaaaaaccttgccggcattatggaaatactggaaaaaatatacgcggacgagatggcgaaggattgcgccaagcagattagcactataggcacggcttcggttgaaaaaatagaagcctatatgagttactttttatccagcctgtccatgctgtcaattgacattcaaatggcccagcagaaaatagatttgcagccggcggtaccggaggaagttcaagccgggccgcccaaagcgaacaagatacttgctgttgacgatacggcgtttttccttaccatacttaagaaaatcctacaggactcaagatacaatttaacctgcgtatcatcgggaagggacgcgcttaaataccttgaaaagcaccagccggacatgtttcttctggacatagaaatgcccggaatggacggatacgaacttgccacaaaaatcaaggaaagcggaagtaaggcgccgattattttccttaccggcaacgccaaaaaagaatatctggcaaaagcggttaaatcagggggcggccggatttcataa

SEQ ID NO: 7888 - protein, 299 aa, Unknown
  Obtained from environmental sample
  DOMAIN (201)...(299): Response regulator receiver domain
  misc_feature (1)..(299): Xaa is any amino acid
MRERPPAIGIERHEKIEAYMRYFLTTLTMLSADIQNAQQQAGKTNAPKDAPVNSLKNTKEETKILERLLEISELNTEKIEQLDEDEFLNYLQVLNEFTENYPNQEEKIKDSLKLKDNEALIKNLAGIMEILEKIYADEMAKDCAKQISTIGTASVEKIEAYMSYFLSSLSMLSIDIQMAQQKIDLQPAVPEEVQAGPPKANKILAVDDTAFFLTILKKILQDSRYNLTCVSSGRDALKYLEKHQPDMFLLDIEMPGMDGYELATKIKESGSKAPIIFLTGNAKKEYLAKAVKSGGGRIS

SEQ ID NO: 7889 - DNA, 696 bp, Unknown
  Obtained from environmental sample
  misc_feature (1)..(696): n is a, c, g, or t
ttgatggccgagtatacgctcgccatcataatcgccgtaataaatatttttattgaagtaacgttggagccgcttaaccggataataaaaaaaattaataacacgtttaccgacctggatttgaaatctgaagaagataaaattcaaaaaaatgaagttgaatcattaggtgattttttacacttgactataatcgatcagcttaccggtatttataacaggcgttatcttgacggcagtttaaaaaagattataaaacaacattcccgtaccggcagcagtttaagcgtactaatgatagacatagatcattttaaaaaatacaacgatacttacggtcatgacgccggggatgcttgtctcagagcggtcgcgggtactctttcccggtgcgtaataagagaagaagattttatcgcaaggtacggaggcgaggaatttgctgttattctaccaaataccgatgagaaaggcgctcaattagttgcggaaagaatgttggaaaaaatgcgcgaatgtaatataccgcacaaaacaaacgatgtagccgcttatgtaactatctctattggcggtacaaccggtatcattaatcatttgcagtatggaagcgattatatcaaacttgccgatgaagcgttatataaatctaaaaaaaacggccgcaatagatacacgtttttgaaaaccgcttaa

SEQ ID NO: 7890 - protein, 231 aa, Unknown
  Obtained from environmental sample
  DOMAIN (59)...(224): GGDEF domain
  misc_feature (1)..(231): Xaa is any amino acid
MMAEYTLAIIIAVINIFIEVTLEPLNRIIKKINNTFTDLDLKSEEDKIQKNEVESLGDFLHLTIIDQLTGIYNRRYLDGSLKKIIKQHSRTGSSLSVLMIDIDHFKKYNDTYGHDAGDACLRAVAGTLSRCVIREEDFIARYGGEEFAVILPNTDEKGAQLVAERMLEKMRECNIPHKTNDVAAYVTISIGGTTGIINHLQYGSDYIKLADEALYKSKKNGRNRYTFLKTA

SEQ ID NO: 7891 - DNA, 879 bp, Unknown
  Obtained from environmental sample
  misc_feature (1)..(879): n is a, c, g, or t
atggcaatactggattacttaatagaaaaaaatacacggatgatcattacaacgcaccacggaatattgaaaaattacggctatacaagacagggcgtagaaaacgcctccgttgaatttaacgcgcagacactttcgcccacttataaaataatcaacgggattcccggagaaagcagagctcttgatatagccgccgcaaacggtcttgacagcagcatcgtagaaaaagcaagaaattatattgacgaagaaaagtcagacatttccgcattgatcaagggacttgaacagaaacagaaagaacttgcggggcttgagcataaaagcacagttgaacaaacaaggttaaaagaagaaaaacgaaaagcggatttaaaggaattgcagcttaggcaaaaagaagcggaactaaagcgcgaatctgtcggaaaactttcatctttattaaaggaaagccgcaaaacgcttgaaaaccttgtccgtgagctgaaagaaggcgaggtagaccgggaaaaaaccttgaaagtaaaggaattccttgcagaacttgcgcgtaacgttgagaatgaaagctccgcccttgacgaagaagaacgcgccataattgaacagttccaaaaaaacaaaaatgaaacattctccgcctttgcgccggacatggaagtttttgctggctcttcaaaacaacgcggcgtaattatccgtaaagacaaaaaaagctccgccgganattcgtggatagtaaaaatcggttccataaaaatgagttttccggaaaaagatttaatcccggcatccggcgttaaggcaaataaaaccgcatcatgggatgcggaatacggctcgtctgccgccgctgtttttgaacttaattga

SEQ ID NO: 7892 - protein, 292 aa, Unknown
  Obtained from environmental sample
  misc_feature (1)..(292): Xaa is any amino acid
MAILDYLIEKNTRMIITTHHGILKNYGYTRQGVENASVEFNAQTLSPTYKIINGIPGESRALDIAAANGLDSSIVEKARNYIDEEKSDISALIKGLEQKQKELAGLEHKSTVEQTRLKEEKRKADLKELQLRQKEAELKRESVGKLSSLLKESRKTLENLVRELKEGEVDREKTLKVKEFLAELARNVENESSALDEEERAIIEQFQKNKNETFSAFAPDMEVFAGSSKQRGVIIRKDKKSSAGXSWIVKIGSIKMSFPEKDLIPASGVKANKTASWDAEYGSSAAAVFELN

SEQ ID NO: 7893 - DNA, 930 bp, Unknown
  Obtained from environmental sample
  misc_feature (1)..(930): n is a, c, g, or t
atggcggtagaggctttgcagaacggcgcagaccattttatagagaaaaaagaccttgagcacgcggaaattatagaacacgctgttgcaatggtgcttgagaaatacaagtatagaacggaaaattttgctttgagaaaaaagctgtgtgaaaaaaatttcatagggcatggcgaaaaatttttagctctgaataaatttgttgaaaccgttgcccccacaaacgcctccgttttgataacgggggagtccggggttggaaaagaggttttggcacgtgcggtgcattatcaaagtttaagagctggcggcccttttgttaaaataaattgcgcggccttgccagaatctttgatagaaagcgaactttttggtcacgaaaaaggagcgttcaccggagcgttgaaaacaaggcgcggcaaatttgagcttgcagacggtggtacccttttgttggacgaaataggcgaaatgccgcttgccgctcagagcaagctcctacgtgttttgcaggagagagtgatagttcgcattggcggcgatgatgagataaaggttgatgttcgcataatttgcacaacgaacagagatttgaagcaagaggtggaaaacgggactttcagagaggatttattttaccgcctgagcgttgtgcccgtgcatatcccgcctttaagggaacgcaaagaggatattccggatttactgaattactttataggcaaattgaatgaggaaaacggctacgcggtggaggaggcaagcgaggagacggtagctatgcttcanaagcaaacttggcccggcaatatacgccaactggagaatgccattgaacgagctatggtgtttttgcaaagcggaattttaaaaccggatttttttgacattgaacccgcagcaaacgcagcanaacccaaaaagaaataa

SEQ ID NO: 7894 - protein, 309 aa, Unknown
  Obtained from environmental sample
  DOMAIN (77)...(217): ATPase family associated with various cellular activities (AAA)
  misc_feature (1)..(309): Xaa is any amino acid
MAVEALQNGADHFIEKKDLEHAEIIEHAVAMVLEKYKYRTENFALRKKLCEKNFIGHGEKFLALNKFVETVAPTNASVLITGESGVGKEVLARAVHYQSLRAGGPFVKINCAALPESLIESELFGHEKGAFTGALKTRRGKFELADGGTLLLDEIGEMPLAAQSKLLRVLQERVIVRIGGDDEIKVDVRIICTTNRDLKQEVENGTFREDLFYRLSVVPVHIPPLRERKEDIPDLLNYFIGKLNEENGYAVEEASEETVAMLXKQTWPGNIRQLENAIERAMVFLQSGILKPDFFDIEPAANAAXPKKK

SEQ ID NO: 7895 - DNA, 819 bp, Unknown
  Obtained from environmental sample
  misc_feature (1)..(819): n is a, c, g, or t
gtgttgctcgttgggcctcccggaacgggaaaaacccttttggcaagagctgtggctggcgaagctggcgttaatttttacagcatgagcggttctgattttgttgagatgttcgtgggcgttggtgcgagccgtgtccgcgatttatttgaaaccggcaaaaaaaatgcgccctgcattttgttcatagacgaaatagacgcggttggcaggcagcgtggcgcagggcttggtggcgggcacgatgaacgcgagcaaacattgaaccaactccttgtagagatggatggttttgcgccaaacgaaggtgttattttagttgcagccacaaaccgccctgatgttttggataaagcgttgctacgccccggacgttttgacaggcaagttgttgtcagcttgccggacttggttggcagagaagctattttgagagttcatttggaaaagcgcaaagttcctcttgacaaagaggtaagcgttagggatgtggcaaaaggaacgccggggcttgccggtgcggatttggaaaaccttgtgaacgaagcggctcttatggcagctcgttttggcaacccaactgtaacgcaactggattttgaagaagcgagggataaactttggatgggcgcagagcgtaaatcccttttgatgaccgaagaggataagaaaatggttgcttatcacgaagctggccacgcactcttaaatctgttgtgcaaaaatgcagaccccttgcacaaattaaccataatcccacgtggccgcgctcttggcgtaactctttcccttccagaaaacgacctcggccgattctga

SEQ ID NO: 7896 - protein, 272 aa, Unknown
  Obtained from environmental sample
  DOMAIN (1)...(134): ATPase family associated with various cellular activities (AAA)
  misc_feature (1)..(272): Xaa is any amino acid
MLLVGPPGTGKTLLARAVAGEAGVNFYSMSGSDFVEMFVGVGASRVRDLFETGKKNAPCILFIDEIDAVGRQRGAGLGGGHDEREQTLNQLLVEMDGFAPNEGVILVAATNRPDVLDKALLRPGRFDRQVVVSLPDLVGREAILRVHLEKRKVPLDKEVSVRDVAKGTPGLAGADLENLVNEAALMAARFGNPTVTQLDFEEARDKLWMGAERKSLLMTEEDKKMVAYHEAGHALLNLLCKNADPLHKLTIIPRGRALGVTLSLPENDLGRF

SEQ ID NO: 7897 - DNA, 573 bp, Unknown
  Obtained from environmental sample
  misc_feature (1)..(573): n is a, c, g, or t
atgactaacgaaaaacttatccgtacttctatttttattttcgccgccgccctccatcttctggttctttttttccttgtttttcatacaaacaaaattattcaggaagctccagagaacgcgagaataatgaaattaaccgacattcaggaagcccctcccccggaaccggaaattcctcaggtggaagccattgccgagaaaatgatagaaaccgatgtcgcgcccgtccaacaagtgcttgcggcgggagtttttcttaccgaaacatatcttgctatgaatcaagtttccgttcctcccaagtttgactcaagtcttgtcatgaaatcccttgtctaccctcctatcgcgctgcgttccggcattgagggaaaggtcatccttgaattatttgtagaccgcgccggtatggtgcaaaaaattgtaatcttaaaagaagatccccccgaccgcggcttcggcgaagcggcggtaaaggcgttcacggacagaaaaggcgttcccgcctacgccaacggggaacccgtctccgcaaggtaccgctacccggttacatttaagcttaaataa

SEQ ID NO: 7898 - protein, 190 aa, Unknown
  Obtained from environmental sample
  DOMAIN (111)...(145): Gram-negative bacterial tonB protein
  misc_feature (1)..(190): Xaa is any amino acid
MTNEKLIRTSIFIFAAALHLLVLFFLVFHTNKIIQEAPENARIMKLTDIQEAPPPEPEIPQVEAIAEKMIETDVAPVQQVLAAGVFLTETYLAMNQVSVPPKFDSSLVMKSLVYPPIALRSGIEGKVILELFVDRAGMVQKIVILKEDPPDRGFGEAAVKAFTDRKGVPAYANGEPVSARYRYPVTFKLK

SEQ ID NO: 7899 - DNA, 348 bp, Unknown
  Obtained from environmental sample
  misc_feature (1)..(348): n is a, c, g, or t
ttgttcttgttactgacagccttaaacctaccgaacaaaaagagggacctgtttttcgcaaataacgaagaagtctatttcaataacggcatctttttacgcaaagccgataatgtaatcgccggttcagggttaacaatgatccggggaataaagaatcttgtcgcggcaggtttcagtcttgaagatgccgtaaaaaccgcatctatgaatccggcaaatattatgcggtacaacagccagggagccataataccaggtcgttttgccgatataacaatattcaataaaaattttgaaatcaattatgtaatgatcggcggaaaaattattaaagaaaaaacttaa

SEQ ID NO: 7900 - protein, 115 aa, Unknown
  Obtained from environmental sample
  misc_feature (1)..(115): Xaa is any amino acid
MFLLLTALNLPNKKRDLFFANNEEVYFNNGIFLRKADNVIAGSGLTMIRGIKNLVAAGFSLEDAVKTASMNPANIMRYNSQGAIIPGRFADITIFNKNFEINYVMIGGKIIKEKT

SEQ ID NO: 7901 - DNA, 489 bp, Unknown
  Obtained from environmental sample
  misc_feature (1)..(489): n is a, c, g, or t
atgagaataataatccaggaaaatcacgagaaagcaagcctttgggctgccggatatatagcagataaaataacttgctgcaaagaaaaaccctttattcttgggcttcccacaggttccagtccattgagaatttaccgtgaattcatcaaaatgcacaatgaagggaaactttcatttaaaaatgtgcgcacttttaatatggatgaatatataggtctggaagcaagtcatcctcaaagttatcattatttcatggcggaaaacctgtttaaacatattgatattgatcaaaagcacatacacattctggacggaatggcaaaagatcccgaanaggaatgcagactttacgaagaagcaataaccgctgaaggcggaattgatcttttcctcggaggtatgggcagcgacgggcacattgcatttaatgaggcaggntcatctctcagttccagaacaagaattaaactctcacggaagaactaa

SEQ ID NO: 7902 - protein, 162 aa, Unknown
  Obtained from environmental sample
  DOMAIN (15)...(162): Glucosamine-6-phosphate isomerases/6-phosphogluconolactonase
  misc_feature (1)..(162): Xaa is any amino acid
MRIIIQENHEKASLWAAGYIADKITCCKEKPFILGLPTGSSPLRIYREFIKMHNEGKLSFKNVRTFNMDEYIGLEASHPQSYHYFMAENLFKHIDIDQKHIHILDGMAKDPEXECRLYEEAITAEGGIDLFLGGMGSDGHIAFNEAGSSLSSRTRIKLSRKN

SEQ ID NO: 7903 - DNA, 807 bp, Unknown
  Obtained from environmental sample
  misc_feature (1)..(807): n is a, c, g, or t
gtgtactacctcatatcgcgctcgctcgggccggagttcgggggggccatagcgctcaccatctttttatcgcagtcgctctcgattccgttctacctcataggtttcgccgaggccacggtgctcacgtttccgtacctcgacatatacttcgaccttatcgcctacgcgatcttcgcggccacggccattctttcgttgcgcggcgcggcggtggtggtcaaggcgcagtacttggtgctggccatactcgtgctttcgatattggcgttccttaccggtgcggccatccacttcagccccgagactttcgccgccaacgcgggggcgccgcccgaatcgttttataataggccgctcgacggaatccacgtggacaacacgaaatacactttctggatgctcttcgccatatacttcccggcggtgaccggcatcctctccggtgtcaacatgtccggcgacctgaagaaccccgcccgcgccatacctaggggcacgctcatcgccatcggcgtagcctttcttgtttacgccgccgagataatcctatgcggcggagcgatatcgcgcgaaaaactcacggacgaaccataccagagcatactccacatatgggatcccgtcacggccttcatagttgtgccgggcgtgatggccgccacgctctctagcgcgctgggcataatcttgggcgcgccgcgcgtgctgcagtcgctcgctcaagacaagatactcaagccgatcaacatattcgccaaggtaacgccggaaggcgagcctagaaggncgctcttcgtcacatag

SEQ ID NO: 7904 - protein, 268 aa, Unknown
  Obtained from environmental sample
  misc_feature (1)..(268): Xaa is any amino acid
MYYLISRSLGPEFGGAIALTIFLSQSLSIPFYLIGFAEATVLTFPYLDIYFDLIAYAIFAATAILSLRGAAVVVKAQYLVLAILVLSILAFLTGAAIHFSPETFAANAGAPPESFYNRPLDGIHVDNTKYTFWMLFAIYFPAVTGILSGVNMSGDLKNPARAIPRGTLIAIGVAFLVYAAEIILCGGAISREKLTDEPYQSILHIWDPVTAFIVVPGVMAATLSSALGIILGAPRVLQSLAQDKILKPINIFAKVTPEGEPRRXLFVT

SEQ ID NO: 7905 - DNA, 951 bp, Unknown
  Obtained from environmental sample
  misc_feature (1)..(951): n is a, c, g, or t
ttggccgaggagagcaacgagcgaacgaccgaaatcccggtcatcttcctgaccgcccacagcaacagcgaaagcgaactcaggggtataacgctcggcgccgtggactacataatcaaacccttctcagccccgttgctggtcaaacgcatagatatgcacctgacggtggaattgcagaagcgccttttggaatcgcaaaaccacgagttaaaggaccaacaacacaaattggagtatcaaaagcaggaacttataaatttcaacgccaagttgcaggatatggtggacgccaaggttaaaaccatcttggagttgcaaagcgccctacttaggtcgatggcggaactcgttgaaagccgcgacgacatcaccggcgggcacatcgagaggacgcagagctacctcggaacgctgctagacgccatgaagcggcaaggcatatacgccgacgaggtagcctcttgggatatgagactggtgctgatgtcggcgcagctgcacgacataggaaagatcgccgtaaaggacagcatactgaacaagccgggcaaactcacgccggaagagtttgaagaggtcaagaagcacacaaccttcggcgggcaggtcatagacaagataatggagagcacgagcgagcacacgttcttgacatacgcgaaaattttcgccttgacacaccacgagaagtgggacggcagcggctacccaaaggggctatccggcgaggagataccgcttttaggccgcctgatggcaatcgccgacgtctacgacgcgttagcctcggacaggccgtacaagagagcgttttcgcacgaggaggcggtgaagataattattgacggccgcgggacgcacttcgaccccgtattgacggatatgtttgtgagcatagcggacgagtttgagagcatagcggcggccgtgggaagtaaacggacttaa

SEQ ID NO: 7906 - protein, 316 aa, Unknown
  Obtained from environmental sample
  DOMAIN (125)...(262): HD domain
  misc_feature (1)..(316): Xaa is any amino acid
MAEESNERTTEIPVIFLTAHSNSESELRGITLGAVDYIIKPFSAPLLVKRIDMHLTVELQKRLLESQNHELKDQQHKLEYQKQELINFNAKLQDMVDAKVKTILELQSALLRSMAELVESRDDITGGHIERTQSYLGTLLDAMKRQGIYADEVASWDMRLVLMSAQLHDIGKIAVKDSILNKPGKLTPEEFEEVKKHTTFGGQVIDKIMESTSEHTFLTYAKIFALTHHEKWDGSGYPKGLSGEEIPLLGRLMAIADVYDALASDRPYKRAFSHEEAVKIIIDGRGTHFDPVLTDMFVSIADEFESIAAAVGSKRT

SEQ ID NO: 7907 - DNA, 1002 bp, Unknown
  Obtained from environmental sample
  misc_feature (1)..(1002): n is a, c, g, or t
ttgcntcatgccagactgataccggtaaacctttcaagttctacgatttcgtctgcggcaatggttcgggaaatgggtattgggataaacatcggcaataccntggactgcattggtaccgatacatggatcgccggagagacgggctggggtaatcctaaaataactagggaatttattgccgcccttaaaaattatggttataagacaatccgtcttccagttacatgggcagaaaacatgggacccggtcctaattacactattgccgaaacatggatgagccgtgttgaagaagtggtaaactggatactggaagaagatttgttttgcatcctcaacctgcaccatgacggcggtgaaagcgacaagagttggatattgaatgcaggagacgatcctgttgggataactaaacagtttgctgccgtctggaaacaaatagccactcgtttttcaggcgcttctgaaaaattgatctttgaggcgatgaacgaagttggttttaaaatgtggaaccaatggaatgcctccaccaatgacaagaagcccgaggcctaccgtatattaaacaatcttaatcaaacatttgttaatacggttcgcgccaccggttctaaaaacaagttccgctttctgctcatttccggttactacaccgacattgatttaacttgcgatccattgttcaaaatgcccactgatacaatggacaacagattgatcctttcggtacattactacactccggcgactttttgcattctggacaaagatgaatcctggggcaagaatcaaactgattggggtagcgatgctgactatgcagaacttaacagacagttcgccaaacttaaagtcaattatttggacaagggtattccggttatacttggcgaatatggcgtaaactttagccccactaaggtcgaggctgcccgaacaaaatggatagccgcggttacgcagatatgtatgactctgccaatctgtcaatggtaa

SEQ ID NO: 7908 - protein, 333 aa, Unknown
  Obtained from environmental sample
  SIGNAL (1)...(22)
  DOMAIN (32)...(326): Cellulase (glycosyl hydrolase family 5)
  misc_feature (1)..(333): Xaa is any amino acid
MXHARLIPVNLSSSTISSAAMVREMGIGINIGNTXDCIGTDTWIAGETGWGNPKITREFIAALKNYGYKTIRLPVTWAENMGPGPNYTIAETWMSRVEEVVNWILEEDLFCILNLHHDGGESDKSWILNAGDDPVGITKQFAAVWKQIATRFSGASEKLIFEAMNEVGFKMWNQWNASTNDKKPEAYRILNNLNQTFVNTVRATGSKNKFRFLLISGYYTDIDLTCDPLFKMPTDTMDNRLILSVHYYTPATFCILDKDESWGKNQTDWGSDADYAELNRQFAKLKVNYLDKGIPVILGEYGVNFSPTKVEAARTKWIAAVTQICMTLPICQW

SEQ ID NO: 7909 - DNA, 843 bp, Unknown
  Obtained from environmental sample
  misc_feature (1)..(843): n is a, c, g, or t
atgtttcgcgaatcaataaaggttttagactgctcaatacgcgatggcggtctcatcaataaccacaaattttcttttgaatttgtgcagaatgtttataaggctcttacagccgcaggcgttgattatatggaagcaggttataaaaactcagcccagttgttcagcagggaagagtacggaccgtggaaattctgcgatgatgacttgctttggaagatgaaagaaagcgttcaaaatggtccaaaaatatcggttatggcagatattggcagggcagatatgagcaaaataaagccaaaaaacgaatccccttacgatatggtgcgcgtggcttgctatgcccgcgatattgataagtgcattgctatggtaaatgaattccacgaccttggctacgaaaccaccataaacataatggcggcaagccgcgacaacggacctgagctggacgaggctttagaccaggcagaaaaagaagcccatacagaagttatttacattgtggatagctttggctatttttaccaagaaaacattgacaaactggcaaaacgctacaaaaggtggattaaaaccaagaagctcggctttcacggtcataacaaccagcagctcgctttttcaaacaccatacaggctataataaaccacgtggattatttggattgctcaatctacggcatggggcgcggagctggcaactgccccactgagctattgctcagtttcctcaaaaatcccaagtttgatgttcgcccgattttggactctatcgcaaatgattttatgcccttgcaaaangagcaaaaattggaatggggttatataattccgcaatga

SEQ ID NO: 7910 - protein, 280 aa, Unknown
  Obtained from environmental sample
  DOMAIN (14)...(269): HMGL-like
  misc_feature (1)..(280): Xaa is any amino acid
MFRESIKVLDCSIRDGGLINNHKFSFEFVQNVYKALTAAGVDYMEAGYKNSAQLFSREEYGPWKFCDDDLLWKMKESVQNGPKISVMADIGRADMSKIKPKNESPYDMVRVACYARDIDKCIAMVNEFHDLGYETTINIMAASRDNGPELDEALDQAEKEAHTEVIYIVDSFGYFYQENIDKLAKRYKRWIKTKKLGFHGHNNQQLAFSNTIQAIINHVDYLDCSIYGMGRGAGNCPTELLLSFLKNPKFDVRPILDSIANDFMPLQXEQKLEWGYIIPQ

SEQ ID NO: 7911 - DNA, 771 bp, Unknown
  Obtained from environmental sample
  misc_feature (1)..(771): n is a, c, g, or t
ttggtcaatagccgcgccgaatttnggaaaggcaaggaagacggatttgttcatacgttaactacgctggcaaatgtaatgggcgattttgaaacattaaaaccggaagaacgccgtgacaagtacgatgaaatactgggatcagagcttaaagaagaacctaatatgatcgtcttgtatacaatatggaaaccgaacgctcttgacggtatggacgaaaagtatataggacgcgccggatcaagtcccacaggacagtacgcgatggcatggggcaaagaaacaggcagcacaataaaacgccaatccaacgacattgaaaatgtaatggaacacattaccggacccaacaaatacaaagacttcattagtgaaccgacattgcggacaataaacggagttgacaagtacacattaagaattgttgttcctattactaataacaaaacaaacgacgaagttgttgttggcgctgtaggctgcgtactatctatcgacgcaatgcagaacatagtggaaaacacgttaaaaaacaacgatgaaattaatatgctcataatctattcaagcaaaggctccattatcgctcattataaaccggaatatataggcaaaaatatgtttgacgttgatgaagagttgggcaatttcagaaatgacatatacaacgcaatgaacaacaatgaaatctgcaaaggatcaatatacgagcctaatattaatgataatataagatttgtagcaaaaccggattcaaataggcaatgctga

SEQ ID NO: 7912 - protein, 256 aa, Unknown
  Obtained from environmental sample
  misc_feature (1)..(256): Xaa is any amino acid
MVNSRAEFXKGKEDGFVHTLTTLANVMGDFETLKPEERRDKYDEILGSELKEEPNMIVLYTIWKPNALDGMDEKYIGRAGSSPTGQYAMAWGKETGSTIKRQSNDIENVMEHITGPNKYKDFISEPTLRTINGVDKYTLRIVVPITNNKTNDEVVVGAVGCVLSIDAMQNIVENTLKNNDEINMLIIYSSKGSIIAHYKPEYIGKNMFDVDEELGNFRNDIYNAMNNNEICKGSIYEPNINDNIRFVAKPDSNRQC

SEQ ID NO: 7913 - DNA, 948 bp, Unknown
  Obtained from environmental sample
  misc_feature (1)..(948): n is a, c, g, or t
ttgttccggaagtaccataacgctaaagacggtaaatcaaccggagctatcagtaacattaaatatgcggaaaatacaactataccgcaaactgaaggaacttatgccgtaacttttgatgtagcggcgacaacaggttggaacgcagcaacaaaattatccgcaggaaatcttattgtaagtgtaccaacatggacatccgtagcggacagcacattcggaacaggcttcatcttagcaatcgcctatggcaacggcaagtttgtcgcagttggaggtggaggaaaaatagcgtattcagcggacggcataacatggacagcagtagcgaacagcacattcggaacaggcctcatcgaagcaatcgcctatggcaacggtatgtatgtcgcagtcggcgataatggaaaaatggcgacttcaacggacggcacaacatggacagcagtaccgaacagcacattcggaacagacagcatcttcgcaatcacatatggcaacggtatgtatgtcgcagttggcgctagcggtaaaatggcgacttcaacggacggcaatacatggacagcagtaccgaacagcacattcggaacagccagcatcttcgcaatcacatatggcaacggtatgtatgtcgcagttggcactagcggtaaaatggcgacttcaacggacggcacaacatggacagcagtatctaacagtactttcggttcaaactacattagtaaaatcacatatggtaacggtatgtatgtcgcagtcggcgctagcggtaaaatggcgacttcaacggacggcacaacatggacagcagtagcgaacagcacattcggaacaggcctcatcgctgcaatcgcctatggcaacggaaagtttgtcgtagtagcagaaggagaatatggcggaaaaatagcatatcagcggctcggccgatctgatcattga

SEQ ID NO: 7914 - protein, 315 aa, Unknown
  Obtained from environmental sample
  misc_feature (1)..(315): Xaa is any amino acid
MFRKYHNAKDGKSTGAISNIKYAENTTIPQTEGTYAVTFDVAATTGWNAATKLSAGNLIVSVPTWTSVADSTFGTGFILAIAYGNGKFVAVGGGGKIAYSADGITWTAVANSTFGTGLIEAIAYGNGMYVAVGDNGKMATSTDGTTWTAVPNSTFGTDSIFAITYGNGMYVAVGASGKMATSTDGNTWTAVPNSTFGTASIFAITYGNGMYVAVGTSGKMATSTDGTTWTAVSNSTFGSNYISKITYGNGMYVAVGASGKMATSTDGTTWTAVANSTFGTGLIAAIAYGNGKFVVVAEGEYGGKIAYQRLGRSDH

SEQ ID NO: 7915 - DNA, 756 bp, Unknown
  Obtained from environmental sample
  misc_feature (1)..(756): n is a, c, g, or t
atgcgcgagtcaaaaaaggagaacaaaggccatttccagtggtatccctctgtggggatgggaataaattttttaatcccctccggcggtaaaagacagcccggcgaaaggcgtccctctgacggggatataacctttgacgccgtattcaagcctctgtattacgatgtttacgcgacaggcgccggggtgacatggtacgcgccttatagggacgatctgccccccaatatcatcgttgattatccggagactcaatatatttctcctaactatgacggaaaatccgattcacttgtttttcccgtcaggatagtcgatgaccattatgttatgggctggatcatgacaataaaggacgcgaacggcaacatagtccgcacataccaaaacaaggatcgccggtttgaaatgatggatgtgagggatatttacggccgttattatgtggaaaaaaaaggagtcgaggttcctccgaccatgcgctgggacggtgtttttaccacgggtgaaatcggaccggacggaaaatattatttctctatcagcgccacggacgaaaacggcaatgtcggaaccagccgcgactatgaagtaatattgaaaaacacaccgccgcaagtcgctatagacaacataaatctaaatgatcggatttttgatccttcgggggggaatagaacatccattaacatcgttccccgcggcactatggaagataaatgggaaagcggcatttacgattccgaagngtag

SEQ ID NO: 7916 - protein, 251 aa, Unknown
  Obtained from environmental sample
  misc_feature (1)..(251): Xaa is any amino acid
MRESKKENKGHFQWYPSVGMGINFLIPSGGKRQPGERRPSDGDITFDAVFKPLYYDVYATGAGVTWYAPYRDDLPPNIIVDYPETQYISPNYDGKSDSLVFPVRIVDDHYVMGWIMTIKDANGNIVRTYQNKDRRFEMMDVRDIYGRYYVEKKGVEVPPTMRWDGVFTTGEIGPDGKYYFSISATDENGNVGTSRDYEVILKNTPPQVAIDNINLNDRIFDPSGGNRTSINIVPRGTMEDKWESGIYDSEX

SEQ ID NO: 7917 - DNA, 504 bp, Unknown
  Obtained from environmental sample
  misc_feature (1)..(504): n is a, c, g, or t
atgaatcagggcgatgtgctgcagataggcacgccccatgatatttatgaaagcccggcgaccgattttgtagcccgctttatcggggaaaccaacctttttgacgcggcagtggtcagcgtggaaacacttaatcgggactgggaagagtatatggctgaactggatatcccggaactgggccgtattaaagttaccaccgtagacaaggtaaaaccaggtcagacagtcagctttacaataaggccggagaaaatcgtcattgccaaggacaggccgacgaccaagcgcgaagatatcaacctctttcaggggattgtagacgagccgatttattcgggcttccagacaaagttttacgttaaggtaatggaaaagtccatgattagggtgatcaagcagcacgccaactattcggacgaagggcccgatatacgctggaaggattctgttttcctgtcatggagcgccaatgacggctatattgtcgaggtgaagaattga

SEQ ID NO: 7918 - protein, 167 aa, Unknown
  Obtained from environmental sample
  DOMAIN (79)...(163): TOBE domain
  misc_feature (1)..(167): Xaa is any amino acid
MNQGDVLQIGTPHDIYESPATDFVARFIGETNLFDAAVVSVETLNRDWEEYMAELDIPELGRIKVTTVDKVKPGQTVSFTIRPEKIVIAKDRPTTKREDINLFQGIVDEPIYSGFQTKFYVKVMEKSMIRVIKQHANYSDEGPDIRWKDSVFLSWSANDGYIVEVKN

SEQ ID NO: 7919 - DNA, 366 bp, Unknown
  Obtained from environmental sample
  misc_feature (1)..(366): n is a, c, g, or t
ttgaagccgcatccgggcgcgcacgctggcggcggcggaaggcggaatttaggcacgttgtattccggacccatggcaatttggttcaccttattcttcctggcgcctatttttattataattatttacagtttccttaaaaaaggactgtacggcggggtggagccggttttttcgcttgatgcctaccagtatttgggcgacagagtattccttggtatcacgcttcgtactattattacttcgaccatagctaccattattacgattttaatcgccctgccctgcggctattacatggccaaaagcaaaaaccagactttcctccnttttgctatcatcattcccttttggacaattttttga

SEQ ID NO: 7920 - protein, 121 aa, Unknown
  Obtained from environmental sample
  misc_feature (1)..(121): Xaa is any amino acid
MKPHPGAHAGGGGRRNLGTLYSGPMAIWFTLFFLAPIFIIIIYSFLKKGLYGGVEPVFSLDAYQYLGDRVFLGITLRTIITSTIATIITILIALPCGYYMAKSKNQTFLXFAIIIPFWTIF

SEQ ID NO: 7921 - DNA, 747 bp, Unknown
  Obtained from environmental sample
  misc_feature (1)..(747): n is a, c, g, or t
atgtcattaacagacaaagttgaaattcccagaaggaccatggttttgttttttgtgattgatacttcgggaagcatggacggaagcaagattggcgcggtaaacaccgcgatcgaggaagttattccggcaatcagagaagtgtccgacgagaacgccgatgcccagataaaaatcgccgccctggaattttctaccggcgcacgctggatcacttcaggcggcccggttgaagccgacaagttccgctggaactatctgaacgcggcgggcgtcaccgactttggggccgcctgtaaagcgctgaacgaaaaactttcgacaaaagcttttatgcaggaggcgaccggctctttcgcaccggcgatatttttgctttccgacggagaaccgactgacagttgggacagggaattggcggcgttaaggcagaacaactggttcaaagccgccgtcaaggttgcaatcgcaataggggacgatgcaaacaaggacgtgctaaaggaatttaccggcacaatggaagcggttctggaaacccacaactcggcgaccttaaaaaagatgattaaattcgtcagcgtccgcgcgtcccaggttgccagcaaaagttccgatgtcaacgataccgccgccgatcttggcgatgagcaaaaacagcgggagctgaacgcaaacctgaatgaatttgtccaggaaattgccgccgcccctgacaacgatcaatggattgtaatgaaaacataa

SEQ ID NO: 7922 - protein, 248 aa, Unknown
  Obtained from environmental sample
  misc_feature (1)..(248): Xaa is any amino acid
MSLTDKVEIPRRTMVLFFVIDTSGSMDGSKIGAVNTAIEEVIPAIREVSDENADAQIKIAALEFSTGARWITSGGPVEADKFRWNYLNAAGVTDFGAACKALNEKLSTKAFMQEATGSFAPAIFLLSDGEPTDSWDRELAALRQNNWFKAAVKVAIAIGDDANKDVLKEFTGTMEAVLETHNSATLKKMIKFVSVRASQVASKSSDVNDTAADLGDEQKQRELNANLNEFVQEIAAAPDNDQWIVMKT

SEQ ID NO: 7923 - DNA, 903 bp, Unknown
  Obtained from environmental sample
  misc_feature (1)..(903): n is a, c, g, or t
gtgggcacgataggcaaaatgagctatgagcataagatagacggtaaattgttgagcaaaatgctgacgggcggctttacgaatctttcacacaacatagactatcttaacaaaataaatgttttccccgtatccgacaacgacaccggcacaaatatgaaaaagaccttcgagagcggagttgccacgcttaacggcgaggcttcgttttgtgatgccttttccgcgtttgtaaggggtctgcttatcggatcgagagggaactcgggttttattctatcgcagtattttttaggtatttatgaacatacaaaggggaaagatgccgtttccgtcgccgatttaagctccgccctgccgcatgcgtatcaggttgcttaccgggcggtgcttaatcctgtcgaggggactatacttacgataatgcgcgaggggccgaaaagaacgctgcagaaaatagacgacaaaacgtccattcaggagttttttgacgttttagcggatgaaatgtttgtttgcgtgcgggaaacggtaaatcaaatgaacctgcttcacgacaacaatgtattggatagcggcgcggtcgggctctacctgattttcgacggaatgaggagagcgtttcacgcggatttacagcattttgattgcgaggaaaatgccgctcttcccagccgcagcataaccccaattaaaaccttttcgtttttccgcttttgcaccgaatttgttttaagtatgcacgagatacaaagcagggattactttgcccgccggcttacaaacagaggggattctattgttgtcgcgacggatgagaaccttttgaatgtacatatacatacccacgagccgcaaaaaatattggatgagtttggaaatacggagatatcgtcacaatga

SEQ ID NO: 7924 - protein, 300 aa, Unknown
  Obtained from environmental sample
  DOMAIN (43)...(206): DAK2 domain
  misc_feature (1)..(300): Xaa is any amino acid
MGTIGKMSYEHKIDGKLLSKMLTGGFTNLSHNIDYLNKINVFPVSDNDTGTNMKKTFESGVATLNGEASFCDAFSAFVRGLLIGSRGNSGFILSQYFLGIYEHTKGKDAVSVADLSSALPHAYQVAYRAVLNPVEGTILTIMREGPKRTLQKIDDKTSIQEFFDVLADEMFVCVRETVNQMNLLHDNNVLDSGAVGLYLIFDGMRRAFHADLQHFDCEENAALPSRSITPIKTFSFFRFCTEFVLSMHEIQSRDYFARRLTNRGDSIVVATDENLLNVHIHTHEPQKILDEFGNTEISSQ

SEQ ID NO: 7925 - DNA, 816 bp, Unknown
  Obtained from environmental sample
  misc_feature (1)..(816): n is a, c, g, or t
atgaaaaatttagtgaaaactcttgttatactaaacgctgtaatctttgcagcttgcggtaataacagttctaccaaagaaacgatgggtttaacattgaatagcgacaccacagttgtaaaagaaaattcaccggtattggaacagataattattcaaaaggtgcaattacaggatttctcggcagagttcagaacggtcggaacagttcgccccgttgcaggcaagctggcagagattgctccaccatttgcaggacgcattattaaatcttttgtcaagttgggacaaaaggtgagtgccggttcgccgatttttgagttaagttctgcagaattttacgaagcaataaagtcgtactatgcagcgctatcggcatacgaagttgcacaaagaaacttcaatcgtcaaaaagagttagcagcaaacggtgttgcttcacaaaaggattttgagcaggcgcaaagcgatgcgcatattgcccatcatgaatttgaacaagtaaaagcgaacctgcgcatattcaatattgatgaagaggtgtggcatgccacacctcttcaaatgggacaaccactgaaaattatttcacccatttcgggcgaggtagtaaaatgcaatatcaccatcggtggttatgtaaaagaggattccgaaccgttggcggtggttgccgatttattaaaagtttgggtagcggcaattgtcaaggaaaaagatttcggagtgattaaacagggtgaccgcgtggagatttataccgacgctcatcccaataaaatcatttgggtactatttatatactcggccatctga

SEQ ID NO: 7926 - protein, 271 aa, Unknown
  Obtained from environmental sample
  SIGNAL (1)...(25)
  misc_feature (1)..(271): Xaa is any amino acid
MKNLVKTLVILNAVIFAACGNNSSTKETMGLTLNSDTTVVKENSPVLEQIIIQKVQLQDFSAEFRTVGTVRPVAGKLAEIAPPFAGRIIKSFVKLGQKVSAGSPIFELSSAEFYEAIKSYYAALSAYEVAQRNFNRQKELAANGVASQKDFEQAQSDAHIAHHEFEQVKANLRIFNIDEEVWHATPLQMGQPLKIISPISGEVVKCNITIGGYVKEDSEPLAVVADLLKVWVAAIVKEKDFGVIKQGDRVEIYTDAHPNKIIWVLFIYSAI

SEQ ID NO: 7927 - DNA, 408 bp, Unknown
  Obtained from environmental sample
  misc_feature (1)..(408): n is a, c, g, or t
atggatgtcaaggagatagtccgggttcaggcaatccgggccattccaaacgctcctatgtatgtcgaagggatatttaacctgcgaagcgaaataatacccattataaacctgcataaacgtttccaccttaagaaactggcaagctcggaggaagacgaattgttgtccgggtttgtaatccttgatatagacggcatgaaacttggaatcatcattgaccgtatatccagggttataacaatcgaaaaggaagatatacagccgccgccccaaatgttttcagggattggagcggaatacataatgggagtagtacgccaggaacagggctatctgattattctggatattcgcgacctgtttaatcccaaggaactcgcaaagatcgccgagttaagacgctag

SEQ ID NO: 7928 - protein, 135 aa, Unknown
  Obtained from environmental sample
  DOMAIN (2)...(126): CheW-like domain
  misc_feature (1)..(135): Xaa is any amino acid
MDVKEIVRVQAIRAIPNAPMYVEGIFNLRSEIIPIINLHKRFHLKKLASSEEDELLSGFVILDIDGMKLGIIIDRISRVITIEKEDIQPPPQMFSGIGAEYIMGVVRQEQGYLIILDIRDLFNPKELAKIAELRR

SEQ ID NO: 7929 - DNA, 636 bp, Unknown
  Obtained from environmental sample
  misc_feature (1)..(636): n is a, c, g, or t
atgggaataatgaatttttccgacttattcactacccgccaacttaccgcactaatgacattcagcgatctggtaagtaaagcgatgnagcagattgaagaggacgcaaaaaaaacagcaaattacatgaaaaaaacgaataacgcaaatgaaaaaggtttggacgaagacggtactggcgcaagggcttatgccgaagcggtaggtgtgtatttggcaatgctgattgataaactcgccgatctgggaaattctctgaaccgatgggaaccaaatgcacaatgtccaagacagttgtttgcacgtcaggcaatacctatggtttgggattatgccgaaggaaatcctttgggggctagttctggttcatggaaaattttactggataatttattacgaagtctaaaagcaccattatttgcttttaatagaaaggcaatgggatatgttaatcaaaaagacgcgacacaaatatcattcaacagtcccattgtaatttcaaccgacccaccttattacgacaatatcggctatgctgatttgtcagattttttttatatctggctacgccgttccttaaagaatgtatatccaaaattattttctaccatgctgttcccaaaacggaagaattag

SEQ ID NO: 7930 - protein, 211 aa, Unknown
  Obtained from environmental sample
  misc_feature (1)..(211): Xaa is any amino acid
MGIMNFSDLFTTRQLTALMTFSDLVSKAMXQIEEDAKKTANYMKKTNNANEKGLDEDGTGARAYAEAVGVYLAMLIDKLADLGNSLNRWEPNAQCPRQLFARQAIPMVWDYAEGNPLGASSGSWKILLDNLLRSLKAPLFAFNRKAMGYVNQKDATQISFNSPIVISTDPPYYDNIGYADLSDFFYIWLRRSLKNVYPKLFSTMLFPKRKN

SEQ ID NO: 7931 - DNA, 882 bp, Unknown
  Obtained from environmental sample
  misc_feature (1)..(882): n is a, c, g, or t
atgaaagtccttcttatttgtctggaagaagaaaaagaaaaaacctcaaatcttgtgtcttttcttgaaaaaacaggtattccatcgggaacgcatcttattgaaaacaaggatgtaaggctgagagacattataaatttctctcatattgtggttctttcggcgcttggaccgaggcgggtggattttcttgcggggtttttctgcggttcgcatcttcctatttttgtattcggggataaagctgtcgaaagtatccctgatgtatttgccttttgcttcaaattcgtttttaccgaagaacaattacatgactatctggcaagcgaatacgaaactttcaagaaaaatgaagccgtagaggaattaaatcacgccagacaagcattgtttgacatgggaatttccgcgacaaacgactctcttatccaatgtgttgccgaagataaaacaaaagaagttgccctcttttttgccgcgggtttttcgcccgatataaaagacaaaaaaggaattcccttgatttgtatcgccgccagaaacgggcatttaaataccattaagcttctgcttaattccggcgctcaagtgaatcttattgccgaagacaggggttctaacgctctttttgacagcgctcttgtaagaaataaggatataataaaagcccttattgaagccggagcggatgtgaatatacaaagcaaggacggacagaccgcgctgattgtcgtagtaggcgcaggggaagaggatattgttgaaatattggttaaagccggggctgagtttgatattaaagacgctctcggcataagcgcgagaaaatacgccgccatttttaataataaaaaaatacttgccatgtttgatgccaaatga

SEQ ID NO: 7932 - protein, 293 aa, Unknown
  Obtained from environmental sample
  DOMAIN (170)...(202): Ankyrin repeat
  misc_feature (1)..(293): Xaa is any amino acid
MKVLLICLEEEKEKTSNLVSFLEKTGIPSGTHLIENKDVRLRDIINFSHIVVLSALGPRRVDFLAGFFCGSHLPIFVFGDKAVESIPDVFAFCFKFVFTEEQLHDYLASEYETFKKNEAVEELNHARQALFDMGISATNDSLIQCVAEDKTKEVALFFAAGFSPDIKDKKGIPLICIAARNGHLNTIKLLLNSGAQVNLIAEDRGSNALFDSALVRNKDIIKALIEAGADVNIQSKDGQTALIVVVGAGEEDIVEILVKAGAEFDIKDALGISARKYAAIFNNKKILAMFDAK

SEQ ID NO: 7933 - DNA, 759 bp, Unknown
  Obtained from environmental sample
  misc_feature (1)..(759): n is a, c, g, or t
atgggtgatttgaaaacgcctccgcaaagggggcgagcgcaagcagttccgttggctcagccggggggcggatacagcggggtcactttgaatacgccccttggtgagggttccggttttatcgaacacaaccgtgtccagatgggtgcaggcttcaagataattgccgcccttgaccaggatcccgcttttggacgcccggccgataccgctgaaaaagctgagcgggatggagagtaccagcgcgcagggacaggagatcacgagaaagacaagaccgcgctggagccactcccgccagtccccgccaaaaaagagcggcactaccgccgcgagcagcagggcgcatccgacgacggcgggcgtatagtattttgcgaatctcgtaataaaattttctgttttggctttcttgtttacagcgttttccatgaggctgatgatcttcgcgacggcggattcgccaaaggtcttttgcacctctatggtcagcacgccgttttggttcaggcagccggagagcaccgcgtcccccggcctggccctgcgcggtacggattcccccgtgagagcggaggtatccagcatggacgaaccctccagcactataccgtccagcggaattttttctccgggcttcgcgataatcacatcgcccgcgcgcagggtatcgggcgaaaccctgacgatggcgccgtccttcttcaggttggcgtagtcggggcgcagattcatcagggcggtgatggatcgctttga

SEQ ID NO: 7934 - protein, 252 aa, Unknown
  Obtained from environmental sample
  misc_feature (1)..(252): Xaa is any amino acid
MGDLKTPPQRGRAQAVPLAQPGGGYSGVTLNTPLGEGSGFIEHNRVQMGAGFKIIAALDQDPAFGRPADTAEKAERDGEYQRAGTGDHEKDKTALEPLPPVPAKKERHYRREQQGASDDGGRIVFCESRNKIFCFGFLVYSVFHEADDLRDGGFAKGLLHLYGQHAVLVQAAGEHRVPRPGPARYGFPRESGGIQHGRTLQHYTVQRNFFSGLRDNHIARAQGIGRNPDDGAVLLQVGVVGAQIHQGGDGSL

SEQ ID NO: 7935 - DNA, 822 bp, Unknown
  Obtained from environmental sample
  misc_feature (1)..(822): n is a, c, g, or t
atgatcagatcggcacgagataacgtcctgccgttttcgttttcggaatttttggagtttaacggtaatacggaaaataccgatagagcgttcgtaaactacctaaactacggcggctttcccgaagcggtgaaacttgcaaacgtaggcgaaaattattcattcagatacttgcaaagcatattccgaaatatatacgaaaacgacattaaaccacgatacagcatccattccgatatatcttaccgagagatcgtagactttttggcagatagcgtcggttcgccgatgtcacctagaaacatagcgaaagttctcaccaattccgggaaaaagatagatcacaagtccgtctcaaaatatatctccacgctcatcgattcatatatattctaccgagcgtcacgctacgatataaagggcaaacaacatttaaccacgcaagaaaaatactacgccgtagacaccggcctcagaaacgcgcttttaggcaaagaactttcgagcgacaggggacatctattggaaaacattgtttatttggagttgcttcgccgcgaaaatcaagtgtggataggaaagatcggaaacggcgaagttgattttgtagcccgcgacaacgccggcgttactaaatacatccaagtctcgcaatccgtaaaaaacccggagacgctgacccgcgaactaacggctcttgacaagattccggatcataatgaaaagatattgatctcggcggactatgaaaccggacaacgaaacgngataaagcaggttaatatcgttaattggctcttagatagggctgagacagtttaa

SEQ ID NO: 7936 - protein, 273 aa, Unknown
  Obtained from environmental sample
  misc_feature (1)..(273): Xaa is any amino acid
MIRSARDNVLPFSFSEFLEFNGNTENTDRAFVNYLNYGGFPEAVKLANVGENYSFRYLQSIFRNIYENDIKPRYSIHSDISYREIVDFLADSVGSPMSPRNIAKVLTNSGKKIDHKSVSKYISTLIDSYIFYRASRYDIKGKQHLTTQEKYYAVDTGLRNALLGKELSSDRGHLLENIVYLELLRRENQVWIGKIGNGEVDFVARDNAGVTKYIQVSQSVKNPETLTRELTALDKIPDHNEKILISADYETGQRNXIKQVNIVNWLLDRAETV

SEQ ID NO: 7937 - DNA, 879 bp, Unknown
  Obtained from environmental sample
  misc_feature (1)..(879): n is a, c, g, or t
atgctcggaaactggtcgcttggggattacttcaaggacggcgccatcaaaatgagttacgaattccttacttcgccggaatggctgggtatcccggcggaaaaaatcggggtgacggtttttgccggagacgagaacgccccccgcgatgacgagtccgcggaagtttggaggagcctgggcttccccgaaaaccggatcagttaccgccccaaagaggacaactggtggggcccggctgggactacaggcccctgcggcccggattcggagatgttctacgacatcggaaaagagccttgcggcccgaattgcggccccggctgttcctgcggcaaatggcttgagatctggaacgacgtttttatgcagtacaacaaaaacgcggaaggaaaatatatacccctttcccgcaagtgcgtcgatacaggcatgggcatagaaagaaccgttacgattctgaacggaaaatcctcggtctatgacacggaaatttttgcccccataatcgcggctgttgaagcggctaccaactacaagtacggtacggaaagcgagaaggacagatctctcagaatcatctgcgaccacaccagagcttcgacctttatccttggggatccaaaagcggtaagcccctccaacgtgggtgcgggctacgtactaaggcggcttatacgccgggcggtgcgccacgggcgcaagctcgcaggaaaggaaataatccccctgctctcccccatcgcggctgtgataatcgaaaagtttaagggcccatacccggaactgacggaaaacaaggcccgaataacggaagaattaaacgaggaggaagagagattcctgggaacccttcagaaaggggaacatgaattttga

SEQ ID NO: 7938 - protein, 292 aa, Unknown
  Obtained from environmental sample
  DOMAIN (1)...(292): tRNA synthetases class II (A)
  misc_feature (1)..(292): Xaa is any amino acid
MLGNWSLGDYFKDGAIKMSYEFLTSPEWLGIPAEKIGVTVFAGDENAPRDDESAEVWRSLGFPENRISYRPKEDNWWGPAGTTGPCGPDSEMFYDIGKEPCGPNCGPGCSCGKWLEIWNDVFMQYNKNAEGKYIPLSRKCVDTGMGIERTVTILNGKSSVYDTEIFAPIIAAVEAATNYKYGTESEKDRSLRIICDHTRASTFILGDPKAVSPSNVGAGYVLRRLIRRAVRHGRKLAGKEIIPLLSPIAAVIIEKFKGPYPELTENKARITEELNEEEERFLGTLQKGEHEF

SEQ ID NO: 7939 - DNA, 492 bp, Unknown
  Obtained from environmental sample
  misc_feature (1)..(492): n is a, c, g, or t
atgatccaggttccctacggttctgacacagcttctaaaaacaaggcgaaagaggcggctgacaggcttgttagggaaatcggttccgatccttcaaaattcgacgaagcggttattaaaggccgggttcccaattccggctatcaggccggagacggaggatacattcagcgcaaccaggaataccagcagtacatgggggtgaattttatgaatgccgccttttcgctgaggcaaggcgaggtttcgaagctgattgaaggccttccgggctatcagataatcaagattaccgaaaccttgcccatgaaagccctggaacttgatgagattgcgatactcggaacctccgtaacggtaaggcagtacatagcggcaggtttgctggagcaaagacagcaggaaattctggaaagagctaccagagagctcacaacagagctcagggccgggaatccgtttcgaataatggaaaacaacctaaactggtaa

SEQ ID NO: 7940 - protein, 163 aa, Unknown
  Obtained from environmental sample
  DOMAIN (2)...(99): PPIC-type PPIASE domain
  misc_feature (1)..(163): Xaa is any amino acid
MIQVPYGSDTASKNKAKEAADRLVREIGSDPSKFDEAVIKGRVPNSGYQAGDGGYIQRNQEYQQYMGVNFMNAAFSLRQGEVSKLIEGLPGYQIIKITETLPMKALELDEIAILGTSVTVRQYIAAGLLEQRQQEILERATRELTTELRAGNPFRIMENNLNW

SEQ ID NO: 7941 - DNA, 927 bp, Unknown
  Obtained from environmental sample
  misc_feature (1)..(927): n is a, c, g, or t
ttgtggcgggacgtctcaaggcatgacgcggttatagcggactttggaatttccagcatcatggacgaaactgagcagctccataaaacccgcacaggttcccgcacaacaggctacgccgcgccggaagtcctttccggccttatcggtcccaagatggattactacgcgcttggaatcaccctctgggaactgctcaccggtaaagacccatttaccctggacaacggcaagcgccgcaacgacgcccatctgttacgcgacaccatcgaagggagaatcgccgatgacattttaagcaaggaacccagagtgagccaaaagatggaacgcctcatacgcggactccttatactcgacccggaataccgctggggatatgacgaagttacgcgccatcttgccggggaaaccgtcgatattcatcaagaggcgaaaaagacatggtctttttccatcggcggcattgactgtactacacttgaggctttgggaagcgcgataatggaaaatcccggggatgccagaaaatatatcttcaaaggcaggcttggagcttttcttgaggattactaccctgacatctccaaacagattgaacaaatcgcggaggaaacgtctgcggctaacgaacacgacaaaggcgttattaaagttgcctatatcttaaatcccggtctgcctcttgaaatcgccaatgattacaagatacaaaatcttgatgaccttatctcccttctggaaaacgcgcccgagtcggtcgttccttcgctgcgggacgctaaatcaaaactctacacatggatggacattatggggtataaggacaacgcgtcggaaataaaaaaactccccggactatccggcggcatgggtgatacggaattggcgggcaaagccgaagtgttccttaaaataaaactataa

SEQ ID NO: 7942 - protein, 308 aa, Unknown
  Obtained from environmental sample
  misc_feature (1)..(308): Xaa is any amino acid
MWRDVSRHDAVIADFGISSIMDETEQLHKTRTGSRTTGYAAPEVLSGLIGPKMDYYALGITLWELLTGKDPFTLDNGKRRNDAHLLRDTIEGRIADDILSKEPRVSQKMERLIRGLLILDPEYRWGYDEVTRHLAGETVDIHQEAKKTWSFSIGGIDCTTLEALGSAIMENPGDARKYIFKGRLGAFLEDYYPDISKQIEQIAEETSAANEHDKGVIKVAYILNPGLPLEIANDYKIQNLDDLISLLENAPESVVPSLRDAKSKLYTWMDIMGYKDNASEIKKLPGLSGGMGDTELAGKAEVFLKIKL

SEQ ID NO: 7943 - DNA, 864 bp, Unknown
  Obtained from environmental sample
  misc_feature (1)..(864): n is a, c, g, or t
ttgttccgacgtcacattttcggtttcgccttcgtaagtggttatcaccntatgcctcaggatgtccatccccacggattttatgtcttccggcgtcacgtatccgcgccctcggatgaaggcgtgggctcgggcggcccgggtcaggaacagcgtggcgcggggggaggccccgtaggatatcagcgacctcatgtcgctcaaccccaccgtctccggctccctggtggcgaagactatgttcactatgtactcctccaccttggagtccatgtatatctcgctgaccaattttctggccgaaagcagtttgtcaacctttatcacccggctgacctccggcaccggcccggccgccatccgcttcaagatctctttctcctcgtcgcgcgaggggtagacgatcttgagcttcagcatgaagcggtctacctgcgcctcgggcaggggataggtgccctcctgctctatggggttctgcgtggccagcaccaaaaaaggttcctccagtttgtagcactcgtcgccgatggtcacctggcactcctgcatggcctcgaggagggcgctctgcacttttgccggggcgcggttgatctcgtcggcgagcacgatattggagaagatggggccctttttgggcacgaactccccgctcttctggttgtagaccatagtccccacgatgtccgccggcagcaggtcaggcgtgaactgtatccgcttgaagccggtgtccaccgccttggcgagcgtcgatatggccagcgtcttggcgagccccggcaccccctcaagaagtatgtggccgcgcgtcagaagccctataaggagcctgtcgaccattttagactgccccactag

SEQ ID NO: 7944 - protein, 287 aa, Unknown
  Obtained from environmental sample
  misc_feature (1)..(287): Xaa is any amino acid
MFRRHIFGFAFVSGYHXMPQDVHPHGFYVFRRHVSAPSDEGVGSGGPGQEQRGAGGGPVGYQRPHVAQPHRLRLPGGEDYVHYVLLHLGVHVYLADQFSGRKQFVNLYHPADLRHRPGRHPLQDLFLLVARGVDDLELQHEAVYLRLGQGIGALLLYGVLRGQHQKRFLQFVALVADGHLALLHGLEEGALHFCRGAVDLVGEHDIGEDGALFGHELPALLVVDHSPHDVRRQQVRRELYPLEAGVHRLGERRYGQRLGEPRHPLKKYVAARQKPYKEPVDHFRLPH

SEQ ID NO: 7945 - DNA, 879 bp, Unknown
  Obtained from environmental sample
  misc_feature (1)..(879): n is a, c, g, or t
atggccaaggtcatcgtggggcagtcaaagatggtcgacaggctccttgtggggcttctgacgcgcggccacatactccttgagggggtgccggggttggccaagacgctggccatatcgacgctcgccaaggctgtggacaccggcttcaagcggatacagttcacccccgacctgctgccggcggacatcgtgggaacgatggtctacaaccagaagagcggggaattcgtgcctaagaagggccccatcttctccaacatagtgctcgccgacgagatcaaccgcgccccggcgaaggtgcagagcgccctcctggaagctatgcaggagtgccaggtgaccatcggcgacgagtgctacaagctggaggagccctttttggtgctggccacgcagaaccccatagagcaggagggcacctatcccctgcccgaggcgcaggtcgaccgcttcatgctgaagctcaaaatcgtctacccctcgcgcgacgaggagaaggagatactgaagcggatggcggccgggccgataccggaggtcagcccgataataaaggtggataagctgctggcggccagaaaattggtcaccgagatatacatggactccaaggtggaagattacatagtgaacatagtcttcgccaccagagagccggaggcggtggggctgagcgacatgagaacgcttatatcctacggcgcctccccgcgagccaccctgttcctaacccgagccgccagagcccacgccttcatccgaggccgaggctacgtaaccccggaagacataaaatcagtggggatggacgtcctaaggcacagggtgataatcacttacgaggcagaagcggagaataaacctcggagcagatag

SEQ ID NO: 7946 - protein, 292 aa, Unknown
  Obtained from environmental sample
  DOMAIN (24)...(161): ATPase family associated with various cellular activities (AAA)
  misc_feature (1)..(292): Xaa is any amino acid
MAKVIVGQSKMVDRLLVGLLTRGHILLEGVPGLAKTLAISTLAKAVDTGFKRIQFTPDLLPADIVGTMVYNQKSGEFVPKKGPIFSNIVLADEINRAPAKVQSALLEAMQECQVTIGDECYKLEEPFLVLATQNPIEQEGTYPLPEAQVDRFMLKLKIVYPSRDEEKEILKRMAAGPIPEVSPIIKVDKLLAARKLVTEIYMDSKVEDYIVNIVFATREPEAVGLSDMRTLISYGASPRATLFLTRAARAHAFIRGRGYVTPEDIKSVGMDVLRHRVIITYEAEAENKPRSR

SEQ ID NO: 7947 - DNA, 864 bp, Unknown
  Obtained from environmental sample
  misc_feature (1)..(864): n is a, c, g, or t
gtgatccccgcctaccagtacaacctagagcagatgagccggcgcgtcctctccatgatcccgtttaccgagccgctcacgatcaaaaagcttctcgccgacgtcgacttcagctccatgacccgcagcgccgtccgcgaggtcacaaacgctttcggcaagggcgcctacgtcatcatatatctgattttcctattcatggagaagaggagcttcgccaagaaattcgataagttcctctcaaagtccggcaacggcgccgaggtgaacgccatcatcgaacgcataaattccgatatacgcacgtacatcggcatcaagaccctggcgagctgcgtcaccgcggcggccggttacttggtcttcgcgagcgtggggctcaacttcgccagcttctggacattcctgctgtttatgctgaactacatacccatactcggctcgatagtggcgaccgtcctgccggcgatcttcgccctgatgcagtacgagagcctgggcccgttcttcgttgttctgttcggcgtaatcatcatccagcaagccgtaggcagcataatcgagcccagattcatgggcgacaagctcaacctgagcccgctggtgatcctgctctcgttggccacttggaacctgatctggggcatccccggaatgctgatgtgcgtgccgctcaccgccatcgtcataatcatcttctcctacttcccgcagacaaggccgatagccgaggcgctctcgaggaacggggatattaggggcataggggtggcggcggggtcgatacaaggggaacaggggcaaaaccaagagcagggtcaagaccctttaaagcgggagacggatgaaattacaaaacaataa

SEQ ID NO: 7948 - protein, 287 aa, Unknown
  Obtained from environmental sample
  DOMAIN (1)...(237): Domain of unknown function DUF20
  misc_feature (1)..(287): Xaa is any amino acid
MIPAYQYNLEQMSRRVLSMIPFTEPLTIKKLLADVDFSSMTRSAVREVTNAFGKGAYVIIYLIFLFMEKRSFAKKFDKFLSKSGNGAEVNAIIERINSDIRTYIGIKTLASCVTAAAGYLVFASVGLNFASFWTFLLFMLNYIPILGSIVATVLPAIFALMQYESLGPFFVVLFGVIIIQQAVGSIIEPRFMGDKLNLSPLVILLSLATWNLIWGIPGMLMCVPLTAIVIIIFSYFPQTRPIAEALSRNGDIRGIGVAAGSIQGEQGQNQEQGQDPLKRETDEITKQ

SEQ ID NO: 7949 - DNA, 366 bp, Unknown
  Obtained from environmental sample
  misc_feature (1)..(366): n is a, c, g, or t
ttgacgggaaggcccttgacgggtgtatttctacaagacttcctaccgggtaatgaaccggtaagggaatggttgaaacaacagacaccggaaagaaaaaaggcaataggagaggacattaaggcagtcgagttttcttggcctgttgggtatccacaagttactaaactggacaagaatttatgggaagtcaggacaaatttaccggatgacatttgtcgaattttctttacagtatggaagcgatatatggtgttgttacatggaattattaaaaagagccagaaaacgccgcaacaggacttagaccatgctaaaaaactaaggaataaagtaatggcaggagggataaacaatgaagaataa

SEQ ID NO: 7950 - protein, 121 aa, Unknown
  Obtained from environmental sample
  DOMAIN (58)...(112): Phage derived protein Gp49-like (DUF891)
  misc_feature (1)..(121): Xaa is any amino acid
MTGRPLTGVFLQDFLPGNEPVREWLKQQTPERKKAIGEDIKAVEFSWPVGYPQVTKLDKNLWEVRTNLPDDICRIFFTVWKRYMVLLHGIIKKSQKTPQQDLDHAKKLRNKVMAGGINNEE

SEQ ID NO: 7951 - DNA, 648 bp, Unknown
  Obtained from environmental sample
  misc_feature (1)..(648): n is a, c, g, or t
atggccgaggaaactttggccggaagggacttattatcgaaaccgccgcaccaacggcggaggaagcccgcgcgctgggtgagaagcttcattctatactgtcataaagggagcttgccgattaatttgaaagagacatttgaacaggcggtaaagggacgcgcttttgagtatgcggtaatacctgttgccggcattaacttttcacaggaactttacaatacatgcgcaacaaacgtatgcggaaactacaacaaatgttggtcttgtccgccggtcgttgggtcgctggaagcgcaaagggagaaaataacgtccttttcttccgcttttgtctttaccaccaaatcagaacttgaagattcttttgattatgaagggatgatgaaggcaggggaacagcataatcggcttaccgttgaaatacatgatcgctttggaagcagctaccctgtctacggcgcgggaagttgctcagtctgcaagacctgcgcctacccccagccatgcaggtttccagacagaaaaatttcttcaatcgaagcggcggggatcaatgtaacagaactcagccgacttggcggtatacgctataacaacgggcagaatacggttacttatttttcgatgatactgtttaaccagtag

SEQ ID NO: 7952 - protein, 215 aa, Unknown
  Obtained from environmental sample
  misc_feature (1)..(215): Xaa is any amino acid
MAEETLAGRDLLSKPPHQRRRKPARWVRSFILYCHKGSLPINLKETFEQAVKGRAFEYAVIPVAGINFSQELYNTCATNVCGNYNKCWSCPPVVGSLEAQREKITSFSSAFVFTTKSELEDSFDYEGMMKAGEQHNRLTVEIHDRFGSSYPVYGAGSCSVCKTCAYPQPCRFPDRKISSIEAAGINVTELSRLGGIRYNNGQNTVTYFSMILFNQ

SEQ ID NO: 7953 - DNA, 477 bp, Unknown
  Obtained from environmental sample
  misc_feature (1)..(477): n is a, c, g, or t
atgaaactatatcacggaagcaacgtagttgttgatacaccaagtctgaaattcagccgaatagagttggatttcggagctggtttctacacaacgaccaattacgagcaggcggtgctgttttctgaaaaaattgttgagcgaaaaaaaggcagtaaagttgtgaacatatatgattttgatgacgatgtcctgaatgaatttaaagttcttgaattttcggaacctgatataaaatggttggactttgtttccgcgcacagaaaatcttctccgccgcacggtgattacgatattataatcggacctgttgcgaatgacgatgttttcaggacgctatttctatactttacgggtggacttgatgccggtgaaacattgaataggttaaaaatcaagaaattgtttaatcaatatgcgtttaaaaccgatattgccctaaaacggttagaatttataaaaggagagtttatatga

SEQ ID NO: 7954 - protein, 158 aa, Unknown
  Obtained from environmental sample
  misc_feature (1)..(158): Xaa is any amino acid
MKLYHGSNVVVDTPSLKFSRIELDFGAGFYTTTNYEQAVLFSEKIVERKKGSKVVNIYDFDDDVLNEFKVLEFSEPDIKWLDFVSAHRKSSPPHGDYDIIIGPVANDDVFRTLFLYFTGGLDAGETLNRLKIKKLFNQYAFKTDIALKRLEFIKGEFI

SEQ ID NO: 7955 - DNA, 846 bp, Unknown
  Obtained from environmental sample
  misc_feature (1)..(846): n is a, c, g, or t
atgagtgacataaaaattgcgtgtattggcagcgggaacatgggttttgcccttatgaagggcattatggctataagcggcggcgcgaccaatgccaaaacgagcatcggctttaccgatgtttacgctgaaaaagccaaagccgcagccgccgcgttgaaagccggggttttcggttccaataacgaggctgttgaaaaagccgatttcgttttcctcgcggtcaaaccgcaaattctctctgaggtgctggccgggattgctccaattattcaaaagcgtttgagtgacggcagcgcgccattgctggtatcaatggcggcaggctggacgattcaaaaaatccaggtcgctattaacattggctcaacaatgccgtttctacaaattcctgttgcgagaataatgcccaatacaccggccttaatttctaaaggcatgatcgcccttgcggtatcacccgaagtctccggcgaaaaagccgctgcgttagaggaaatgctcaagggagccggtactgttgacaggatttctgaaaattattttaacgccataacgggcctttcaggttccggccccgcgtttgcgttcctgttcatcgaagcccttgccgacgggggagtcctcgcgggcctgcctagggacaaggctctgtgctacgcggcccagaccgtgctgggttccgcggcgatggttttggaaaacggcaagcaccccggcgaactgaaagacatggtcgcctctcccggcggcacaaccattgccggcgtcgccgcgcttgagtcaggagctttccgatccaccgcgataaaggccgtggaagccgcgtggaaaagggtcaaatga

SEQ ID NO: 7956 - protein, 281 aa, Unknown
  Obtained from environmental sample
  DOMAIN (5)...(268): NADP oxidoreductase coenzyme F420-dependent
  misc_feature (1)..(281): Xaa is any amino acid
MSDIKIACIGSGNMGFALMKGIMAISGGATNAKTSIGFTDVYAEKAKAAAAALKAGVFGSNNEAVEKADFVFLAVKPQILSEVLAGIAPIIQKRLSDGSAPLLVSMAAGWTIQKIQVAINIGSTMPFLQIPVARIMPNTPALISKGMIALAVSPEVSGEKAAALEEMLKGAGTVDRISENYFNAITGLSGSGPAFAFLFIEALADGGVLAGLPRDKALCYAAQTVLGSAAMVLENGKHPGELKDMVASPGGTTIAGVAALESGAFRSTAIKAVEAAWKRVK

SEQ ID NO: 7957 - DNA, 300 bp, Unknown
  Obtained from environmental sample
  misc_feature (1)..(300): n is a, c, g, or t
ttgaattcaatttcagagcatcaaaaaacggtttttagaggttccctagaatatatcggttctcagaacgattttgaactatacagatcacttactgatagaagcaaagaaatagaatgtttatttgtagaacgtacaaaacaactgctaaaagaaggcggggtagcaggcgttattttaccgagttctatgttaagtaacgagggaatttatacaaaaaccagagaaattattttacagtattttgatattgttgccattacacaactagtatccagttactattctaattgtggataa

SEQ ID NO: 7958 - protein, 99 aa, Unknown
  Obtained from environmental sample
  misc_feature (1)..(99): Xaa is any amino acid
MNSISEHQKTVFRGSLEYIGSQNDFELYRSLTDRSKEIECLFVERTKQLLKEGGVAGVILPSSMLSNEGIYTKTREIILQYFDIVAITQLVSSYYSNCG

SEQ ID NO: 7959 - DNA, 456 bp, Unknown
  Obtained from environmental sample
  misc_feature (1)..(456): n is a, c, g, or t
gtgatattcatgtttaccgccccccttgagaaatggaggagggctgaggtaactgagcggcggacaaaaatagattgggcgcatcagataaaaaagctggtaacggttgattttcctgatgcggagaaaattgtccttgttatggataatcttgacatacatactatgggatccctttataaggcgtttcctcctgaagaagcaaaacgactaagagacaaactcgaagttcattacacgccgaaacatgggagctggcttaatatggcggaaatagaaaacaacgtgcttataaaccatggcctttcaacacggattcccacaattgagcagatgaaaaatgaagtggctgcatgggccgaggcccggaacaaaagcgcaggtaaaatcaattggagatttaccacagatgacgcacggattaaacttaaacgcctttatccacaattagaatag

SEQ ID NO: 7960 - protein, 151 aa, Unknown
  Obtained from environmental sample
  misc_feature (1)..(151): Xaa is any amino acid
MIFMFTAPLEKWRRAEVTERRTKIDWAHQIKKLVTVDFPDAEKIVLVMDNLDIHTMGSLYKAFPPEEAKRLRDKLEVHYTPKHGSWLNMAEIENNVLINHGLSTRIPTIEQMKNEVAAWAEARNKSAGKINWRFTTDDARIKLKRLYPQLE

SEQ ID NO: 7961 - DNA, 858 bp, Unknown
  Obtained from environmental sample
  misc_feature (1)..(858): n is a, c, g, or t
ttggaaaatggggtgattgtttccccgggtaaaaaagcatgttccggcaaattgggaatcagcggtgaaaaaataacttctccctgcggctctgtaaaaatcaatttaaaggattcatttgtttatccttctcttattaatacgcatgatcacttgcagggaaattaccgtccgcccgtaggtccccccccgggaagcttttaccttacatggctgccctgggataacgacttaaaagcgtctgacacattcaaagaacgctcccagttgacgagggaagatctttacgccctttcaggctataaatgtttgttttcgggcgttactacggtgaacgatcattttccgcataaatttaacagtcaaatattgcccactttgccaatcagggcgattcaggattattgtatcgagcatgaatgttcgtcatacgatcttaaatggggcgacggcatagaaattgagcatgaacgcgccgtaaaaaacaagtggccgtttattacccatctttccgaaggttttgacaaagaggcaatgcacggcgtagagaaactggaaagcctgaaggctctggacaaccattgtttgtttatccattgtataggattcagcgacgaggacattaagaaagtcgccaaggccggggcgagcgtttcatggtgcggtttttccaatatgtttatgtttaacgtaacggctaaagtacggaaaatgcttaaggcgggagtaaatgttactatagggacagattcttccgcgacaggctccgccaatcttcttgcggaaattaaatatgacagggaattgtacagaaaactttacggtgaagatcttgaagcggaaaaatatttcaaatga

SEQ ID NO: 7962 - protein, 285 aa, Unknown
  Obtained from environmental sample
  misc_feature (1)..(285): Xaa is any amino acid
MENGVIVSPGKKACSGKLGISGEKITSPCGSVKINLKDSFVYPSLINTHDHLQGNYRPPVGPPPGSFYLTWLPWDNDLKASDTFKERSQLTREDLYALSGYKCLFSGVTTVNDHFPHKFNSQILPTLPIRAIQDYCIEHECSSYDLKWGDGIEIEHERAVKNKWPFITHLSEGFDKEAMHGVEKLESLKALDNHCLFIHCIGFSDEDIKKVAKAGASVSWCGFSNMFMFNVTAKVRKMLKAGVNVTIGTDSSATGSANLLAEIKYDRELYRKLYGEDLEAEKYFK

SEQ ID NO: 7963 - DNA, 507 bp, Unknown
  Obtained from environmental sample
  misc_feature (1)..(507): n is a, c, g, or t
atggtccggactatagcagattggcataaagaatactttcccatggttttccggcgctgtaagtatatcctccgtaaaagcgcgtatgccccggaagacgcggctcaggatgtttttgtcaatcttcttacctgtaatgagaaaccggacgatatagcgaagataaaaaatgttgaaggcctgttatggactattgctaccaatgtgtgccttaacaagctcaaggcaaaaaaatggaaaccgggagaagatctcaccgctaatgaagaagaattgtatcctgccgccggtgatgactataaacaggtagatgataatttgcttttggaagccattttggaagaagaatcggaagaagtcagaaactatgtctatatgcattattgcgacgggatggggtatgtagaaatagcaaaagctgttggcaagtcaaaaacatgggtggggaaaaaacttgccggctttagggaaagagcgcgaaaggaattggaggatgtcgtanaatga

SEQ ID NO: 7964 - protein, 168 aa, Unknown
  Obtained from environmental sample
  DOMAIN (8)...(80): Sigma-70 region 2
  misc_feature (1)..(168): Xaa is any amino acid
MVRTIADWHKEYFPMVFRRCKYILRKSAYAPEDAAQDVFVNLLTCNEKPDDIAKIKNVEGLLWTIATNVCLNKLKAKKWKPGEDLTANEEELYPAAGDDYKQVDDNLLLEAILEEESEEVRNYVYMHYCDGMGYVEIAKAVGKSKTWVGKKLAGFRERARKELEDVVX

SEQ ID NO: 7965 - DNA, 345 bp, Unknown
  Obtained from environmental sample
  misc_feature (1)..(345): n is a, c, g, or t
atgtgcgacaaatccgtcttggacgagataacgtcaagggtctgcgtcgccgccaaagaggttttgggcgacaagttggagaaggtaatccttttcggctcatacgcgaggggtgattacgacgaggagtcggacatagacatcatgataatatccgacatcgcgctggaggaggcgaacgagacgcgcaggaagattcatgcccaaacgggagacttggatatggaatataatgttattgtcagtttaaggatggcgtgtagcgaaatatttcacaaatgtaaggatgttaccggtttttacataaacgtccagaaagatggggtattattgtatgccgcctaa

SEQ ID NO: 7966 - protein, 114 aa, Unknown
  Obtained from environmental sample
  DOMAIN (11)...(111): Nucleotidyltransferase domain
  misc_feature (1)..(114): Xaa is any amino acid
MCDKSVLDEITSRVCVAAKEVLGDKLEKVILFGSYARGDYDEESDIDIMIISDIALEEANETRRKIHAQTGDLDMEYNVIVSLRMACSEIFHKCKDVTGFYINVQKDGVLLYAA

SEQ ID NO: 7967 - DNA, 492 bp, Unknown
  Obtained from environmental sample
  misc_feature (1)..(492): n is a, c, g, or t
ttgcagaggatcggcatcgccctggcgcttgcccagggctgcgagctgctcattgccgacgagcctacgacggcgttagatgtcaccatacagaaacagattgtggaactgttaaaaacattacgccgcacccgcggtatttcgatcatcttcataagccacgacatagacctggtcgccgagatctcggacaggatcatggtcatgtacggcggaatggagatggaggcggcgccgtcagaggagattatcaacaatccgaagcacccctacacaaaggctctgctcgcctcctcgccgcgcttcggcagccactactcgctggggcggctctccgccatccccggcaaggtaagcgatcccgcaaccgagattacaggctgccccttcgccccgcgctgttcgcaggccgtggaaaaatgccatcaaacaacgccgccgctttcaaaaattgaaggacatgaggtggggtgctggaagccgagcgaataa

SEQ ID NO: 7968 - protein, 163 aa, Unknown
  Obtained from environmental sample
  SIGNAL (1)...(19)
  DOMAIN (1)...(72): ABC transporter
  misc_feature (1)..(163): Xaa is any amino acid
MQRIGIALALAQGCELLIADEPTTALDVTIQKQIVELLKTLRRTRGISIIFISHDIDLVAEISDRIMVMYGGMEMEAAPSEEIINNPKHPYTKALLASSPRFGSHYSLGRLSAIPGKVSDPATEITGCPFAPRCSQAVEKCHQTTPPLSKIEGHEVGCWKPSE

SEQ ID NO: 7969 - DNA, 708 bp, Unknown
  Obtained from environmental sample
  misc_feature (1)..(708): n is a, c, g, or t
atgaaaaggatgataaatatttataaaacttgcgtggcgacggctttggctcgggcgttgacttacaggcttaatttcctgttttcaatgttcataacgctgtgtttcaatttgcttttccctttggcgacgattctcatttacagatcaggcgcggcttttccgggatggaatttttacgaagtgttattaatacaatctatttttaccttatcactcgggctggcgtgcgtattgttcagtaatgtgttatggtcaacaatgcagcacatacgcgagggcagttttgaggttgtccttctgcgtcctgtaaacccgctcttttttctgatagcaaccaattttgacaccgggagtttcgggctgttaattggcggcggcgtaatgttcggtatagcgatatcacacacaggaattatttcgcttgccgccgcagcgcagtttttattgctgttcgggggagggttcgcggtaatgaccggttttcaaatgattatggctgcgacttcgttcaagtgggtgggaaattcgcgtctgcctgacattttagacagtatactgtcattcggaaaataccctgtgtcaatatttccgcgggcaataaaaacgctcgtatcatttattattcctgttggcatgataggatttttccccgcaagcgcgctgttggggcggcttgatccggtgtgtaatgctcggccgatctga

SEQ ID NO: 7970 - protein, 235 aa, Unknown
  Obtained from environmental sample
  DOMAIN (28)...(232): Protein of unknown function (DUF990)
  misc_feature (1)..(235): Xaa is any amino acid
MKRMINIYKTCVATALARALTYRLNFLFSMFITLCFNLLFPLATILIYRSGAAFPGWNFYEVLLIQSIFTLSLGLACVLFSNVLWSTMQHIREGSFEVVLLRPVNPLFFLIATNFDTGSFGLLIGGGVMFGIAISHTGIISLAAAAQFLLLFGGGFAVMTGFQMIMAATSFKWVGNSRLPDILDSILSFGKYPVSIFPRAIKTLVSFIIPVGMIGFFPASALLGRLDPVCNARPI

SEQ ID NO: 7971 - DNA, 765 bp, Unknown
  Obtained from environmental sample
  misc_feature (1)..(765): n is a, c, g, or t
atggatgtttcggtaatcaaggatatgccgccgggaaggaagcccattaaaacccatcttgccaaagaatcaaatgaaaagaaagtttatgactatgtcaggaaggaacttaaacaaggccggcaggcatattttgtttatccgttaatcgaaggcggagacgagataaaagacgccgtctcaatggcggaaaggctcgcgaaaagagtgtttccaaaatacaaaacggcgcttattcattcaaaattgcccgaagacgaaaaaaggcagacaatggacgattttcgcaagggaaaaataaaaatccttgccgccacaagcgttgtggaagttggtgtagacgtccctaacgcgacttgcatggtaatcgaacatgccgagcgtttcggtctttccgctctgcaccagcttagaggacgcgtagggcgcgggcaggagcaatcttattgtttccttgtctactcggacgaatatacggaagagggaaagacgcgtctgttggtaatgatggagaacagcgacggttttgtaatcgcgcaggaagatttgaaattgcgaggtcccggtcttattacaggaaccgagcagtcggggtacatgttttttggaatagccgaccctgtccgcgacatagaacagcttgagcgcgcccgcgaggacgcgttttcgattctggagagcgatccaagtttggtattggagaaccatcaaattatagcgagggtgcttgaggaagcgcctccgtttggggaggttgttctttga

SEQ ID NO: 7972 - protein, 254 aa, Unknown
  Obtained from environmental sample
  DOMAIN (68)...(145): Helicase conserved C-terminal domain
  misc_feature (1)..(254): Xaa is any amino acid
MDVSVIKDMPPGRKPIKTHLAKESNEKKVYDYVRKELKQGRQAYFVYPLIEGGDEIKDAVSMAERLAKRVFPKYKTALIHSKLPEDEKRQTMDDFRKGKIKILAATSVVEVGVDVPNATCMVIEHAERFGLSALHQLRGRVGRGQEQSYCFLVYSDEYTEEGKTRLLVMMENSDGFVIAQEDLKLRGPGLITGTEQSGYMFFGIADPVRDIEQLERAREDAFSILESDPSLVLENHQIIARVLEEAPPFGEVVL

SEQ ID NO: 7973 - DNA, 891 bp, Unknown
  Obtained from environmental sample
  misc_feature (1)..(891): n is a, c, g, or t
gtggtgtgccacgagatagtggaaacaagccgcgtgttcgccagaaccgtggcggcggtcaaacctgagtggcttgaggagttggccgccgatttttgcaaacggacatttgaagcgccgtttttcgacgcggagagcgggtgcgtgcgggctgtcgagcgcgttatgctcttcggtcttccgctggcggtcaagaaaaacgcattgtacagcaaagcggagccggaagcggccacggaaatctttatcagggacggattggttgaagagaatcttgtatgccatcacaaattttatgaccataacaagaaactcaaacaaaaaatcctttcatacgaagcgaagctacggacgagaggttattacaagggggacgtggcgatatttgatttctacaagaagcggctgcatatcgcggcatctatacacgatctaaacaaggcgataaaggccgccgggagcgataaattcctgtatatgcgcgaggaggacatcatagaggaatcaatacctaaagaagctcacgcttatcccgaccacgtcaacatcggcaatcagaatttcgcgctgaaatacgcttttgatccgggtaatgaaaacgacggagttacactagcgctgccgcaaaaggttttgccgtttatcgcanaggaaacaatagggtggttgatcccgccgttatggccggcgcaaataaagagcttattgcaacagttgccgcgcagtcaacgaaaggtattcgtacctgtaggcgaagcggcgcagaagcttgcggataacatcgttgcgccccctgctacgcacgaatcgttcgcggcggaattgtcgtcggctataaaaggatttacggcattgatattgacccggaattattggattccgatagactga

SEQ ID NO: 7974 - protein, 296 aa, Unknown
  Obtained from environmental sample
  misc_feature (1)..(296): Xaa is any amino acid
MVCHEIVETSRVFARTVAAVKPEWLEELAADFCKRTFEAPFFDAESGCVRAVERVMLFGLPLAVKKNALYSKAEPEAATEIFIRDGLVEENLVCHHKFYDHNKKLKQKILSYEAKLRTRGYYKGDVAIFDFYKKRLHIAASIHDLNKAIKAAGSDKFLYMREEDIIEESIPKEAHAYPDHVNIGNQNFALKYAFDPGNENDGVTLALPQKVLPFIAXETIGWLIPPLWPAQIKSLLQQLPRSQRKVFVPVGEAAQKLADNIVAPPATHESFAAELSSAIKGFTALILTRNYWIPID

SEQ ID NO: 7975 - DNA, 885 bp, Unknown
  Obtained from environmental sample
  misc_feature (1)..(885): n is a, c, g, or t
atgctcggcaaagatgaagtattaaaagggctggaaaaaggcattttcttccgtcaggaagacggctctgtggcggtcgatttaagcgaagaaaaactggataaaaaaatacttttacgaagcgacggcacgtcgatttatattactcaggatttcggaacggcgataaaccgttataaagactggcagtttgacgaaatgatctatgttgtaggctccgagcaaaattatcattttaaggttctttttattttgcttgaaaaattgggctattcgtgggcaaaaaatcttcatcatctgtcctacggcatggtcaatcttcccgaaggaaaaatgaaaagccgcgaaggaacggtagttgatgccgacgatttaatcgactccctgcgcgatatggcgctcgctgaaatacgcgagaagggcagggaagaggaagtaggagacccgcagaccgtggcggaaaaaatagcgcttggcgcactgcattatttcctgttacagcccaaccccgttaaagatatgcttttcgacccgaaagaatcgctttcatttacaggaaacacaggaccttatttgcaatacatgggagcgcgtatttcttcgatgttacgcaaagcggagaaggacagcggtggcggcgcagtaaacagcggcgcggattttactctccttgcaaccgatcccgaatgggagcttataaaatctctcgccgcgtatcctgcgaaggtaagcgaagccgcgcagaccctcgatccttccaatttaactggtttcctttacgaagtttcaaaggctttcagccgtttttaccatgaatgtccgatcctttactgcgaagaccccgctctatccaaagcaaggcttgaaattaagcagggncggtaa

SEQ ID NO: 7976 - protein, 294 aa, Unknown
  Obtained from environmental sample
  DOMAIN (1)...(178): tRNA synthetases class I (R)
  misc_feature (1)..(294): Xaa is any amino acid
MLGKDEVLKGLEKGIFFRQEDGSVAVDLSEEKLDKKILLRSDGTSIYITQDFGTAINRYKDWQFDEMIYVVGSEQNYHFKVLFILLEKLGYSWAKNLHHLSYGMVNLPEGKMKSREGTVVDADDLIDSLRDMALAEIREKGREEEVGDPQTVAEKIALGALHYFLLQPNPVKDMLFDPKESLSFTGNTGPYLQYMGARISSMLRKAEKDSGGGAVNSGADFTLLATDPEWELIKSLAAYPAKVSEAAQTLDPSNLTGFLYEVSKAFSRFYHECPILYCEDPALSKARLEIKQGR

SEQ ID NO: 7977 - DNA, 354 bp, Unknown
  Obtained from environmental sample
  misc_feature (1)..(354): n is a, c, g, or t
atgacagattggccgagaccacatactttactttccatcgataccgaaagccttgccgtttataaccttgttcttgaagttactcgaaggcacgatgaaacaaaacccgattttcttacccgtatactcgaaacaggttcttttgacgcaaaaacattaaaagtagcggatcgtatatccaatatgatttctctcggttttgtaaacaatctcgcctttgttgagcgttatataaacgaaactgaaaaatatctttttccccttgcggcgcaggtaaatcattatatgctgatagaacttacagaccttgtaaaaataaaacgcaaatatctggaagacttgaaacaacaatga

SEQ ID NO: 7978 - protein, 117 aa, Unknown
  Obtained from environmental sample
  misc_feature (1)..(117): Xaa is any amino acid
MTDWPRPHTLLSIDTESLAVYNLVLEVTRRHDETKPDFLTRILETGSFDAKTLKVADRISNMISLGFVNNLAFVERYINETEKYLFPLAAQVNHYMLIELTDLVKIKRKYLEDLKQQ

SEQ ID NO: 7979 - DNA, 627 bp, Unknown
  Obtained from environmental sample
  misc_feature (1)..(627): n is a, c, g, or t
atgacaaaaccaccttctctttctgaaatacactctccccaagatataaaaaaaatgacgatccgagaattaaacgctctggcgcaggaaataagggagtatattgtatcaacggtttcgagtaacggggggcatttatcttccaacctcggaatagtggagcttacaatcgcccttcatcgggtatttaattcgccctccgataaaattgtctgggacgtggggcatcagtgttacgcgcataaactgataacaggacgctatgacgcattttcatcgctccgcaaaaaagggggaatagccggctttccaaagcgaagcgaaaacccgcacgacgcttttaacacggggcacgcctctacgtcaatttccgccgctctggggcttttggcggcggacaggatacagggcggcaaatcccacgccatagcggttataggagacggcgctcttacaggcggcatggcttatgaagcgctgtcccactgcggacatcttgngcttccgttaatcgtaatattaaacgacaataaaatgtccattaaccgaaatgtcggcggactttcaaaatatttaagcccggctttcaatgaaaaagaaatatcaaaccctccgcaggctttttga

SEQ ID NO: 7980 - protein, 208 aa, Unknown
  Obtained from environmental sample
  misc_feature (1)..(208): Xaa is any amino acid
MTKPPSLSEIHSPQDIKKMTIRELNALAQEIREYIVSTVSSNGGHLSSNLGIVELTIALHRVFNSPSDKIVWDVGHQCYAHKLITGRYDAFSSLRKKGGIAGFPKRSENPHDAFNTGHASTSISAALGLLAADRIQGGKSHAIAVIGDGALTGGMAYEALSHCGHLXLPLIVILNDNKMSINRNVGGLSKYLSPAFNEKEISNPPQAF

SEQ ID NO: 7981 - DNA, 675 bp, Unknown
  Obtained from environmental sample
  misc_feature (1)..(675): n is a, c, g, or t
atgcaacaaacacttttcggcaaaaccggattaaccgtaagccgcacaggtttcggctgtatcccaatccagcgtatttcctacgaagaaagtaccgctctcttgcagcatgcctacgataatggcgtaactttatatgacaccgccaacggatacacaaccagcgaagacagaataggaaccgcgcttcatcatgtgcgcgataaaattgttttatgcacaaagtccggcgcgcagacgccggacagtttaatggaacatatcgagaacagcctgaaaatgctgcgcacggattatatcgacgttttccagcttcataacccgtcctttgtgccgcgccccgaaggggacgacggtctttacgccgcagcagtaaaagcgaaagaacagggtaaaatccgccgcataggaattaccgcccacagcaaagataacgcgaaaacggcagttctgtccggtttatacgataccctgcagtaccctctctcttacctgtcctcaagtgaagaattggcgcttatcgatctttgccgcgagcgtaacatcgggctgcttgccatgaaaagtttgtgcggcggattgattggcaacgccaaagccgcgttcgcttttctgcggcagtatgagaatgtaattcccatctgggggaaatgcagaaatgagcgaattagatga

SEQ ID NO: 7982 - protein, 224 aa, Unknown
  Obtained from environmental sample
  DOMAIN (7)...(210): Aldo/keto reductase family
  misc_feature (1)..(224): Xaa is any amino acid
MQQTLFGKTGLTVSRTGFGCIPIQRISYEESTALLQHAYDNGVTLYDTANGYTTSEDRIGTALHHVRDKIVLCTKSGAQTPDSLMEHIENSLKMLRTDYIDVFQLHNPSFVPRPEGDDGLYAAAVKAKEQGKIRRIGITAHSKDNAKTAVLSGLYDTLQYPLSYLSSSEELALIDLCRERNIGLLAMKSLCGGLIGNAKAAFAFLRQYENVIPIWGKCRNERIR

SEQ ID NO: 7983 - DNA, 894 bp, Unknown
  Obtained from environmental sample
  misc_feature (1)..(894): n is a, c, g, or t
ttggccgagtacgtggaacctgtattgtcagctaataaaaagtccgttgaaattaccataaccgcgacaattgtcagccgcgataaaaaaagcggcggtgttattcgtatgcgtctgcttgctccagacggaaactgcgctgctgagagttcagtttcctttaattgcggcggaaaagaagaaaccacggtgaaacaaactttgcgtattcaaaaccccgctctttggtcagcggaaaagccggatttgtaccgcgcgtttgtttgtcttgaacgggaaggtggggcggtggacccgcctatagaagtcaatttcggcatccgtactgtggagattgcgtataacaagggaatgaccgtaaatggagagaaagtaaaactgaaaggcgtgtgcctgcaccatgacgggggcataaccggttccgcgtactatgacgcggtttggcggagacggttgaacatattaaaaagtatcggctgtaacgcgataaggacaagccacaatccgcctgcggaagaatttttagatttatgtgacgagatgggattttatgtgatagacgaatgttttgacaaatggaagagcggctattacgcctctcattttgacgctgacgtacagcgcgatttgacggattttattctgcgtgacagaaaccacccgtgtatcattatgtggagcatcggtaacgaagtggaaaaacagggcgaggacagtatgcttgaaaatacaaaaaaattaaccgccatcgtccacagtcttgattcgcgtcccgtaacctgtgcccttgcccctcatgcgattccgcgtagtttggtgaacgagccgcctgaagagcttgccnaaattaacaaaaaaataaccaaggatgttgatatatttgggtcttattaa

SEQ ID NO: 7984 - protein, 297 aa, Unknown
  Obtained from environmental sample
  DOMAIN (5)...(108): Glycosyl hydrolases family 2, immunoglobulin-like beta-sandwich domain
  misc_feature (1)..(297): Xaa is any amino acid
MAEYVEPVLSANKKSVEITITATIVSRDKKSGGVIRMRLLAPDGNCAAESSVSFNCGGKEETTVKQTLRIQNPALWSAEKPDLYRAFVCLEREGGAVDPPIEVNFGIRTVEIAYNKGMTVNGEKVKLKGVCLHHDGGITGSAYYDAVWRRRLNILKSIGCNAIRTSHNPPAEEFLDLCDEMGFYVIDECFDKWKSGYYASHFDADVQRDLTDFILRDRNHPCIIMWSIGNEVEKQGEDSMLENTKKLTAIVHSLDSRPVTCALAPHAIPRSLVNEPPEELAXINKKITKDVDIFGSY

SEQ ID NO: 7985 - DNA, 957 bp, Unknown
  Obtained from environmental sample
  misc_feature (1)..(957): n is a, c, g, or t
atgacagattggccgagaggcaccggcagtggcggctacgcagtgtacaacaatgctgctggcgcgctgaccatctctgactgtacggtttcggtaacaacaggcagggccgtacacaaccaagccggcggcgcggtaaccatttccggcggcacgtattcggcaacatcgggcagagcggtacacaaccaagccacaggcacagtaactatttccggcggcacgtattcggtgacaacaggcgaagcagcgtacaactatggagccggcaagataattgtgtcgggaacggcgaagcttacatcggcaaactcaacttccggtacctcggctggcggtacgattgttatagcatccagcggaagcactactgccgagcggctagtcattgaaggcggcatagtggaaaatactgccagctcaaacgcaagggcggtgttcaacggttcaaccggagcgataactatttccggcggtgatgtttctgccgcaaattacgcaatatacaattattccacaggggcggttacgatttccggcggcacggtttcggcaaccgggacaggtggcaatgcggtgtataactatagcaccggtaaaataaccgtgtcgggaacaacaacgaaggtaacaacgccaaacacatctgcctctaatgggacgatttatcttagtagcgggaccgcaactgatgtccggcttgaaatctcaggcggtacggtagaaaacaccagcaccaccgcaaacaccaatgcgatttacaacgattctttcggggtggttacgatttcaggcggtacggtttcggcggcgggtagggctatttataatatcaattccagcgcgataaatctgggcggcaacccaaccataacagggcaaattacccacataacaggcaatgtaagcgcagtaagctgttttttcccccaggcgcacaaaaaattatacgcttga

SEQ ID NO: 7986 - protein, 318 aa, Unknown
  Obtained from environmental sample
  misc_feature (1)..(318): Xaa is any amino acid
MTDWPRGTGSGGYAVYNNAAGALTISDCTVSVTTGRAVHNQAGGAVTISGGTYSATSGRAVHNQATGTVTISGGTYSVTTGEAAYNYGAGKIIVSGTAKLTSANSTSGTSAGGTIVIASSGSTTAERLVIEGGIVENTASSNARAVFNGSTGAITISGGDVSAANYAIYNYSTGAVTISGGTVSATGTGGNAVYNYSTGKITVSGTTTKVTTPNTSASNGTIYLSSGTATDVRLEISGGTVENTSTTANTNAIYNDSFGVVTISGGTVSAAGRAIYNINSSAINLGGNPTITGQITHITGNVSAVSCFFPQAHKKLYA

SEQ ID NO: 7987 - DNA, 606 bp, Unknown
  Obtained from environmental sample
  misc_feature (1)..(606): n is a, c, g, or t
gtgctcgtcgatcagccgtcggtgggcgatacaatatcgatactgccggggctgcgcgagcgctacgagctgcaccacggtatacaaatcaaggacagcgcgctggtagccgcggccgtcctctccgaccgctacatctcggagcgtttcctgccggacaaggcgatagacctgatcgacgaggcggcggcgaaactgcggacggagcgcgactcgagccccgtggagcttgacgaggcgatgcggcggcagatgcggctcgaaatagagatcgaggggctgaaaaaggagaacgacaaggggtctaaggagaagctggcaaaactgcaagaggagctatccgccgtgcgcgaaaccgcgtcgtccctcaaaagccgctgggagacacagaaatcacaatccgacagactgcaaaagatcagggaggagatagacgcggcgagggtcgagctggagcgggctgagcgcgagtacaacctccgagccgccgcgacgctgcgccacggacgcataccggagcttgagcggaaaagggcactcatcgaggcggagatcaaagactccggcgacgggacacgccttttaaaagaggaggtgggcgaatag

SEQ ID NO: 7988 - protein, 201 aa, Unknown
  Obtained from environmental sample
  misc_feature (1)..(201): Xaa is any amino acid
MLVDQPSVGDTISILPGLRERYELHHGIQIKDSALVAAAVLSDRYISERFLPDKAIDLIDEAAAKLRTERDSSPVELDEAMRRQMRLEIEIEGLKKENDKGSKEKLAKLQEELSAVRETASSLKSRWETQKSQSDRLQKIREEIDAARVELERAEREYNLRAAATLRHGRIPELERKRALIEAEIKDSGDGTRLLKEEVGE

SEQ ID NO: 7989 - DNA, 951 bp, Unknown
  Obtained from environmental sample
  misc_feature (1)..(951): n is a, c, g, or t
gtggccttcattgaacgtccgagatttttttgttccctcggcggagccttatccacgctggaagcgctgccggaaaccatacctatcctccactgcgccgtgggctgcgccggcagtatcgcgtgggcgcaaaacggcggcagcgcgctgcaggtcggcggatactgcggcggacttaccgttcccagttccaatgtaggcgaacatgacgttgtgttcggcggtactgaccgtttacgcgaacagataaattctactcttgaactgatggaaggacggctgtttgttgtaataaccggatgcgtaaccgaaattatcggggacgacatccgttctgtaacgggcgaattttccgacagagccgatattgtcgcggccaatacgggcggatttaaggggaattcctatttgggctacgatattgttatgtcagaaatagccaagcgttatgtgaaaaaaggaaccgtgaaaaaaaataaagcggttaatattctgggcgttgttccctacatggactgtttttggcgcggaaaccttattggcgtcaggcgcctgctggaaaaaataggagtggaggcaaacaccttcttcacggacgaggacacattggacggccttaaaaattcatcttcagccgaattaaacatcgttctttcggacgtgtacggactggaaaccgcaaaggcatacgaggcgacgcataacattccctacattacgacgaccctgcccgtggggccgaccgcaagcgcgctgctcttacggtctgtcgcanaggctttaaaactggagattgacgtcgaggcgatcatcgaagcggaatcccgccgttattataaataccttacgcccctggttgacgtgtacaacgacgccgatatgcaaaagtattctgtcattgtcggagacgtaaactatgccgtggcgttaacccgcttcctgacccgatga

SEQ ID NO: 7990 - protein, 316 aa, Unknown
  Obtained from environmental sample
  DOMAIN (7)...(315): Nitrogenase component 1 type Oxidoreductase
  misc_feature (1)..(316): Xaa is any amino acid
MAFIERPRFFCSLGGALSTLEALPETIPILHCAVGCAGSIAWAQNGGSALQVGGYCGGLTVPSSNVGEHDVVFGGTDRLREQINSTLELMEGRLFVVITGCVTEIIGDDIRSVTGEFSDRADIVAANTGGFKGNSYLGYDIVMSEIAKRYVKKGTVKKNKAVNILGVVPYMDCFWRGNLIGVRRLLEKIGVEANTFFTDEDTLDGLKNSSSAELNIVLSDVYGLETAKAYEATHNIPYITTTLPVGPTASALLLRSVAXALKLEIDVEAIIEAESRRYYKYLTPLVDVYNDADMQKYSVIVGDVNYAVALTRFLTR

SEQ ID NO: 7991 - DNA, 492 bp, Unknown
  Obtained from environmental sample
  misc_feature (1)..(492): n is a, c, g, or t
atggattatgttaccggtcaaattacagaatacgctctgctctgcgcggataacggcgcggacgttatttncatcgccgacccgacggcgaccggggaaatcntgggccccaaattttttgacgaatacgcggttccgtatttaaacaaactggcccaggcaattaaaacgacagggaaacaggtaataatacacatctgcggcgacgtaagcatggttaaatcgggactcgcgaaactggattgcgacgcgctcagcgtggactctgttgtcaacttaagaaaaataaaagatgaattgggcggcatagccgttatgggcaatgtcagcacatatcttttacaatttggaaaagaagacagaatttcggaaacaacggcaaatcttgtgaaacagggtattgacatcattgctccggcgtgcggattaagcacatccacccccatcgccaatatcaaggcgctgacaaaaacggttgtttcgggcggatga

SEQ ID NO: 7992 - protein, 163 aa, Unknown
  Obtained from environmental sample
  misc_feature (1)..(163): Xaa is any amino acid
MDYVTGQITEYALLCADNGADVIXIADPTATGEIXGPKFFDEYAVPYLNKLAQAIKTTGKQVIIHICGDVSMVKSGLAKLDCDALSVDSVVNLRKIKDELGGIAVMGNVSTYLLQFGKEDRISETTANLVKQGIDIIAPACGLSTSTPIANIKALTKTVVSGG

SEQ ID NO: 7993 - DNA, 534 bp, Unknown
  Obtained from environmental sample
  misc_feature (1)..(534): n is a, c, g, or t
ttgttacagagcatctgctggaacaaggccacaaaagaatccgcctttatttacaatgacagggtaagcgccgcttacgagcggagaaagggataccgcgcggctctgaacgccgccggcatcggcaatgatccggaactggaaatagcgtataacgatgaagaagggcttgcatatccgggttatatttttaccaaacaactgcttgaaaagccggaactgggtgtcaccgccattttttactttaacgatgatcttgccatacagggcatgacagccgcgcaaagtcttaatgtggaaattccccgcagtctttccatcgcgggctacgacgacattccccgttcccgtctgaacggcgtgcggctgacaaccgtttcgcatcccaaaaagctgatcggcgcgtgggcggcaacattgctgcaggaacaattcgagcataccgacaccaatcccatttaccgtaaaatcaccgtacactcgtccatggtttacagggatacggtggcggaaccgaaatcaaataacaaataa

SEQ ID NO: 7994 - protein, 177 aa, Unknown
  Obtained from environmental sample
  misc_feature (1)..(177): Xaa is any amino acid
MLQSICWNKATKESAFIYNDRVSAAYERRKGYRAALNAAGIGNDPELEIAYNDEEGLAYPGYIFTKQLLEKPELGVTAIFYFNDDLAIQGMTAAQSLNVEIPRSLSIAGYDDIPRSRLNGVRLTTVSHPKKLIGAWAATLLQEQFEHTDTNPIYRKITVHSSMVYRDTVAEPKSNNK

SEQ ID NO: 7995 - DNA, 594 bp, Unknown
  Obtained from environmental sample
  misc_feature (1)..(594): n is a, c, g, or t
ttgtttttggctgtaaaactcagaattcaggacttaacaaaagtcttcaataaacaaaaacaggaagttctccacgggcttaactttacagtgaacgacggtgagtttctttccatacttggaccttccggatgcggtaaaacaactattttacgaatcatgattggactattggcgccgacatcggggcaaattttcaaagacgatattgatataaccaatgtaatcgcttcaaagcgcaatatgggcatcgtctttcagaactatgcccttttccagaacatgagcgtcatgggcaatgtggaatacgcgttgaaattcaacaaagaacttaaatcacattcccgtgaaatcgctgaaaacatcattgagcaggtcggcttaaaagaccatatcaacaaaaagccttacaggctctcaggcggccagcagcaacgggtggcaatcgcgcggacgttagcctgtcagcctgagataattctttttgacgaacctatgtccgcgctggacgccgcccatgcgcttcagcttcgcgaagaaataaagcggatacagacacaattcagatncaccatgatctacatcaccccatga

SEQ ID NO: 7996 - protein, 197 aa, Unknown
  Obtained from environmental sample
  DOMAIN (34)...(197): ABC transporter
  misc_feature (1)..(197): Xaa is any amino acid
MFLAVKLRIQDLTKVFNKQKQEVLHGLNFTVNDGEFLSILGPSGCGKTTILRIMIGLLAPTSGQIFKDDIDITNVIASKRNMGIVFQNYALFQNMSVMGNVEYALKFNKELKSHSREIAENIIEQVGLKDHINKKPYRLSGGQQQRVAIARTLACQPEIILFDEPMSALDAAHALQLREEIKRIQTQFRXTMIYITP

SEQ ID NO: 7997 - DNA, 723 bp, Unknown
  Obtained from environmental sample
  misc_feature (1)..(723): n is a, c, g, or t
ttgcgttatcatcgctcttcctgttgtggtttttatacttcttcttttattaaaagttatcctgtggatatgggattttcacttcgtaatgtaacaaaaaccattaatatgggagcgaggcgctaccttttaaactccattactgtcgcgattattgtctcttttttgggaacggcaatttcatggcttaccgcgtattttacagcgcgaactccgggcaattcttcgcgcattattcacctgatttccataaccacgcttgccattccgggaatggtacttggtatttcttatgtgctcttttttaaaggaacatttatttacggcggccttgccattttgatcctggtaaacattattcacttcatggcctccccgtatcttatggcatataactctttgggaaaattaaacgtgaaccttgaggacgtaggccgtacattgggcgtaggacgtttccgcattattcgtgatgtgataattccccagactaaatttacgttgctggaaatgttttcttacttttttgtcaattccatgatcaccatatccgcggtatcatttctaaatacggtacggaatcgtccggtatcacttatgattacgcaatttgaagcccagctctttcttgagggggcggcatttgtttcagttcttattcttgtcagtaatttaattgtcaaatgctctgtacacttgattacaaagctcaacaagggataa

SEQ ID NO: 7998 - protein, 240 aa, Unknown
  Obtained from environmental sample
  DOMAIN (43)...(236): Binding-protein-dependent transport system inner membrane component
  misc_feature (1)..(240): Xaa is any amino acid
MRYHRSSCCGFYTSSFIKSYPVDMGFSLRNVTKTINMGARRYLLNSITVAIIVSFLGTAISWLTAYFTARTPGNSSRIIHLISITTLAIPGMVLGISYVLFFKGTFIYGGLAILILVNIIHFMASPYLMAYNSLGKLNVNLEDVGRTLGVGRFRIIRDVIIPQTKFTLLEMFSYFFVNSMITISAVSFLNTVRNRPVSLMITQFEAQLFLEGAAFVSVLILVSNLIVKCSVHLITKLNKG

SEQ ID NO: 7999 - DNA, 453 bp, Unknown
  Obtained from environmental sample
  misc_feature (1)..(453): n is a, c, g, or t
ttgagttccggtcgacgagtcgtgcggcaagtgttccccgtgccgcgtaggcgggcgtcagctcttcaccacttggagaagatcactaacggcgagggcacggaggaggacatccgcaagatgcgcctcatcggcaaggccatgcagaaagcgtcgctttgcgctctcggtcagaccgcgccgaatcccgtcgtctccacgctccagtatttcgagagcgagtacatggcccacataaaggagcgcaggtgtccggctggcaagtgcaagaagatgttgcgctactccatcgtggccgatatgtgcaagggttgcggcttgtgcgcgaagaagtgtccggcgggctgtatcaagggcgagataaagaagccgtacgtgatagactccgcggcgtgcataaagtgcggcgcgtgcgaagaggcgtgtaaattcaaggcagtcgtcaagaactaa

SEQ ID NO: 8000 - protein, 150 aa, Unknown
  Obtained from environmental sample
  DOMAIN (125)...(148): 4Fe-4S binding domain
  misc_feature (1)..(150): Xaa is any amino acid
MSSGRRVVRQVFPVPRRRASALHHLEKITNGEGTEEDIRKMRLIGKAMQKASLCALGQTAPNPVVSTLQYFESEYMAHIKERRCPAGKCKKMLRYSIVADMCKGCGLCAKKCPAGCIKGEIKKPYVIDSAACIKCGACEEACKFKAVVKN

SEQ ID NO: 8001 - DNA, 900 bp, Unknown
  Obtained from environmental sample
  misc_feature (1)..(900): n is a, c, g, or t
ttgtcctccgcggaagccgcacattccggctatgagcatttaacctaccggcttgatcccctgcgggactggatgcccgacatgaccgatgtggaacttaaggtgaaatacaacgattccatcgcggggatactccttatcaatcctgacaaccccaccggcgcggtgtaccctgtggaagttcttctggaatttgtacgaattgcgcgtaactacgggcttttcatcatttgtgatgaaacgtacgccaacatcgtttacggcggcgcgaaaaccgcggccttgtcccaaatcatcggtgatgtgccgggtctggctttgcgatccatttccaaagaagtcccctggcccggcgcgcgctgcggatgggctgaggtctacaaccgcaggtctgacccccgttttgacgcgtatatcaaaagccttgtggattcaaaacgtctggaagtatgttccaccagccttccccagctttgtatccccgccattctgggctctccccgctaccccaggcatcttgaaaaaagggccgttatgtttgagaaaagggccgatgaaatggaacaggctttcgcgggtgtatcgggaatcacgattaaaaaacccagcggcgctttttatgtttccgctgttttcgacgatgttgtgaatgagaatcccggcctccgttccctgccggtcgtcgatgaaactttacggaattacatccgcgcggaaatcaccaaccttaaaccggacaagcagtttgcctactggctcctggcctccacgggtatctgcgtggtcccgctttccggcttgccagcgatctgcccggttttcgttttacattgcttgaatacaccgatgaaaaacggaatggatttttatactctgggcgaagcggtgcagatttactga

SEQ ID NO: 8002 - protein, 299 aa, Unknown
  Obtained from environmental sample
  misc_feature (1)..(299): Xaa is any amino acid
MSSAEAAHSGYEHLTYRLDPLRDWMPDMTDVELKVKYNDSIAGILLINPDNPTGAVYPVEVLLEFVRIARNYGLFIICDETYANIVYGGAKTAALSQIIGDVPGLALRSISKEVPWPGARCGWAEVYNRRSDPRFDAYIKSLVDSKRLEVCSTSLPQLCIPAILGSPRYPRHLEKRAVMFEKRADEMEQAFAGVSGITIKKPSGAFYVSAVFDDVVNENPGLRSLPVVDETLRNYIRAEITNLKPDKQFAYWLLASTGICVVPLSGLPAICPVFVLHCLNTPMKNGMDFYTLGEAVQIY

SEQ ID NO: 8003 - DNA, 468 bp, Unknown
  Obtained from environmental sample
  misc_feature (1)..(468): n is a, c, g, or t
gtgccatacagacttgataaaaccttaagctctcagggaaccgtcgcgcgcggcgtatgtcaaatcaaagacgattaccttgtcacggttgacgagcttacagccattggcgaaaaagacggcgttattatcaatacaaatccggacggttcaatccggcggcttgccgccgacagccccgtgtcgatgaatttctggggcttccccccaagcatcctccctgaattcaaaaaatattttgacgagttcttaaaaacttttgccgccgatattcccgcgcagattaaaagcgaatgttttatccccaaagcggcggattattttatcaaacagggcatcacaaagatcaaagtcctgagggcggactccgactggtttggcgttacctatcgggaagaccgtgaagcggcagtcaaaaaactcagccatctgacacgggccggcgtttacccggaatcactctggtag

SEQ ID NO: 8004 - protein, 155 aa, Unknown
  Obtained from environmental sample
  misc_feature (1)..(155): Xaa is any amino acid
MPYRLDKTLSSQGTVARGVCQIKDDYLVTVDELTAIGEKDGVIINTNPDGSIRRLAADSPVSMNFWGFPPSILPEFKKYFDEFLKTFAADIPAQIKSECFIPKAADYFIKQGITKIKVLRADSDWFGVTYREDREAAVKKLSHLTRAGVYPESLW

SEQ ID NO: 8005 - DNA, 714 bp, Unknown
  Obtained from environmental sample
  misc_feature (1)..(714): n is a, c, g, or t
gtggacagcagacttgtggccgtccaggatggagcgcatggcgtcggccaccggctcgttcatgtcgtcgccgtccaccagcacggtgtagaggccggtgatgctgccgtggggccagttgcccgcccgttccaaaagccccggcagttgggagaagaccgaaggcgtatagccccgggtggtggcgggttcgcctacggagaggcccacctcccgggcggcgaaggcgtagcgggtggccgaatccatcatcagaatcacgtgccggccctggtcgcggaaatattcggcgatggtcgtggccacataggccccccgcatacgcaccaaagccggttgctcggacgtggccgccaccaccacgctgcgggccaggccctccggccccaggtccttttctatgaactccatgacttcccggccgcgttcgccgatcaaggcgatgacgttgacgtcggccttcatgtgccgggcgatcatgcccaaaagagtgctcttgcccaccccggaaccggcgaagatgcccacccgctggccccggccgatggtcaggagcgagtttatgctcctgacgcccacgtccatggcctcggttatgcggccccgggccaggggattgccgggccgggcgtggaccgggtagttttcggcgatattgatgggcccccggctgtcgatgagacggcccaggccgtccaccacccggcccagtag

SEQ ID NO: 8006 - protein, 237 aa, Unknown
  Obtained from environmental sample
  misc_feature (1)..(237): Xaa is any amino acid
MDSRLVAVQDGAHGVGHRLVHVVAVHQHGVEAGDAAVGPVARPFQKPRQLGEDRRRIAPGGGGFAYGEAHLPGGEGVAGGRIHHQNHVPALVAEIFGDGRGHIGPPHTHQSRLLGRGRHHHAAGQALRPQVLFYELHDFPAAFADQGDDVDVGLHVPGDHAQKSALAHPGTGEDAHPLAPADGQERVYAPDAHVHGLGYAAPGQGIAGPGVDRVVFGDIDGPPAVDETAQAVHHPAQ

SEQ ID NO: 8007 - DNA, 315 bp, Unknown
  Obtained from environmental sample
  misc_feature (1)..(315): n is a, c, g, or t
atgaaagaagcctatcaggttttggttgcgccgcacatcacagacaaaacggttaaacataattttgaccgcaacaatgatgcttatacttatgtgttccgcgttgatttgaaagcaaataagtttgaaataaaaaaagcaattgaaagttattttggtgttcaagtgggttccataaataccttgattgtgcgcggcaaagttaaacgcgcgcagcttaaaacaaaattcacttcgggtaaattgccaaattggaaaaaagcctatgttaaattaaaacctgggcaaaaaatatccgagtttgagggaatgtaa

SEQ ID NO: 8008 - protein, 104 aa, Unknown
  Obtained from environmental sample
  DOMAIN (5)...(104): Ribosomal protein L23
  misc_feature (1)..(104): Xaa is any amino acid
MKEAYQVLVAPHITDKTVKHNFDRNNDAYTYVFRVDLKANKFEIKKAIESYFGVQVGSINTLIVRGKVKRAQLKTKFTSGKLPNWKKAYVKLKPGQKISEFEGM

SEQ ID NO: 8009 - DNA, 414 bp, Unknown
  Obtained from environmental sample
  misc_feature (1)..(414): n is a, c, g, or t
atgcttagcccaaagagaacaaaacatcgcaaaatgatgaaaggccgaatgaaaggcatagctaccactggcgattatatcgcttttggcgactttggcattcaggctcttgaacagtgctggctcaccgctcgccaaatagaggcagcacgtatttgcatgactcgcaaaataaaaagaggcggcaaggtttggattcgtgtgtttccagataaacccgtttctaaaaagcccgccgaaacccgtatgggtaaaggcaagggcgcaccggaattttgggcagccgtggtgctgccgggcagaatattatttgagatgggcggagttgaaaaggctctcgctttggatgctttgaatggcgcggctcaaaaactgccgataaaagttaaaataattgaggcttcggagatataa

SEQ ID NO: 8010 - protein, 137 aa, Unknown
  Obtained from environmental sample
  DOMAIN (1)...(132): Ribosomal protein L16
  misc_feature (1)..(137): Xaa is any amino acid
MLSPKRTKHRKMMKGRMKGIATTGDYIAFGDFGIQALEQCWLTARQIEAARICMTRKIKRGGKVWIRVFPDKPVSKKPAETRMGKGKGAPEFWAAVVLPGRILFEMGGVEKALALDALNGAAQKLPIKVKIIEASEI

SEQ ID NO: 8011 - DNA, 324 bp, Unknown
  Obtained from environmental sample
  misc_feature (1)..(324): n is a, c, g, or t
ttggtagccgagaatattgctcgtcaactagaaaagcgtgtaacaggtcgccgtgctatgaaacgtgccattcaaaacgcaatgcgttttggagttgaaggcattcgtattcaaattggcggtcgccttggcggagcggaaattgccagagtagaaaaatatgcagagggcagagttccgcttcatacccttcgcgcagatattgattatgcaactgcaacagcgaaaactctttacggcacaaatggcgtaaaagtttggattatgcacggtgaaaaacttcgcaagggagatttttcttccaacgaaccaaaaaggatttaa

SEQ ID NO: 8012 - protein, 107 aa, Unknown
  Obtained from environmental sample
  DOMAIN (5)...(88): Ribosomal protein S3, C-terminal domain
  misc_feature (1)..(107): Xaa is any amino acid
MVAENIARQLEKRVTGRRAMKRAIQNAMRFGVEGIRIQIGGRLGGAEIARVEKYAEGRVPLHTLRADIDYATATAKTLYGTNGVKVWIMHGEKLRKGDFSSNEPKRI

SEQ ID NO: 8013 - DNA, 606 bp, Unknown
  Obtained from environmental sample
  misc_feature (1)..(606): n is a, c, g, or t
atgatttacggatacattcgggtaagcaccgatagacagacagtagaaaatcagcgttttgaaatcaatcaattttgcgacaaaaatgtaatggttgtggacaaatggattgaagaaaccatttcagggacaaaaacagttcaggaacgaaaacttggtaaacttctaaaaaagatgaaaaagtacgatattttgatatgttcagaactgtcacgtttgggcagaaacctgttgatgattatggcaattctcaacgaatgtatgaacagggacattgaagtatggacaatcaaagacaattatcgtttgggtagcgacatcaactccaaagttcttgcctttgcgtttggtctttctgccgagattgagcgcaatctcatttcacagcgcaccaaagaagcccttgcccgcaagcgtgcagaaggtgttgtattaggacgtccgaaaggtagcaaatcaaaggtaaaaaaacttacaggaaaagaagttgagatacaaaatctgttagacaaagatgtgtcaaagtcagcaattgcacggattttgggagtgcatcggctcactgtagcagcattcgtgaaaagtttaggatgtgttaatttataa

SEQ ID NO: 8014 - protein, 201 aa, Unknown
  Obtained from environmental sample
  DOMAIN (2)...(144): Resolvase, N terminal domain
  misc_feature (1)..(201): Xaa is any amino acid
MIYGYIRVSTDRQTVENQRFEINQFCDKNVMVVDKWIEETISGTKTVQERKLGKLLKKMKKYDILICSELSRLGRNLLMIMAILNECMNRDIEVWTIKDNYRLGSDINSKVLAFAFGLSAEIERNLISQRTKEALARKRAEGVVLGRPKGSKSKVKKLTGKEVEIQNLLDKDVSKSAIARILGVHRLTVAAFVKSLGCVNL

SEQ ID NO: 8015 - DNA, 363 bp, Unknown
  Obtained from environmental sample
  misc_feature (1)..(363): n is a, c, g, or t
ttgaatattttgcttaaatgctgtataacaagatatatgcaaatagaaaccaggaaagcaaggcaattctgcgagacgctgttcggggcatacggtttttcttcggaagaaagtaaaataataagcgatgtattaattcgcgccgacctttacggcattgattcgcacggcatccacaggcttatccgttatcacgatgagataacggcggggcaggttgacgtaaaagcgaaaactcaaattgtccacgaaaccggcatttccgcgaccatagaggcaaacaaggcgatgggccagcttgtcggcgttgaagctatgaaccttgctgtaaaaaagcgcgtaacgcgggctgcggaatggtaa

SEQ ID NO: 8016 - protein, 120 aa, Unknown
  Obtained from environmental sample
  misc_feature (1)..(120): Xaa is any amino acid
MNILLKCCITRYMQIETRKARQFCETLFGAYGFSSEESKIISDVLIRADLYGIDSHGIHRLIRYHDEITAGQVDVKAKTQIVHETGISATIEANKAMGQLVGVEAMNLAVKKRVTRAAEW

SEQ ID NO: 8017 - DNA, 861 bp, Unknown
  Obtained from environmental sample
  misc_feature (1)..(861): n is a, c, g, or t
ttgattgagagccagataataaacgagatactctcctccgctccggcttttttgttaatagcgatcagggcccttgcattgatcgaagtcgccccccttttcaactctgagtccgtcccgcaagtggcaaaaattgcgctggcgggattcgcggcatacgcttcgttttcctcggccattgtaagagattgggttatcgcgccgttcgggctcagttttgttttccttgctatcggagaagcccttatcgggattattatagctttctttattgctcttattttcgcggccttttctacggcgggccagtttttctcccttcaaatgggctttggcgcttcggaaacttttgatcccctgtcgcagatagaaaatccccttatgggccaataccttaacaccgtcgccatgctgatattcgttactgtcgacggctttcgcgatcttttcctgggcggcttttggcgttcgctccagtccataaacgtgatgagccttgtggcgggcagggaaaacattgtttccattgtgctggcggggctttcccggctttttttggacgccattattatcagtatgccgatccttggctcgctgtttttggtttccctgtcaaccggccttatctcanaagccgccccgcaaatcaacatactttcagaggggtttcccatttcgataaccgtggccttcattctcatttacgctacccttccttttatgaccgaagcgttcagcagagtcataggatcgggcttccggacccttcaaaacctgtatatccaaataggccagagcataaccgcggggaggcgcgctgtgaaaccacattcccctttcgtgcgtgatgaattcggatga

SEQ ID NO: 8018 - protein, 286 aa, Unknown
  Obtained from environmental sample
  SIGNAL (1)...(26)
  DOMAIN (8)...(257): Bacterial export proteins, family 1
  misc_feature (1)..(286): Xaa is any amino acid
MIESQIINEILSSAPAFLLIAIRALALIEVAPLFNSESVPQVAKIALAGFAAYASFSSAIVRDWVIAPFGLSFVFLAIGEALIGIIIAFFIALIFAAFSTAGQFFSLQMGFGASETFDPLSQIENPLMGQYLNTVAMLIFVTVDGFRDLFLGGFWRSLQSINVMSLVAGRENIVSIVLAGLSRLFLDAIIISMPILGSLFLVSLSTGLISXAAPQINILSEGFPISITVAFILIYATLPFMTEAFSRVIGSGFRTLQNLYIQIGQSITAGRRAVKPHSPFVRDEFG

SEQ ID NO: 8019 - DNA, 552 bp, Unknown
  Obtained from environmental sample
  misc_feature (1)..(552): n is a, c, g, or t
ttgactgattacacggcgacaataaccttgacggctaaaacaggctataccctggacggagttaccgaagacttctttaccgtagctaatgcatcatcggtaagcaaccctgccaattcaggtgttattactgcggtattcccgcaaacaggcgctattataattaacatcgcggccatacccggcgtaacagttccggtaaccggagcaaccccggtatcggttatcaccccgacagatcaatataccggaatggtatcatggtatccgactattaatcccggtgagacatttgccgccgctactgattatacagcgacaatcacattaacggcaaaaacgggttatactctgatcggagtgtccgcaaacttcttcacggttgcaggaacatcaccagcggcaactaactctgtcggctccggtattattacggcaaaatttcctaaaacagcggcgcctacagaaggtaatgcttccattacgattaattttgatattgatgaattagcctctactgttctccatctacggctactcggccgatcctga

SEQ ID NO: 8020 - protein, 183 aa, Unknown
  Obtained from environmental sample
  misc_feature (1)..(183): Xaa is any amino acid
MTDYTATITLTAKTGYTLDGVTEDFFTVANASSVSNPANSGVITAVFPQTGAIIINIAAIPGVTVPVTGATPVSVITPTDQYTGMVSWYPTINPGETFAAATDYTATITLTAKTGYTLIGVSANFFTVAGTSPAATNSVGSGIITAKFPKTAAPTEGNASITINFDIDELASTVLHLRLLGRS

SEQ ID NO: 8021 - DNA, 408 bp, Unknown
  Obtained from environmental sample
  misc_feature (1)..(408): n is a, c, g, or t
atggaacctgctaaaaaaaaagtttacatagaaaccaccatacctagtgttattaccgctaaaccaagcagggatattagaaatttataccgccaagaaataagcagagaattttgggaatatgaacggcataaatacgatttgtatataagcgaatatgttttgaaggaatgtgcgaatggtgataaagaggctgcgaaaaagaggaggctcaaaatggaagaatataaggaactagacgacccggtagaagaagtctatcgtataagagaaaatattctcaaagagttcaactacgacataaaagcataccacgctcatttgcgtgaagaaaggcctaaatgggaagcaatgggttttaaatatgtatcggaagtccaagccgaagctatgaggaataggagttaa

SEQ ID NO: 8022 - protein, 135 aa, Unknown
  Obtained from environmental sample
  misc_feature (1)..(135): Xaa is any amino acid
MEPAKKKVYIETTIPSVITAKPSRDIRNLYRQEISREFWEYERHKYDLYISEYVLKECANGDKEAAKKRRLKMEEYKELDDPVEEVYRIRENILKEFNYDIKAYHAHLREERPKWEAMGFKYVSEVQAEAMRNRS

SEQ ID NO: 8023 - DNA, 486 bp, Unknown
  Obtained from environmental sample
  misc_feature (1)..(486): n is a, c, g, or t
atgcaaacagaccacataagaaatttcagcataatagcccacatagaccacggaaaaagcacgctcgcagaccgcttgattgaactcacgggaacggtttctaaaaatgagatgatggagcagcttttggacgatatggatttggagcgggaaagaggcataactataaaagcccacgctataagaatggtttatgaacgcggtggcaaagaatatttgatgaatatgatagacactccggggcacgtggattttacctacgaggttagccgctcgcttgcggcttgcgaaggggcagttctggtggtggacgcttcgcagggcatagaggcacaaacactctcgaatttgtatttggcaatagacaataacttaactataatacctgtgataaacaaaatagatttgcctggtgcaaatccagatgctatagcccattccatcggggatttgctcgggtatgaccccgataaaatccacgcataa

SEQ ID NO: 8024 - protein, 161 aa, Unknown
  Obtained from environmental sample
  DOMAIN (18)...(135): GTPase of unknown function
  misc_feature (1)..(161): Xaa is any amino acid
MQTDHIRNFSIIAHIDHGKSTLADRLIELTGTVSKNEMMEQLLDDMDLERERGITIKAHAIRMVYERGGKEYLMNMIDTPGHVDFTYEVSRSLAACEGAVLVVDASQGIEAQTLSNLYLAIDNNLTIIPVINKIDLPGANPDAIAHSIGDLLGYDPDKIHA

SEQ ID NO: 8025 - DNA, 507 bp, Unknown
  Obtained from environmental sample
  misc_feature (1)..(507): n is a, c, g, or t
gtgnaagagaggggaaaagaggctcacgcagaggacgcagaggcgcagaggacgcgagggacggttaaagggcagaatgttatcattgacagcgatgtggcgcggatttatggtactgaaacaagggaaataaataaggcgatcaagaataatcccggaaaattcccaacaggttataccattgaagccgacaagggcgaactggtggaaaatttccaccggttcaaaaatctaaaacattctaccgtacaaccaaaggcatttaccgaaaaaggcttatatatgcttgcaactatcctgaaaagtccgcaagctacagcggcgactatcgccattattgacgaacggagcgagtgtcgtggccgtgtttacacggacatgaccgagcgagtgaggacatcgaagggctttagccctttattgagacttttgcaaaactgcgtgaattgtcgcatacaatcgcaaagctggcagacgctaaagaaaagcctgaacaacaatcattaa

SEQ ID NO: 8026 - protein, 168 aa, Unknown
  Obtained from environmental sample
  misc_feature (1)..(168): Xaa is any amino acid
MXERGKEAHAEDAEAQRTRGTVKGQNVIIDSDVARIYGTETREINKAIKNNPGKFPTGYTIEADKGELVENFHRFKNLKHSTVQPKAFTEKGLYMLATILKSPQATAATIAIIDERSECRGRVYTDMTERVRTSKGFSPLLRLLQNCVNCRIQSQSWQTLKKSLNNNH

SEQ ID NO: 8027 - DNA, 426 bp, Unknown
  Obtained from environmental sample
  misc_feature (1)..(426): n is a, c, g, or t
atgttttaccgcatcgcgtggtatgccgcgcagttggcgaataattnttcggagtacgatgtgggcggctttgaggctcatcacaataaaaaaatggacagcccttcgggaacggcaaaaactttggctgagggcgtactttccaaaatcgacaggaaaaagaaaattgtatgggagacattgaaccgcaaaccggaagccgatgagattcactttccaagcctgcgtatgggcagcgttcccggaacgcacagcttgttttttgactctcaagcggatacaatcgaaattacccatacagcccgcgggcgcgaaggttttgcgtccggcgcggtacaagcggcaaaatggcttacggcgcaaaaacggcgcggggtttttacggttgacgatatgatgaacgatttattcaaggagaaagtatga

SEQ ID NO: 8028 - protein, 141 aa, Unknown
  Obtained from environmental sample
  DOMAIN (1)...(134): Dihydrodipicolinate reductase, C-terminus
  misc_feature (1)..(141): Xaa is any amino acid
MFYRIAWYAAQLANNXSEYDVGGFEAHHNKKMDSPSGTAKTLAEGVLSKIDRKKKIVWETLNRKPEADEIHFPSLRMGSVPGTHSLFFDSQADTIEITHTARGREGFASGAVQAAKWLTAQKRRGVFTVDDMMNDLFKEKV

SEQ ID NO: 8029 - DNA, 750 bp, Unknown
  Obtained from environmental sample
  misc_feature (1)..(750): n is a, c, g, or t
ttgaacaaaacatgcgtgactggaatttcacgcagaaaatcatcaacgatctattggaggaatgagatgaacgcgaaagaatttgtagattcattgttcaatggttatgaacagacagaagcgcttgcggatttcaaggaagagctgctggctaacatgaacgcgaaaatcgagaactttatcaggaaaggcttagatatggacgcggcgtttgccaaggcaagcgcggagttaggcgatgtgtcttcccttgcggacgaactgtcgctaaaaaaacgaaaagaagtatttgaggaggtttacatggacatcaggatgtatatgcctgcaagacgggtagcggggtacgtagtttttggcatactggcgttttttggcataacggtcgcgctcatcacattatttgccgcaagaagcatagagtttatggccggcacatcgcttgatatgaccagcttttttggagcgatgatgcctttccttacggctgccgttattggttttacctttttgggcgttacgcaggaaaccgcttcgatgcttcctgtaagcaggaaacggggcgcatggtacgccgccgctgcgggactgatcgccttcggacttttcactatgcctatagtgtatttcagcactaaatttgcgaataacattgttaatgatgttttaacttttgatatacctgtgcaaaatctggaaacgctggttcgggctataggcgtgctaattcccttgtactgcccggcatag

SEQ ID NO: 8030 - protein, 249 aa, Unknown
  Obtained from environmental sample
  misc_feature (1)..(249): Xaa is any amino acid
MNKTCVTGISRRKSSTIYWRNEMNAKEFVDSLFNGYEQTEALADFKEELLANMNAKIENFIRKGLDMDAAFAKASAELGDVSSLADELSLKKRKEVFEEVYMDIRMYMPARRVAGYVVFGILAFFGITVALITLFAARSIEFMAGTSLDMTSFFGAMMPFLTAAVIGFTFLGVTQETASMLPVSRKRGAWYAAAAGLIAFGLFTMPIVYFSTKFANNIVNDVLTFDIPVQNLETLVRAIGVLIPLYCPA

SEQ ID NO: 8031 - DNA, 687 bp, Unknown
  Obtained from environmental sample
  misc_feature (1)..(687): n is a, c, g, or t
atgcttttagtcgcagactcaatgacaggacagtccgccgccgacatcgctaaaacctttgacgaaaaaatcgggctgacgggagtagtgcttacaaagtttgattccgacactcgaggcggcgcggcgctttcacttaagacaataaccggtaaacctttaaaatttaccggcacaggtgaaaaacccgaagactttgaaccttttcaccctgatcgcattgcagggcgaatactcggtatgggcgatgtcgtaagccttgtagagaaagcgcaggaagtaattgatcaaaaagaagctctcgaactccagaaaaaaatggagaaagaaaattttactcttgatgactggttaaaccagcttcgagctgttaaaaaaatgggatcgcttcagtccatgctggaaatgattccgggaatgcagggacagatcagcgaagacgatattgacaaggaagaattaaaacatcaggaagcgattctaagttccatgacgtacaaggaacgcgccaatcatttaataatcgggccgccgcgcagaagccgtatagcaagaggttccggtacatcggtcgcagaagtagcgcgtctattaaagaagtttgaaaaaatgcgcggcatgatgaaaaaaatggcaaaaggcgcaaggggcggaggaatgcctaatatacctggattgttcggttaa

SEQ ID NO: 8032 - protein, 228 aa, Unknown
  Obtained from environmental sample
  DOMAIN (1)...(80): SRP54-type protein, GTPase domain
  misc_feature (1)..(228): Xaa is any amino acid
MLLVADSMTGQSAADIAKTFDEKIGLTGVVLTKFDSDTRGGAALSLKTITGKPLKFTGTGEKPEDFEPFHPDRIAGRILGMGDVVSLVEKAQEVIDQKEALELQKKMEKENFTLDDWLNQLRAVKKMGSLQSMLEMIPGMQGQISEDDIDKEELKHQEAILSSMTYKERANHLIIGPPRRSRIARGSGTSVAEVARLLKKFEKMRGMMKKMAKGARGGGMPNIPGLFG

SEQ ID NO: 8033 - DNA, 648 bp, Unknown
  Obtained from environmental sample
  misc_feature (1)..(648): n is a, c, g, or t
atggcatttaaagccgctgctattttttccgacaatatggttttacaacatggtaagcctgttcctgtttggggaacaggcggagaagatgggagttttgtccgcgtttcttgggaaagcgaaaaaagtaaaatacaaaatgaaactgccgtagacggcggtaaatggagtctttctctccctcccctaactgtcggcgtaacaggcgagcttataataaaaaacggaaataacgagatacgttttcgcaatgtgataacaggagacgtatggttcgcgggcggtcagagcaacatggagatggagttgattaatgtaaaaaacggtgaagccgagcttgccgcctgcgcgaatcaatacatacgtttttatcaagtagttagacgcgctgttgttgatgatgattatcttcgtgaagaagcggcaagcaaatggcaaatctgcgcgcctgatactgccgcaatgttaagcgccgcagcctttttttttgctcataaaataaatgcagatataggcataccaatcggtatcataaattgttcatggngcggaacatccataagcacatggatgagcagggaacagttgatgaaaagccgcgcgggacaaaaatttattgatgatttatgcgaaaaagtcggcgggtaa

SEQ ID NO: 8034 - protein, 215 aa, Unknown
  Obtained from environmental sample
  DOMAIN (157)...(214): Domain of unknown function (DUF303)
  misc_feature (1)..(215): Xaa is any amino acid
MAFKAAAIFSDNMVLQHGKPVPVWGTGGEDGSFVRVSWESEKSKIQNETAVDGGKWSLSLPPLTVGVTGELIIKNGNNEIRFRNVITGDVWFAGGQSNMEMELINVKNGEAELAACANQYIRFYQVVRRAVVDDDYLREEAASKWQICAPDTAAMLSAAAFFFAHKINADIGIPIGIINCSWXGTSISTWMSREQLMKSRAGQKFIDDLCEKVGG

SEQ ID NO: 8035 - DNA, 498 bp, Unknown
  Obtained from environmental sample
  misc_feature (1)..(498): n is a, c, g, or t
atgtcgcgggtcaacaccacgctcatcaacaacatcggcaacctgcataaccgctccacggtattctgcgagcgctacttccacgggatggtccncaaggcggcgtgggatcccggcatagccgctcagaccgaggccgccgccgcggacatcgccgcctggtatgagagcggcgacttcaaactggtagtggagaagatacaagcgctgggcagcgtaggaaacaaatacttccaagaccgcaagccgtgggagtctataaagagcggcgacaaagagtccgcggcggcggtgattgttacgtgtataaacctgataaaggcgcttatggtatacctaaagccaatcacgccggatatatgcgcggccttcgaaaggcagataggcgctaagctggcttgggaagattataagtttagtttgtcggggcgcagagtcggccaggttgacaaattggctattccgttggaggcggggcatttgaaatggttgttttaa

SEQ ID NO: 8036 - protein, 165 aa, Unknown
  Obtained from environmental sample
  misc_feature (1)..(165): Xaa is any amino acid
MSRVNTTLINNIGNLHNRSTVFCERYFHGMVXKAAWDPGIAAQTEAAAADIAAWYESGDFKLVVEKIQALGSVGNKYFQDRKPWESIKSGDKESAAAVIVTCINLIKALMVYLKPITPDICAAFERQIGAKLAWEDYKFSLSGRRVGQVDKLAIPLEAGHLKWLF

SEQ ID NO: 8037 - DNA, 843 bp, Unknown
  Obtained from environmental sample
  misc_feature (1)..(843): n is a, c, g, or t
ttggtaaaaaactggattaagacaaattttaattttgagcctgaacttattttaacagcagataagcaccataccgcaattcttgcgatggctcaccaaaatgcggctgaagatttacgcaaacggttaaaagaaagaggagccggtccggcgcttgacgagcttatgcgggtgttgagcctcgaaataaaaccggaaaggattgagggttttgacatatctcatcttgacggtaaacatcctgtcgcttcgttaatttcgtttaaaaacggaattcccgacaaaaaaaattaccgttatttcaaactgcgtaccgttgttggaacagcggacgattatgccgcaatgcgtgaagcggtgcggcggcgttattcccgcttaataaaagaaggcacggagcttcctgatttaatactcgttgacggcggcatcggacaggttaatgttgcaaaagaagtgctggacgaactgggtgttgattgcagtcttgccggtcttgcgggacgggaggaagaaatctggctgcccgacgcaaaagagccaattgttctttcaagacaatctgaggcgctgaaagtcctgcaatttgtacgcgatgaatgtcaccgctttgcaaataacttcaacagacggcttcgctcaaaagacctgttttttcctgtactggaatccgttgaaggtatcggcccgaaaagagcgcttgtaatcatgaaagcctacganacaatcgcaaatatcgccgccgctgacatcgcagaaatggcggaacgctgcnaaatcagcgaggtttcagcccgcgctgtcagagcctgcgcaaaaattgcgctgaanaacaggaattag

SEQ ID NO: 8038 - protein, 280 aa, Unknown
  Obtained from environmental sample
  DOMAIN (55)...(206): UvrC Helix-hairpin-helix N-terminal
  misc_feature (1)..(280): Xaa is any amino acid
MVKNWIKTNFNFEPELILTADKHHTAILAMAHQNAAEDLRKRLKERGAGPALDELMRVLSLEIKPERIEGFDISHLDGKHPVASLISFKNGIPDKKNYRYFKLRTVVGTADDYAAMREAVRRRYSRLIKEGTELPDLILVDGGIGQVNVAKEVLDELGVDCSLAGLAGREEEIWLPDAKEPIVLSRQSEALKVLQFVRDECHRFANNFNRRLRSKDLFFPVLESVEGIGPKRALVIMKAYXTIANIAAADIAEMAERCXISEVSARAVRACAKIALXNRN

SEQ ID NO: 8039 - DNA, 915 bp, Unknown
  Obtained from environmental sample
  misc_feature (1)..(915): n is a, c, g, or t
ttgactcacacgggtcagatgaaagccgacatcggcaccgacggcgacgatgttctggtagttaacggccacaagattaaatgtctgtccggcaagggcatgaccccggaccaattcccttggaaggatctgggcatagattatgtggtagagtccacaggtatctataccaacgaaaaagcttacggccacattgccgccggggcgaaaaaggttattatttcagcgccgggcaaatcagaagataaatcaaaaccgattaaaactatcgttatgggcgttaaccaggatgaatacgatccggcgaatcatcatgtactgtccaacgcaagctgcaccacaaactgtctcgcgccggtagttcatgtaatacttaaagaaggctttggcattgaaaccggtcttatgaccacaattcactcatatacagccacacagaaaaccgtagacggcgtttcccagaaagactggagaggcggacgcgcggcggccatcaacattattccgtcaaccacaggcgcggccaaagccgtaggcgaagtgcttccctcaaccaagggcaagctcaccggtatgagcttccgcgttcccacacccactggctccgtagtagacctgactttccgcgcggaaaaagacacttctatcgaagccattgacgccgcaatgaagaaagcttcggaaacttacatgaaaggcgttctgtcttactgcaatgaagaaatcgtttcttctgatgttatccacaatgtaaatacttcaatctatgacagcaaagccacccttgaaaacaacctcaaaggcgaaaaacgcttctttaangtagtttcatggtacgacaacgaatggggctattcaaacaaagttgtagacctgatcagacacatagacagtaaaaaatattttagtatttaa

SEQ ID NO: 8040 - protein, 304 aa, Unknown
  Obtained from environmental sample
  DOMAIN (1)...(112): Glyceraldehyde 3-phosphate dehydrogenase, NAD binding domain
  misc_feature (1)..(304): Xaa is any amino acid
MTHTGQMKADIGTDGDDVLVVNGHKIKCLSGKGMTPDQFPWKDLGIDYVVESTGIYTNEKAYGHIAAGAKKVIISAPGKSEDKSKPIKTIVMGVNQDEYDPANHHVLSNASCTTNCLAPVVHVILKEGFGIETGLMTTIHSYTATQKTVDGVSQKDWRGGRAAAINIIPSTTGAAKAVGEVLPSTKGKLTGMSFRVPTPTGSVVDLTFRAEKDTSIEAIDAAMKKASETYMKGVLSYCNEEIVSSDVIHNVNTSIYDSKATLENNLKGEKRFFXVVSWYDNEWGYSNKVVDLIRHIDSKKYFSI

SEQ ID NO: 8041 - DNA, 558 bp, Unknown
  Obtained from environmental sample
  misc_feature (1)..(558): n is a, c, g, or t
atgaatttttattctcctttcgcgaatatcgaaaaatatataagcggtcaaatggtaacgctttatttttctatcgggcttgaagcaatgggcgcaagaaaaacttttaatcagcttacagaaaaaataaaagtcgcagcccgcgaggtaagttataaaaaaatgaaccacccgggcgtttcttacgcatattgcgtaaacgataacggcaaaagaataatatattccacggacactgagcttacttcggatgattttcaaaaaaacgaagaaaatataactttttttaaaaacgcggatatgataatcattgactgccagtatacgcttggagaagctatcgaaaaatataactggggacacagcgcattcagccttgcggtggactttgcggctaactggggaattaaacgaatggttatgttccatcacgatccttcttatgatgatcataaactttacgggatactgcaatctgccaggtggtatcttgaaagaatgaacataaaaggaattgaattgacccttgcctatgaaggcctggaaatatccatataa

SEQ ID NO: 8042 - protein, 185 aa, Unknown
  Obtained from environmental sample
  misc_feature (1)..(185): Xaa is any amino acid
MNFYSPFANIEKYISGQMVTLYFSIGLEAMGARKTFNQLTEKIKVAAREVSYKKMNHPGVSYAYCVNDNGKRIIYSTDTELTSDDFQKNEENITFFKNADMIIIDCQYTLGEAIEKYNWGHSAFSLAVDFAANWGIKRMVMFHHDPSYDDHKLYGILQSARWYLERMNIKGIELTLAYEGLEISI

SEQ ID NO: 8043 - DNA, 573 bp, Unknown
  Obtained from environmental sample
  misc_feature (1)..(573): n is a, c, g, or t
atgatcagatggccgagacaaagaatagccgctgtatgcgaaaaaaccatcttccttcccagtatccgtgccatgcatgaagaaggctgtccctttaagggctgtctttacttcgggcttatgcttacaaacaaagggcctttcgtaattgaatataactgccgcttcggagaccctgaagcgcaggcggttttatccttgcttgaaacaaatttgcttgaaataatggaagctgttacggacgaaaagctttctgaacttgaaatccgctggaaaaaagcgcattgtgcctgcgtaatacttgcaagcggcgggtatccgctttcttacaagacaggttttgccataacaggtcttgaagaggcgcaaagcagcggagcggtagtcttccatgcgggaaccgaatacaaaaaaacggagaataaaggcgctttttacacttccggcggacgtgttttaggcgtaactgccgctgcccccgcgcttgaaacagctcttgaaaaggcgtataaagccgtagaatttatcaaatttgacggaattcactaccgaaaagacataggaaagtactaa

SEQ ID NO: 8044 - protein, 190 aa, Unknown
  Obtained from environmental sample
  DOMAIN (2)...(61): Phosphoribosylglycinamide synthetase, ATP-grasp (A) domain
  misc_feature (1)..(190): Xaa is any amino acid
MIRWPRQRIAAVCEKTIFLPSIRAMHEEGCPFKGCLYFGLMLTNKGPFVIEYNCRFGDPEAQAVLSLLETNLLEIMEAVTDEKLSELEIRWKKAHCACVILASGGYPLSYKTGFAITGLEEAQSSGAVVFHAGTEYKKTENKGAFYTSGGRVLGVTAAAPALETALEKAYKAVEFIKFDGIHYRKDIGKY

SEQ ID NO: 8045 - DNA, 369 bp, Unknown
  Obtained from environmental sample
  misc_feature (1)..(369): n is a, c, g, or t
atgaaacgaaatatattcttatttctcttttgttttctcattttttcagccgtattatatggtcaggaatacgattctcaggcattaagatatttaaaaagcggtatagaaaaccttatgaacggtaattttacaaaagctatcgaagattgtacgcgggtgataaggatcgatcctaaatccgcgattacttatgttattcgcgcgcgggcatattacgaattaggcgatatggacagggcaattgcggacagtacgcttgccataaggcgcgacaaggaaaatatcggcgcatattcaatacgcggcaacgcttacgggaaaaaggcgaccttgacagggcgattgcggactgaaacgcgattttaa

SEQ ID NO: 8046 - protein, 122 aa, Unknown
  Obtained from environmental sample
  SIGNAL (1)...(21)
  DOMAIN (28)...(61): Tetratricopeptide repeat
  misc_feature (1)..(122): Xaa is any amino acid
MKRNIFLFLFCFLIFSAVLYGQEYDSQALRYLKSGIENLMNGNFTKAIEDCTRVIRIDPKSAITYVIRARAYYELGDMDRAIADSTLAIRRDKENIGAYSIRGNAYGKKATLTGRLRTETRF

SEQ ID NO: 8047 - DNA, 795 bp, Unknown
  Obtained from environmental sample
  misc_feature (1)..(795): n is a, c, g, or t
gtgttaaggatggggaggctgttccgcaggagttggagattttttgattttcatataaggagattaaccatggatcctctttccgattccgtatgcgcgatactcgcggtggatgacgacgcggttacccttgaattattgacagagattctttcgacacgttacgacgtaacggtttgttccaacggtaaagaagctataaggtatttagatgagaacaattttgatttgataattacagaccttatgcttcccgatatctccggcatagacatcctcgctcacgccaagcgccgcgacgcgtttgcggaggttctgatgataaccggcaacgcatctgtggataccgccgccgcggcgttgagcggcggcgtaggttcgtatatgcttaaaccgttttccatccgtgaactttgcggacgcgtggataaaatggtcgccaaacggaggtttcttacgaagagtctgcagctcttggctctttccgacgctattgaccctaccgtgaaagagcatattgaggacatcacatcgctctatcacttcacccgtacaatcgtgctgacgcttgagatctcggaggtaatgaggattattttggaagaggctaatcggaaagtagacgcgatgttttgctcgcttgaggttaaccacttgggctataaagaggttttttctatgtcaagattagggcttgtcggtaaagaatatcttaacaacgtctttgcggagcattggaacgacgcgtttattgcacagctagggcgatttcttaaggaaccccgtccgatctga

SEQ ID NO: 8048 - protein, 264 aa, Unknown
  Obtained from environmental sample
  DOMAIN (32)...(143): Response regulator receiver domain
  misc_feature (1)..(264): Xaa is any amino acid
MLRMGRLFRRSWRFFDFHIRRLTMDPLSDSVCAILAVDDDAVTLELLTEILSTRYDVTVCSNGKEAIRYLDENNFDLIITDLMLPDISGIDILAHAKRRDAFAEVLMITGNASVDTAAAALSGGVGSYMLKPFSIRELCGRVDKMVAKRRFLTKSLQLLALSDAIDPTVKEHIEDITSLYHFTRTIVLTLEISEVMRIILEEANRKVDAMFCSLEVNHLGYKEVFSMSRLGLVGKEYLNNVFAEHWNDAFIAQLGRFLKEPRPI

SEQ ID NO: 8049 - DNA, 846 bp, Unknown
  Obtained from environmental sample
  misc_feature (1)..(846): n is a, c, g, or t
atggcgcccagccggaattatttacgccggtacaggagcatgaaaatctgcggggagccgcttcattcgtgtaaagggggagagatgatacagcaaacacttggataccttaaggaaatgaggctttcggtgatggaagtggaataccgcaggcagagtgaacttgcagcttggaatgaactctcgtttgaagagcggataagcctgttggtagatgctgaatggcgggagcggaagaacaagaaactcaggcggcttttgaaggcggcctgccttcgggagcctggagcctgtcttgaggagcttgagtattcaaccgtccgcgggctggacaaagcccttgtggcccgtctttcagactgtgcatggatacgggaaggccgccatatgctgataaccggcccttgtggaacgggaaagacgtatcttgccaacgcgttcgccaatgcggcctgccgttcaggttatacggtgaaatgtgtgaggatgtcccggcttcttgtagatttgcaggtgggccggggtgacggctcctgggcaaaaacgctttcggaaatgaaaaagcccgacctattggtactggacgatttcggccttgagaacctgcaaaccactcactgccgtgattttctggaagtggtagatgaccgctcacccaccaagccaatactgattatctcccagcttcccgtttcttcctggcatggggtattttcagattcaacaatagcggaagcagttctggaccgcctgttacaccaggcattacgatttgaactgaagggtccttcaaaacgccgggagaagaaggcaagtgaaacagaacaatcaacaacctcaccttga

SEQ ID NO: 8050 - protein, 281 aa, Unknown
  Obtained from environmental sample
  DOMAIN (50)...(79): IstB-like ATP binding N-terminal
  misc_feature (1)..(281): Xaa is any amino acid
MAPSRNYLRRYRSMKICGEPLHSCKGGEMIQQTLGYLKEMRLSVMEVEYRRQSELAAWNELSFEERISLLVDAEWRERKNKKLRRLLKAACLREPGACLEELEYSTVRGLDKALVARLSDCAWIREGRHMLITGPCGTGKTYLANAFANAACRSGYTVKCVRMSRLLVDLQVGRGDGSWAKTLSEMKKPDLLVLDDFGLENLQTTHCRDFLEVVDDRSPTKPILIISQLPVSSWHGVFSDSTIAEAVLDRLLHQALRFELKGPSKRREKKASETEQSTTSP

SEQ ID NO: 8051 - DNA, 972 bp, Unknown
  Obtained from environmental sample
  misc_feature (1)..(972): n is a, c, g, or t
ttggaatgccacgaagcagatgcggtttgccttgcaacaggcggttatggaaacgtgttttatctttccacaaacgcaaaaggctcaaacgtgggtgcagcttggcgcgcacataaaaaaggcgcattgtttgccaatccctgctacacgcaaattcacccaacttgcattccggtaacgggagatcaccaaagcaagctaactttgatgtctgaatctcttagaaacgatggaagggtttgggttcctcgcaaagccggagatgttcgcagaccgagcgatataccagaggtagagcgttattattatttagaagaaaaatatccgagctttggaaacttggtgccccgcgatgttgcaagccgcaatgcaaaaatggtttgcgataacggtcttggcgttgggacctccaaacgcgctgtgtttttggattttgctgatgccatcaaacgcattggcgaaagtgcggttagcgcaaaatatggaaatctctttcagatgtacgaaaaaatcacagacgagaatccatacaaaacgcctatgcgcatttatcctgcaagccattacacaatgggtggcttatgggtggactacaatttgcaaagcaccgtccctggcttgtttgtccttggagaggcaaatttctccgaccacggtgcaaaccgcttaggagcatctgctcttatgcaaggccttgcagacggctattttgttattccatataccttgggcggttattttgctggcacaaaattagacaaagtaaattccgctcaggcagaatttgtagatgcggcaaaaagttcaaaagcgctcattgaccgcttgctttccataaacggcaaaaaaacggtcaccgagttccacagagaaatgggtcacattatgtgggaaaatgtcggaatgggtcgcaataaagctggtcttgaaaaggcaatttccgcacttccggntttgcgcgatgagttttga

SEQ ID NO: 8052 - protein, 323 aa, Unknown
  Obtained from environmental sample
  misc_feature (1)..(323): Xaa is any amino acid
MECHEADAVCLATGGYGNVFYLSTNAKGSNVGAAWRAHKKGALFANPCYTQIHPTCIPVTGDHQSKLTLMSESLRNDGRVWVPRKAGDVRRPSDIPEVERYYYLEEKYPSFGNLVPRDVASRNAKMVCDNGLGVGTSKRAVFLDFADAIKRIGESAVSAKYGNLFQMYEKITDENPYKTPMRIYPASHYTMGGLWVDYNLQSTVPGLFVLGEANFSDHGANRLGASALMQGLADGYFVIPYTLGGYFAGTKLDKVNSAQAEFVDAAKSSKALIDRLLSINGKKTVTEFHREMGHIMWENVGMGRNKAGLEKAISALPXLRDEF

SEQ ID NO: 8053 - DNA, 573 bp, Unknown
  Obtained from environmental sample
  misc_feature (1)..(573): n is a, c, g, or t
ttggccgtcgaactggctgtcgcgatgggcgttaccatagaatcacaggccgcgtttgccgcgtatacgggcatggttcatgatacgggctcttttgcctatcaaaaaaccaacccgcgaagcttccgcgcggccattaccctgcttgatttgggagtaagcccgacggatgtgtaccaggagttacacgaaaataccgcgctaaggtcactgcttctgcaaaaaagggcttttgccagccttgagatacacagcggcggacaggccgcctcacagatgctccggctggaggattttacggagacgggggctgtcaacgatgactcggacggctttgttaacgtccccctcagggtcagggagatcatggtttcagtcctggtcaaggaaagccgcaagggaaaggtcaaatgttcaatgaggtcaaaaggggacatagacgtctcgaaaatcgcccatgatttcgggggcggcggacatgttaacgcggcgggttttaacagcgacctgaacattgaccagacgcttgccgttgccctgacaaagataaacggatgtttaggtaaaaaatga

SEQ ID NO: 8054 - protein, 190 aa, Unknown
  Obtained from environmental sample
  SIGNAL (1)...(20)
  DOMAIN (121)...(185): DHHA1 domain
  misc_feature (1)..(190): Xaa is any amino acid
MAVELAVAMGVTIESQAAFAAYTGMVHDTGSFAYQKTNPRSFRAAITLLDLGVSPTDVYQELHENTALRSLLLQKRAFASLEIHSGGQAASQMLRLEDFTETGAVNDDSDGFVNVPLRVREIMVSVLVKESRKGKVKCSMRSKGDIDVSKIAHDFGGGGHVNAAGFNSDLNIDQTLAVALTKINGCLGKK

SEQ ID NO: 8055 - DNA, 444 bp, Unknown
  Obtained from environmental sample
  misc_feature (1)..(444): n is a, c, g, or t
gtgaaacggtttaagttcggtcttgaaaaagtattaaaactgcggcagcacaatgagcacgaagccagggttgaactgggcagggccataggagttcttgccggtattgaaaacgaaatcaagagaaacgctgcaacccgcgccggcgcgctccaggaacgttttgccggacttactgcgggcgatggcacagcgtctctttccatgcatgcctgggacgcttacataaaccggctggaactggaagcggatcgcctgatggaagaggcggcccgcgcggaaacagtagttgaagaaaaacgcggcctttacattgaggcttcccgcgagcttaaggtgatggaaaacctgaaagaaaggcgcgagaaagagcaccggaaagaaatctttgttgaagaaactaaagagcttgatgacaggaagatagtgaacaatgaacaatga

SEQ ID NO: 8056 - protein, 147 aa, Unknown
  Obtained from environmental sample
  misc_feature (1)..(147): Xaa is any amino acid
MKRFKFGLEKVLKLRQHNEHEARVELGRAIGVLAGIENEIKRNAATRAGALQERFAGLTAGDGTASLSMHAWDAYINRLELEADRLMEEAARAETVVEEKRGLYIEASRELKVMENLKERREKEHRKEIFVEETKELDDRKIVNNEQ

SEQ ID NO: 8057 - DNA, 729 bp, Unknown
  Obtained from environmental sample
  misc_feature (1)..(729): n is a, c, g, or t
gtgacacccgaacagatactctacacgctcgaccattgcgttaatcaagattatcttatttgtcaagacgagtgcgtctacctgccctatctatacgccgccgagagcggcgtggcgcaacgcctgtcggaacggattcgcggcggcgttagaagaagggagcgttccatcagtgacaaagagattgacgacttcatcgcccgatacgagaaaagaaccggttggataggcgcgccggagcagcttgaggccgtccgttgcgccgccaagagcggcatcttcatcctcaccggcggccccggcaccggaaagacgaccgttctgcaagtgatagtcgctctcttcaacgagatgggattgaaagtggaacttgccgctcctacaggccgcgccgccgcccgcatgggttcaatctccggtatagccgcccgcaccatccaccgtctgttggaattcaaacccggcggcaaaagcggcggtttcacattccaacgctgcgaaaccaatcccataaacgccgacgcggtaatcctcgacgagacatcaatggttgatatcatgctgatgagaagttttatcgcggctgtaaagaacgacaccaaactcattctcgttggcgacaagaatcaattgccgtccgtaggccccggcaacgtgctcgccgacctcatagcctgcccccgcataccgcacgtggaactcaagcgcgtcttccgccatccgccgtga

SEQ ID NO: 8058 - protein, 242 aa, Unknown
  Obtained from environmental sample
  misc_feature (1)..(242): Xaa is any amino acid
MTPEQILYTLDHCVNQDYLICQDECVYLPYLYAAESGVAQRLSERIRGGVRRRERSISDKEIDDFIARYEKRTGWIGAPEQLEAVRCAAKSGIFILTGGPGTGKTTVLQVIVALFNEMGLKVELAAPTGRAAARMGSISGIAARTIHRLLEFKPGGKSGGFTFQRCETNPINADAVILDETSMVDIMLMRSFIAAVKNDTKLILVGDKNQLPSVGPGNVLADLIACPRIPHVELKRVFRHPP

SEQ ID NO: 8059 - DNA, 354 bp, Unknown
  Obtained from environmental sample
  misc_feature (1)..(354): n is a, c, g, or t
atggcgaggagatattttgacgaggtttttgcgcgtgaaaaaattagaagcactggcataggtcacggcattgccattcctcacgcaagaacggctttggtgaagcagttgtattgcgctgcggcaacttcagaaagcggcatagagttcaaagccttggatggcaagccagttagtttgtttttcctaatcataagcccagattttaccgttggtccacatttgaacatactttctgcaataagccatttggtcagcaaaaaagcaaaattaagctcagagctgaacgatgttgactctacggcagagtttatgaaaatactgaaagaaacggaagagaagtatattatatag

SEQ ID NO: 8060 - protein, 117 aa, Unknown
  Obtained from environmental sample
  DOMAIN (1)...(111): Phosphoenolpyruvate-dependent sugar phosphotransferase system, EIIA 2
  misc_feature (1)..(117): Xaa is any amino acid
MARRYFDEVFAREKIRSTGIGHGIAIPHARTALVKQLYCAAATSESGIEFKALDGKPVSLFFLIISPDFTVGPHLNILSAISHLVSKKAKLSSELNDVDSTAEFMKILKETEEKYII

SEQ ID NO: 8061 - DNA, 531 bp, Unknown
  Obtained from environmental sample
  misc_feature (1)..(531): n is a, c, g, or t
ttgaccaaaaaaagagatagagccatgagcaaagatagcaatttattcagcggacagccgggtttcaagcagataatcagcctgcttgacaagtcaatgattggccagatagccaaagatgcccggtcggacagatatgcaaagaagcttgacacctacaaacaccttctgataatgctctacggtatcttcagcgacagctattcgcttcgcgagcttgtgcttggctgccttatagacgcgaacaagttctgccatctgggtatagatttcaaggtatgccgcagcacccttgcagaggcgaacgcccgccgcgacagcaccgtgtttgagtccatatacataagcctttacgagcgatacaggcatcttttgccggacagccgcattccggtgaagaatctgtatgcctacgattccacgaccataacgctgttctgcgatgttctgaagggctgccgacaggcttatgagcgaggcggcaaggctggcaagcgccaaggggggtataaaagtccaatcccctcatga

SEQ ID NO: 8062 - protein, 176 aa, Unknown
  Obtained from environmental sample
  misc_feature (1)..(176): Xaa is any amino acid
MTKKRDRAMSKDSNLFSGQPGFKQIISLLDKSMIGQIAKDARSDRYAKKLDTYKHLLIMLYGIFSDSYSLRELVLGCLIDANKFCHLGIDFKVCRSTLAEANARRDSTVFESIYISLYERYRHLLPDSRIPVKNLYAYDSTTITLFCDVLKGCRQAYERGGKAGKRQGGYKSPIPS

SEQ ID NO: 8063 - DNA, 570 bp, Unknown
  Obtained from environmental sample
  misc_feature (1)..(570): n is a, c, g, or t
atgtttcacgcggagcgttgggcgggagcgtttttaagcgtttcgggcgaaaccgcaaatgaggcgtttatgtgcctcaaggcgcttgccgcgcaggtaaaaaccacacagggcgtactcatggggcgcagcgcctcaggcaggcttgaaaaaatactcagggaaagcgcggcggaggccgcggcagctaacgctgccgaaattgaaactccggccgtagagtacgccatacgcttcctgtgcctgttagttgaaaaaaattctttcagatacgttaacttgcttctgcaaaaaatcgaacaggatcttgacgagaaaaacaaaatactcaacgccgttctggaatccgcgtttcccgtggaaagcggctttgaggaatcattaacgcagatgataaaaaacaagacgggcgcttccggcgttaaaatgaaaacttgcgtaaaacctgaactgctgggcggttatattctgcggattggcagcctatacattgacgcgagcttgaaggggcagttggaaagcctggctttccatttgggcgaaggggatacaggaggccgcaatggctaa

SEQ ID NO: 8064 - protein, 189 aa, Unknown
  Obtained from environmental sample
  SIGNAL (1)...(30)
  DOMAIN (4)...(179): ATP synthase delta (OSCP) subunit
  misc_feature (1)..(189): Xaa is any amino acid
MFHAERWAGAFLSVSGETANEAFMCLKALAAQVKTTQGVLMGRSASGRLEKILRESAAEAAAANAAEIETPAVEYAIRFLCLLVEKNSFRYVNLLLQKIEQDLDEKNKILNAVLESAFPVESGFEESLTQMIKNKTGASGVKMKTCVKPELLGGYILRIGSLYIDASLKGQLESLAFHLGEGDTGGRNG

SEQ ID NO: 8065 - DNA, 840 bp, Unknown
  Obtained from environmental sample
  misc_feature (1)..(840): n is a, c, g, or t
atgaaaatacatgatgaagctccggatgagaaaacaatgataaaacgaattgaaaattgccgtcttacgggaggaaagatacttgacctttcccgtctgtatatgacggaacttccggatgaagtcaaggatcttgaaggcttaaccgagcttaatgtaagttacaatcaactggaaaaacttccggattggataggcgcgctgcactctcttaaaaaactcaatctgcgcgggaatagaattgacgctttacctgattcaaccggagaattgcgagggcttacgttccttgaccttgggttaaacagtttcagtgagataccggaatgtgtaaaggaattttcatctctggaacaccttgatcttgaaactcttaaacactctggttctgaagataatcaagcggaatcactgcctgattggataggagattttagcaatcttcaatttcttaatttgcgccactgcggaataaaatcactgcccgaatcaatgaagaatctttcaaacttgcgtaccctttatcttggagcgaataaactgtccgttctgcccgaatggcttggcgctttttcgcaattggaaaaacttgatatcagcgccaatgaatattattccatacctgagtttatcggaaaattgcaaaacctcaccgaacttgctctgggacactcaggcaaatgggaaaatgagaattgtaaacacaccatttatgatcttgacaggcaaataaacgaacttgataaactgccctcgtttttaccgctctgtcaatctgaacgtctggactggggcatactgcctaaatcnttccccgaaacttgcgttcttaagtcttga

SEQ ID NO: 8066 - protein, 279 aa, Unknown
  Obtained from environmental sample
  misc_feature (1)..(279): Xaa is any amino acid
MKIHDEAPDEKTMIKRIENCRLTGGKILDLSRLYMTELPDEVKDLEGLTELNVSYNQLEKLPDWIGALHSLKKLNLRGNRIDALPDSTGELRGLTFLDLGLNSFSEIPECVKEFSSLEHLDLETLKHSGSEDNQAESLPDWIGDFSNLQFLNLRHCGIKSLPESMKNLSNLRTLYLGANKLSVLPEWLGAFSQLEKLDISANEYYSIPEFIGKLQNLTELALGHSGKWENENCKHTIYDLDRQINELDKLPSFLPLCQSERLDWGILPKSFPETCVLKS

SEQ ID NO: 8067 - DNA, 741 bp, Unknown
  Obtained from environmental sample
  misc_feature (1)..(741): n is a, c, g, or t
atgatgaatacttttggatggacagctaatgatgcagatttgggaagagtgaatgttatgcaaatagcccattggttagctacgggaacaacaagcaacgctaaattaaccattcttcttttggatattaaagacaattatggcggcggtaaaaatgattcttattttggcggatactttgattctatgaatttaataaaaaacaatccaagggatcctttgttaaaatactcaaatgaacttgatatgatctttattgatacttatccttctgttcccggcgattcccagtccaatgcagttcttgcccatgaaatgcagcaccttataaattatgtatcaagcttggtattcagatatgatgatgatagagaaacattcgattttatggatacatggattgacgaagggctttcaggcgccgcggaatatgtatattcaggagtgcatcctgaaatacgttggaaatattataatcaagacccgtcaggattaataaaaaaaggcaacaatttttttatctggggtaatcgcgacggagaatccacttctgcgaatccgaatcttgacgattatgcaactgtttatctttttttccagtggttaagacttcaatctaaagatgccggtaatctttattccaatattttattatcagaattttctgatcacagatcggtaacagaagccgcangaggaataatcccgaaacaggagaaagagactcgacaaaaggaatag

SEQ ID NO: 8068 - protein, 246 aa, Unknown
  Obtained from environmental sample
  misc_feature (1)..(246): Xaa is any amino acid
MMNTFGWTANDADLGRVNVMQIAHWLATGTTSNAKLTILLLDIKDNYGGGKNDSYFGGYFDSMNLIKNNPRDPLLKYSNELDMIFIDTYPSVPGDSQSNAVLAHEMQHLINYVSSLVFRYDDDRETFDFMDTWIDEGLSGAAEYVYSGVHPEIRWKYYNQDPSGLIKKGNNFFIWGNRDGESTSANPNLDDYATVYLFFQWLRLQSKDAGNLYSNILLSEFSDHRSVTEAAXGIIPKQEKETRQKE

SEQ ID NO: 8069 - DNA, 555 bp, Unknown
  Obtained from environmental sample
  misc_feature (1)..(555): n is a, c, g, or t
gtgagccgcgtccctggcggtgtaaattttcccggtgatgcaaaccgaatctcccgcattaaggccgcttatcgcttcatcgcttatcggggtttggagtactttcacagaacaccctccgcgtgccttgtagcgtggcagccgatattcaccgcgacggggagcccagctatgtgggttgggaaagtttcaatgttcacgctcagggctgttgttttgccgccgaaaccagcggggcctatgccaagcgaatttattttttccagcaattccttttctacgctgcgccaaaactcatttgcgttaacggagccaacaggccgcaaaagcgctttcttgcttaataacgcgcatttctccattgtccccccgactcccacaccgacaataaccggagggcagggattgcctccggcttttgatactgtatcgacaacaaacttttttattccttcgatgccgtcagacggagttagcatagccagggcgctcatgttttcgcttccgaaacctttggcgcgacggttatttcatttatcgcctcggccgatctga

SEQ ID NO: 8070 - protein, 184 aa, Unknown
  Obtained from environmental sample
  misc_feature (1)..(184): Xaa is any amino acid
MSRVPGGVNFPGDANRISRIKAAYRFIAYRGLEYFHRTPSACLVAWQPIFTATGSPAMWVGKVSMFTLRAVVLPPKPAGPMPSEFIFSSNSFSTLRQNSFALTEPTGRKSAFLLNNAHFSIVPPTPTPTITGGQGLPPAFDTVSTTNFFIPSMPSDGVSIARALMFSLPKPLARRLFHLSPRPI

SEQ ID NO: 8071 - DNA, 390 bp, Unknown
  Obtained from environmental sample
  misc_feature (1)..(390): n is a, c, g, or t
atgagcgccctggctatgctaactccgtctgacggcatcgaaggaataaaaaagtttgttgtcgatacagtatcaaaagccggaggcaatccctgccctccggttattgtcggtgtgggagtcggggggacaatggagaaatgcgcgttattaagcaagaaagcgcttttgcggcctgttggctccgttaacgcaaatgagttttggcgcagcgtagaaaaggaattgctggaaaaaataaattcgcttggcataggccccgctggtttcggcggcaaaacaacagccctgagcgtgaacattgaaactttcccaacccacatagctgggctccccgtcgcggtgaatatcggctgccacgctacaaggcacgcggagggtgttctgtga

SEQ ID NO: 8072 - protein, 129 aa, Unknown
  Obtained from environmental sample
  DOMAIN (1)...(129): Fumarate hydratase (Fumerase)
  misc_feature (1)..(129): Xaa is any amino acid
MSALAMLTPSDGIEGIKKFVVDTVSKAGGNPCPPVIVGVGVGGTMEKCALLSKKALLRPVGSVNANEFWRSVEKELLEKINSLGIGPAGFGGKTTALSVNIETFPTHIAGLPVAVNIGCHATRHAEGVL

SEQ ID NO: 8073 - DNA, 780 bp, Unknown
  Obtained from environmental sample
  misc_feature (1)..(780): n is a, c, g, or t
gtgaaagcacttgcagaagagaaaattggcggggcagatttttttggcggaagtgagtggattccaacctctgtgccctctccacaatttggagtgctgcctttggtgcttggaacattgcttgttagcctcatcgcaattttaatcgctttgccgctcggtcttggcgttgccgtttatatttctgagcttgcaaacaatggaacaagaaaaattttgaaacccgctgtggaattgcttgccggaataccttctgttgtctatggcttttttggcttggtggttttggttcctcttgtgcaaaaggcactcaacttgcccgttggcgaaaccgcattcaccggaagtttggtgcttgcaattatggcactccccaccattatcacggttgcagaagatgctatgcgcagcacaccgagcgcaatgcgcgaggcaagcctcgctcttggcgcaactcattggcaaaccatatacagggtgattatcccttatgcttcgtctggaatttcagctgcggtgattttgggaataggcagggcagttggcgaaacaatggcggtgcttatggtaaccggaaacgctgccgttattccaacatccttgtttgcgccaattcgcacaattcctgcggctattgccgccgagcttggagaagcaccggttgggggagcgcattatcaagctttgtttatgctgggttgcattttatttatgataactcttgttatgagcatttcgtctgaacttatttccaagcgagagccagggaagggggtgtaa

SEQ ID NO: 8074 - protein, 259 aa, Unknown
  Obtained from environmental sample
  DOMAIN (36)...(256): Binding-protein-dependent transport system inner membrane component
  misc_feature (1)..(259): Xaa is any amino acid
MKALAEEKIGGADFFGGSEWIPTSVPSPQFGVLPLVLGTLLVSLIAILIALPLGLGVAVYISELANNGTRKILKPAVELLAGIPSVVYGFFGLVVLVPLVQKALNLPVGETAFTGSLVLAIMALPTIITVAEDAMRSTPSAMREASLALGATHWQTIYRVIIPYASSGISAAVILGIGRAVGETMAVLMVTGNAAVIPTSLFAPIRTIPAAIAAELGEAPVGGAHYQALFMLGCILFMITLVMSISSELISKREPGKGV

SEQ ID NO: 8075 - DNA, 981 bp, Unknown
  Obtained from environmental sample
  misc_feature (1)..(981): n is a, c, g, or t
gtgcaaggcgtgaacggggcaaatgcgcgctatatagaaattgggaacaatgtatttatgcagtttgaacgcataaaaagcggcgatctgcttccactgaaaaataaaaatgttgatacgggaatgggctttgagcgagtttgtgcaattttgcaaggcaaggattctaattacgaaaccgatgtgttttctccaatcataaataaaatcgctgaactctccggtgtgccatacaatgcagaccaaagcggaatgccacacagggttgttgcagaccaccttcgcgcactgagtttcgcaatagcagacggcgcactcccaagcaacgatgggcgcggttatgtgcttcgcagaattttgcgcagagcgagccgctacgctcgcctcttgaaccaaaaagaacctttcatttgccgccttgtgcaaacacttgtgcaaacaatgggcgaggcctttcccgaaatccgcgagcgcgcagattttgtaacggaagtaatccgctccgaagaggagagattcataagaaccttggatgctggcttggagagatttgaaaaaataacccacgaactgagttccaaaataattccgggcacacaagtatttttgctatacgatacctatggttttcctccagacttaacacgcattttggcagaagaaaaaaatttgcaaatagacgaggcgggttttgaaacagaaatggaaaagcaaaaagaacgtgcaagagcttctcaaaaacaggggctttctgccataggctccgaaggctggacaatttttgcagaaggctccacagaatttttgggctatgaggcaagcacagcgcaggtgaaaattctgcgctacaaagaagacaaaggttcctattcaatagttttggatcgcacacctttctatgcagagatgggcggcgaaattggagaaaggggaaccctnntgaaaattctggtgcaacccttaaagtttttgataccataa

SEQ ID NO: 8076 - protein, 326 aa, Unknown
  Obtained from environmental sample
  DOMAIN (1)...(324): tRNA synthetases class II (A)
  misc_feature (1)..(326): Xaa is any amino acid
MQGVNGANARYIEIGNNVFMQFERIKSGDLLPLKNKNVDTGMGFERVCAILQGKDSNYETDVFSPIINKIAELSGVPYNADQSGMPHRVVADHLRALSFAIADGALPSNDGRGYVLRRILRRASRYARLLNQKEPFICRLVQTLVQTMGEAFPEIRERADFVTEVIRSEEERFIRTLDAGLERFEKITHELSSKIIPGTQVFLLYDTYGFPPDLTRILAEEKNLQIDEAGFETEMEKQKERARASQKQGLSAIGSEGWTIFAEGSTEFLGYEASTAQVKILRYKEDKGSYSIVLDRTPFYAEMGGEIGERGTLXKILVQPLKFLIP

SEQ ID NO: 8077 - DNA, 933 bp, Unknown
  Obtained from environmental sample
  misc_feature (1)..(933): n is a, c, g, or t
atggcgagggcatcatgggtgtctcttttgtctatgacgattttttcaaaaagcgcgtggcaatttttcgggtggccaaaaagtgctcttacaggaagcgcgattcgcctacccgccaacgcgctagactcagccaaggaaaagcaggcgataacagttgcgacttgggtgtactgcacaaactctgcgccccgattgagggtttttgactttgggcaaaactccgcttccaatttctacatgacaactaggcatgccagcggcacattcagtgttcgccacacgccaaatggcactggcagcgaaaaggcggcggcagcgggtagcgcgcttcctacaggctcttggcagcactgcgccgcaactgtatctggcaacaatgggactatgactctctacctcaatggtttgcctgtggccagcacgactatttatggttcacttagccaggcactgggaatttcgctaggagattcactgaatggctatttcatcggccgctcgcaatccgctgacagggactttgagggcaaaatgtctgacttcaggatttacgaccgcccactgtctgccttagagattcaggaattgtacgattcttattttgatgaggaaactgttgttggctctgtctataaccgcatcgttgctgctttggggaacctgaccaaccgcgattcagacatgccatttcccacagccatgagcaaatgcgcgataacgtggagttcaagcaatacaaagttggtagaaaatactggaaaagtccaccgcccgcccaacaccaaccgaaaccaagcggagcctgtttccgttgccatttcaattgcaaaaggtaaagccgccaaaactggcacaataaacatgactgtgctgcgtatgccaaatgacaaagacattgtggcaaacgatngtggcagcattagatattga

SEQ ID NO: 8078 - protein, 310 aa, Unknown
  Obtained from environmental sample
  SIGNAL (1)...(19)
  misc_feature (1)..(310): Xaa is any amino acid
MARASWVSLLSMTIFSKSAWQFFGWPKSALTGSAIRLPANALDSAKEKQAITVATWVYCTNSAPRLRVFDFGQNSASNFYMTTRHASGTFSVRHTPNGTGSEKAAAAGSALPTGSWQHCAATVSGNNGTMTLYLNGLPVASTTIYGSLSQALGISLGDSLNGYFIGRSQSADRDFEGKMSDFRIYDRPLSALEIQELYDSYFDEETVVGSVYNRIVAALGNLTNRDSDMPFPTAMSKCAITWSSSNTKLVENTGKVHRPPNTNRNQAEPVSVAISIAKGKAAKTGTINMTVLRMPNDKDIVANDXGSIRY

SEQ ID NO: 8079 - DNA, 393 bp, Unknown
  Obtained from environmental sample
  misc_feature (1)..(393): n is a, c, g, or t
atgaattatgccgaagaatcattaaaaaagcattaccagtggcgcggtaaattggaaatcattcacaagatgcccgtctccacccgggaggatctttcgcttgcctacactcccggcgtcgcccaaccctgccttgaaataagtaaaaatcctgaaaaaagttgggagctgacaggacgttggaatactgtcgccgttgtcacagacggtaccgccgtcttgggacttggagatattggccctgaagctggaatgcccgtaatggaaggaaaatgcgtactgtttaaagcctttggcggagtggacgcaatcccactgtgcatacgctcaaaagaagttgacgttattgtagaaacggtagncgcttcttgcagggagttttggaggtattaa

SEQ ID NO: 8080 - protein, 130 aa, Unknown
  Obtained from environmental sample
  DOMAIN (16)...(126): Malic enzyme, N-terminal domain
  misc_feature (1)..(130): Xaa is any amino acid
MNYAEESLKKHYQWRGKLEIIHKMPVSTREDLSLAYTPGVAQPCLEISKNPEKSWELTGRWNTVAVVTDGTAVLGLGDIGPEAGMPVMEGKCVLFKAFGGVDAIPLCIRSKEVDVIVETVXASCREFWRY

SEQ ID NO: 8081 - DNA, 969 bp, Unknown
  Obtained from environmental sample
  misc_feature (1)..(969): n is a, c, g, or t
ttgacagaatcggccgagttgggaaaattggcggatgttatttcagattctgtcagtctgagcgaattggaagcgataaaggattattttggtatgctccttgaacgtacttacgaccaggaaatgctggatgaaataaatccgttaaacgagcttcactatgtaaacaaagaaacaggtgacagaaaagtttttcaattcgcctttgccacggtagagcgtgggcgtggtgaaattttcatcctggtaacagtctacgatattacaaccagagtggaactgcaacaaaggttggcggaagaagaagcaagacggcaggaagaaatgcaggctgtctttgaacttatccaggttgagccggatgtttttaacgacttcatggcggatatggaacatgagttcgaagagattgacaagatacttaaaaacgacgctttatccacgcatgacgtgcttgttaaaatttatcaatctgttcatgccattaaatcaaacgccgtaattcttggattgaatgtatttggcaacaaggtacataacttggaatcgaaaataaagaaattacgggaaatgcagggtgatgtttcattcggtgaaatgttgaatctgaccatggagatagaaaaaatatccaaggaaaaagaaggattcagggatattcttaacaagcttcaaaattacgcgggaagcggcggcaagagcgcaggaacgggtgaaaaacaaaatatcaaagtattaattgagtcccttacaaaaacaacttccagagttgccgaagatttagataaaaaaattaaatttatcgcctctgagattgatcctgaagccattgacaaaggtccaagacgggtaatgaaagaaatattgatgcagcttatccgtaattccgccctgcacggaatagaaacaccggaagaaagaaaaaccaaggtaagaatgaacaggcattataaaccttccattagatga

SEQ ID NO: 8082 - protein, 322 aa, Unknown
  Obtained from environmental sample
  misc_feature (1)..(322): Xaa is any amino acid
MTESAELGKLADVISDSVSLSELEAIKDYFGMLLERTYDQEMLDEINPLNELHYVNKETGDRKVFQFAFATVERGRGEIFILVTVYDITTRVELQQRLAEEEARRQEEMQAVFELIQVEPDVFNDFMADMEHEFEEIDKILKNDALSTHDVLVKIYQSVHAIKSNAVILGLNVFGNKVHNLESKIKKLREMQGDVSFGEMLNLTMEIEKISKEKEGFRDILNKLQNYAGSGGKSAGTGEKQNIKVLIESLTKTTSRVAEDLDKKIKFIASEIDPEAIDKGPRRVMKEILMQLIRNSALHGIETPEERKTKVRMNRHYKPSIR

SEQ ID NO: 8083 - DNA, 720 bp, Unknown
  Obtained from environmental sample
  misc_feature (1)..(720): n is a, c, g, or t
gtgacaatgctgtctgtatatactancagacagttttattatacatatcttacaaaaaggagttttattatgaaaaacaaactatgggttatcgccctgnttgcggtattcacactatcaacgacattttgttatggtcagagcggtggtggagctattacaagccctacagggattgtaatggtttcaataccagccggaacctttatgatgggtagtcccagaagcgaaccgaatagggataaagatgaaacgcaacattcggtaacgattagtagttttaaaatgagtaagtatgaggtaacgcaggcgcagtgggaaacggtaatggggacaaatcccagtgtatttgactcagatccgaaagcgggtgaaattcaaggtaagcgtcctgtggaatgtgtaagctggtatgacgctatagtattctgtaacaaattgagcataaaggaaggattaagccccgtgtacagcattaacggtaaaaccaaccctatggattggggaaaagtaccaagacagagtcaaacaaaaaataatgatccgacatgggatactgtagtaattgtagccggttctaatggttatcgtttaccgactgaggcgcagtgggagtatgcctgccgagcaggaacaacaacagcgtataacacaggagctacgattagcgacaatacagggtggtatgaagacagctatgaagactacgaagatgaataa

SEQ ID NO: 8084 - protein, 239 aa, Unknown
  Obtained from environmental sample
  DOMAIN (57)...(239): Domain of unknown function (DUF323)
  misc_feature (1)..(239): Xaa is any amino acid
MTMLSVYTXRQFYYTYLTKRSFIMKNKLWVIALXAVFTLSTTFCYGQSGGGAITSPTGIVMVSIPAGTFMMGSPRSEPNRDKDETQHSVTISSFKMSKYEVTQAQWETVMGTNPSVFDSDPKAGEIQGKRPVECVSWYDAIVFCNKLSIKEGLSPVYSINGKTNPMDWGKVPRQSQTKNNDPTWDTVVIVAGSNGYRLPTEAQWEYACRAGTTTAYNTGATISDNTGWYEDSYEDYEDE

SEQ ID NO: 8085 - DNA, 918 bp, Unknown
  Obtained from environmental sample
  misc_feature (1)..(918): n is a, c, g, or t
atggcccgtaactctgcggtatctttatcaatatcaatactatcaataataacattaatactgaccgtatcctcttgttccggcaacaacggcaaacacgtcattcgcaaaagactttttttccgaatggacaccatgattgaggtcacgatatccgttccgccccgctacgacatagccccgctctggcgctcaatggattcgcttttgacgcagtgcgggggtcgcttctcggcgtccggggattcttcggagattaatgttatcaatacgcgggcgtcgaacgcgctgccggtatcggtgccgctgggagagatgctgcggctgggtgtggcctacggcgataccttaggcggcgcattcgacatcaccgtgttgcccttaaaggagatctggggcctctgcgagcggtgcggcgacagcgtcccgcttcctgattccgcggcggtatcggccgcgctgcaatccgtcaattacaaaaagatacgtgttaatgacgccggcgacagcgcgtttttcgactccccggcgacccgcgtcgacgtcggcggtatcgccaaagggtttgttatcaagtggctgggcgcgcttacggagggttacggcgtagacaatttcctaatctccgccggaggcgacatcatatcctccggccgccgccccgacggcgccccttggcgcgtaggcgtccgccacccgcgcaactccgccgaactgatagccgcgatccccatagaatccggcgcaatattcacaagcggcgactacgaacgggcacgcgtaacggacgacggccgccgctaccaccacatcttcaacccctcaaacggctacccctgcggcaagaaccagaagttgacgatacaaacccccgatccgatagagccgacatcctatccacggcctattctgccgtaa

SEQ ID NO: 8086 - protein, 305 aa, Unknown
  Obtained from environmental sample
  SIGNAL (1)...(28)
  DOMAIN (13)...(299): ApbE family
  misc_feature (1)..(305): Xaa is any amino acid
MARNSAVSLSISILSIITLILTVSSCSGNNGKHVIRKRLFFRMDTMIEVTISVPPRYDIAPLWRSMDSLLTQCGGRFSASGDSSEINVINTRASNALPVSVPLGEMLRLGVAYGDTLGGAFDITVLPLKEIWGLCERCGDSVPLPDSAAVSAALQSVNYKKIRVNDAGDSAFFDSPATRVDVGGIAKGFVIKWLGALTEGYGVDNFLISAGGDIISSGRRPDGAPWRVGVRHPRNSAELIAAIPIESGAIFTSGDYERARVTDDGRRYHHIFNPSNGYPCGKNQKLTIQTPDPIEPTSYPRPILP

SEQ ID NO: 8087 - DNA, 699 bp, Unknown
  Obtained from environmental sample
  misc_feature (1)..(699): n is a, c, g, or t
ttgacgagaaataaaaccattacgctgcttatcctggaagtcatttttttggctttgttgttcatggtgtggaattccttcagggcggaggaacggcctgagcttctcgcgccgacggcggaaaaggcgcgtccgcaagatgcgacgccgtccgccccgagcagcgccgtgcttgcgcctttcgtcccgaaggccgcgacgcagcagggggagaatgtcgcgcctgaacggggatcttcggcggagggcgttgcggtaaaaaccgtgcccgcgcagatagacgccggacaaacagcccccgcagcttctccgccgcaggcggtcacgcccgcccgccccgccccgcccaaggttgcggccacgccggagccggccgccaaacccgtgagcgggggcgtcaggaacatcacgagcgccgttgtctatgtcacccaagagggtgtcacgttgcgcctcggcgcggacgcgccacttacctgcaaatccatgctgttgcataatcccgagcgtctggtgcttgactgcgatgggcaatggaatgtggccgctcccagtgtgccgcagaacaagatcatcaaggccgtccgggtggggcggcaggctgattccacgcgcatggcggttgatctccaccggactcccgcatcctatcggctgttgcagacctcgccgaggggactcgacgtgcgtttgcgctga

SEQ ID NO: 8088 - protein, 232 aa, Unknown
  Obtained from environmental sample
  SIGNAL (1)...(28)
  misc_feature (1)..(232): Xaa is any amino acid
MTRNKTITLLILEVIFLALLFMVWNSFRAEERPELLAPTAEKARPQDATPSAPSSAVLAPFVPKAATQQGENVAPERGSSAEGVAVKTVPAQIDAGQTAPAASPPQAVTPARPAPPKVAATPEPAAKPVSGGVRNITSAVVYVTQEGVTLRLGADAPLTCKSMLLHNPERLVLDCDGQWNVAAPSVPQNKIIKAVRVGRQADSTRMAVDLHRTPASYRLLQTSPRGLDVRLR

SEQ ID NO: 8089 - DNA, 471 bp, Unknown
  Obtained from environmental sample
  misc_feature (1)..(471): n is a, c, g, or t
gtgttcgccgcccaacagcaccggcagggcgttgtgggccagcgcttcgcgcgtgctgcgggcgatgttttccagcgccgtttcgatgctgccggtgcagtccacggcctcggcagtatggatgccgagcgcgccggggcaggacgcgccatcccagggttcaaggtgttgcgaagccgccagtatcgccgccgggccgcgcgccgtgcctgcgccataggaaaccgtgtgctccaacggcgcggggatgatgtggaacagggcgttttccggcgcggcgggtgcgtattcggatgcgagaaatgcgggcgtcacggcggctccttccgatgcgtaagccaagctgcactcccttgcccggcggtcagccggcttttttcgaggcacgccgcgcacgcagccagtcgtaccaagcttccagaccctgcccgttgcggcaggagacttcgaacacggcgagactgcggttga

SEQ ID NO: 8090 - protein, 156 aa, Unknown
  Obtained from environmental sample
  misc_feature (1)..(156): Xaa is any amino acid
MFAAQQHRQGVVGQRFARAAGDVFQRRFDAAGAVHGLGSMDAERAGAGRAIPGFKVLRSRQYRRRAARRACAIGNRVLQRRGDDVEQGVFRRGGCVFGCEKCGRHGGSFRCVSQAALPCPAVSRLFSRHAAHAASRTKLPDPARCGRRLRTRRDCG

SEQ ID NO: 8091 - DNA, 813 bp, Unknown
  Obtained from environmental sample
  misc_feature (1)..(813): n is a, c, g, or t
atgcaacgacgaatacacgaaatggttaatacgcggacagaattcgtggatgttttgccgtatcccacccattccctgaaccccataaaatcgcagctaccgcagaaaggtgcgcctccatacccgccatccgcagagcattggcttgggacagacgctcacgggagggatgttctttccagattgattcacgggttcaggatttgcatgagctttagccttttgctctctttgatagggactttttttgggatagtgataggcgggattcagggatatttgggtggaaagacggatataatttttcagagggtaattgaaatttgggctgcgctcccttttttgtatgtggttattctgctaggtagcatttacggtcagggcttttggcttttggctgtgattatggcggcttttagctggataggccttagctattatatgagggcagagtttttcaaaataaaaaatatgcagtttgtaaaggctgctaccgtgcttggctttagccataagagaatttttttcaaggagattttgccaaacgccttggctcccgttatcacgcttttccctttctctttaatcggtggaatatcggggcttacctctttggattttctgggctttggcttgcagcccccaacgccttcttggggcgatttgctctcccaaggtctaacaaacctctacgctccgtggattaccatcttcacaataacggcactttttgcaacccttatgctcgcttcgtttataggcgagggaataagagatgcctttgacccaaaatcaggcgatagatttgagtga

SEQ ID NO: 8092 - protein, 270 aa, Unknown
  Obtained from environmental sample
  DOMAIN (66)...(267): Binding-protein-dependent transport system inner membrane component
  misc_feature (1)..(270): Xaa is any amino acid
MQRRIHEMVNTRTEFVDVLPYPTHSLNPIKSQLPQKGAPPYPPSAEHWLGTDAHGRDVLSRLIHGFRICMSFSLLLSLIGTFFGIVIGGIQGYLGGKTDIIFQRVIEIWAALPFLYVVILLGSIYGQGFWLLAVIMAAFSWIGLSYYMRAEFFKIKNMQFVKAATVLGFSHKRIFFKEILPNALAPVITLFPFSLIGGISGLTSLDFLGFGLQPPTPSWGDLLSQGLTNLYAPWITIFTITALFATLMLASFIGEGIRDAFDPKSGDRFE

SEQ ID NO: 8093 - DNA, 651 bp, Unknown
  Obtained from environmental sample
  misc_feature (1)..(651): n is a, c, g, or t
atggcaatgagtcatgccgaaaatctgggcgtgggacgggaggatatggcagggacggggcaggtttggattctttcacgaatgtcagttttggtaaaaagccgtcccaaattctgcgaaactgtcacggtaagaagctggccgtgcggctgggaaaaattattcgccatgcgtgatttcgatattagagataaaaatgatacggcggttgtcgccgctcgaagcgcatggctaatcgtagacattgaaaaacgccgcccgttaagacctcaatccgtaatggacaaccttccgaaaaacgagggagttaccgctcttactcccgaagacaacggaaccgccgctcttgaggagcgcaaagaccttcaaaaagcggcggaaagaaaagcgctctacacggatatcgattacaacgggcacgttaacaatgtccgctatgtccaatggatagaggacgctttagacccccaaattttagaaaaagcggataaattccgcattgacatcaactacatgaatgaaataatgcttggagaaacagcggaacttttatccgcgcccatttccggtgaaaataacgccttcgcttttgaagggcgcaaaaaagaaagcggacaaaccgcttttagagctgaattgcggctggggtaa

SEQ ID NO: 8094 - protein, 216 aa, Unknown
  Obtained from environmental sample
  DOMAIN (2)...(211): Acyl-ACP thioesterase
  misc_feature (1)..(216): Xaa is any amino acid
MAMSHAENLGVGREDMAGTGQVWILSRMSVLVKSRPKFCETVTVRSWPCGWEKLFAMRDFDIRDKNDTAVVAARSAWLIVDIEKRRPLRPQSVMDNLPKNEGVTALTPEDNGTAALEERKDLQKAAERKALYTDIDYNGHVNNVRYVQWIEDALDPQILEKADKFRIDINYMNEIMLGETAELLSAPISGENNAFAFEGRKKESGQTAFRAELRLG

SEQ ID NO: 8095 - DNA, 666 bp, Unknown
  Obtained from environmental sample
  misc_feature (1)..(666): n is a, c, g, or t
atgatgacttttgctgaatatgatgcgagaatttgcaacgaagatttaaaagagtattttcatcatttaactttagagagacaggaaaatccgcagaacgaaacgattaaggacgtgattgcggagttgcaaggcatagtgatcccaggtcgtttaagcggcaaagcggttatagaattgcgagagcaaaataaagttgcagcggatttggcagaagaggggaaaatagaggaaagccttgcagttattgagcagatactcaatgcttgcccggaaaattactctgcgttttacacccttggctatatatcttttgaacaagaggattttgaaaaagccattgaatgttttaaacaggcttttgaatacaaccagtttttcactgatgtagttttgagaatttatgattgctgtgtttgccttggcgatatgagtgatattggtgttgttttgaataaagctcttgctttgcagcctagcgaccctgagcttttggagacaaagcggcatttagaagaaggcacatatcctgagcggttggcacagtacataaaaaagacagatgaaaagaaagacaaattaaggcaggaacttttggagattaaaagactactggaagaaggcaatacagaagaagcgttggaaaaattaaataagctggtgtga

SEQ ID NO: 8096 - protein, 221 aa, Unknown
  Obtained from environmental sample
  DOMAIN (94)...(127): Tetratricopeptide repeat
  misc_feature (1)..(221): Xaa is any amino acid
MMTFAEYDARICNEDLKEYFHHLTLERQENPQNETIKDVIAELQGIVIPGRLSGKAVIELREQNKVAADLAEEGKIEESLAVIEQILNACPENYSAFYTLGYISFEQEDFEKAIECFKQAFEYNQFFTDVVLRIYDCCVCLGDMSDIGVVLNKALALQPSDPELLETKRHLEEGTYPERLAQYIKKTDEKKDKLRQELLEIKRLLEEGNTEEALEKLNKLV

SEQ ID NO: 8097 - DNA, 912 bp, Unknown
  Obtained from environmental sample
  misc_feature (1)..(912): n is a, c, g, or t
atgagccaactctggcccggcgccgctgccgttttcagcggggaaagcggggaggggaagcgcctgcttgccgccattgccgcctgcggcgctgatatacngcttancggcatcagcggcgcggcggggctggaaccttcaatggcggcgattgaggcgggttctgaccttgccctcgccaataaagaaaccctggtcatggcgggaccgctggtctttcagaaagcgcgtgaaaaaaaagtatcgatcattcccgttgattcagaacattcggctatttttcaccttattgaagcgcacagaagcgatgcgttagatgaaattatacttaccgcgtcgggcggccccttcagggattactctgttgaagaaatgaaaaaagttaccccccaggccgcccttgcccatcccacctggaatatggggccgaagatcaccattgattcggcttctatggcaaacaagggactggaagtgatagaggcagcgcggctgttcacgctgcccggcgggcagccacttaccccggaaaaaatcaaagtggtgattcatccccaaagtatcgtgcactcaatggtcaggatgaaggacggcgcggtatacgcccagctttcccgccctgatatgcggcttcctattcataaggcactatactggccggaaacattgccttctaaagaaggcgcgccttccgactttggacgactcgactttgaatcgctaagccttaccttttatcaacccgatacggaaaaatttcctctgttggctatggcgtatgaggcggtaaaaaagggcgcactgtacccctgcgcgtacaacggggcaaatgaggcggcggcgggcgctttccttgcgggacgtattggctttcttgatataagccngtattacacggtatgttttagataa

SEQ ID NO: 8098 - protein, 303 aa, Unknown
  Obtained from environmental sample
  DOMAIN (6)...(69): 1-deoxy-D-xylulose 5-phosphate reductoisomerase
  misc_feature (1)..(303): Xaa is any amino acid
MSQLWPGAAAVFSGESGEGKRLLAAIAACGADIXLXGISGAAGLEPSMAAIEAGSDLALANKETLVMAGPLVFQKAREKKVSIIPVDSEHSAIFHLIEAHRSDALDEIILTASGGPFRDYSVEEMKKVTPQAALAHPTWNMGPKITIDSASMANKGLEVIEAARLFTLPGGQPLTPEKIKVVIHPQSIVHSMVRMKDGAVYAQLSRPDMRLPIHKALYWPETLPSKEGAPSDFGRLDFESLSLTFYQPDTEKFPLLAMAYEAVKKGALYPCAYNGANEAAAGAFLAGRIGFLDISXYYTVCFR

SEQ ID NO: 8099 - DNA, 402 bp, Unknown
  Obtained from environmental sample
  misc_feature (1)..(402): n is a, c, g, or t
atgaaattctttgatgattttctttgtcaaaaaaataaaaaaaatcatgatgtctgcggagactactgtctttacgagcgcaccgccgccggcatggtttacgtggtatgcgacggagtaggctccggtatttacgcgaatatttccgctatcacctgcgccaaccgtattctggaactgatccggtgcggaatgtctatcagaatgacctgcgaaatggtagcggcgtcaatgcaccgcgcgcgaaaagaagacatcccgtttgccgctttctcggcggtttcaatttcacctgacggtaactatactgtttattcctatgaatcgccgaacccgattttattaaaaaacaaccacgcgactgttcttactccgcgtttttacacaaccggcttgaagtaa

SEQ ID NO: 8100 - protein, 133 aa, Unknown
  Obtained from environmental sample
  misc_feature (1)..(133): Xaa is any amino acid
MKFFDDFLCQKNKKNHDVCGDYCLYERTAAGMVYVVCDGVGSGIYANISAITCANRILELIRCGMSIRMTCEMVAASMHRARKEDIPFAAFSAVSISPDGNYTVYSYESPNPILLKNNHATVLTPRFYTTGLK

SEQ ID NO: 8101 - DNA, 534 bp, Unknown
  Obtained from environmental sample
  misc_feature (1)..(534): n is a, c, g, or t
atggctgaacttgaaatgtgtattccttatatgcgccgcctcgctcagcagcgtaccgacagagttatagacacaacgcccaacggggttgtggttttagacagcgaattgtgcatagtaaaaatgaatccggcttttcaaaaaatgtttacgtgtaacaacggcattttgggaagacgcatttcctatcttgtgaatgcagacggttttgaaaccttacattccggcgcttcggaaaaatgcgagtctattcaaacaaagtacgggattaagtaccatgaaattctttacgcgttacgcgaagagaaccaatatgtcggtatttattcggatatttcaagaatcaaatatgacgccgggcagttggatacgataaaaacgcaaactttaatgcacgcgcgggaattcttgaatcatcaagtgcgttttgcgcaggaaatggcgcactatctgggcaaaagcacagcccaaagcgaagaaatcgcgaaacgtctgattggactctacgaagaagatagcggtgaagttacatga

SEQ ID NO: 8102 - protein, 177 aa, Unknown
  Obtained from environmental sample
  misc_feature (1)..(177): Xaa is any amino acid
MAELEMCIPYMRRLAQQRTDRVIDTTPNGVVVLDSELCIVKMNPAFQKMFTCNNGILGRRISYLVNADGFETLHSGASEKCESIQTKYGIKYHEILYALREENQYVGIYSDISRIKYDAGQLDTIKTQTLMHAREFLNHQVRFAQEMAHYLGKSTAQSEEIAKRLIGLYEEDSGEVT

SEQ ID NO: 8103 - DNA, 831 bp, Unknown
  Obtained from environmental sample
  misc_feature (1)..(831): n is a, c, g, or t
atgcaagcgcagacaatttatactattacagctaactgtcaggattgttaccgctgtgtgcgtgaatgtccggtaaaagcaataagcattaacaacggacaagcgcatattgaagacaatttatgcatcaaatgcggaacttgtgtgcgggaatgcccccagcacgcaaaaaccgtccgccccgatttagaagaagcaaaggcgctgcttggcggcggcaaaatcgtagccgccagcgtagcgccctcgtttgccgcaatgtttcccggcgctctaagcagacgtattccttccgcgttacgccaattaggttttaaatatgtcagtgaaacagccgaaggcgcgaagtatgttacggaacaatcttttataacgccgcagaagggaagcatttgcacagcctgtcccgctgttgtcaaccttatcgaaaaataccacagcgaatatttagacgcgttaattcctgtggtctcgcccatgatagcacatggcagaataatcaaagaacaacagcctaactgcgctgtgatttttatcggtccctgcgccgcaaaaaagcaggaaattctaagaccggaaaacgcaggcgcgatagacgttgttataacttttacggaacttttagagtggctttcatcgganaatattcaaatagaanactgttccgaaagcggttttgatcaattttacgaaaccggcgacgcgcggctgttccccattcagggcggaatgttaaaaaccggcagtattcaaagcgacgggacacaggcgaacgtactgcacttaagcggcgcggaagacattttagagttgntttcccggcaatattga

SEQ ID NO: 8104 - protein, 276 aa, Unknown
  Obtained from environmental sample
  DOMAIN (63)...(275): Iron only hydrogenase large subunit, C-terminal domain
  misc_feature (1)..(276): Xaa is any amino acid
MQAQTIYTITANCQDCYRCVRECPVKAISINNGQAHIEDNLCIKCGTCVRECPQHAKTVRPDLEEAKALLGGGKIVAASVAPSFAAMFPGALSRRIPSALRQLGFKYVSETAEGAKYVTEQSFITPQKGSICTACPAVVNLIEKYHSEYLDALIPVVSPMIAHGRIIKEQQPNCAVIFIGPCAAKKQEILRPENAGAIDVVITFTELLEWLSSXNIQIEXCSESGFDQFYETGDARLFPIQGGMLKTGSIQSDGTQANVLHLSGAEDILELXSRQY

SEQ ID NO: 8105 - DNA, 897 bp, Unknown
  Obtained from environmental sample
  misc_feature (1)..(897): n is a, c, g, or t
atgctgccgaacctgttccgccgcctctttgccgaggggtcggtctcggctgcgtttattccaaccttcaaggaataccttcttgagaacgatcagaaaaagaaccgcgaattcctttcctgtatttttacttttcttacgtttcttgtcacacttacggtaatggcgggaatcctccttgccccctttctcatacgttttttcggaatggaagattttgacgagacggttctgctcacaaggatcatgttcccctttttgggctttatctcaatcgccgccctgttccaggggatactcaacagcctgcatatttttaccccctcgggtctcgctccgattttgttaaatattgtaacaatagtctgcgcctatgccctcagcccatttaccaaaaacccggcgcgggctatggcctgcggcatactcataggcggcttcctggaggcggcaatacagcttccctttgtgctgaaaaacgggcagcgtttttttatcacgggacttaaaaaggcttttaacaatccgggaaccagaaaagtgctgaagcttatcgggcctacaattataggtatggcggcataccagcttaatgatcttgtttccacagctcttgccggcaacgcgggggagggtattgtctcaagccttcagtattcgctgcggcttcaggaacttatcctcggcgttttcgccgtatccatagggacggtgctgcttccgaatctcgccgagtacgcgaaatcttcccaatggaaaaacttcaatgaacggctggcttccgctatggatatcatagcgcttatcactgttccgattacctttttttcccttgcccagggagagattctgatccgcctgcttttccagaacgcagttttgacgaatcctcggtaa

SEQ ID NO: 8106 - protein, 298 aa, Unknown
  Obtained from environmental sample
  DOMAIN (1)...(298): MviN-like protein
  misc_feature (1)..(298): Xaa is any amino acid
MLPNLFRRLFAEGSVSAAFIPTFKEYLLENDQKKNREFLSCIFTFLTFLVTLTVMAGILLAPFLIRFFGMEDFDETVLLTRIMFPFLGFISIAALFQGILNSLHIFTPSGLAPILLNIVTIVCAYALSPFTKNPARAMACGILIGGFLEAAIQLPFVLKNGQRFFITGLKKAFNNPGTRKVLKLIGPTIIGMAAYQLNDLVSTALAGNAGEGIVSSLQYSLRLQELILGVFAVSIGTVLLPNLAEYAKSSQWKNFNERLASAMDIIALITVPITFFSLAQGEILIRLLFQNAVLTNPR

SEQ ID NO: 8107 - DNA, 468 bp, Unknown
  Obtained from environmental sample
  misc_feature (1)..(468): n is a, c, g, or t
atgaaaatcaaatacttagctttactgctgttaattttattaacaacctgcaacggaacggaggggggcagtacaaatggagaatctattcccggaaatgaaggagaaccatggaacggcgattggtacgcggttcgcgataaccttacaacacagcaattaattctggaaatgggattgggaatcaaccttggtaatactttagaaagtaccggggactggattaacagtagcaaaatctccaattatgaaacggcatggggtagtccgataattaccaaagcaatgattaagggatacgcggacgcgggtttctcctctctgagaattcctgtcacttggtccaatatgatgcagcttaactatgtaatccatcctgatcttttaaatcgggtagaagaaatagtaaaatggacaattgacagtggcatggttgttatgattaatacgcaccatgacagcggatga

SEQ ID NO: 8108 - protein, 155 aa, Unknown
  Obtained from environmental sample
  SIGNAL (1)...(22)
  misc_feature (1)..(155): Xaa is any amino acid
MKIKYLALLLLILLTTCNGTEGGSTNGESIPGNEGEPWNGDWYAVRDNLTTQQLILEMGLGINLGNTLESTGDWINSSKISNYETAWGSPIITKAMIKGYADAGFSSLRIPVTWSNMMQLNYVIHPDLLNRVEEIVKWTIDSGMVVMINTHHDSG

SEQ ID NO: 8109 - DNA, 555 bp, Unknown
  Obtained from environmental sample
  misc_feature (1)..(555): n is a, c, g, or t
atgaaagaagatataaaagaaattgccgcccgtgtaaaggtactgcgggaaattgaagaaatttccattgaagccttggcaaaagaacttggttttgaattgtcggagtatcaggcgtgggaatccgcgcaaaaagattttccggttggcgcgcttgttgaaattgccgcgcgttttaaagttgatctttccgagcttatcagcggggcggcttccaaacttaaaaccttttgtgttacgcgcgcagggcaggctcccgaagtaagccgccgccccatgtacgggtactggaatcttgcttttaattttcaccgtaaaaaagcggagccgtttttggtggaagcgtctcctgaaacagaaaacaaacccatcagccttaacacgcatcccgggcaggaatttgactatgttttggaaggaaagctgctgatttcgattagcggccatgatattgaacttggtcccggcgactgcgtgtattacgattccagcgagcctcatggaatgaaagcgttaggcggaaagaccgcgcgatttttggcgtttgtgttttaa

SEQ ID NO: 8110 - protein, 184 aa, Unknown
  Obtained from environmental sample
  DOMAIN (12)...(66): Helix-turn-helix
  misc_feature (1)..(184): Xaa is any amino acid
MKEDIKEIAARVKVLREIEEISIEALAKELGFELSEYQAWESAQKDFPVGALVEIAARFKVDLSELISGAASKLKTFCVTRAGQAPEVSRRPMYGYWNLAFNFHRKKAEPFLVEASPETENKPISLNTHPGQEFDYVLEGKLLISISGHDIELGPGDCVYYDSSEPHGMKALGGKTARFLAFVF

SEQ ID NO: 8111 - DNA, 765 bp, Unknown
  Obtained from environmental sample
  misc_feature (1)..(765): n is a, c, g, or t
ttgnncaatctttatctgtttcgcaataaatacaaatttaatgtgtctctgctgaacaacagtttgctcgtagcaggtacagacaaaagcaaaactttcttttcgataattggggaagttccagcaaaagaaattttagatgaattgctaaaaaaatacgattactggaaaaatgtttctagcaagcaggctttgcatagtcccattgctttagttgaagacagggataattttgaatatttgtatttgcgaacagacttggcagaactccccggaaaaaatttccagaaaaagagaaatttagtgaatgcctttataaaaacctactctttggataacgtggaaacaaaacttattgacagcgaaacgctaggagatgctctgctggttttggatgaatggaaagaaggcaaaggttctcacagcgattacgatgccgcaaaagaagctttgaatttgcacactgagcttggatttgccggacttgttttttatgttggcaaaaaacctgttggctattgccagggcgaaacgttagctaacgaaaaaagctttgccgtgcattttgaaaaagcaatagatggctacaagggcatttatcaatacataaatcaggaatttgcaaaaagcattccggggagcataatctgcataaacagagagcaagatttggggcatgagggtctgcgccaagccaaaattacttaccgccctgttgattttgtgaggcttttttccagcaatgtctctaccaaagcggaataa

SEQ ID NO: 8112 - protein, 254 aa, Unknown
  Obtained from environmental sample
  misc_feature (1)..(254): Xaa is any amino acid
MXNLYLFRNKYKFNVSLLNNSLLVAGTDKSKTFFSIIGEVPAKEILDELLKKYDYWKNVSSKQALHSPIALVEDRDNFEYLYLRTDLAELPGKNFQKKRNLVNAFIKTYSLDNVETKLIDSETLGDALLVLDEWKEGKGSHSDYDAAKEALNLHTELGFAGLVFYVGKKPVGYCQGETLANEKSFAVHFEKAIDGYKGIYQYINQEFAKSIPGSIICINREQDLGHEGLRQAKITYRPVDFVRLFSSNVSTKAE

SEQ ID NO: 8113 - DNA, 807 bp, Unknown
  Obtained from environmental sample
  misc_feature (1)..(807): n is a, c, g, or t
gtggggggggggggggaggatatatatattttttttttttttttccccccccccccccgccccggagtattgttttgttttttttttttttttttttttttcgagggggggngnnnaaaaaaaagggaggggggggggggggggggggcggggccccccccccccccccctctcttttcttttttttttttttttattaagaaggtttttttttttttttttttttttctcctccccccccacacaaaaaaaaaaagggttggttttgtctttatttttttttttcccccccccccaataaaaaaaaaaaggaaaaaatatttttgtgttttaattannnnccccccccacaaaaaaaaccgccgtggggggggggggcctcttttttttgggggggggggggaggggggatttttntttttttttttttctccccgggggggggagaaaaaaacaaacatattttttttctttctttcccccccacaaacaatattaggggggggttttttttttggggtctttttttccccccccccggaggaaattttttttccagggccccacaaaaaaaagggggcggggaaaaatttttttggggggggcctgttttattttttttttaaaagtgggagaaccccaaaaggcccctttttttttttgggccgggggaaacccctgggtccgaccatgnccaaanagaggcgtgcttgctcgggtattcgtcattctgtcgggtgttcggttgcgtcaaatagccgcgcgcggttgctttttacaaaaaaacaggttttactgtattgctag

SEQ ID NO: 8114 - protein, 268 aa, Unknown
  Obtained from environmental sample
  misc_feature (1)..(268): Xaa is any amino acid
MGGGGEDIYIFFFFFPPPPRPGVLFCFFFFFFFFEGGXXKKREGGGGGGAGPPPPPPLFSFFFFFIKKVFFFFFFFLLPPHTKKKRVGFVFIFFFPPPPIKKKRKKYFCVLIXXPPHKKNRRGGGGPLFFGGGGEGGFXFFFFSPRGGEKKTNIFFFFLSPPQTILGGGFFFGVFFSPPPEEIFFPGPHKKKGAGKNFFGGGLFYFFFKSGRTPKGPFFFLGRGKPLGPTMXKXRRACSGIRHSVGCSVASNSRARLLFTKKQVLLYC

SEQ ID NO: 8115 - DNA, 330 bp, Unknown
  Obtained from environmental sample
  misc_feature (1)..(330): n is a, c, g, or t
ttgttttttttttttttttttttttctttgtggggggggggggggaggatatatatattttttttttttttttccccccccccccccgccccggagtattgttttgttttttttttttttttttttttttcgagggggggngnnnaaaaaaaagggaggggggggggggggggggggcggggccccccccccccccccctctcttttcttttttttttttttttattaagaaggtttttttttttttttttttttttctcctccccccccacacaaaaaaaaaaagggttggttttgtctttatttttttttttcccccccccccaataa

SEQ ID NO: 8116 - protein, 109 aa, Unknown
  Obtained from environmental sample
  misc_feature (1)..(109): Xaa is any amino acid
MFFFFFFFSLWGGGGRIYIFFFFFSPPPPAPEYCFVFFFFFFFSRGGXXKKGRGGGGGGRGPPPPPLSFLFFFFLLRRFFFFFFFFSSPPTQKKKGLVLSLFFFFPPPQ

SEQ ID NO: 8117 - DNA, 873 bp, Unknown
  Obtained from environmental sample
  misc_feature (1)..(873): n is a, c, g, or t
atgtatccgggcaaggtgcaacgcattgtgtgcgtcggcaagcgcggccgtaatccattcggccacgcggcgcatttccgcttccttcatcccgcgcgtcgtcaacgcgggcgtaccgatgcgcaccccggacgtgacgaagggcggccgggtctcaaagggcacggtattcttgttgaccgtaatgcccgccatatcaagcgccttttccgcgtccttgccggtgatgtcccggttgcgcaggtccaggagcatcagatgcgtatccgtgccgccggacaccagatcaaaacccgcatcatggaggcatttcgccagctcggcggcgtttttccgcgtctgctcctggtattccctgaactgcggacgcaaggcttcgcccagcgccacggcctttgccgcgatgacatgcatgagcgggccgccctgaatgccgggaaaaatctggctgttcaaggtattgcttccgtcttcgccggaaaggatcatgccgccgcgcgggccgcgcagggttttatgggttgtggtggtgacgatatgggcgtgcggcaggggcgaggcgtgcacgccggtcgcgaccagacccgcgatatgggccatgtccacgatcagtttcgcgcccacgccatcggcaacggcgcgaaagcccgcgaaatccaactcacggggatacgcgctggcgccggcgacaatggccgccgggcggtgttcacgcgcgagcgcggccacctgatccatgtcaatgcggcccgtttcccgttccacgccgtacgcgacgatcttgaacaggcgtccggaaaaattcaccgggctgccgtgggtcagatgcccgccggggaaagatccatgcccaaaatgacatctccgggctga

SEQ ID NO: 8118 - protein, 290 aa, Unknown
  Obtained from environmental sample
  misc_feature (1)..(290): Xaa is any amino acid
MYPGKVQRIVCVGKRGRNPFGHAAHFRFLHPARRQRGRTDAHPGRDEGRPGLKGHGILVDRNARHIKRLFRVLAGDVPVAQVQEHQMRIRAAGHQIKTRIMEAFRQLGGVFPRLLLVFPELRTQGFAQRHGLCRDDMHERAALNAGKNLAVQGIASVFAGKDHAAARAAQGFMGCGGDDMGVRQGRGVHAGRDQTRDMGHVHDQFRAHAIGNGAKAREIQLTGIRAGAGDNGRRAVFTRERGHLIHVNAARFPFHAVRDDLEQASGKIHRAAVGQMPAGERSMPKMTSPG

SEQ ID NO: 8119 - DNA, 855 bp, Unknown
  Obtained from environmental sample
  misc_feature (1)..(855): n is a, c, g, or t
gtgaatttttccggacgcctgttcaagatcgtcgcgtacggcgtggaacgggaaacgggccgcattgacatggatcaggtggccgcgctcgcgcgtgaacaccgcccggcggccattgtcgccggcgccagcgcgtatccccgtgagttggatttcgcgggctttcgcgccgttgccgatggcgtgggcgcgaaactgatcgtggacatggcccatatcgcgggtctggtcgcgaccggcgtgcacgcctcgcccctgccgcacgcccatatcgtcaccaccacaacccataaaaccctgcgcggcccgcgcggcggcatgatcctttccggcgaagacggaagcaataccttgaacagccagatttttcccggcattcagggcggcccgctcatgcatgtcatcgcggcaaaggccgtggcgctgggcgaagccttgcgtccgcagttcagggaataccaggagcagacgcggaaaaacgccgccgagctggcgaaatgcctccatgatgcgggttttgatctggtgtccggcggcacggatacgcatctgatgctcctggacctgcgcaaccgggacatcaccggcaaggacgcggaaaaggcgcttgatatggcgggcattacggtcaacaagaataccgtgccctttgagacccggccgcccttcgtcacgtccggggtgcgcatcggtacgcccgcgttgacgacgcgcgggatgaaggaagcggaaatgcgccgcgtggccgaatggattacggccgcgcttgccgacgcacacaatgcgttgcaccttgcccggatacatgaagaggtgtcgcgcttcgcgctccggtatccgctcttcgcctggtag

SEQ ID NO: 8120 - protein, 284 aa, Unknown
  Obtained from environmental sample
  DOMAIN (1)...(252): Serine hydroxymethyltransferase
  misc_feature (1)..(284): Xaa is any amino acid
MNFSGRLFKIVAYGVERETGRIDMDQVAALAREHRPAAIVAGASAYPRELDFAGFRAVADGVGAKLIVDMAHIAGLVATGVHASPLPHAHIVTTTTHKTLRGPRGGMILSGEDGSNTLNSQIFPGIQGGPLMHVIAAKAVALGEALRPQFREYQEQTRKNAAELAKCLHDAGFDLVSGGTDTHLMLLDLRNRDITGKDAEKALDMAGITVNKNTVPFETRPPFVTSGVRIGTPALTTRGMKEAEMRRVAEWITAALADAHNALHLARIHEEVSRFALRYPLFAW

SEQ ID NO: 8121 - DNA, 303 bp, Unknown
  Obtained from environmental sample
  misc_feature (1)..(303): n is a, c, g, or t
atgccgggaaaaatctggctgttcaaggtattgcttccgtcttcgccggaaaggatcatgccgccgcgcgggccgcgcagggttttatgggttgtggtggtgacgatatgggcgtgcggcaggggcgaggcgtgcacgccggtcgcgaccagacccgcgatatgggccatgtccacgatcagtttcgcgcccacgccatcggcaacggcgcgaaagcccgcgaaatccaactcacggggatacgcgctggcgccggcgacaatggccgccgggcggtgttcacgcgcgagcgcggccacctga

SEQ ID NO: 8122 - protein, 100 aa, Unknown
  Obtained from environmental sample
  misc_feature (1)..(100): Xaa is any amino acid
MPGKIWLFKVLLPSSPERIMPPRGPRRVLWVVVVTIWACGRGEACTPVATRPAIWAMSTISFAPTPSATARKPAKSNSRGYALAPATMAAGRCSRASAAT

SEQ ID NO: 8123 - DNA, 756 bp, Unknown
  Obtained from environmental sample
  misc_feature (1)..(756): n is a, c, g, or t
gtgataacgggcgttcgggagcaggcctgccgtgatgtgacggcggattttctcgtctggcagcaggaagagcgtccgtacctcattctcaagctggcttccaccctggatgggcgcatcgcaagcagaagcgggcattcacaatgggtcagcggcgaggcttcccgcgccagggttcatgaactgcgcgccaatatcggcggttgcggcggcgtggtgctcatcggcggcaataccctgtacgccgacaatccgcggctgacggcccggacgctcccggcggacgccgctcagccgcgggcctgcgtactcacctcgcgcctgccgaagccggcggcacggctcgccgtgctgcaagagcggccggagcaatgcatctttctctgcccgcatgagtacgccgcttcgcctgaggcctcggcgttgcgggacatcggcgcgtatgtctacggccttgagcaggcgccgggccatgcagggctggatctccgtgcggggctgcgtctgttgtggcagcatcacaaatgcttttatgtgctctgcgaggggggcggcaagctcgcgctcaccctgcttgcgcagggactggtggacgagttccacctgcacatggccccgcgcattttgggggacaatctggcgctgccgctctttgacggacgcgcgcccttgcgtatggatcagagcatggacatgcgcataacttcgctcacgacctgcggcgaagacgcgcattttgtgctgcggccgcgttga

SEQ ID NO: 8124 - protein, 251 aa, Unknown
  Obtained from environmental sample
  DOMAIN (26)...(246): RibD C-terminal domain
  misc_feature (1)..(251): Xaa is any amino acid
MITGVREQACRDVTADFLVWQQEERPYLILKLASTLDGRIASRSGHSQWVSGEASRARVHELRANIGGCGGVVLIGGNTLYADNPRLTARTLPADAAQPRACVLTSRLPKPAARLAVLQERPEQCIFLCPHEYAASPEASALRDIGAYVYGLEQAPGHAGLDLRAGLRLLWQHHKCFYVLCEGGGKLALTLLAQGLVDEFHLHMAPRILGDNLALPLFDGRAPLRMDQSMDMRITSLTTCGEDAHFVLRPR

SEQ ID NO: 8125 - DNA, 360 bp, Unknown
  Obtained from environmental sample
  misc_feature (1)..(360): n is a, c, g, or t
atgacactgaaacagatttatgtccgaaatttaaaagaattccgcaaaaaagaaggtctttcacagatgaaattggcagaattttgtgacactgcaaccagttatataggggatatagagattgggcgaagatttccttctatggaaatgattgaaaaaatagccaatattctcaggataaagccgtacctatttttcaaggaacaggcagacaaaattgaaaattcggaaactgaaaatttattcccgcgcctgccaaactccatgaaaaaacagattaaaactcaaataaaaatccaaattgaccagtcaacaagcgaaattctcaatgaaattgatgagattatcaacaaatactga

SEQ ID NO: 8126 - protein, 119 aa, Unknown
  Obtained from environmental sample
  DOMAIN (11)...(65): Helix-turn-helix
  misc_feature (1)..(119): Xaa is any amino acid
MTLKQIYVRNLKEFRKKEGLSQMKLAEFCDTATSYIGDIEIGRRFPSMEMIEKIANILRIKPYLFFKEQADKIENSETENLFPRLPNSMKKQIKTQIKIQIDQSTSEILNEIDEIINKY

SEQ ID NO: 8127 - DNA, 633 bp, Unknown
  Obtained from environmental sample
  misc_feature (1)..(633): n is a, c, g, or t
atgagtgaatcgtctgaaaatttaaataaaagtgaaaatcctttaatactggtgaacggcctggatacggaaaaaggcatggcctcggcgggcggaaacttaaaaacctacttgaatctgctttccacatttcacatggacggagcctcaaaaattaatgaaataaaaacatatattgaaaccggcaatataaagtcatatacaattaatgtccatgcgttaaagagcgcctgcgcgaacattggagccagcgagctatccgaagccgccgccgcgctggagatggcgggaaagaagggagatttatcctttattcgtgataataatgccgcatttgtatcgaatttagagacgattcttaataatatcaatattgcgctgatggaagaggcaaaggaaggcaaaaaaaaccatattgacagaaatttgctaaaaactgagctttccaacctaaaaacggcgcttgttgattttgattatttcaagatagaagactcggtaactaacttacaagattttacgcaggatgcggacgttggcgatacggtaaaggctatattgaaaaaaatacttaatggggagtacgaggaagccatatcaatgacggacgctcttatcaatttctcacaatga

SEQ ID NO: 8128 - protein, 210 aa, Unknown
  Obtained from environmental sample
  DOMAIN (39)...(115): Hpt domain
  misc_feature (1)..(210): Xaa is any amino acid
MSESSENLNKSENPLILVNGLDTEKGMASAGGNLKTYLNLLSTFHMDGASKINEIKTYIETGNIKSYTINVHALKSACANIGASELSEAAAALEMAGKKGDLSFIRDNNAAFVSNLETILNNINIALMEEAKEGKKNHIDRNLLKTELSNLKTALVDFDYFKIEDSVTNLQDFTQDADVGDTVKAILKKILNGEYEEAISMTDALINFSQ

SEQ ID NO: 8129 - DNA, 555 bp, Unknown
  Obtained from environmental sample
  misc_feature (1)..(555): n is a, c, g, or t
atgaattccctaaccagaagcctaattttggctatgaaatacaagggaatgcaaaaaatagcctcgtatttggtagcaaactcctctgttggccgcaaaggggaagctctccaaattttggagagctggggaaaaaatatgagctttgtccctgtgcctgtgcacaacgcacgaaagcgcgaaaggggctacaaccaatgcgaacaggccgcccttgaactttcgctccactgcggagggaaattgcaaacaaacgttctaaaaaggcgaatctacaaaccttcgcaaacatcgcttggcagcggagcccgctctttgaatgtcgcgggtgcatttgaggcaaaaaaaatccaaaatttgcaaatctctccgcaaatagttgtagttgacgatgtttacacaacaggggcaacaacggcatcttgcgctagggctttgaaaagggctggttttgagggtgtaaaaacctgcaccctgctctatgaattgccagcaagtgccagagcggatatggttgcggataagaaaataggttggagaacagaggaggattaa

SEQ ID NO: 8130 - protein, 184 aa, Unknown
  Obtained from environmental sample
  misc_feature (1)..(184): Xaa is any amino acid
MNSLTRSLILAMKYKGMQKIASYLVANSSVGRKGEALQILESWGKNMSFVPVPVHNARKRERGYNQCEQAALELSLHCGGKLQTNVLKRRIYKPSQTSLGSGARSLNVAGAFEAKKIQNLQISPQIVVVDDVYTTGATTASCARALKRAGFEGVKTCTLLYELPASARADMVADKKIGWRTEED

SEQ ID NO: 8131 - DNA, 468 bp, Unknown
  Obtained from environmental sample
  misc_feature (1)..(468): n is a, c, g, or t
ttgggccttgaactggaacaggcgatggaaataatacgagccgaggtcggcccggtcgaggagacggagactgtggaaaccggccgcctgggcggacgcatctgcgcggaagacatcgtcgccgccttccacatccctcccttcaaccgatcccccctggacggctatgccttgcgcgctctggacagccggggggcctctgttgattatccggtcgaacttacagtcattgaggatattgccgccgggcaatggccgcaaaagagcctgacctcgggcagcgcggcccgggtcatgaccggcgcgcccataccggaaggggcggactgcgtaatcaggcaggaggagacggatgagggattgatgcgggtgagaattttcaaggaattgtccccattcgagagtttctgccgccagggtgaggacgttaagctgggcgaggtgctggtccgggccggagaacgttaa

SEQ ID NO: 8132 - protein, 155 aa, Unknown
  Obtained from environmental sample
  DOMAIN (2)...(155): MoeA N-terminal region (domain I and II)
  misc_feature (1)..(155): Xaa is any amino acid
MGLELEQAMEIIRAEVGPVEETETVETGRLGGRICAEDIVAAFHIPPFNRSPLDGYALRALDSRGASVDYPVELTVIEDIAAGQWPQKSLTSGSAARVMTGAPIPEGADCVIRQEETDEGLMRVRIFKELSPFESFCRQGEDVKLGEVLVRAGER

SEQ ID NO: 8133 - DNA, 486 bp, Unknown
  Obtained from environmental sample
  misc_feature (1)..(486): n is a, c, g, or t
gtggcgacgggactgatagaagacacctttgcgccggtggtcgaggccaagctgtcgcttttcgggctggccgcccattggcgtctaatagttgacgaccgtaaggagactatcacgcgggctatccggcggtttcgggaagccggcgcggaactgataatctgcaccggcggaatgagcgtcgatccggacgaccagacgccgggggcgattgccgacagcggcgccaagccggtctgttacggaacgccggtgatgcccggggccatgttcatgctggcctattttgaagacggcacaccggtgctcggcctgccaggctgcgtcatgttcgaccggcgcaccgtctttgacctggtcctgccgcgtctggccgccggcctggttatgaaaccgcttgatttcgcggccctgggccagggcgggctctgcctgcgctgccaggactgccgttatccagcctgcgccttctgtaaaggagcctga

SEQ ID NO: 8134 - protein, 161 aa, Unknown
  Obtained from environmental sample
  DOMAIN (3)...(126): Probable molybdopterin binding domain
  misc_feature (1)..(161): Xaa is any amino acid
MATGLIEDTFAPVVEAKLSLFGLAAHWRLIVDDRKETITRAIRRFREAGAELIICTGGMSVDPDDQTPGAIADSGAKPVCYGTPVMPGAMFMLAYFEDGTPVLGLPGCVMFDRRTVFDLVLPRLAAGLVMKPLDFAALGQGGLCLRCQDCRYPACAFCKGA

SEQ ID NO: 8135 - DNA, 588 bp, Unknown
  Obtained from environmental sample
  misc_feature (1)..(588): n is a, c, g, or t
ttggctgcgtttgccgctcctttggggcgcagctatcaggcggtccacgactgggaaaacggaaagtcgcccctctcgcccataaccgcagaggctatagaaaggcaccatcacatctcgaaaatttggctgcttgacggcacgggtgagatgtttatcaaattatatgaaagcgatcatatagtcgtcccccttctgacccccaaaccacgcgccggcaaggggaaaaggcttgacgactatgtgggcggagagggcgggatgtccttcgacgggcgctggctgcgcagcgtgttcggcgtcgccccggagaacctgtgcctgatgcaggtggacggggacagcatggcgccgacgctggccccgaacgagatgatttttgtggacgggctcaacggctcgcccgagtaccgcgacggcgtctgggtcctgcggctcgacggccacctgttcgtcaagcgcgtccagctgcttgcgtcgggcaagtacctcgccacaagcgacaaccccgcctaccgcccgctggagatggacgacgcgtcccagcttctcggcagggtcgtgggcggcccgcccggacgtttctga

SEQ ID NO: 8136 - protein, 195 aa, Unknown
  Obtained from environmental sample
  DOMAIN (110)...(180): Peptidase S24-like
  misc_feature (1)..(195): Xaa is any amino acid
MAAFAAPLGRSYQAVHDWENGKSPLSPITAEAIERHHHISKIWLLDGTGEMFIKLYESDHIVVPLLTPKPRAGKGKRLDDYVGGEGGMSFDGRWLRSVFGVAPENLCLMQVDGDSMAPTLAPNEMIFVDGLNGSPEYRDGVWVLRLDGHLFVKRVQLLASGKYLATSDNPAYRPLEMDDASQLLGRVVGGPPGRF

SEQ ID NO: 8137 - DNA, 684 bp, Unknown
  Obtained from environmental sample
  misc_feature (1)..(684): n is a, c, g, or t
ttggattcaggcggctgggccggtgaggaagaactgaaggaaactacgctgcggctcagatccggaaccaaccttgatgacgccgccatgattgccgcgaaggcgggcctttgcgggttggaatttctcgccggcatgccgggcagcataggcggggccgtctggatgaacgcccgctgttacgggcgtgaaatcgccgatgtgttagttgaaaccgaaattattgatttttcactttccccgccaggaaacgagcgcctgcctgttaaccgatcggaattcagctacaagcgcagcccttttcagggccgcgacgccttcatcctttccgcggcttttcaactctcatctgataacacggagcatattctcgcgcggatggacgcaaaccggcgcgaccgcgaagagaaggggcattacctcttcccgtccgcgggctcggtgtttaagaacaacccctcctttggcaagcccacgggaaaaatcattgacgaattgggcctgcgcgggcttcaaatcggcggcgcgaagatcgcggactggcacggcaactttattgtcaatacgggagaggcgacatccagggacatacgcgcgttaacggaagaagccgccgccagggtaaaacaaacgacaggtatcatccttgagccgganatattgtttgtggnggattgggagtag

SEQ ID NO: 8138 - protein, 227 aa, Unknown
  Obtained from environmental sample
  DOMAIN (120)...(224): UDP-N-acetylenolpyruvoylglucosamine reductase, C-terminal domain
  misc_feature (1)..(227): Xaa is any amino acid
MDSGGWAGEEELKETTLRLRSGTNLDDAAMIAAKAGLCGLEFLAGMPGSIGGAVWMNARCYGREIADVLVETEIIDFSLSPPGNERLPVNRSEFSYKRSPFQGRDAFILSAAFQLSSDNTEHILARMDANRRDREEKGHYLFPSAGSVFKNNPSFGKPTGKIIDELGLRGLQIGGAKIADWHGNFIVNTGEATSRDIRALTEEAAARVKQTTGIILEPXILFVXDWE

SEQ ID NO: 8139 - DNA, 414 bp, Unknown
  Obtained from environmental sample
  misc_feature (1)..(414): n is a, c, g, or t
atgaccgaggctgagttccggctgttattcaattccgccttccccgtgctttataaagttgcctgccgtattacgaattccggcgaggcggccgaagatctttgtcaggatgcgttcttccgtctgcacgagaagaacatggtctttccaaaccaggaagaggccaagtactggctgatccgcgtggttaagaactcagccttgaattacgcgaagcgaaaacagcgtgagcggaaggcctaccagcgggcattcaaggaaaacacaaggcgggaagaaacaggggaagagcagcttgtcaggaaagaaaccaggcaggaggttttggatgctcttgataaattaccggacaacctccgcgtggtgctgatattaaaggaatactccgaaatgaatacactcgtcngatcctga

SEQ ID NO: 8140 - protein, 137 aa, Unknown
  Obtained from environmental sample
  DOMAIN (9)...(77): Sigma-70 region 2
  misc_feature (1)..(137): Xaa is any amino acid
MTEAEFRLLFNSAFPVLYKVACRITNSGEAAEDLCQDAFFRLHEKNMVFPNQEEAKYWLIRVVKNSALNYAKRKQRERKAYQRAFKENTRREETGEEQLVRKETRQEVLDALDKLPDNLRVVLILKEYSEMNTLVXS

SEQ ID NO: 8141 - DNA, 459 bp, Unknown
  Obtained from environmental sample
  misc_feature (1)..(459): n is a, c, g, or t
gtgatagcggacggcggctgtaaaacgccgggcgatgtcgcgaaggctttctgcgccaatgccgacatggttatgctgggtaccatgttcgccggcaccgacgaatgtgacggcaacattattacaaaatatatccatgacggcgagtattgccaacttgcaacggatcctccaaaatacgagccgctcataaaggaaaggaaattcaaggttttttacgggatgagttccgatctcgcgcaggaatcctattttgggggcattaaggattaccgggccagcgagggcctggttgaagaagtgccgtacaagggttccgtcaatatccaggtgaggaatatcctggggggcttacggtcctgcggcacctatattggggctataaatatcaagaatttcggcaaatgcgcctcctttgtcgaggtaaacagggttcacagagggcctcatgagtcgtag

SEQ ID NO: 8142 - protein, 152 aa, Unknown
  Obtained from environmental sample
  DOMAIN (1)...(150): IMP dehydrogenase / GMP reductase domain
  misc_feature (1)..(152): Xaa is any amino acid
MIADGGCKTPGDVAKAFCANADMVMLGTMFAGTDECDGNIITKYIHDGEYCQLATDPPKYEPLIKERKFKVFYGMSSDLAQESYFGGIKDYRASEGLVEEVPYKGSVNIQVRNILGGLRSCGTYIGAINIKNFGKCASFVEVNRVHRGPHES

SEQ ID NO: 8143 - DNA, 933 bp, Unknown
  Obtained from environmental sample
  misc_feature (1)..(933): n is a, c, g, or t
atgggagagaatcgggcttcctacacgttcgcccccgccgttgtagggtaccccagccagcagacatccaataggctgacgatagacattctcaacacgggcaacacgttgcccggcggtctggacatgtcgccgccgccgcaggaaatgcagtcgtggtcgccgggtcctttcgttgcgcagttttactctggaaccacaccggagaacgtagcctggcgatggaacttttatccccaaaccggtcttggcgcgggaacccacacccggaccattaccgtgtttgcgaaggccgataaccagaacgccgccgccatcaccccggtgtcatttaccctgagctttacggtcagcgcggccactgttaatttagccgccgtgccgggcgtaaccgccccgcaaaccggggcgaccgcggtaacggcggtcgggactaacagccagtactcgggaccggtaagctggtctcccgctctcaccgacggcaaatttgccagcgggactgcgtacacggcgactatcaatctgacggcgacaagcgactactcgctgaccggcgtaggggcgaacttctttaccgtcgcgggcgcgacatcggtaactaacgccgccaacaccggcgctgccaccactgtggttaccgccgtattcccggcgaccacggcctacggcatcagcctttcaaagagcggcacgttcgcgttcccctccgccgtcgtgaactacagcggcactcccgcgacggagacggtaaccgttaccaacacgggcaacacggcgacaggtacgctgaatatcgcgctgtcgggaactaactcaagcagtttcacgctgtcaggatcgtcaatcggcagtatagcgccgaacggaaccggaccttcaccgtcaggccccatgccagcctcgccgccggcacttacacggcaatcgtga

SEQ ID NO: 8144 - protein, 310 aa, Unknown
  Obtained from environmental sample
  misc_feature (1)..(310): Xaa is any amino acid
MGENRASYTFAPAVVGYPSQQTSNRLTIDILNTGNTLPGGLDMSPPPQEMQSWSPGPFVAQFYSGTTPENVAWRWNFYPQTGLGAGTHTRTITVFAKADNQNAAAITPVSFTLSFTVSAATVNLAAVPGVTAPQTGATAVTAVGTNSQYSGPVSWSPALTDGKFASGTAYTATINLTATSDYSLTGVGANFFTVAGATSVTNAANTGAATTVVTAVFPATTAYGISLSKSGTFAFPSAVVNYSGTPATETVTVTNTGNTATGTLNIALSGTNSSSFTLSGSSIGSIAPNGTGPSPSGPMPASPPALTRQS

SEQ ID NO: 8145 - DNA, 819 bp, Unknown
  Obtained from environmental sample
  misc_feature (1)..(819): n is a, c, g, or t
atggacctaacaagcaccggctacagcagggacctgttcacccacaattccaccggcacgctcaccgttaccggcggcaagtttagcggcggcaggggagtggttcaagctaacaccggcgcggtaacgatttccggcggcgatgtggggacgatatacaacgattccaccggcacgctcacgatttccggcggcacggcgacgaatgtgtataacacttccaccggcacgatcacgatttccaacggcacggtgtcgtcggtggcgtacaacaattcctccggcacggtaaacatcaccggcggcaaggtggatacggcaagaaacgaatccaccggcacgctcgccatttccggcggcacggtggcgacggcgctcaaccgatccagcggcacgcttaacatctccggcggcacgatttcagatacgcttgccaacagatatctgatatccaacagcggcgttttaacgatttccggcggaaccataaaaaacggctccgcgccgtccgacccgaccaagcctcccacatccggcgtcgctaacgcttatacggtatacaacgacgccaattccacatcgtttaccctgagcggcagccccgacataacgggcagaatgagggtacagccggggaagacgattgtggcaagcgactttgcgcccggcacaaagacctacctgcttgagttcgggtctttctcccaaaacagcgtagccgttaccaacggatccgctcttttttcgaactttgtgctgtataacaccacggattgggaactggtcgtaaaagactccaacataaacgtcatgacgtga

SEQ ID NO: 8146 - protein, 272 aa, Unknown
  Obtained from environmental sample
  misc_feature (1)..(272): Xaa is any amino acid
MDLTSTGYSRDLFTHNSTGTLTVTGGKFSGGRGVVQANTGAVTISGGDVGTIYNDSTGTLTISGGTATNVYNTSTGTITISNGTVSSVAYNNSSGTVNITGGKVDTARNESTGTLAISGGTVATALNRSSGTLNISGGTISDTLANRYLISNSGVLTISGGTIKNGSAPSDPTKPPTSGVANAYTVYNDANSTSFTLSGSPDITGRMRVQPGKTIVASDFAPGTKTYLLEFGSFSQNSVAVTNGSALFSNFVLYNTTDWELVVKDSNINVMT

SEQ ID NO: 8147 - DNA, 891 bp, Unknown
  Obtained from environmental sample
  misc_feature (1)..(891): n is a, c, g, or t
atgaacataaatcanaatttcttaaaattgcaaaatagctacttgttttctggcatagccaaaaaagtaaaggaatatacagcggcaaatccagataaaaaagttattcggcttggaattggcgatgtcaccttgccgcttgtgccagcggttacaaacgctatgcagcaggctgtttcggaaatgggcaatgcaagcacttttcgcggctatggcgatgagcaaggctattcttttttaaggcaggctatttgcagatattatgcaaaaaaaggcgtgaccctcagcgaagatgaaatttttgtcagtgatggtgcaaaaagcgacctcggaaatattcttgatattttttcttcaaaaaacaaagtgctaataccagaccctgtttatcccgtttatgcagacacgaatattatggcaggcagaaaaatttcttatatgaacggaaatgcaaacaatgattttttgcctttgccagataaaaaaacaacagcggatattatatatttgtgttcgccaaataatccaaccggagcggtttataacaaggaacaacttaaactatgggttaaatacgccttgaaaaataaagctgtgattctctttgacagtgcttatgaaatttttgtacaagacgctgccttgcccacaagcatttaccaaatagagggagcggaaaaatgtgccattgaattttgctctctttccaaaacagccggatttacaggcactaggtgcggctacacaattattccgcacaaactcattcgcgagcgtacggctttgaacaagttatggttgcgtaggcaaacaaccaaattcaacggagttccttatattgtgcaancgtggtgcggaggcagtttcaccgatgagggctctgccatctga

SEQ ID NO: 8148 - protein, 296 aa, Unknown
  Obtained from environmental sample
  DOMAIN (33)...(296): Aminotransferase class I and II
  misc_feature (1)..(296): Xaa is any amino acid
MNINXNFLKLQNSYLFSGIAKKVKEYTAANPDKKVIRLGIGDVTLPLVPAVTNAMQQAVSEMGNASTFRGYGDEQGYSFLRQAICRYYAKKGVTLSEDEIFVSDGAKSDLGNILDIFSSKNKVLIPDPVYPVYADTNIMAGRKISYMNGNANNDFLPLPDKKTTADIIYLCSPNNPTGAVYNKEQLKLWVKYALKNKAVILFDSAYEIFVQDAALPTSIYQIEGAEKCAIEFCSLSKTAGFTGTRCGYTIIPHKLIRERTALNKLWLRRQTTKFNGVPYIVQXWCGGSFTDEGSAI

SEQ ID NO: 8149 - DNA, 720 bp, Unknown
  Obtained from environmental sample
  misc_feature (1)..(720): n is a, c, g, or t
ttggcacgagcggtgcggcgcgtattgctgtttatggatcccgatgacccgagcgcggaaaccgtggccccgcgtgagaagagcgtgcaccgcgacgagctgagcgtgttcggagccgcggacgacaattttgagcttaatgaagttaacataaatttgcgcccctatgacaagttctggtacgaggtgccctacgcgatacggggcctgtactttgacgtaaagacccttggcgccacctattttgacgttggcgtgggccttagtttttttgacagcaatgtgcgccttcaggcgcagtacggccgtgcgcctccctggggcgcgttaggcgtcatggttgaggggggccgctatgtgggcgacgtcataggcttcaagctggtggcgaacataggctccatcccctttgactggctcttcaaggacagggactgggtgttttacaagatgaacatcggccttggggcgaacttctcctggttcgagatggactggcgctccccgctgtacatgggttctgtgttaatgcagatagacatagcgaacattgaaataaggtatatataccccaactggaaatacttccacattgtgtcgctgtatttgcagcccgaagcgtggttcgcctcatccgacgccctcaccgacggctttggcaacaaggtaccaaaggttataccaagggtttcaattgggcttagggtgaatgtgttttga

SEQ ID NO: 8150 - protein, 239 aa, Unknown
  Obtained from environmental sample
  misc_feature (1)..(239): Xaa is any amino acid
MARAVRRVLLFMDPDDPSAETVAPREKSVHRDELSVFGAADDNFELNEVNINLRPYDKFWYEVPYAIRGLYFDVKTLGATYFDVGVGLSFFDSNVRLQAQYGRAPPWGALGVMVEGGRYVGDVIGFKLVANIGSIPFDWLFKDRDWVFYKMNIGLGANFSWFEMDWRSPLYMGSVLMQIDIANIEIRYIYPNWKYFHIVSLYLQPEAWFASSDALTDGFGNKVPKVIPRVSIGLRVNVF

SEQ ID NO: 8151 - DNA, 834 bp, Unknown
  Obtained from environmental sample
  misc_feature (1)..(834): n is a, c, g, or t
atgcggcgcatttggaaaaaagcccgcaggatctttcggcggtcagaaaaacggatttcccttgccggggttttgatagacgacgttgacattctgctttttgacgaacctctggcaaaccttgatcccgccgccggaaaggacgcgatagagcttattgacgaactccacaaaaaaacaggcaagactatattaattgttgaacacaggcttgaggacgcgcttcaccgtccggtagaccgtattgtggtattggaaaaaggtcaaattatatcggattcaaaaccggctgaattgctggcaaaagacattctaaagaagacgggcataagggaaccgctgtatatcagcgctctttcctatgcgggagtaaaggtagacgcggatacggcgtcccggcttttggattcattgcaaattaattcgcggccgcttgaagaatgggacaaaaatcttgccgcccggcagactaaccccaggctccaatatataaacgcggtagaatgttccggtcttgaggttaatgatctgcaattccggtatacagaacaaggagaaccggcgttgaagggaatttctttttccgtggaacccggcgaatgcatagggcttgtaggcaaaaacggttcaggcaaatccacaacggctaagtgcatttgcggctttgtccgccccgattcgggaacgatttcttttaacggacaggatttggcggaactttccattatggaaagggctgaaaagatcggttatgtgatgcaaaatccgaatcagatgatctcttttcccatgatttacgatgaaaccgcgtttggattaagacaagaggcatag

SEQ ID NO: 8152 - protein, 277 aa, Unknown
  Obtained from environmental sample
  misc_feature (1)..(277): Xaa is any amino acid
MRRIWKKARRIFRRSEKRISLAGVLIDDVDILLFDEPLANLDPAAGKDAIELIDELHKKTGKTILIVEHRLEDALHRPVDRIVVLEKGQIISDSKPAELLAKDILKKTGIREPLYISALSYAGVKVDADTASRLLDSLQINSRPLEEWDKNLAARQTNPRLQYINAVECSGLEVNDLQFRYTEQGEPALKGISFSVEPGECIGLVGKNGSGKSTTAKCICGFVRPDSGTISFNGQDLAELSIMERAEKIGYVMQNPNQMISFPMIYDETAFGLRQEA

SEQ ID NO: 8153 - DNA, 486 bp, Unknown
  Obtained from environmental sample
  misc_feature (1)..(486): n is a, c, g, or t
gtggttatgctctttttggcgggacatggggtcagcgacaacgcggggaaatttttctttttgcccaccgacacgcgcctgagcgggaataccgtggctgaggactcggtcattacgggaagcgacatcattaaggtactggacagggcggggaacttgttggtgttcatcgacgcctgccagtccggcggcgtggacaacgacaggctggtgcgctcgctcatggaaaccaacgcctttgtgttcacctccagccgcggcaatgaactgtcgcaggaacgacaggagtttggccatggggtgttcacctacagcgtcatgcagggcctcaaaggcgcgacaccggctgtggcccagggctcagtgacggtaatgagtttatcgggttttgtaatgcgggatgtgccgcgaataaccaacggcgcgcaaaatcccaaagcctactcgctgggcttttatgactttccggtagcggtaatcaaatag

SEQ ID NO: 8154 - protein, 161 aa, Unknown
  Obtained from environmental sample
  misc_feature (1)..(161): Xaa is any amino acid
MVMLFLAGHGVSDNAGKFFFLPTDTRLSGNTVAEDSVITGSDIIKVLDRAGNLLVFIDACQSGGVDNDRLVRSLMETNAFVFTSSRGNELSQERQEFGHGVFTYSVMQGLKGATPAVAQGSVTVMSLSGFVMRDVPRITNGAQNPKAYSLGFYDFPVAVIK

SEQ ID NO: 8155 - DNA, 699 bp, Unknown
  Obtained from environmental sample
  misc_feature (1)..(699): n is a, c, g, or t
ttgattctttgcatgatttgggcggagattaatatgaacagcgaagatactataactgacgaaatcctgacccttgatgaggttgccaagtatttaaaagtttctgaaagaacagtttacgattggacccaaaaaggagaaatcccggcaggaaaaatcgggtcagtttggcgttttaaaaaatccgagctggaacaatgggttaacgcgcgccttttggcaagtaaagccgttcccaagagcagcagtatcgatccacaggcaattatttcccccgggcgcattgtttttctgaattgttcttcaaaaagagaagcccttctttcccttaccgaaaatatttccacggcgcaggaaattaccaatccgcaggaactttcccgcgaaattctaaaaagagaagagctcatgagtacagccataggctgcggcatcgctattccccacgtaaggctttcgtcaatttctgatttggttatttcagtcggaataagccgggcggacataatggattttcaaacccttgacggcgaacctgtgcggctccttcttatgatagccgccgcatataaccagcatgcttattatctgcagacgctttcatttttcagcgcaaggttaaaaaacggagagctaaggaacacccttttggcttcaaatgacagccaggaggtttatagaattctcaccggcgcttga

SEQ ID NO: 8156 - protein, 232 aa, Unknown
  Obtained from environmental sample
  DOMAIN (20)...(68): Prophage CP4-57 regulatory protein (AlpA)
  misc_feature (1)..(232): Xaa is any amino acid
MILCMIWAEINMNSEDTITDEILTLDEVAKYLKVSERTVYDWTQKGEIPAGKIGSVWRFKKSELEQWVNARLLASKAVPKSSSIDPQAIISPGRIVFLNCSSKREALLSLTENISTAQEITNPQELSREILKREELMSTAIGCGIAIPHVRLSSISDLVISVGISRADIMDFQTLDGEPVRLLLMIAAAYNQHAYYLQTLSFFSARLKNGELRNTLLASNDSQEVYRILTGA

SEQ ID NO: 8157 - DNA, 318 bp, Unknown
  Obtained from environmental sample
  misc_feature (1)..(318): n is a, c, g, or t
atgcgncgtggaaaatatttatcaaagtttcatcccgccgtttttaaattgataaaagagacagtatcggcttttaaaacagctgaaaagcctatttcaatctgcggggagatgagcggcgacccgttggcggttcttgcgcttatcggctgcggacttagaaaattcagcatggggtccgcgtccgtcgcggctgtaaaaagggctattgccggtataactgtggcgcaggctgaggaaacagcccaaaaaatgctggaattgtctaccgcgcaggaaattgaaagttttttgaatacatcatataatattaattaa

SEQ ID NO: 8158 - protein, 105 aa, Unknown
  Obtained from environmental sample
  misc_feature (1)..(105): Xaa is any amino acid
MRRGKYLSKFHPAVFKLIKETVSAFKTAEKPISICGEMSGDPLAVLALIGCGLRKFSMGSASVAAVKRAIAGITVAQAEETAQKMLELSTAQEIESFLNTSYNIN

SEQ ID NO: 8159 - DNA, 585 bp, Unknown
  Obtained from environmental sample
  misc_feature (1)..(585): n is a, c, g, or t
atgccgcttttcattacgtttccttcatggcttaagcctgaaataattcccggcctgccggtgcgctggtacgggcttatgtacatactcgcattcggaaccgcgttttatttataccgcagacaaattaaagaacgcagttttcctatgtcggacgatgatttatcgagtatgtttttctggggaataatatcccttcttgccggcgcgcggcttttctcaacgttaatttaccatggcgacagcacttattggcttaagccgtggcttattttctggcctttccaggacggaaagtttacaggacttcagggaatgagttatcacggcggcgctttattcggagtgctgtctgttgtaatttacgcgagagttaagcgcgtaagtttcagggaattaagcgatatgtacgcggcaagcgtcccgcttggttacacattcgggcggctaggcaattttataaacgccgaactttacggcagggtaacgacaggcccgctgggaatgatctttccccacgcgacgcctcttcctacaagcgaaaactgggtaagggaagccgccgaaaaagtaggaatagcataa

SEQ ID NO: 8160 - protein, 194 aa, Unknown
  Obtained from environmental sample
  DOMAIN (11)...(188): Prolipoprotein diacylglyceryl transferase
  misc_feature (1)..(194): Xaa is any amino acid
MPLFITFPSWLKPEIIPGLPVRWYGLMYILAFGTAFYLYRRQIKERSFPMSDDDLSSMFFWGIISLLAGARLFSTLIYHGDSTYWLKPWLIFWPFQDGKFTGLQGMSYHGGALFGVLSVVIYARVKRVSFRELSDMYAASVPLGYTFGRLGNFINAELYGRVTTGPLGMIFPHATPLPTSENWVREAAEKVGIA

SEQ ID NO: 8161 - DNA, 636 bp, Unknown
  Obtained from environmental sample
  misc_feature (1)..(636): n is a, c, g, or t
atgaccaaagatgaggaagggtcgtttatggtaggggcgatggcggcgttgatgaaagaagacgggtacagccaaaccgatctgattggatttatcggcggcgctgacaggccaaatatcaaaattttttattccgggtacgcggccggagcgaagtatgttaataaagatattcagatttttgacgattatgtagggtctttcaccgatgttacgaccgccaaggaaatcgcgtctaccatgaacagcaggggggcggacatgattttccacgcggcgggaatgtcaggtaacggcctgttccaggcggcgcgggagaacaacacgtacgcgtttggcgtaaatattaatcagaattcagctgatcccgatcgtattcccgccagtatgatcaaaaaagtagataccgccgcgtatgaagcgatcaagtctgtggttaacggaaccttcactcccggaaccagagtgctttctatggctgacggcggggtggatatcgcgaccgaaggttcaaatatcaaaacaagcgaaaaaacacggcaaaggctcgatgaaattcgcgtgaaaatcgcttccggagaaatcaaagtgccgggcaccgcggcggagctggatgagtttataaaggggttgtaa

SEQ ID NO: 8162 - protein, 211 aa, Unknown
  Obtained from environmental sample
  DOMAIN (1)...(201): Basic membrane protein
  misc_feature (1)..(211): Xaa is any amino acid
MTKDEEGSFMVGAMAALMKEDGYSQTDLIGFIGGADRPNIKIFYSGYAAGAKYVNKDIQIFDDYVGSFTDVTTAKEIASTMNSRGADMIFHAAGMSGNGLFQAARENNTYAFGVNINQNSADPDRIPASMIKKVDTAAYEAIKSVVNGTFTPGTRVLSMADGGVDIATEGSNIKTSEKTRQRLDEIRVKIASGEIKVPGTAAELDEFIKGL

SEQ ID NO: 8163 - DNA, 726 bp, Unknown
  Obtained from environmental sample
  misc_feature (1)..(726): n is a, c, g, or t
atgcggcgaagcgtcctgcttttgttgagaaagacgcctccttcacagccaaagcgcataacgctggaatcgccgactaatgagacaacattgccgggacttaccgccattcgcctgcaaacgatattccgctggaacagcgaagaagcggtatcaaaatcaaggttcgttctttcgcgtaactctaatcccctctcaggacgggctgtgatagaaatacccgatccaaacaggacaatccgaattgatcgtcttgagcaaggcgtatggtactggacagtggaagcgcaaactcccgaaggtgtagatattaccgctcaaactccgcatcaactgcgggttctgcccattccgcttctttcttctcccgcggaacgtcagcctgccgagggataccgtataggcatagaagaactaaaaaaaaccaatatcaattttaaatggtcggctgtacagggagcaaatggttatattttcaccctttatcaggaaaccggaagcgagcggcagcaaattacgcaagtaggacctgaaaatcttacttcatggtcaacggatattaaaactcttgggcggggaaaatttatctggcgcatagaggcggtaaatgtcggacgtaacaatgtgattgaacaacatggcaatcctgcggaaaacagttttattgtagatattccaccggcaggtcccgtaaagataatcagcaggtcaaaggttaagccatga

SEQ ID NO: 8164 - protein, 241 aa, Unknown
  Obtained from environmental sample
  misc_feature (1)..(241): Xaa is any amino acid
MRRSVLLLLRKTPPSQPKRITLESPTNETTLPGLTAIRLQTIFRWNSEEAVSKSRFVLSRNSNPLSGRAVIEIPDPNRTIRIDRLEQGVWYWTVEAQTPEGVDITAQTPHQLRVLPIPLLSSPAERQPAEGYRIGIEELKKTNINFKWSAVQGANGYIFTLYQETGSERQQITQVGPENLTSWSTDIKTLGRGKFIWRIEAVNVGRNNVIEQHGNPAENSFIVDIPPAGPVKIISRSKVKP

SEQ ID NO: 8165 - DNA, 963 bp, Unknown
  Obtained from environmental sample
  misc_feature (1)..(963): n is a, c, g, or t
ttgnaaggtgtgcctaaaatcggcgaggcgggaaaaccgattatccttacaggaaaaatcagacccgtttttgcgagtaacaaagatattgtntggtctgtcatagatgccggaaccacaggagcgagtataagcgagaatattttatatactaatgcgagcgggacagtattaataagagcgaaaatctcaaacggttttgcggaaggaaggaattttactcaggattttatcatagttatcaatcatggaactcctattacggataaagaatatactgtcataattctaaaattaggaaatgaatcagatgacaccataacagtgttcccggaaaatggcattgaaggcgttacggttacgcttgcttacacggttgcaaatacgatgcattacaaccaactggacttcggcggcgtttctgcggacatcgctcctgtagaagaagcgggatcggggaccagaacctacaccataaacgccgaggactcctcaaacgggattataaccattaccgccgtgtttacccataccgatttggaaattgaccacatcgcttttagcgagcatgacaaagggcatataaccatgacttatggagatacgccgtttaccaacgctattaccagcgcacacaagggaagcggcgcgataacatatcacagcagtgactcgaccgttgccgaggtggacaactcaggacaagtaataattctgaagaccggttccgccgttatttccgcagagaaggcggctgacgcggtatatgcccgtgcgcagactacttacgcgctgacggttaatcccaagcccgttaccataacagggttgtccgcggcggataaagtttatgacggcacgacaatggcaataattagcggaactgcggtaatcaatggattggtcaatggcgatacggtaaccgttatgcgggaaccgctcggccgatctgatacgtgttaa

SEQ ID NO: 8166 - protein, 320 aa, Unknown
  Obtained from environmental sample
  misc_feature (1)..(320): Xaa is any amino acid
MXGVPKIGEAGKPIILTGKIRPVFASNKDIVWSVIDAGTTGASISENILYTNASGTVLIRAKISNGFAEGRNFTQDFIIVINHGTPITDKEYTVIILKLGNESDDTITVFPENGIEGVTVTLAYTVANTMHYNQLDFGGVSADIAPVEEAGSGTRTYTINAEDSSNGIITITAVFTHTDLEIDHIAFSEHDKGHITMTYGDTPFTNAITSAHKGSGAITYHSSDSTVAEVDNSGQVIILKTGSAVISAEKAADAVYARAQTTYALTVNPKPVTITGLSAADKVYDGTTMAIISGTAVINGLVNGDTVTVMREPLGRSDTC

SEQ ID NO: 8167 - DNA, 711 bp, Unknown
  Obtained from environmental sample
  misc_feature (1)..(711): n is a, c, g, or t
atggacgattccctaggggcaaatatatgggcagaccacgcagacggggttgtgtacagggttatgccccgttgcaacccagaagtgaaccgcagttggctttcaaatgcggcaaaggacgtggctcaaaaaatccatgaaaacagattgctcggcggaaatgtttccgatgcagcgaaaataataaaggaaacaaaagggaaaaaagccatagttcttggcggttcttgcacaatggaagatattgccgcattcaaaaaattagcggagtctttgggtagcacggcagagctttttggaggctcgcttttgcctattcaaaaagcggatggcatagcccgttctggagatccggttgcaaacagagccggtcttgaaaaagctggcatcaacacgaatttaaccgaactttcaaagcgggcagatgaatttgaacttttaataacagtagctgcggacttgtgggacgaaaacccaaaagaagctagcaacttagataaaattccaaaacatatagctttaagcccatttaacggcagcacagcaaaaaaagcaaccgttgcaataggcattctccattggctagaaaacacaggaaccatgctcaattgcaaaaatatggaacaaaaattgcagggagttccaacgaatgaagttgcgcaagcagaggaggcaaaaatcatagcggagaaattaaaagatgcaggctag

SEQ ID NO: 8168 - protein, 236 aa, Unknown
  Obtained from environmental sample
  misc_feature (1)..(236): Xaa is any amino acid
MDDSLGANIWADHADGVVYRVMPRCNPEVNRSWLSNAAKDVAQKIHENRLLGGNVSDAAKIIKETKGKKAIVLGGSCTMEDIAAFKKLAESLGSTAELFGGSLLPIQKADGIARSGDPVANRAGLEKAGINTNLTELSKRADEFELLITVAADLWDENPKEASNLDKIPKHIALSPFNGSTAKKATVAIGILHWLENTGTMLNCKNMEQKLQGVPTNEVAQAEEAKIIAEKLKDAG

SEQ ID NO: 8169 - DNA, 429 bp, Unknown
  Obtained from environmental sample
  misc_feature (1)..(429): n is a, c, g, or t
ttgtggtctatacggagcaggaagaaggaaaaactaatacgacgcgcccaatatcagcgcgggaagcagagaaacatgagaggaggagttatcatggctactatcacatcgacagtaaaaactggacaaaagatacctaaagagattcttaaacaggcgaaagaacaggtaagagaagcgcgaaaaacttccaaagtccacgatcccgactgcccatcttccacaccagaagcccttgctgaattcgcagcaatggcgcgggaattgcggagaaaccgcagaaacccttcaccggtagttgcgctcagggttaagccggatgttctttcaaaatacaaagctcttggcaggggctataccagcattatggccgatgttctgaattatgttgtggaaaacccggaaatacttgttaaagctcgtcaataa

SEQ ID NO: 8170 - protein, 142 aa, Unknown
  Obtained from environmental sample
  misc_feature (1)..(142): Xaa is any amino acid
MWSIRSRKKEKLIRRAQYQRGKQRNMRGGVIMATITSTVKTGQKIPKEILKQAKEQVREARKTSKVHDPDCPSSTPEALAEFAAMARELRRNRRNPSPVVALRVKPDVLSKYKALGRGYTSIMADVLNYVVENPEILVKARQ

SEQ ID NO: 8171 - DNA, 327 bp, Unknown
  Obtained from environmental sample
  misc_feature (1)..(327): n is a, c, g, or t
atggccgtcggcccctttggtgtcatgggtggatatatgcagccacagggtcatgtccaggtgataaccaatatgctggactttggccttaatccccagcaggccctggacgctccccgctggcaatggattgatggccggaaaatccatgtggaagcgggcttcaattctgaaattgcgcgtgtccttgcgaacaggggacacgagataagcgtttcccttcaaacatcaagtttcggcagggggcaatgcattgtccgtctggataacggcgtccttgtgggcgctactgaagggcgcactgatggaagcattgcgtgtgtgtga

SEQ ID NO: 8172 - protein, 108 aa, Unknown
  Obtained from environmental sample
  misc_feature (1)..(108): Xaa is any amino acid
MAVGPFGVMGGYMQPQGHVQVITNMLDFGLNPQQALDAPRWQWIDGRKIHVEAGFNSEIARVLANRGHEISVSLQTSSFGRGQCIVRLDNGVLVGATEGRTDGSIACV

SEQ ID NO: 8173 - DNA, 384 bp, Unknown
  Obtained from environmental sample
  misc_feature (1)..(384): n is a, c, g, or t
gtgcctgtgaagctggcggtgcgcggtatttgctccctcattccgggcgtaaaggggctgagcgagaacgtggaggcggtgagcattgtggacaggtacttggagcattcgcgcatattcatttttgccaacggcggaaagccgcgctactacctatcttcggcagacctcatgcgccgtaacctcaatcagcgcgtggaaattgctatacctgtgtataacccccgaatacagagcgtgctgcagcacattgtggattacgccatgcgcgataacgtaaaggcgcgtaagcttgacaccagccaaagcaataaaattgtggtaaaaggaaaacaacccttccgctcacaagaggagctgcggaaatatttaggaaagctgtga

SEQ ID NO: 8174 - protein, 127 aa, Unknown
  Obtained from environmental sample
  misc_feature (1)..(127): Xaa is any amino acid
MPVKLAVRGICSLIPGVKGLSENVEAVSIVDRYLEHSRIFIFANGGKPRYYLSSADLMRRNLNQRVEIAIPVYNPRIQSVLQHIVDYAMRDNVKARKLDTSQSNKIVVKGKQPFRSQEELRKYLGKL

SEQ ID NO: 8175 - DNA, 531 bp, Unknown
  Obtained from environmental sample
  misc_feature (1)..(531): n is a, c, g, or t
atgccttttaccacccataccaaacggcttcttccgcgcgagctcagttggctgtcgttcaaccgccgcgtgctgcaggaggctgaaaaccccgatgtcccgctcatggagcggttgcgctttttggggattttttccaataaccttgacgagttttttcgcgtgcgcgtgggtactattcgccgtctgctgtcgctcgataaaaaggagtacggcgaatatgcaccgcatagaatcttagagcggattaacgaaacggcggtggagtatcagcacatttttgataaaacgtacgagggcttagtgcgcgagctgcgcaagcggaacatacacatcataaacgagctgaagataaccgccgagcagcgtgcttacgtgcgaggccgctttagtgaaccgctgctcaacgccgtcagcccgcttatgctgtcgcaaacgccgcactttccgcagcttgtggacaagtccatttacctcatgctgcggctttcgcaagcagccgcccaacgcgctttgagtacgtgttggtag

SEQ ID NO: 8176 - protein, 176 aa, Unknown
  Obtained from environmental sample
  misc_feature (1)..(176): Xaa is any amino acid
MPFTTHTKRLLPRELSWLSFNRRVLQEAENPDVPLMERLRFLGIFSNNLDEFFRVRVGTIRRLLSLDKKEYGEYAPHRILERINETAVEYQHIFDKTYEGLVRELRKRNIHIINELKITAEQRAYVRGRFSEPLLNAVSPLMLSQTPHFPQLVDKSIYLMLRLSQAAAQRALSTCW

SEQ ID NO: 8177 - DNA, 552 bp, Unknown
  Obtained from environmental sample
  misc_feature (1)..(552): n is a, c, g, or t
atggaaaaatctaacaaaatgtcggctcaaaagcaaaaaaagcaagatcttgtagattctctcgccaaggatttttcggcagcggcagctatttatttgctggacttccaaagaataaccgttgcccaagacaatgccctgcgcataaatttgcgcaaaaaaggcatttactacagagcggcaaaaaacagactgataaagcaagcgtttaaaaaagcaaatatttcaggcttggattcttatttaaaaggtgcaacttccattatgctaggtggcgcagacgatccaatgcaacccgctcgcgaagtggttgagttccacaaggcaagccctgatattttaaacgcaaaaggcatttttatggatggctccacgctgaaaggcggcgagctggaaggtctcgcaaaaatgccgggcaaaaaagaaattcttggtcaaattgtatccttaatgctttcgccgggagcaaacttgatagctcttatcaagggtccgggcgcaaaaattgcggggcaaataaaggctttagaagagaaactggaaacaaagtaa

SEQ ID NO: 8178 - protein, 183 aa, Unknown
  Obtained from environmental sample
  DOMAIN (9)...(108): Ribosomal protein L10
  misc_feature (1)..(183): Xaa is any amino acid
MEKSNKMSAQKQKKQDLVDSLAKDFSAAAAIYLLDFQRITVAQDNALRINLRKKGIYYRAAKNRLIKQAFKKANISGLDSYLKGATSIMLGGADDPMQPAREVVEFHKASPDILNAKGIFMDGSTLKGGELEGLAKMPGKKEILGQIVSLMLSPGANLIALIKGPGAKIAGQIKALEEKLETK

SEQ ID NO: 8179 - DNA, 699 bp, Unknown
  Obtained from environmental sample
  misc_feature (1)..(699): n is a, c, g, or t
gtgccgggaaagactttcggcagcctctcggtgtggatggcgtcggacggcgagattaacgataggttcgaccggcatctgcacataatgacatccatagcctcgcccgttatcgagcatatatacgccgaccggatggcgcttcatcaggccaagaccgacggtttgacgggcgtatccaacaaacggcatttttacgaggtattggacagcgagatagccagagccaaccgtaagaaaaatacttttgcgcttgtactggccgacattgataattttaagaagataaacgatacccacggccaccaaatcggcgatgctgttctgatagagctgacaaagcacctaaaggatagcgttcgcggcggcgacgtggtggctcgctacggcggcgaggagttcatcctgatatttcccgataccgatttagacggggccgtcactctgacgaataggatacgcgagactattgcgggcagtccgtttgccaatatgaggtactacgtcccatatacctccagtttcggtcttgccatgtatgacggcgccgcgccgccgataaacaaagacgaacttatccatatcgccgacacggctctctaccactcaaaacaccacggtaagaaccgcgttacggtggctgctaaggatgaaacggggatcgtttgtaaggacacggtttccgaatacatgatataa

SEQ ID NO: 8180 - protein, 232 aa, Unknown
  Obtained from environmental sample
  DOMAIN (48)...(210): GGDEF domain
  misc_feature (1)..(232): Xaa is any amino acid
MPGKTFGSLSVWMASDGEINDRFDRHLHIMTSIASPVIEHIYADRMALHQAKTDGLTGVSNKRHFYEVLDSEIARANRKKNTFALVLADIDNFKKINDTHGHQIGDAVLIELTKHLKDSVRGGDVVARYGGEEFILIFPDTDLDGAVTLTNRIRETIAGSPFANMRYYVPYTSSFGLAMYDGAAPPINKDELIHIADTALYHSKHHGKNRVTVAAKDETGIVCKDTVSEYMI

SEQ ID NO: 8181 - DNA, 888 bp, Unknown
  Obtained from environmental sample
  misc_feature (1)..(888): n is a, c, g, or t
ttgtcgaaagcggggatttcgccaagactacgcttcacgacggggacaacgtggagttcctgtactttatgggagggggttggtaacatggccttgactaacgagcaattggagcgatactcccgccacatcatactcgccgaggtgggagccaaagggcagaaaaagctcttggacgcgaaggtgctgattatcggagccggagggctcggttccccagccgctctctatttagccgccgccggggtgggaaccatcggcattgccgacgcggacgcggtcgacttgtctaatttacaacggcaggtcatacacaccacggttgacgtaggcaaggctaaggcgctctcagccaaagagactatgaacgcgatcaatccggacgttaaggtaaacgtccacagccttttcgtcgccgccgataacgtcatgaagctgattgcggactatgactttatcattgacggaaccgataattttccggcgaagttcctgataaacgacgcgtgcgtattgtcgaagaaacccttttcccacgccggtatattacgctttaagggacaactgatgacctacgttcccaacgccggaccgtgctatcgctgcgtattcaaagaaatgccgcccccatccgccataccgacctgccgacaggccggagtcataggagcgataggcggcataataggttccatgcaggctatggaagcggtcaaattcatcatcggcaaaggaaaactgctgaccggttggttgcttacgtatgacgcgttggagatggagttccgtaaaatcaaactcccgaccgtgaaagcctgcgccgtatgcggggaagatccctccatactaaccccgtttgactacgaacaggcggtgtgcgaagtatga

SEQ ID NO: 8182 - protein, 295 aa, Unknown
  Obtained from environmental sample
  DOMAIN (195)...(280): MoeZ/MoeB domain
  misc_feature (1)..(295): Xaa is any amino acid
MSKAGISPRLRFTTGTTWSSCTLWEGVGNMALTNEQLERYSRHIILAEVGAKGQKKLLDAKVLIIGAGGLGSPAALYLAAAGVGTIGIADADAVDLSNLQRQVIHTTVDVGKAKALSAKETMNAINPDVKVNVHSLFVAADNVMKLIADYDFIIDGTDNFPAKFLINDACVLSKKPFSHAGILRFKGQLMTYVPNAGPCYRCVFKEMPPPSAIPTCRQAGVIGAIGGIIGSMQAMEAVKFIIGKGKLLTGWLLTYDALEMEFRKIKLPTVKACAVCGEDPSILTPFDYEQAVCEV

SEQ ID NO: 8183 - DNA, 561 bp, Unknown
  Obtained from environmental sample
  misc_feature (1)..(561): n is a, c, g, or t
ttgaacacgattattttgcctttgactgccgatgatattctcaagtttcatatcggcgatgtaatttatctttctgggacaatcgtaacgggaagggacgaggttatncacagggtagtagaagaaaatattatgccgcctgtggacttaaacggtatggcgatttatcacgccggacctatcgtaaaaaaaactgggcaaaataacgagcttatttcgataggaccgactacatctatgcgtatggaaaaatgggcggcggattttattaaaaaaacaggcgtaaaagtgatgatcggcaagggcggtatgggagagaaaacggcgtccgcctgccgccagttaggcgcaattcactgtgtttatccgggcggctgcgctgtgttaggcgctagtcaaatagagagtatcgaaaattgctactgggaagaatttggtatggctgaatgcctttgggtgatgaagactgcggtgtttggtccgctgattgtcagtattgatgcgcatgaggggaatctttttgcggagaacgctttattttatactggaaggaagcgataa

SEQ ID NO: 8184 - protein, 186 aa, Unknown
  Obtained from environmental sample
  DOMAIN (1)...(180): Fumarase C-terminus
  misc_feature (1)..(186): Xaa is any amino acid
MNTIILPLTADDILKFHIGDVIYLSGTIVTGRDEVXHRVVEENIMPPVDLNGMAIYHAGPIVKKTGQNNELISIGPTTSMRMEKWAADFIKKTGVKVMIGKGGMGEKTASACRQLGAIHCVYPGGCAVLGASQIESIENCYWEEFGMAECLWVMKTAVFGPLIVSIDAHEGNLFAENALFYTGRKR

SEQ ID NO: 8185 - DNA, 528 bp, Unknown
  Obtained from environmental sample
  misc_feature (1)..(528): n is a, c, g, or t
atgtatatttatgacagccaaaaaacatttcaaaggaaaaaatacggctttataacggcatttttcggattggattggtatataggggataacaggggaggaacggctgttttgttaacctcgcccgcacatcccggtaaagtacatgattatggcaataataaatatgcttcaatacacgagattgtacatgcgtataattatctgattaataaaaatatgccaaagtgggtggatgacggcgtcgcgttatatttaacaaacggaaatccgccgcatgatctttatagcaggcaaagaacgcctaagcttaatgagatacgatcgaataatccgataaaattcgccaatattggcggttacgattttgctcatacatatatagaatatctggataaaacctttgggtggaataaagtattggtatttttaagagagaataactatgaaaacgcgtttggacaatcagaaggggagatatatactaactggacagaatatttgagaaataattatgcgggaaaataa

SEQ ID NO: 8186 - protein, 175 aa, Unknown
  Obtained from environmental sample
  misc_feature (1)..(175): Xaa is any amino acid
MYIYDSQKTFQRKKYGFITAFFGLDWYIGDNRGGTAVLLTSPAHPGKVHDYGNNKYASIHEIVHAYNYLINKNMPKWVDDGVALYLTNGNPPHDLYSRQRTPKLNEIRSNNPIKFANIGGYDFAHTYIEYLDKTFGWNKVLVFLRENNYENAFGQSEGEIYTNWTEYLRNNYAGK

SEQ ID NO: 8187 - DNA, 381 bp, Unknown
  Obtained from environmental sample
  misc_feature (1)..(381): n is a, c, g, or t
ttgaaaaggcctgggggacccttacgctttcttccgcgtnccggggaaacggcccccgccgtgtattacagtcttccgggcttaccgggaacattcggctttatcaacgccgtaagccggggcttctgtgaaacctgtaaccgcctccgcntgacctccgaggggtttctaaaaccatgcctcgcaaacgaactgtgcctggatgtaagaaccatgctccgctccggtgccgcggacgacgaattaaaacgcgccgtcaccgaagccgtatcgcgaaagcctcagttccactctttttcaaacgcgcacggcgctcccccggcggaaacggcgtttccggcgggaacgagcgccgaaggcatgttccgcatagggggataa

SEQ ID NO: 8188 - protein, 126 aa, Unknown
  Obtained from environmental sample
  DOMAIN (7)...(99): Molybdenum Cofactor Synthesis C
  misc_feature (1)..(126): Xaa is any amino acid
MKRPGGPLRFLPRXGETAPAVYYSLPGLPGTFGFINAVSRGFCETCNRLRXTSEGFLKPCLANELCLDVRTMLRSGAADDELKRAVTEAVSRKPQFHSFSNAHGAPPAETAFPAGTSAEGMFRIGG

SEQ ID NO: 8189 - DNA, 657 bp, Unknown
  Obtained from environmental sample
  misc_feature (1)..(657): n is a, c, g, or t
atggaaattcccaggatgaacctggccatccatacctggggtaatgtctccgcctttgatccggacaggggagtgtttgccataaagccttccggggttccctatgacaagctccacgccgattccatggttgtcgttgatctggacgggaaggtaatcgaaggcggtttaaacccctcttcggataccgaaacccaccgggtgctgtaccgggagttttccggcatccgtggaatcacccacactcattccccctacgcttccggctgggcccaggccgggaaatccgtgccggtatacggcaccacccatgcggacaacggcgcggaaaccattccctgcacgttgcacatgggcgcggaggcggtaaagaacaactacgaactggaaacgggaaacctgattgtggacacgttccggcggcagaacagggagccggcccacatgaccatggtgcttgtggcgggccacggcccctttacctggggaacaaacgcccgccaatcggtactccagtccgcgatactggaagaaatctgcaaaatggccctgttcaccgttatgcttgaccctgcggcgccaagccttccggaacaccttatccgcaagcattgggaacgcaaacacggccccaacgcatactacgggcagaagtaa

SEQ ID NO: 8190 - protein, 218 aa, Unknown
  Obtained from environmental sample
  DOMAIN (1)...(204): Class II Aldolase and Adducin N-terminal domain
  misc_feature (1)..(218): Xaa is any amino acid
MEIPRMNLAIHTWGNVSAFDPDRGVFAIKPSGVPYDKLHADSMVVVDLDGKVIEGGLNPSSDTETHRVLYREFSGIRGITHTHSPYASGWAQAGKSVPVYGTTHADNGAETIPCTLHMGAEAVKNNYELETGNLIVDTFRRQNREPAHMTMVLVAGHGPFTWGTNARQSVLQSAILEEICKMALFTVMLDPAAPSLPEHLIRKHWERKHGPNAYYGQK

SEQ ID NO: 8191 - DNA, 786 bp, Unknown
  Obtained from environmental sample
  misc_feature (1)..(786): n is a, c, g, or t
atggcagagcggataagctcgcgcagcgttttggccgccatgatccccccgatacgcgcgacgccaagcacgtcgccttttttggcggttccgcccaataccgctttcatggctttttcgctcatggtgatgattcccntggcaagcgcggcgcgggatgttgtttcttttgccgagacatccaccatgacagcgtttccccgtgaatcaaaatgggtaaagtcatgttccacaaagacctccgtatcccgccgccgcgcgcacggttcgtatctcggcggcgggaaaccggtatcgttacttctgcccgtagtatgcgttggggccgtgtttgcgttcccaatgcttgcggataaggtgttccggaaggcttggcgccgcagggtcaagcataacggtgaacagggccattttgcagatttcttccagtatcgcggactggagtaccgattggcgggcgtttgttccccaggtaaaggggccgtggcccgccacaagcaccatggtcatgtgggccggctccctgttctgccgccggaacgtgtccacaatcaggtttcccgtttccagttcgtagttgttctttaccgcctccgcgcccatgtgcaacgtgcagggaatggtttccgcgccgttgtccgcatgggtggtgccgtataccggcacggatttcccggcctgggcccagccggaagcgtagggggaatgagtgtgggtgattccacggatgccggaaaactcccggtacagcacccggtgggtttcggtatccgaagaggggtttaa

SEQ ID NO: 8192 - protein, 261 aa, Unknown
  Obtained from environmental sample
  misc_feature (1)..(261): Xaa is any amino acid
MAERISSRSVLAAMIPPIRATPSTSPFLAVPPNTAFMAFSLMVMIPXASAARDVVSFAETSTMTAFPRESKWVKSCSTKTSVSRRRAHGSYLGGGKPVSLLLPVVCVGAVFAFPMLADKVFRKAWRRRVKHNGEQGHFADFFQYRGLEYRLAGVCSPGKGAVARHKHHGHVGRLPVLPPERVHNQVSRFQFVVVLYRLRAHVQRAGNGFRAVVRMGGAVYRHGFPGLGPAGSVGGMSVGDSTDAGKLPVQHPVGFGIRRGV

SEQ ID NO: 8193 - DNA, 870 bp, Unknown
  Obtained from environmental sample
  misc_feature (1)..(870): n is a, c, g, or t
gtgaaaaggctgatagggtgggccgggtatcttaatgctaccgagaaaactcccagcgagcgcatgttgaaagaacttgctntgcggattaaggagagacagcttgtctgcgccgtcgcgctgggttacgggatgttgtccgcgctgcggtcagtaatcggcagggcagacggcggtctcgcggctaacctcgcttttgagcattgggatttggatcgcaaactcaaggaacagttcaggagttttggcgcaaacgacgacgaggtttggcggattggggaaatttgcaaggctgttttacgacgaaccggcgcggataatcccgaggtaatcaatgacactgttgttaacaaaaagacatccgcgtttgacgcgggacgctttgcggcctcattattcatcaataaccattcacacgacgatttccgcagactcatcggcattaatgtttttaatgatgtaacatggttcaacaaggaggcttttgaaaccgccttgttctacgggaaattgttctttgtcctggaaacagattccgcatatcagcagccatgtgttgaaaggacgcgtcctgaaaggacggcgcgtattgccgaagttaccgaattgataaagaaggcggaaattgactgcggttaccggctggacaaatttttacaactgctttcaggagaggaggaaccgtcgcaagagccagcgccgcaagcgtcggcgccgcaagcgtcggcgccgcaagcgtcggcgcctaaattgtcagcgacgaaaaaaccggctccgaaaaagtcagagactaaaaagccggagactaaaaagtcagagactaaaaagtcagagactaaaaaacccggagttgggaaaaccaacgcctaa

SEQ ID NO: 8194 - protein, 289 aa, Unknown
  Obtained from environmental sample
  misc_feature (1)..(289): Xaa is any amino acid
MKRLIGWAGYLNATEKTPSERMLKELAXRIKERQLVCAVALGYGMLSALRSVIGRADGGLAANLAFEHWDLDRKLKEQFRSFGANDDEVWRIGEICKAVLRRTGADNPEVINDTVVNKKTSAFDAGRFAASLFINNHSHDDFRRLIGINVFNDVTWFNKEAFETALFYGKLFFVLETDSAYQQPCVERTRPERTARIAEVTELIKKAEIDCGYRLDKFLQLLSGEEEPSQEPAPQASAPQASAPQASAPKLSATKKPAPKKSETKKPETKKSETKKSETKKPGVGKTNA

SEQ ID NO: 8195 - DNA, 732 bp, Unknown
  Obtained from environmental sample
  misc_feature (1)..(732): n is a, c, g, or t
atggaagaaatgaagcgaacggtaacctgcggcgagctgacaaaagccgatgggggcaggaatgtaatacttaacggatgggtacatcgcaagcgggatcacggggggatttcctttattaatttgagggatcgttacgggattacgcaggtggtggttgatccggcggtgtttgacggaggggtggttccggacgaggttgcaaaaatctgcggggaactgagaaacgagtactgccttgccgtcgagggggctgtcaggctcaggccttccagcatgattaacccggatatgcagacgggcgagatagaggtggctgcgaaaaagatagtcgttttaagccgctgtgaaattcttcctttccagatcgatgaaaagaccgaggcaagggaagagcttcgccttaaataccgctacctggatctgcgttccgcttccatgcagaaaaagataaagctccgcagcgacgtgattttcgcgctgagggaatacatgatgggcaagggtttttacgagatagaaaccccgacctttatccgctcgactccggaaggggcaagggattacctggtgccttctcggctataccccggcaaattttacgccctgccacagagcccgcagctctacaagcagatactgatggtttcgggttttgacaagtattttcaaatagcccgcgttaccgcgacgaggacgcccgcggcgacaggcgcccgaatctctccataa

SEQ ID NO: 8196 - protein, 243 aa, Unknown
  Obtained from environmental sample
  DOMAIN (130)...(243): tRNA synthetases class II (D, K and N)
  misc_feature (1)..(243): Xaa is any amino acid
MEEMKRTVTCGELTKADGGRNVILNGWVHRKRDHGGISFINLRDRYGITQVVVDPAVFDGGVVPDEVAKICGELRNEYCLAVEGAVRLRPSSMINPDMQTGEIEVAAKKIVVLSRCEILPFQIDEKTEAREELRLKYRYLDLRSASMQKKIKLRSDVIFALREYMMGKGFYEIETPTFIRSTPEGARDYLVPSRLYPGKFYALPQSPQLYKQILMVSGFDKYFQIARVTATRTPAATGARISP

SEQ ID NO: 8197 - DNA, 606 bp, Unknown
  Obtained from environmental sample
  misc_feature (1)..(606): n is a, c, g, or t
atgtgccgtgtagaacagaaaaaattgatgctcaaaggcaaccgctgtaaaagcgataagtgcccaatgaataaaaaaagaccggctcccggaaaagacccaaaagcccgtcccggcaaaaggtctgactacggcgttcagttacgcgaaaagcagaagcttaaaagaatttacggaatgctggaaaaccagttccggcttttctttgaacgcgcgcaaagaatgcccggtattacaggtgaaaacctttttgtattgctggaaagacggcttgataatgttgtttatcgtctgcgctttgcttcgtcaagaaatcaagctcgtcagcttgtattgcatggtcatatacttgtaaacggcaagaaaattacaattccttcttatattgtaaaacctgaaaatgaaatcagcgttgtggaaggaagcaagaatatgacggttataaaggacgcgttaaaggaatacggcaaatcgggcgtaatgccatggttaagccttgaccctgacgcgatgaaaggaaagttcctcgcctcgccgagaagaagcgatattaccgatcttggcgatattaaggaacagatgattatagaattatattctaaataa

SEQ ID NO: 8198 - protein, 201 aa, Unknown
  Obtained from environmental sample
  DOMAIN (2)...(88): Ribosomal protein S4/S9 N-terminal domain
  misc_feature (1)..(201): Xaa is any amino acid
MCRVEQKKLMLKGNRCKSDKCPMNKKRPAPGKDPKARPGKRSDYGVQLREKQKLKRIYGMLENQFRLFFERAQRMPGITGENLFVLLERRLDNVVYRLRFASSRNQARQLVLHGHILVNGKKITIPSYIVKPENEISVVEGSKNMTVIKDALKEYGKSGVMPWLSLDPDAMKGKFLASPRRSDITDLGDIKEQMIIELYSK

SEQ ID NO: 8199 - DNA, 327 bp, Unknown
  Obtained from environmental sample
  misc_feature (1)..(327): n is a, c, g, or t
atggcacgtaaaaaccttatatcaggatttaaacgtcccaaaagttttacttttgaacatgatgaactcactcaaaattacggcaagtttgtcgcttctccgtttgagccgggttttggtacgaccgttggcaatactttacgcagagttctcctttcatcaattcaagggtatgcaatcactgcggtaaaaattgaatcaatagactccaacggaactacacataacgtatccagtgaatttgagacaattccgaatattgtggaagacactctggaagtttataaacactttaaaacaattcgccttnaactgcngagatactga

SEQ ID NO: 8200 - protein, 108 aa, Unknown
  Obtained from environmental sample
  DOMAIN (25)...(103): RNA polymerase Rpb3/Rpb11 dimerisation domain
  misc_feature (1)..(108): Xaa is any amino acid
MARKNLISGFKRPKSFTFEHDELTQNYGKFVASPFEPGFGTTVGNTLRRVLLSSIQGYAITAVKIESIDSNGTTHNVSSEFETIPNIVEDTLEVYKHFKTIRLXLXRY

SEQ ID NO: 8201 - DNA, 696 bp, Unknown
  Obtained from environmental sample
  misc_feature (1)..(696): n is a, c, g, or t
gtgtttatggcaaaatttgtttgcccttattgcataaggagttacaatctaaagaaggctctgtatgtctgtcccgactgcggagagacggcaacccctgattcgtttgaaaaagaaccaatcaagtgcaagaaaaccggctgcgggggactcgcgacgcaaaggaaatgccctttgtgcggtgaaaatcttcccagaatagcgttacagacgccaaatcttccttttagtataattggcgtatcaaactccggaaaaaccaactatataacggttatgctgcatgagatgggcagggcccccggcctccgtttggcgcttggacaccaaaacgcgtctacgctggatcatcagaatgaaaactataaacgtatttatgaggatcatgtgccgcctgagagtacggccggaggcgccagtataccccagatatggtacattaaaaatcttcttaaaaagagaggcaacaatgtacccacctatacattcaccatatttgacggcgcaggcgaagatcacgagcacaatttagatccgtcgtcccccgtatgccggtatatacagacatctaaagcgattatcattaccctggaccctctgatactgccaaccatcagaaaaggcggcattgtagacgaaaatgatatgcgtaattctctggcggggaatgaaaacgtacataaaaacngcggttga

SEQ ID NO: 8202 - protein, 231 aa, Unknown
  Obtained from environmental sample
  misc_feature (1)..(231): Xaa is any amino acid
MFMAKFVCPYCIRSYNLKKALYVCPDCGETATPDSFEKEPIKCKKTGCGGLATQRKCPLCGENLPRIALQTPNLPFSIIGVSNSGKTNYITVMLHEMGRAPGLRLALGHQNASTLDHQNENYKRIYEDHVPPESTAGGASIPQIWYIKNLLKKRGNNVPTYTFTIFDGAGEDHEHNLDPSSPVCRYIQTSKAIIITLDPLILPTIRKGGIVDENDMRNSLAGNENVHKNXG

SEQ ID NO: 8203 - DNA, 750 bp, Unknown
  Obtained from environmental sample
  misc_feature (1)..(750): n is a, c, g, or t
gtggtcattgcggactttggaatttccagcgtcatggacgatacggaacaactccacaagacccgcacggggtcccgtaccacgggctacgccgcgccggaggtgctttccggcatcatcggccccaaaatggattattacgcgctggggattaccctttgggaactgcttagcggtaaagacccctttaccctggataacggcaagcgccgtaatgacgctcatctgatacgcgacactattgaaggcagaatagccgacgatattttaagcaaggaacccagggtgagccaaaaaatggaacgccttatccgggggcttctgatactcgacccggaacaccgctggggttatgacgaagttacgcggcatcttgccggggaaactgtcgatctttatcaggaagcgaaaaaggcatggattttttgtatcggcgatattgaatgtacaaccctggaggaattgggaagcgcgataatggaaaatcgcgaggcatctaaaaaatacatcttccgcggtttactaggttccgtgcttgaaaaacactacccggaaatttccaaacaaattgtgcaaatcgcagaggaaacatccgcggccaacgatcacgacaatggtattttaaaagttgtctatcttttaaatcccggcctgccgcttaaaatcgccaacggctttaaaatgcagaaccttgacgaccttgttttccttctggaaaagcgcccgaatcggtcatcccctgctgcgtga

SEQ ID NO: 8204 - protein, 249 aa, Unknown
  Obtained from environmental sample
  misc_feature (1)..(249): Xaa is any amino acid
MVIADFGISSVMDDTEQLHKTRTGSRTTGYAAPEVLSGIIGPKMDYYALGITLWELLSGKDPFTLDNGKRRNDAHLIRDTIEGRIADDILSKEPRVSQKMERLIRGLLILDPEHRWGYDEVTRHLAGETVDLYQEAKKAWIFCIGDIECTTLEELGSAIMENREASKKYIFRGLLGSVLEKHYPEISKQIVQIAEETSAANDHDNGILKVVYLLNPGLPLKIANGFKMQNLDDLVFLLEKRPNRSSPAA

SEQ ID NO: 8205 - DNA, 894 bp, Unknown
  Obtained from environmental sample
  misc_feature (1)..(894): n is a, c, g, or t
ttggtatttgggaatcggcaggctctatattatggggacggaacaatgaataaaagaaaattgccggtcggcggcggacagatattcagagacgttcgcgaagaatgcgatgtgtacgtggataagaccgcgcacatatacgatatggcgtctaggtacagagccgtttttctgtctcgcccgcgaaggttcggaaaatcgctcttatgttcaaccatagagtcgctgttccgagcccaaaaagagctgtttgaggggctggcgatatcgaaaaccgactgggagtggaaggagcatccggtcattcatctaagattgggagccggcgattttaccgatgacgggattgaaacgttgacttccacgttggatcgccaattagacgtagtctgcgatgattacggcgtatccgcggggaaaagcggcggaatcgccgacaaattcgccgggactatcatcaatgtttcaagaaaatcaggcagagcggtcgtgattgtcgacgaatatgataatccgttgcttagtacgataaaccaaccggaactcaacggcagaatacgtgagaaattgaaggggttttacagcgtaataaagcaaaacgaggagcatatacggttcgcgtttctcacaggggtaacaaaattcgctcaagtcagcgtgttctccggcttgaatcagccgaaagatatctccatgatgccggagtactgcgatatttgcggaataacgcagaatgagcttgaggagtgcttcgcgcccgagataaacgattacgccgaaaaacacggcggtcgggaaaaatatcttgaaaaattaaagattactancacggctatnttttcacccgcaaaaattgtctgtatacnatacctacggcatattgaatcactttga

SEQ ID NO: 8206 - protein, 297 aa, Unknown
  Obtained from environmental sample
  DOMAIN (16)...(295): Protein of unknown function (DUF1703)
  misc_feature (1)..(297): Xaa is any amino acid
MVFGNRQALYYGDGTMNKRKLPVGGGQIFRDVREECDVYVDKTAHIYDMASRYRAVFLSRPRRFGKSLLCSTIESLFRAQKELFEGLAISKTDWEWKEHPVIHLRLGAGDFTDDGIETLTSTLDRQLDVVCDDYGVSAGKSGGIADKFAGTIINVSRKSGRAVVIVDEYDNPLLSTINQPELNGRIREKLKGFYSVIKQNEEHIRFAFLTGVTKFAQVSVFSGLNQPKDISMMPEYCDICGITQNELEECFAPEINDYAEKHGGREKYLEKLKITXTAXFSPAKIVCIXYLRHIESL

SEQ ID NO: 8207 - DNA, 705 bp, Unknown
  Obtained from environmental sample
  misc_feature (1)..(705): n is a, c, g, or t
gtgatcatggacgctgatctagggcttgccaatgtcattgttatgttcaacatacatccaaagcataacttttaccatgtgatcaaaaaacagaaaacattcagggaaataatagtagaaaccgaatacggcatctcgatagtagccggggcgtctggtttttcccaaattgccaatatgggcaaaaaggaacggcatgaatttatcagcgaactggataccctttcatttgccgatattattatcatagacaccagtgccggcgtgagcagcaatgtgctggatttcatcgccgccgcggacgacgcgattattatcaccacgcccgaacccaccgcgataaccgacgcctacagcataatcaaaattatctccacagaatacaacacgctgaatatggagcttaagctggttgtaaaccgggcgcgcggggcgtcggaagcgaatatcgtcgcggacaagatgataaatgttaccaaccagtttcttcatgttaaaatggaatacctgggttttatatatgaggaccatactgtgcaaaacgccgtgcggcagcagaaaccttttatggtggttgatccaaaatgcaaggcaagccaaagcatccagcacctggtggtgcgaatggacaaaaaccagccaatcgagcctgccggcctgggcgccatgttcaggaagatgttcaaccgttcacagggggcataa

SEQ ID NO: 8208 - protein, 234 aa, Unknown
  Obtained from environmental sample
  DOMAIN (45)...(181): CobQ/CobB/MinD/ParA nucleotide binding domain
  misc_feature (1)..(234): Xaa is any amino acid
MIMDADLGLANVIVMFNIHPKHNFYHVIKKQKTFREIIVETEYGISIVAGASGFSQIANMGKKERHEFISELDTLSFADIIIIDTSAGVSSNVLDFIAAADDAIIITTPEPTAITDAYSIIKIISTEYNTLNMELKLVVNRARGASEANIVADKMINVTNQFLHVKMEYLGFIYEDHTVQNAVRQQKPFMVVDPKCKASQSIQHLVVRMDKNQPIEPAGLGAMFRKMFNRSQGA

SEQ ID NO: 8209 - DNA, 831 bp, Unknown
  Obtained from environmental sample
  misc_feature (1)..(831): n is a, c, g, or t
ttgattcgcgtttttaagcaggctaacggcctttaccgggtgccgcttagcgcgacgggcatgcccaacgcgcccagggaaaaagcggcctatcctctggattttaacacaataatggctataaacgtcctttatctttcggctatgaccgatatccttaacgaaaaggaagccagttttcagtataaaaagcagtatttcgccctaaagacgcggatcaactccataatgtgggataatgaagacggcttttaccatgacattgacaagcacgaaaagcgcctcccggtaaaaactttggcgggctattggcccctgctagcggaaattcccaacgacgacaaggccgagcggatcattagcaggctttctgacccgagatatttcggggcgccccatcctttcccctgcgtggcaataaacgaaaagtcttttgatgaaaacggcaatggcttcaggggctctgttttcccgcacctcacgtttatggtgataaagggtcttgaaaggtaccagcgctgggatctctcaagggacagcgccataaggcacctttattttgtccttgattccatgagccctgacggaaaccaccataaagacaggctatgggaggcctaccttcccatgaaagaagggcctgcacaatggccggggagagacgattttccccggcctcaataccttacctacgccgccctttccacgatttgccttaccatagaaaatattataggtcttttaatctcgcttccacgaaaaactgttgactggattataccgaacctggaaataatggggatagaaaacctttcgcttaaaaagatatga

SEQ ID NO: 8210 - protein, 276 aa, Unknown
  Obtained from environmental sample
  misc_feature (1)..(276): Xaa is any amino acid
MIRVFKQANGLYRVPLSATGMPNAPREKAAYPLDFNTIMAINVLYLSAMTDILNEKEASFQYKKQYFALKTRINSIMWDNEDGFYHDIDKHEKRLPVKTLAGYWPLLAEIPNDDKAERIISRLSDPRYFGAPHPFPCVAINEKSFDENGNGFRGSVFPHLTFMVIKGLERYQRWDLSRDSAIRHLYFVLDSMSPDGNHHKDRLWEAYLPMKEGPAQWPGRDDFPRPQYLTYAALSTICLTIENIIGLLISLPRKTVDWIIPNLEIMGIENLSLKKI

SEQ ID NO: 8211 - DNA, 741 bp, Unknown
  Obtained from environmental sample
  misc_feature (1)..(741): n is a, c, g, or t
gtgaggttcttcttcgaaccaatttattgtatactaaagttcatgcgtaaattcaaagtagtatccccctttaagccggcgggcgatcagggcgaggcgattgcggcgctggcggacggcattaaggcgggagataagtttcagacattgcagggcgtcaccggttcggggaaaacttttaccatggcgaagataattgagaaggtgcagatgcctactttgattgtcagccacaacaaaacgcttgccgcccagctttaccgcgagttcaaggggtttttccccgacaacgcggttgagtactttgtctcctactacgactactaccagcctgaggcttatgtcgcgagccgcgatctttacatcgaaaaggacgcttcaataaacgacgagattgaacgtatgcggctctccgcggcgagaagcatgatggaacgcgaagacgtgatcatcgtggcgactgtatcgtgtatctacggcatggttacgcccgacgtgtaccgcaaaatgaccgccacctgctcaaagggcgaaaccatagacgtggacgcgctaatccgccgcttcgtggaactgcaatatgagcgcaacgacgcggttttagaccgaggacgtttccgcaggcgcggcgacactctggaaatttttcccgcctacatggaagaggcctaccgcgtcgatcttgactgggacaaggttgagcggatacggcgtttcaatccgtatccggcgaaattctga

SEQ ID NO: 8212 - protein, 246 aa, Unknown
  Obtained from environmental sample
  DOMAIN (23)...(176): Type III restriction enzyme, res subunit
  misc_feature (1)..(246): Xaa is any amino acid
MRFFFEPIYCILKFMRKFKVVSPFKPAGDQGEAIAALADGIKAGDKFQTLQGVTGSGKTFTMAKIIEKVQMPTLIVSHNKTLAAQLYREFKGFFPDNAVEYFVSYYDYYQPEAYVASRDLYIEKDASINDEIERMRLSAARSMMEREDVIIVATVSCIYGMVTPDVYRKMTATCSKGETIDVDALIRRFVELQYERNDAVLDRGRFRRRGDTLEIFPAYMEEAYRVDLDWDKVERIRRFNPYPAKF

SEQ ID NO: 8213 - DNA, 915 bp, Unknown
  Obtained from environmental sample
  misc_feature (1)..(915): n is a, c, g, or t
atgatttaccttcctgtcagggcagccgtcgccgccaagcgcgatattattcaggcgctcaacttctccggcagcatcgacgccttccgccgcgccgccatcgctccggctgtgatggggagccgcgttatgcggatcttcgtcgacgagggcagcagcgtcaaagaggggcagctgcttgtcagaatggaagacttccagctccgccagtccgcggcgcagatgtcgcagctcgagtcggactacaaacgcatgtcggcgctctacagcaagggcagcgtgacggcgcagcagtacgagcaggtcagctccggcttcaacgccgccgtcgcggggtatgagttgttgaaaaactccgtcgaattgcgcgccccgttcaccggcacggtcatcggcaagtacgtgaacgagggagaggtctacaccggaacgccgggctacgacggcatctccggcgtcctgtcaatcgcgcaactcagccgcatgaagatagaggtaatggtccccgaacaagacttcgtcctgctgcaccccggccaaccggcgcaggtaaagacggacgcctatccgggcatggactttgaggggaaaatcttcaccgtaaaccccgccctaaacagaatgagccgcacatcgcgcgtggccgtggagataaaaaacgacaaacaaatgctgaaacccggcatgttcgcgaaagtggaaatagtaacgaacagcctgacaaacgtcttagccgtccccgccaccgcggtggtaatgagaaacggggaaacgaacgtctttaccgtagagcgccaagacaatttaccgtacgagacgcatcccaaattagtaaaagtaaagacagggcttgttacagacacttacgctcaaatattagaaagtatcaacgaggggaacaatagtactcactga

SEQ ID NO: 8214 - protein, 304 aa, Unknown
  Obtained from environmental sample
  misc_feature (1)..(304): Xaa is any amino acid
MIYLPVRAAVAAKRDIIQALNFSGSIDAFRRAAIAPAVMGSRVMRIFVDEGSSVKEGQLLVRMEDFQLRQSAAQMSQLESDYKRMSALYSKGSVTAQQYEQVSSGFNAAVAGYELLKNSVELRAPFTGTVIGKYVNEGEVYTGTPGYDGISGVLSIAQLSRMKIEVMVPEQDFVLLHPGQPAQVKTDAYPGMDFEGKIFTVNPALNRMSRTSRVAVEIKNDKQMLKPGMFAKVEIVTNSLTNVLAVPATAVVMRNGETNVFTVERQDNLPYETHPKLVKVKTGLVTDTYAQILESINEGNNSTH

SEQ ID NO: 8215 - DNA, 990 bp, Unknown
  Obtained from environmental sample
  misc_feature (1)..(990): n is a, c, g, or t
gtgccgcgcgtgagcgctcgagggggtggcctcgatggcgtgttcggcgaccggaagcgcgagataaacgtcttcctgagcaaaatgcgcttagaccaatacaagatcgggccggacgcggtgatgggggcgctcatggcctccaacatgaacgtgtcgagcggacacgtcagcgccggtcaccaagagtatctcgtgcggactatgggagaattcgggaacatcaacaccatcaccaatacaataatcaccaccgtgaacggatcgcccatacgcataggcgacgtggcgcgggttgaggacacgcagaaggagcagcgcaactacgtccgtatgaacggcagggacggcgtcgtcttcatggtgaccaagcagagcggctccaacacgctcaaaacggtgaacgaggtgaagaaactgctcgcggagctcaagcccaccatgccgccggacgtgcaatttgtgaccatcttcgaccaaggcgagatggtggagcgggtgacgggcaatgccacggaatcggcggtgcagggcaccattctcgcaatcgtcattctgtggttcttccttcgcaactggcggcctacattcgttatcgcgttggcaattcccatatcgatcatcacaacgtttataggcatgtacgccatgggctacacgctcaacgtgataacgataggaggtttcgccctcgcggtgggtatgcttgtcgataacgcggtggtggtgatagagaatatataccggcacttggagggcggcaagcaccgcaacgtcgccgccgtggacggcgccacggaggtgggtctggccatcacggcctccacgctgaccacggtggcggtcttcgtgccgctggcgcttgccggcggtttcgcgggaaagatcgcgcagcccttggcgctgaccgtctgcgcgggtctgggcgcctcgcttctcgtggccataactcgtgccgctcgtgccgctcgtgccgctcggccgatctga

SEQ ID NO: 8216 - protein, 329 aa, Unknown
  Obtained from environmental sample
  misc_feature (1)..(329): Xaa is any amino acid
MPRVSARGGGLDGVFGDRKREINVFLSKMRLDQYKIGPDAVMGALMASNMNVSSGHVSAGHQEYLVRTMGEFGNINTITNTIITTVNGSPIRIGDVARVEDTQKEQRNYVRMNGRDGVVFMVTKQSGSNTLKTVNEVKKLLAELKPTMPPDVQFVTIFDQGEMVERVTGNATESAVQGTILAIVILWFFLRNWRPTFVIALAIPISIITTFIGMYAMGYTLNVITIGGFALAVGMLVDNAVVVIENIYRHLEGGKHRNVAAVDGATEVGLAITASTLTTVAVFVPLALAGGFAGKIAQPLALTVCAGLGASLLVAITRAARAARAARPI

SEQ ID NO: 8217 - DNA, 543 bp, Unknown
  Obtained from environmental sample
  misc_feature (1)..(543): n is a, c, g, or t
ttgtcgccgacacccccggnccgacgggaacaggcgctgaaaaaccgccgttatcttgtagccccctcaggcaagatcgccgaaaaattctttcgtgataatccggcgctgaaaatcgactttcggaaaaatgttattatccttaacaaaacgcctgtccacactccccgcaccattgaactgaaagaactgcgtaaattgggcggcgcggcgctgggaacggtccttgacgaatcccagcggtttatggcccggctgctttttgaattccataaaggtttcagttacgggaaggacaagcccgtccccgtatggataaccggctattccgaaatgaaaaaaacaggagcatttgccgcatatacaaacgagcttaaaacgatatataataaatcagaactggcagaaacgcttttcctgtaccgccatttttccatgaaccagttcacgatagacctgaagcaacagactgctcccggcgaatctgcggcgagagctcttaaacgcgttggagccgcctacaggcggaaatttttaatataa

SEQ ID NO: 8218 - protein, 180 aa, Unknown
  Obtained from environmental sample
  misc_feature (1)..(180): Xaa is any amino acid
MSPTPPXRREQALKNRRYLVAPSGKIAEKFFRDNPALKIDFRKNVIILNKTPVHTPRTIELKELRKLGGAALGTVLDESQRFMARLLFEFHKGFSYGKDKPVPVWITGYSEMKKTGAFAAYTNELKTIYNKSELAETLFLYRHFSMNQFTIDLKQQTAPGESAARALKRVGAAYRRKFLI

SEQ ID NO: 8219 - DNA, 450 bp, Unknown
  Obtained from environmental sample
  misc_feature (1)..(450): n is a, c, g, or t
atggtcagattggccgagtacgccagcgaagaaacggccccctggggaaaatttaaaattccctcgactgcgggcggtttgaattcaacagtttatgaccttagccgttttgggaatatgatgctttcaggcggtacgttaaacggcgtgcgtatccttggcagaaaagccgttgaaaaaatgacaacggctgccatcgcccttccgaaccattgctggaactcaaaagaaaaagaaaggtactacggcgtaggctttgatatgcgtaacggtcccgcttttacattttcccagggtactttcatgcacgaaggttctggtgcgtgttcattgtatatcgatcctaaagaagaacttgtcgcagcatggattgtccccttcgcgaaggaaggctggttttcacgcgcgcttttcaacgtacaaaacattatttggtcgggtttgatatag

SEQ ID NO: 8220 - protein, 149 aa, Unknown
  Obtained from environmental sample
  misc_feature (1)..(149): Xaa is any amino acid
MVRLAEYASEETAPWGKFKIPSTAGGLNSTVYDLSRFGNMMLSGGTLNGVRILGRKAVEKMTTAAIALPNHCWNSKEKERYYGVGFDMRNGPAFTFSQGTFMHEGSGACSLYIDPKEELVAAWIVPFAKEGWFSRALFNVQNIIWSGLI

SEQ ID NO: 8221 - DNA, 471 bp, Unknown
  Obtained from environmental sample
  misc_feature (1)..(471): n is a, c, g, or t
atggattgtccccttcgcgaaggaaggctggttttcacgcgcgcttttcaacgtacaaaacattatttggtcgggtttgatataggtaacaggaaaattgtgaaaatactgtacgtatcggatttggatggaacattactcagaagtaacgaaaagatgtcagaatataccataaagacaataaatgacttaatagagaatggtatgtgtttttcttatgcaaccgcacgttcattgtcatcgtcgtctattgttacaagcggtttgataacgaatataccggttattattcataacggaacatttgttgtaaacgcatctacaagagaaaagctgctttctttgcattttaccgaagaagaaaaggcaaagataataaatatttttgataaatatccaatttatccattggtatatgcatttgtcaatgatgaagaaagagtttcatggataacaaacaatgattattaa

SEQ ID NO: 8222 - protein, 156 aa, Unknown
  Obtained from environmental sample
  misc_feature (1)..(156): Xaa is any amino acid
MDCPLREGRLVFTRAFQRTKHYLVGFDIGNRKIVKILYVSDLDGTLLRSNEKMSEYTIKTINDLIENGMCFSYATARSLSSSSIVTSGLITNIPVIIHNGTFVVNASTREKLLSLHFTEEEKAKIINIFDKYPIYPLVYAFVNDEERVSWITNNDY

SEQ ID NO: 8223 - DNA, 492 bp, Unknown
  Obtained from environmental sample
  misc_feature (1)..(492): n is a, c, g, or t
atgcctgaaacaaattataagaggcccacctgggatgaatactttatggaagtatgcgaggccatatccaagcgggcaacctgcgatcggggccgttcaggctgcgtaatcgcgaagggtaaccagctgcttgtaacaggttacgtcggggctccggcggggcttccccattgtgatgaagccggccaccagttcaaaaaaatgcttcatgaggacggctcggttacaacccactgtgtacggactgtgcacgccgaacaaaacgctatatgccaggcggcaaagcgcggcatttcgattgaaggcgcaaccttatattgcagaatgacgccctgcagaacctgcgccatgcttatcattaactgcggaatagaaagggtagtgtgccagagacgctaccacgacgccgacgattccgaggcaatgtttaccacagcggggatcaaacttgaatatgtgtataacgaaacccagcaatacgttaatcaataa

SEQ ID NO: 8224 - protein, 163 aa, Unknown
  Obtained from environmental sample
  DOMAIN (9)...(131): Cytidine and deoxycytidylate deaminase zinc-binding region
  misc_feature (1)..(163): Xaa is any amino acid
MPETNYKRPTWDEYFMEVCEAISKRATCDRGRSGCVIAKGNQLLVTGYVGAPAGLPHCDEAGHQFKKMLHEDGSVTTHCVRTVHAEQNAICQAAKRGISIEGATLYCRMTPCRTCAMLIINCGIERVVCQRRYHDADDSEAMFTTAGIKLEYVYNETQQYVNQ

SEQ ID NO: 8225 - DNA, 405 bp, Unknown
  Obtained from environmental sample
  misc_feature (1)..(405): n is a, c, g, or t
atgacagattcgacgaaggcaggcgtttttatttttctcatggttcagtttatccggggaataccaaaggaactcgatcaatcggcaatgattgacggctgtggaaaattctcaatattcctgcgcattatttttccgttgataaaacccgcgttgatcacttccgccatttttagtttttactggcgctgggatgattttcttggcccgcttttgtacttgaaccggccccgaaattttactgtttcgctggccctgcggatgttcagcgatcccgccacatccaccgactggggggctattttcgcgatgggaacattatcgcttattccggtgtttctcatctttatcgtattccagaaatatatagttgaaggaatggtgacatcaggattaaagggataa

SEQ ID NO: 8226 - protein, 134 aa, Unknown
  Obtained from environmental sample
  misc_feature (1)..(134): Xaa is any amino acid
MTDSTKAGVFIFLMVQFIRGIPKELDQSAMIDGCGKFSIFLRIIFPLIKPALITSAIFSFYWRWDDFLGPLLYLNRPRNFTVSLALRMFSDPATSTDWGAIFAMGTLSLIPVFLIFIVFQKYIVEGMVTSGLKG

SEQ ID NO: 8227 - DNA, 537 bp, Unknown
  Obtained from environmental sample
  misc_feature (1)..(537): n is a, c, g, or t
atgccccccaatatgccgccgcaattattggtagcgaatttacccttgccgcattcgcaaggcttgtcgttgttttcactgcctttcatgtttgcggcggcgaaccctgcgccgaattcgacgcctttgcacgctccaattgaaattactgcggcggcaagatttgcgtcaagtttttcaaaaacaggctctcctaatccaacggggacgcctgttgtaagacaggttatcacgccgcctgcgctttcgctctcaccgcgaagttcttctatttttgcggacgctttttccgcgccgcttttgctggggactcggaaaggattgcgttctatttcttcaaaatcaaagccgtcttcgttgggcgaaggctggtttattccggcgatggacgatgtccacgcttttattgttattccttgtaaagcgagaaattttttcgctattgcgcctgcggcgactctgcaaagagtttctcgccccgaacttcttccgccgcctcgatggtctctaataccgtattttgcttcccatgtgtaa

SEQ ID NO: 8228 - protein, 178 aa, Unknown
  Obtained from environmental sample
  misc_feature (1)..(178): Xaa is any amino acid
MPPNMPPQLLVANLPLPHSQGLSLFSLPFMFAAANPAPNSTPLHAPIEITAAARFASSFSKTGSPNPTGTPVVRQVITPPALSLSPRSSSIFADAFSAPLLLGTRKGLRSISSKSKPSSLGEGWFIPAMDDVHAFIVIPCKARNFFAIAPAATLQRVSRPELLPPPRWSLIPYFASHV

SEQ ID NO: 8229 - DNA, 708 bp, Unknown
  Obtained from environmental sample
  misc_feature (1)..(708): n is a, c, g, or t
atggtaataatttcaactttgttaaaaattaccggcggcctttgcctctttttgtacggaatgaaggtgatgagcgacggcatccaacgcgccgccggtgacaggcttcaacgcttccttaatttgattaccgggaacagattttcggctgtttttaccggttttgccataacagcaataatccagtcctcgtctgccacgacggtcatggtggtatcccttgtaaacgcgggcctcctcaatcttactcaggcaatagggcttatcatgggggccaatataggcaccacggttacggcgtggattgtctcccttatcggattctcccttaaactttctgaacttgccctgccggcggtcggcgtcggttttatctgcagtatagtcaaatggaaacacagaaacatcggggattttatcctcggtttcggacttctctttatgggccttgatattcttaccaagtcaatgccctcgcttggggacaatatctacattattacaaaagcttccaatatgggctttcttaccgatttgattggcgtggcttttggaactgtaatcaccctgcttcttcactcgtcaagcgcgactaccgccataatactaactatggcgtataacggcataataggttacgaattggcggcggcgatgattttaggcgcgaatatcggcaccacaatgacgcggcntcggccgatctga

SEQ ID NO: 8230 - protein, 235 aa, Unknown
  Obtained from environmental sample
  SIGNAL (1)...(25)
  DOMAIN (16)...(179): Na+/Pi-cotransporter
  misc_feature (1)..(235): Xaa is any amino acid
MVIISTLLKITGGLCLFLYGMKVMSDGIQRAAGDRLQRFLNLITGNRFSAVFTGFAITAIIQSSSATTVMVVSLVNAGLLNLTQAIGLIMGANIGTTVTAWIVSLIGFSLKLSELALPAVGVGFICSIVKWKHRNIGDFILGFGLLFMGLDILTKSMPSLGDNIYIITKASNMGFLTDLIGVAFGTVITLLLHSSSATTAIILTMAYNGIIGYELAAAMILGANIGTTMTRXRPI

SEQ ID NO: 8231 - DNA, 741 bp, Unknown
  Obtained from environmental sample
  misc_feature (1)..(741): n is a, c, g, or t
atgttaggcgaggcggtacggcgggggctgctggcggtaaacccctgtgaaaaagtacagaaattgaaaaacgaccggaagaaactggaaatactgacggttgaggaagtacggaaactataccctaaaaactatacggaagtttggggtgatagaaagattgcctatgccgctaaccgtctggcttccttgacgggtatgcggataggggagattttagggttacggggtgaatatgtgtttgatgattatattatggtttgcggacagtacggagagaaagggtataaaccattcacgaaaaccaaagaaaatcgcaatataccccttatgccggaaatgattggacttttgaaggggctgatgaaaaacaacggacagggctttgtgttttctgataacggcggggcgaaaccgttgagtgatgactgtgttagtagggcgtttcgtgccgcacttgccaaaatagggataaatgaagcggagataaaacggcgggggctgacgttgcatggttggcggcacttcctgaatacggaattacagagacaaggattgacgatacaacaggtgcagagtgtaaccggacataaaaccgaccgtatgagcgaatggtactgccaccttgacgcacggaatataaccgatgtggtgaaagcaccggaagcgattgcccggaactatgcccccagagacagaaagaatacccccaagaaagcgggcgatggtttgaaaaattga

SEQ ID NO: 8232 - protein, 246 aa, Unknown
  Obtained from environmental sample
  DOMAIN (31)...(216): Phage integrase family
  misc_feature (1)..(246): Xaa is any amino acid
MLGEAVRRGLLAVNPCEKVQKLKNDRKKLEILTVEEVRKLYPKNYTEVWGDRKIAYAANRLASLTGMRIGEILGLRGEYVFDDYIMVCGQYGEKGYKPFTKTKENRNIPLMPEMIGLLKGLMKNNGQGFVFSDNGGAKPLSDDCVSRAFRAALAKIGINEAEIKRRGLTLHGWRHFLNTELQRQGLTIQQVQSVTGHKTDRMSEWYCHLDARNITDVVKAPEAIARNYAPRDRKNTPKKAGDGLKN

SEQ ID NO: 8233 - DNA, 735 bp, Unknown
  Obtained from environmental sample
  misc_feature (1)..(735): n is a, c, g, or t
atgtggctatacggattaatcgaagtgcgttttggcgcaccactgcgtgaaattatcggcgacatcgggggcggcgttacaaacgacgacggctctctttgcggctgtaattacaaagcggtgcagattggcggaccgtcaggcggatgcctcacgcaagaacatctcgatctgccgttggattatgataaccttgcaaaagtcggagcgatggttggttcaggcggtcttgtcgtaatgaatcagggaacctgtatggtaaaaatcgcaaggtactttatgcagtttacgcaaaacgaatcctgcggtaagtgcgttgtatgccgcgaaggaacccgtcagatgttggtgcttctcgatgaaattatcgaaggcagggcgacaaaggacaccctcgacctgcttgaagatttatcgcaggttgttaaagtcggctctttgtgcgctctcggaaagactgctccaaacccggtgttgtcaactttaagatatttcagggacgagtataacgctcacgtatttgacaaaaagtgtccaaccggaaactgcgaagctcttgctgactataaaattcttcccgataaatgcaaaggttgttctctttgctccaagaaatgcccggttgaggcaattagcggcgaaataaagaaaccgtataccattgatataaagaaatgtatcaagtgcggcgcatgtatacagagctgtaaatttgcagccatcgtaaaaggatag

SEQ ID NO: 8234 - protein, 244 aa, Unknown
  Obtained from environmental sample
  DOMAIN (219)...(242): 4Fe-4S binding domain
  misc_feature (1)..(244): Xaa is any amino acid
MWLYGLIEVRFGAPLREIIGDIGGGVTNDDGSLCGCNYKAVQIGGPSGGCLTQEHLDLPLDYDNLAKVGAMVGSGGLVVMNQGTCMVKIARYFMQFTQNESCGKCVVCREGTRQMLVLLDEIIEGRATKDTLDLLEDLSQVVKVGSLCALGKTAPNPVLSTLRYFRDEYNAHVFDKKCPTGNCEALADYKILPDKCKGCSLCSKKCPVEAISGEIKKPYTIDIKKCIKCGACIQSCKFAAIVKG

SEQ ID NO: 8235 - DNA, 639 bp, Unknown
  Obtained from environmental sample
  misc_feature (1)..(639): n is a, c, g, or t
atgtgggcgcacagcataattacatttggcaaacttttcagctatacctttggctttaacatgataactatggtgatcatcggggcggtggtagttttgtgctataccctcttgggcggtttctgggcagtcggaatgaccgatctgatccacgggcttttgatggtcgctgccctggtggtagtactggctgcctcgttttttgccgccggcggagtaagcggcgtcgcgacaaacctggcatcctttccccggtttaccgactttttcggaataaccacgcccaaaatggacagccgcgttcaggaactgataataggcgatccgcaattcccccccagagcggattacagcctgcttgttaccataaacaccatggactgggggcttgggtatttcagtatgccccatgtgcttgctcgatttatggccatcaagacaacctcaatgataaaaccttccatgaccattgcggctgtatggtgttttatatcgcacacggccgcagtgctgatcggcatcattggccgctcttatctgcccgaccttcttgttaccgccagcgatgcgaagaatattattatcccttggagcacccgcttattcccgccgttgcttgcagggattgagctttcttga

SEQ ID NO: 8236 - protein, 212 aa, Unknown
  Obtained from environmental sample
  misc_feature (1)..(212): Xaa is any amino acid
MWAHSIITFGKLFSYTFGFNMITMVIIGAVVVLCYTLLGGFWAVGMTDLIHGLLMVAALVVVLAASFFAAGGVSGVATNLASFPRFTDFFGITTPKMDSRVQELIIGDPQFPPRADYSLLVTINTMDWGLGYFSMPHVLARFMAIKTTSMIKPSMTIAAVWCFISHTAAVLIGIIGRSYLPDLLVTASDAKNIIIPWSTRLFPPLLAGIELS

SEQ ID NO: 8237 - DNA, 822 bp, Unknown
  Obtained from environmental sample
  misc_feature (1)..(822): n is a, c, g, or t
gtgaaccgctacgtgaagatgataaccacggacacccagaaccacttaatgtcggcagccctggctgcggcgcagtttgtcagcgtcgaagaactggatcgttaccacacagtggaagactcaaaagatcagaattggtatgacttaagaacgcgtcttgtcaggtttgctgagaaatataatgtatattatgtttactatctgcgggaatacgatgaagacaactttcagtacattgttgacaacgattttgatcccacaactatagtaggcacgggcgatattttgccgattcaggatattgcccgctctgcccttgccggaaacgtaagtgatacagatcttggcatctataatcgtacctgggatggtgttattgccggttgtgctccggtatgcgatccaaacggcaatttttattgtgtagcgggtgtggacataaaagacaactttattgtggatcagcgcagatattggcagacgatgccgatactccagctggttgctctgtatatttcggtgtttggcggttttttgaataggctgctgtaccgcaagaaagcgaaagaatctgaagatgcgaatatcaagcttcagtacttcaacaacaatatgcgtcttgccttctccacgtatctgtcggaggatgttgtcgaggaaataatatccgatcctgcccgcctccacctgggcgggacaaaccggcacatgaccgctttgttttcggatatcaaaaatttgacaagaatagcggaacagcttactccggagcattgggttgatctcctcaaccattacctttccagccatgagtcgatgtaa

SEQ ID NO: 8238 - protein, 273 aa, Unknown
  Obtained from environmental sample
  SIGNAL (1)...(29)
  misc_feature (1)..(273): Xaa is any amino acid
MNRYVKMITTDTQNHLMSAALAAAQFVSVEELDRYHTVEDSKDQNWYDLRTRLVRFAEKYNVYYVYYLREYDEDNFQYIVDNDFDPTTIVGTGDILPIQDIARSALAGNVSDTDLGIYNRTWDGVIAGCAPVCDPNGNFYCVAGVDIKDNFIVDQRRYWQTMPILQLVALYISVFGGFLNRLLYRKKAKESEDANIKLQYFNNNMRLAFSTYLSEDVVEEIISDPARLHLGGTNRHMTALFSDIKNLTRIAEQLTPEHWVDLLNHYLSSHESM

SEQ ID NO: 8239 - DNA, 741 bp, Unknown
  Obtained from environmental sample
  misc_feature (1)..(741): n is a, c, g, or t
gtgccggaacatgattatcaccgggaacgcaacagccttctgcttgattcggtaatgttcctgctcataacggttgtcatcataatcgccgttatttatctggctgtgggcgggcttctccgtcatgttaaatatctggttaccgggatcggaaaaatcgcagagggcaatttggacgcaaggatagaaggcagttacaatgacgagtttgacaaaatcaaggatgctgtaaactctatggcggcggacataaaaacatatatggaagaaaaactacagacagaacgcaaattgaatgaaagccgtatttctatcttgctttcccagatacagccgcattttttatacaacgcccttgccgtcatatcaaggctgtgcgacaaagaccctgccgaggcaaaaaaagcgactctaaatttctcaaattacctaagggcgaatatgaatttattggaacgcagggagccaatcccgtttgaaaatgaacttaaacacacaataggctttttgaatttggaaaaagccatgtacggcgaagcgttaaaggtaatatataacatacaaacaaaaaactttacgcttccggctctcaccatgcagcccattgtcgaaaacgcaatcaaacacggcatagggaaaaaagaaggcggcggtacggttactatttcaacgaaagaaacagatagcggttatctggtcattgtttctgacngacggcgcagttttgacaggaaaaattga

SEQ ID NO: 8240 - protein, 246 aa, Unknown
  Obtained from environmental sample
  DOMAIN (17)...(86): HAMP domain
  misc_feature (1)..(246): Xaa is any amino acid
MPEHDYHRERNSLLLDSVMFLLITVVIIIAVIYLAVGGLLRHVKYLVTGIGKIAEGNLDARIEGSYNDEFDKIKDAVNSMAADIKTYMEEKLQTERKLNESRISILLSQIQPHFLYNALAVISRLCDKDPAEAKKATLNFSNYLRANMNLLERREPIPFENELKHTIGFLNLEKAMYGEALKVIYNIQTKNFTLPALTMQPIVENAIKHGIGKKEGGGTVTISTKETDSGYLVIVSDXRRSFDRKN

SEQ ID NO: 8241 - DNA, 762 bp, Unknown
  Obtained from environmental sample
  misc_feature (1)..(762): n is a, c, g, or t
gtgagtaataaaagcgcactttcggcacaagatgtcgccgatatgcttaatgtcagtaaaaacaccatttataacatgataaaaaaaggcgaactaaagtcttataatgtggggcgaaaggttcggtttaccgaaagcgaggtaaatgcttttattaaccgatctcagataagtctggacgctcagcaaacctcatccgccttgcctaacggcgttcaaaccaataacggatttataatctgcggtcaggatattattcttgatgttttgtccagttatatgaggtcgtacggcatacccgctcttagggcatttatcggaagttacgacgggcttatgcttttatataagaataaagtaagcgtagcgtcttctcatctttgggacagcgaaacgaatgaatacaatattccgtatattaaaagactcttacccggcacttccgctgttgttattcaactgacttatcgtatgcagggactatatgttcaaaaaggaaatccaaaaaacataaaaggctgggaagatttcggacgcgatgatataacaataattaaccgcgaatacggagcgggatcaagggtgctgttagacgaaaatcttaaactgcttggaataaccggcagttccatcaaaggttacacaacagaaaaacaaacgcatttggatgttgcaagttcagtctcaggcggcaaagccgatgtagcggtagggattgaaaagatcgctaggcaggttgataacattgattttatcccctga

SEQ ID NO: 8242 - protein, 253 aa, Unknown
  Obtained from environmental sample
  DOMAIN (4)...(52): Prophage CP4-57 regulatory protein (AlpA)
  misc_feature (1)..(253): Xaa is any amino acid
MSNKSALSAQDVADMLNVSKNTIYNMIKKGELKSYNVGRKVRFTESEVNAFINRSQISLDAQQTSSALPNGVQTNNGFIICGQDIILDVLSSYMRSYGIPALRAFIGSYDGLMLLYKNKVSVASSHLWDSETNEYNIPYIKRLLPGTSAVVIQLTYRMQGLYVQKGNPKNIKGWEDFGRDDITIINREYGAGSRVLLDENLKLLGITGSSIKGYTTEKQTHLDVASSVSGGKADVAVGIEKIARQVDNIDFIP

SEQ ID NO: 8243 - DNA, 948 bp, Unknown
  Obtained from environmental sample
  misc_feature (1)..(948): n is a, c, g, or t
ttgacgcggaaggccaattttgccaacgaacaattcgcggcatacaggaatttatttgattctgaaaacgttatccacgtaacgtatatcgccactgataaaaaaaccggcgcttaccggcgaaaatgggacgctccaactttagcggctattccgggaactgtttcaatgtacacgaaagatcttttgggtgatcggagcgtgtgtgtaataatcacggggatgaacgcccaaagggaacacaccatgaccgttttcaaaaaaaaccttcaggacgcggaaaacgccccttttataaaaatagccgggatacaggttgaaggttccattacagtaaatgaggttgaacggccgcttgcctacaggcagggcattaccaacggacagccttacaatataaccgcttacgggcgcgacacggattcggataatatgctggataggatagaaattacctttgtttacaatcaaagaaacgggaaatatgagcaaaacaaaatcaaccggattcccggcacgcaaatcgagcagcggcgcctgcgtgaaattctttccggtgacacaaaagtttttgaaggatttataaacgatctctggtaccatgtaagcccttcgggaaccctggataataaccagaaattgtattttgatcccgtaaaacgggaaataattttttcacgcgatgaaacaatgcaggtttttcattggcggaattccagcccgtcccgttacggcatttacatttccgcttataacaaatcagtaacgacgttgcgtcgtaccatgaatattgaactggaatcgtttaacagtatccgcgtcagggcgtctgaagacatcaacttgagaattaacatgactgcgtcatgggacggcacatacaggcgtatggggagctcttttcttaaacaacaggaagaaaaccaaatcaaccctcggccgatctga

SEQ ID NO: 8244 - protein, 315 aa, Unknown
  Obtained from environmental sample
  misc_feature (1)..(315): Xaa is any amino acid
MTRKANFANEQFAAYRNLFDSENVIHVTYIATDKKTGAYRRKWDAPTLAAIPGTVSMYTKDLLGDRSVCVIITGMNAQREHTMTVFKKNLQDAENAPFIKIAGIQVEGSITVNEVERPLAYRQGITNGQPYNITAYGRDTDSDNMLDRIEITFVYNQRNGKYEQNKINRIPGTQIEQRRLREILSGDTKVFEGFINDLWYHVSPSGTLDNNQKLYFDPVKREIIFSRDETMQVFHWRNSSPSRYGIYISAYNKSVTTLRRTMNIELESFNSIRVRASEDINLRINMTASWDGTYRRMGSSFLKQQEENQINPRPI

SEQ ID NO: 8245 - DNA, 804 bp, Unknown
  Obtained from environmental sample
  misc_feature (1)..(804): n is a, c, g, or t
atgcccgcgggctcaggcgctccaatcgattccgcggcttccctgatcgaggcggtagaattcgctttgaaatcgccgaagaagggaacgatcctttttatcggttacaaatatcctgacggcgattttgaattattgctgccccactccaacgctcccgccaaaaagcaaaattcaaccgatgtggttcttgaaaagacttatatagaatccatggacgcgttcaatgaaacagtcggggaaataaaccctctgttgattattttcaattcccttgatgttgagggagcggcggcggtacgccgccacccgctgacaatgacgattccggtaataatgatcagcggccgggtggataacgcgattgatgtaaattcattgggcaaattatcgcggcttataatctgtcaccgcgcgattgtctcttccccggaattcagggcgcggataatggccatcgtaaacggcgctgaaatactgcccccgcataccggcatactggtaaaaaaagcgatcctcaattttgacaagcacgccaagaaccacatttcacgctggaaactggctgattcggtaagtgtaagcgaagactaccttacccgtatctttcacaaagaaatggggcttcccctgtgggactatttgaaccgttaccgtatatttctcgcggctgaactcctgcagcagacagacaacacgatacaggagatcgccaatagatgcggatttcaggatcaagcgtatttttgtcgtgttttcaagaaagtttacggcgtttcccccggacagacgcggaaaaaataa

SEQ ID NO: 8246 - protein, 267 aa, Unknown
  Obtained from environmental sample
  DOMAIN (222)...(266): Bacterial regulatory helix-turn-helix proteins, AraC family
  misc_feature (1)..(267): Xaa is any amino acid
MPAGSGAPIDSAASLIEAVEFALKSPKKGTILFIGYKYPDGDFELLLPHSNAPAKKQNSTDVVLEKTYIESMDAFNETVGEINPLLIIFNSLDVEGAAAVRRHPLTMTIPVIMISGRVDNAIDVNSLGKLSRLIICHRAIVSSPEFRARIMAIVNGAEILPPHTGILVKKAILNFDKHAKNHISRWKLADSVSVSEDYLTRIFHKEMGLPLWDYLNRYRIFLAAELLQQTDNTIQEIANRCGFQDQAYFCRVFKKVYGVSPGQTRKK

SEQ ID NO: 8247 - DNA, 912 bp, Unknown
  Obtained from environmental sample
  misc_feature (1)..(912): n is a, c, g, or t
ttgagttgcccggctgagcctgtaatcgaaccggaaaacgcccttgatattttggaccgcggcaaagccctttatgccgaaggtaagatggatgaagcgatagtggaatttacccgcgctcttgctatagacagcagtctggcggacgcttatttttaccgggggcttgcgtactcaaatagacaggtctatgacaaagctattgaggacttttccgaggcgatacggcttaatccgggtgacgcatgggcatattacaacaggggttttgcgtactcatgcaaacaagactatgacaaggctattacggattataccgacgcgatccggcttgatcccaatcttatgctggcttattacaaccgaggctgtttgtattacgaaaaaggtaacaatgacaaggcttttacggattttagcgacgcgataaggcttgacccgaattttgcggccgcttataacaaccgggctgttacgtatcttgataagaaagacaatgaccgggcaattgatgattgtaaccaggcgatacagcttaacgccgattatgcgttggcttataccaaccgaggcaatgcgtatgacggtaaaggtgattttgacaaggcaatcgccgaccataccaaggcgatacagcttgatcccgatttaactaaagccagttttaaccgaggtaattcatactctaataaacaagactatgacaaggctattaatgattatacaaatgtgatagtacgttaccctaatgaagcggtttattttatcaaccgtggtaatgcgtattataacaaacaggattataaccgtgcttttatggactatgaagccgctttatcaataaacccaaataatgccaacgcaaagtggaatcttgatttagccaaatccaggggaggaaaaagggtataa

SEQ ID NO: 8248 - protein, 303 aa, Unknown
  Obtained from environmental sample
  DOMAIN (218)...(251): Tetratricopeptide repeat
  misc_feature (1)..(303): Xaa is any amino acid
MSCPAEPVIEPENALDILDRGKALYAEGKMDEAIVEFTRALAIDSSLADAYFYRGLAYSNRQVYDKAIEDFSEAIRLNPGDAWAYYNRGFAYSCKQDYDKAITDYTDAIRLDPNLMLAYYNRGCLYYEKGNNDKAFTDFSDAIRLDPNFAAAYNNRAVTYLDKKDNDRAIDDCNQAIQLNADYALAYTNRGNAYDGKGDFDKAIADHTKAIQLDPDLTKASFNRGNSYSNKQDYDKAINDYTNVIVRYPNEAVYFINRGNAYYNKQDYNRAFMDYEAALSINPNNANAKWNLDLAKSRGGKRV

SEQ ID NO: 8249 - DNA, 690 bp, Unknown
  Obtained from environmental sample
  misc_feature (1)..(690): n is a, c, g, or t
atggccgatctcttcgtcaagaagagcgtctgggtcttcggcggtgacggatgggcctatgacatcggctatggcggcctggatcatgtgctcgcttccggcgaggacatcaacgtgctggtgatggataccgaagtgtattccaataccggcggccaggcgtccaaagccacgccgctcggctccatcgccaagttcgccgctgccggcaaacgcatcggcaaaaaggatctcggcgccatggccatgacctacggctatgtctatgtggcctccgtgagcatgggcgccaacaagcagcaggtgctgaaagccttcaaggaagctgaagcctacaagggtccctcgctgatcatcgcctacgccccctgcatcaaccagggcctgcgcaagggcatgggcaagagcatggaagaagccaagatcgccgtggactccggctactggcccctgtaccgcttcaatcccgacttggccaaggaaggcaagaaccccttccagttcgaaagcaaggcccccaacggctcgttgcaagacttcctggccggggaaacccgttatgcggccctggccgcgatagatccccaggcttccaaaaagctgcgggccgatctggaaaagtcctacaatgaccgctacgttcagtacaaggcgctggcggatctgccgggactgggcgaacgaaaataa

SEQ ID NO: 8250 - protein, 229 aa, Unknown
  Obtained from environmental sample
  DOMAIN (1)...(120): Thiamine pyrophosphate enzyme, C-terminal TPP binding domain
  misc_feature (1)..(229): Xaa is any amino acid
MADLFVKKSVWVFGGDGWAYDIGYGGLDHVLASGEDINVLVMDTEVYSNTGGQASKATPLGSIAKFAAAGKRIGKKDLGAMAMTYGYVYVASVSMGANKQQVLKAFKEAEAYKGPSLIIAYAPCINQGLRKGMGKSMEEAKIAVDSGYWPLYRFNPDLAKEGKNPFQFESKAPNGSLQDFLAGETRYAALAAIDPQASKKLRADLEKSYNDRYVQYKALADLPGLGERK

SEQ ID NO: 8251 - DNA, 603 bp, Unknown
  Obtained from environmental sample
  misc_feature (1)..(603): n is a, c, g, or t
gtgggaaaaaccacgttgagcaaactcatctcaagattttatgatccgacaggcggaaaggtttgtcttgacgggcacgatctgcgtgacatcactttggaaagcctacgaagcaatatctctttagttttacaggacacatttttatttaatggaactatcgaagaaaacatcgcgtttgcaagacccgatgcttcttttgaagaagttaaatcggcggcgcagaccgcaaggatacacgatgacataatgcaaatgcccgaagcctatcagacgcagataggggaacgcggcgttaagttgtcaggcggacaaaagcagcgcatagctatagcaagggcggtactgtgccgcgctccggtgcttattcttgatgaagcgaccgcgtccgttgacgtgcacaccgaggagcagatacagcaggcgatcaatgaaatagcaggaagcagaacaatcgtaaccatcgctcaccgtctgtctaccattcgaaacgcggatgttatttacgtttttgaaaaagggcgtattattcaatcggggagccatgatgagttgattgggcaggaagggctttatcggaatttgtgcagaacggggaaatga

SEQ ID NO: 8252 - protein, 200 aa, Unknown
  Obtained from environmental sample
  DOMAIN (2)...(174): ABC transporter
  misc_feature (1)..(200): Xaa is any amino acid
MGKTTLSKLISRFYDPTGGKVCLDGHDLRDITLESLRSNISLVLQDTFLFNGTIEENIAFARPDASFEEVKSAAQTARIHDDIMQMPEAYQTQIGERGVKLSGGQKQRIAIARAVLCRAPVLILDEATASVDVHTEEQIQQAINEIAGSRTIVTIAHRLSTIRNADVIYVFEKGRIIQSGSHDELIGQEGLYRNLCRTGK

SEQ ID NO: 8253 - DNA, 780 bp, Unknown
  Obtained from environmental sample
  misc_feature (1)..(780): n is a, c, g, or t
gtgggtgtcgtcgcacacggagaaccagattgtggcgttcattctggcgtgggtggcaatgttcattttgatgatcatcggccatcccgtcgtaactatgaaagcgccctcggcgctggtgccgctgttttcgttcttgggtttgttcacgcacttcgagagcatagaacgcggggtgatcgataccagggacgtcatctactatttgtcgatgacgggggtattcttgttcctcaacgcgcagtctttgggaggcaggaagtcggaataatgaaaacaaaaaagataaaatccaaggcggagatggttgtgatagcatgcgcggtcattgccgcggttgcggtgctcaactacgccgccggcaagtttttttacagaattgaccttacggagaaccgtcagtacacggtctccggcgcgacgaagcggattcttaaggggctcgacgacatcgtggccatcaaggtattcttctctaaggaattgccgccggagatgcacgccacggtcaacgcggtgcgcgaccttttgagcgagtacaagaacatcgccgggggtaaactgcgcgtaacgtgggaggatccggcggagaacgacgaggtccgcggcatggccatgagcttgggcgtccccgagatcaggctgcagacatttaagcgcgacaaagcggagacgatgctgggtttcatgggtatcgggatcatgtacgccgacaagaaagaggcgattcccgtcgtccaaaacctcaagaacctcgagtacgacctcggccgaatctga

SEQ ID NO: 8254 - protein, 259 aa, Unknown
  Obtained from environmental sample
  misc_feature (1)..(259): Xaa is any amino acid
MGVVAHGEPDCGVHSGVGGNVHFDDHRPSRRNYESALGAGAAVFVLGFVHALREHRTRGDRYQGRHLLFVDDGGILVPQRAVFGRQEVGIMKTKKIKSKAEMVVIACAVIAAVAVLNYAAGKFFYRIDLTENRQYTVSGATKRILKGLDDIVAIKVFFSKELPPEMHATVNAVRDLLSEYKNIAGGKLRVTWEDPAENDEVRGMAMSLGVPEIRLQTFKRDKAETMLGFMGIGIMYADKKEAIPVVQNLKNLEYDLGRI

SEQ ID NO: 8255 - DNA, 393 bp, Unknown
  Obtained from environmental sample
  misc_feature (1)..(393): n is a, c, g, or t
gtggcgctctccgtcaccatccccataacattgttcataataggcaaccttgaccccggcccgatcatcggcgggtacgtcggcgcgttgctcatgggggcggcgtatctggccataggcctgtgggtgtcgtcgcacacggagaaccagattgtggcgttcattctggcgtgggtggcaatgttcattttgatgatcatcggccatcccgtcgtaactatgaaagcgccctcggcgctggtgccgctgttttcgttcttgggtttgttcacgcacttcgagagcatagaacgcggggtgatcgataccagggacgtcatctactatttgtcgatgacgggggtattcttgttcctcaacgcgcagtctttgggaggcaggaagtcggaataa

SEQ ID NO: 8256 - protein, 130 aa, Unknown
  Obtained from environmental sample
  misc_feature (1)..(130): Xaa is any amino acid
MALSVTIPITLFIIGNLDPGPIIGGYVGALLMGAAYLAIGLWVSSHTENQIVAFILAWVAMFILMIIGHPVVTMKAPSALVPLFSFLGLFTHFESIERGVIDTRDVIYYLSMTGVFLFLNAQSLGGRKSE

SEQ ID NO: 8257 - DNA, 795 bp, Unknown
  Obtained from environmental sample
  misc_feature (1)..(795): n is a, c, g, or t
atggtagataaagatatgatttttatccccggcggcagtttcgaaatgggtagttataacagtagcgatattgacgcaagtccaccgcatactgtaacgctgagcggattttacatgggcaaatacgaagtaacgcaggagcaatggatgacggtaatggggaacaatccgagttactttacgagtgcacctgcgtacggggaagttcagaataagcgccctgtggagcgtgtaagctggtatgacgcgattgtattctgcaacaagttgagcatgaaggaaggattagatccttcgtaccgcatatcggggagtaccgatccggcaaattggggaaccgtacccaccgacagtaattcgacatgggatgcggtagaaatagttgccggttccaccggttaccgtttgccgacggaggcgcaaagggaatatgcggcaaggggagggaacggctcgcccgggaattacacatattcggggagcaataccataggtgatgtggcatggtatatatctaacagcagtgataagacacatgaagtgggaaagaaggctcccaatggtttgggattgtacgacatgagcgggaacgtgtatgagtggtgctgggactggtatgggggttattcaagcggggcgaagacagatccttggggagcggcttccgggtcttaccgtgtggagcgcggcgggagttgggccggtatggctgagtacatgcgttccacctttcggggtgcctacgaaccgtacatcagggacatcagcatcggcttccggcttgctcgcccctga

SEQ ID NO: 8258 - protein, 264 aa, Unknown
  Obtained from environmental sample
  DOMAIN (1)...(263): Domain of unknown function (DUF323)
  misc_feature (1)..(264): Xaa is any amino acid
MVDKDMIFIPGGSFEMGSYNSSDIDASPPHTVTLSGFYMGKYEVTQEQWMTVMGNNPSYFTSAPAYGEVQNKRPVERVSWYDAIVFCNKLSMKEGLDPSYRISGSTDPANWGTVPTDSNSTWDAVEIVAGSTGYRLPTEAQREYAARGGNGSPGNYTYSGSNTIGDVAWYISNSSDKTHEVGKKAPNGLGLYDMSGNVYEWCWDWYGGYSSGAKTDPWGAASGSYRVERGGSWAGMAEYMRSTFRGAYEPYIRDISIGFRLARP

SEQ ID NO: 8259 - DNA, 843 bp, Unknown
  Obtained from environmental sample
  misc_feature (1)..(843): n is a, c, g, or t
atgctccttgaacctctatttgagttcagcggtgcttgcacaggttgcggcgaaacaccctatgtccgtttggcatctcagttgtttggcgatagaatggtggtaacgaatgcaacgggctgttcttccatttacggcggtaatttgccaactaccccttgggcaaaaaacaaagaaggcagaggtccggcttggactaattccctatttgaagacaatgcggaatttggtcttggacttcgccttgcgataacccaccacgcaaaacaggccgaagaccttttagactctgttagcgaagttccagcagatttgaaaaaaactcttaaagagcaaagccaaattgacgaagctggcattgccgctcaaagagcaaatgtcgaaaaattaaaggaaattctgaaaaaatcaagcagccctgaagcaaaaaaactcctctccttagccgattaccttgtgcataagagcgtgtggattatgggcggagacggctgggcttatgatattggctacggtggcttagaccacgttctcgcgagtggcgaaaatgtgaatattttggttttggataccgaggtgtattccaacacgggcggacaggcgagcaaaagcaccaacttggcagcagttgctcagtttgccgcaagtggcaaacgtgctcccaaaaaagaccttggcttaatcgctatgagctacaaaaacgtgtatgttggcaaagtcgctatgggtgcaaacgatgtgcacacaatcaaggtgttccgtgaggcagaagcccacaacggtccttcgcttatactcgcctactccccttgcatttcgcacggcataaaagatatgcgttaa

SEQ ID NO: 8260 - protein, 280 aa, Unknown
  Obtained from environmental sample
  DOMAIN (117)...(267): Thiamine pyrophosphate enzyme, C-terminal TPP binding domain
  misc_feature (1)..(280): Xaa is any amino acid
MLLEPLFEFSGACTGCGETPYVRLASQLFGDRMVVTNATGCSSIYGGNLPTTPWAKNKEGRGPAWTNSLFEDNAEFGLGLRLAITHHAKQAEDLLDSVSEVPADLKKTLKEQSQIDEAGIAAQRANVEKLKEILKKSSSPEAKKLLSLADYLVHKSVWIMGGDGWAYDIGYGGLDHVLASGENVNILVLDTEVYSNTGGQASKSTNLAAVAQFAASGKRAPKKDLGLIAMSYKNVYVGKVAMGANDVHTIKVFREAEAHNGPSLILAYSPCISHGIKDMR

SEQ ID NO: 8261 - DNA, 444 bp, Unknown
  Obtained from environmental sample
  misc_feature (1)..(444): n is a, c, g, or t
atggacgacgactatatggattccatagaaccgttctactacacggatctcaaagagttccacagcacttttctcgcgggctacacggcggagaaatacgacgtggacgcgagcaaaagccgagacagggcggcgcggcgaatcaaatcctcattggagagggcgttcgccaagtccgtaaccggatacgcaaaggtcacgcccgaacactctatagtaaacgtatacgacggtaatgtaagctacgcttttttcccggtgtgggttctcaacaccaaatacaatgacgctcactatactttcatgatgaacggtcaaacgggccgtcttgtgggaaggcttccggtcgattcggggaaggcgtggaaatataggctgttgattgccggtattttgggcatagttttcaccggcgccgttttggcgtatcagatgctgcattaa

SEQ ID NO: 8262 - protein, 147 aa, Unknown
  Obtained from environmental sample
  misc_feature (1)..(147): Xaa is any amino acid
MDDDYMDSIEPFYYTDLKEFHSTFLAGYTAEKYDVDASKSRDRAARRIKSSLERAFAKSVTGYAKVTPEHSIVNVYDGNVSYAFFPVWVLNTKYNDAHYTFMMNGQTGRLVGRLPVDSGKAWKYRLLIAGILGIVFTGAVLAYQMLH

SEQ ID NO: 8263 - DNA, 609 bp, Unknown
  Obtained from environmental sample
  misc_feature (1)..(609): n is a, c, g, or t
atgttacaatccgcgttaagaataacgtatacatctccccaagcaatgacttgggttacagaatttttgagaagcgctggttctttatctgataatagcaatggtgaatcgttttttgatgatatccaggattattgcagaggtagggtgagaaaggctttgaactattttgacaacactggtggaaacaatgcttaccgaaatatggaacatatcgtttacgcttatttagattatattttatggcgagacggttatggtgatataataaaaccttatagcgattggaaattttcatccagagattccttagaacatttttatcctcaaaatcccattgggaaacatgagaaaatgcccaccgattctttacataattttggaaatttatgtttggttgatgttagtacgaatgctaactttggtaattcgataccatccgctaaagtagataattatccatatataattgaaaaaagtttaaaactcaaaataatgaaagaacacgctaatatgtggacaccatcaaatcaagaaataataataagccatggagatgatatgttaggactactatataaagatattgctaatgccccacaaaactaa

SEQ ID NO: 8264 - protein, 202 aa, Unknown
  Obtained from environmental sample
  DOMAIN (104)...(190): Protein of unknown function (DUF1524)
  misc_feature (1)..(202): Xaa is any amino acid
MLQSALRITYTSPQAMTWVTEFLRSAGSLSDNSNGESFFDDIQDYCRGRVRKALNYFDNTGGNNAYRNMEHIVYAYLDYILWRDGYGDIIKPYSDWKFSSRDSLEHFYPQNPIGKHEKMPTDSLHNFGNLCLVDVSTNANFGNSIPSAKVDNYPYIIEKSLKLKIMKEHANMWTPSNQEIIISHGDDMLGLLYKDIANAPQN

SEQ ID NO: 8265 - DNA, 471 bp, Unknown
  Obtained from environmental sample
  misc_feature (1)..(471): n is a, c, g, or t
ttgatgcaaacgcccgccggcacaccagcttgccgctgtttatatgacccccattacgaagatgcagaggtggaaattacccccgcagatttgcgagtggatacttaccgctccagcggagcgggaggtcaatacataaacaaaaccgattctgccgtgcgcataacgcataatccaacgggcatagtggttagctgccaaacggagcgcagccaaattcaaaaccgcgacaccgcaatgaaaatgctgagagccgagttggttcaatattataaagaagaagaagcagcaaaacgaaatgaacgagccgcagaaaagcgcaaaattgagtggggtagccaaattcgctcttatgttttagacgaccgccgcgttaaagacacccgcactggctatgaaacctcaaacaccgaggctgtactcaatggggatataaaaccatttgtgaaagcgtttttactatctcaatga

SEQ ID NO: 8266 - protein, 156 aa, Unknown
  Obtained from environmental sample
  DOMAIN (17)...(129): Peptidyl-tRNA hydrolase domain
  misc_feature (1)..(156): Xaa is any amino acid
MMQTPAGTPACRCLYDPHYEDAEVEITPADLRVDTYRSSGAGGQYINKTDSAVRITHNPTGIVVSCQTERSQIQNRDTAMKMLRAELVQYYKEEEAAKRNERAAEKRKIEWGSQIRSYVLDDRRVKDTRTGYETSNTEAVLNGDIKPFVKAFLLSQ

SEQ ID NO: 8267 - DNA, 846 bp, Unknown
  Obtained from environmental sample
  misc_feature (1)..(846): n is a, c, g, or t
atgaggcacattgacagcgttctgccttctaccaaacttgaactttacggtgaaactttttcaacacccgtgatgctggcggctctttcccatttgcaaagctgtcaccctgaaggcatggcggaagccgctcggggcatcaaggccgctgatgctgtaatgtgggcaggcatgggagacgaagaggaacttgaggccattaccgcaacgggagcgagaaccattaaaattatcaagccttatgcagataacaaagttattttcagaaagattgagcatgccgaaaaatgcggctgtcttgcggtaggcatggatatcgatcacgcttttaacagaaaaggaaattacgatgtaatccatgatctgaaaatgaaacctaaaagccttgatgaaataaaagaatttgttaaagctacaaaattaccgtttatcatcaagggagtgttaagcgtacatgatactcacaaatgtcttgaagcaggcgtgcgagggatagtggtatctcatcatcacggtcatattgattacgccgtaccgccgttgtacgttctccccgccattgcggagatggttaaaaaacataaagaaaagattcccattttcgttgattgcagtatcaacagaggaatggacgcatttaaggctcttgctctcggcgctgacgccgtgtcagccggacgaatcattatggagcctcttcacgctgaaggagccgaaggtgtgcggaaaacaattaccggaatgacagaagaacttgcgggtgtaatggcagccacaaattcacctgatatacgccatattgatccttctgtngtatggctgccgtttaaaaatggcagaatgtaa

SEQ ID NO: 8268 - protein, 281 aa, Unknown
  Obtained from environmental sample
  DOMAIN (1)...(274): FMN-dependent dehydrogenase
  misc_feature (1)..(281): Xaa is any amino acid
MRHIDSVLPSTKLELYGETFSTPVMLAALSHLQSCHPEGMAEAARGIKAADAVMWAGMGDEEELEAITATGARTIKIIKPYADNKVIFRKIEHAEKCGCLAVGMDIDHAFNRKGNYDVIHDLKMKPKSLDEIKEFVKATKLPFIIKGVLSVHDTHKCLEAGVRGIVVSHHHGHIDYAVPPLYVLPAIAEMVKKHKEKIPIFVDCSINRGMDAFKALALGADAVSAGRIIMEPLHAEGAEGVRKTITGMTEELAGVMAATNSPDIRHIDPSVVWLPFKNGRM

SEQ ID NO: 8269 - DNA, 543 bp, Unknown
  Obtained from environmental sample
  misc_feature (1)..(543): n is a, c, g, or t
atgacttgtcatcttttgcatggatcaaagcggttccatggcgattccgtggtctacggttccgtgtgcggctgcattcttgcgggcatgtcgtccttaaaaacgcacgttgtggctttcgacaccgccgttgtggatttaacggaaaaatacggaaccgacccgattgacatgattttcggggttcaattgggcggcggaacggacattaacaaggcggttgcatattgccgccgattcattttggaacccaaaaaaacggttttcattttgctttcggatatgtatgagggcggaaaccaagcaagccttttcgcgcagtgtgaggagcttgtcggcggcggggtaaaaatgctggggctaactgcgctgtcagataacggttcgccgtcattcgaccaaagcgcagcaaaaaagcttgcgggtttgggcatgccctgtttttcctgcaccccaaaattcctgccggacgttcttgaagccgtccttaaaaacaagcccctaaccgccctaaaacaaaaatccgcccaaaaatccaactga

SEQ ID NO: 8270 - protein, 180 aa, Unknown
  Obtained from environmental sample
  DOMAIN (1)...(159): VWA domain containing CoxE-like protein
  misc_feature (1)..(180): Xaa is any amino acid
MTCHLLHGSKRFHGDSVVYGSVCGCILAGMSSLKTHVVAFDTAVVDLTEKYGTDPIDMIFGVQLGGGTDINKAVAYCRRFILEPKKTVFILLSDMYEGGNQASLFAQCEELVGGGVKMLGLTALSDNGSPSFDQSAAKKLAGLGMPCFSCTPKFLPDVLEAVLKNKPLTALKQKSAQKSN

SEQ ID NO: 8271 - DNA, 492 bp, Unknown
  Obtained from environmental sample
  misc_feature (1)..(492): n is a, c, g, or t
ttgnccgacatcggcataaccacaagcgccgattacatggacggcggtacgctcgtagtagacgagaacaagctcaaagccgcgcttgataaggactttgagggcgtggtatcgctcttcaccaagtcgtcgagcataccgtccacagaaaaggactcgaaaaagctggctcagcgcgccgcggagagcggtatcgcccagcggttgaacgatatcttcaccgccgcggcgggaacttcgacgggcggcgaaaagggctacttgctgaaaaaagccggtatggtgaacgaccgtacgcaagtagacaacgctatgacgaagcagttgaacgactacgacaaaaagatagacaaactcttggagcgttggtaccgtcaagagaacaactactacgccatgttcgcccgtatggagactgcgatgtccaagctccaagcgcagcagaacagcctagcccagatcatggcggcgagcggcggcggcggaaagtga

SEQ ID NO: 8272 - protein, 163 aa, Unknown
  Obtained from environmental sample
  misc_feature (1)..(163): Xaa is any amino acid
MXDIGITTSADYMDGGTLVVDENKLKAALDKDFEGVVSLFTKSSSIPSTEKDSKKLAQRAAESGIAQRLNDIFTAAAGTSTGGEKGYLLKKAGMVNDRTQVDNAMTKQLNDYDKKIDKLLERWYRQENNYYAMFARMETAMSKLQAQQNSLAQIMAASGGGGK

SEQ ID NO: 8273 - DNA, 801 bp, Unknown
  Obtained from environmental sample
  misc_feature (1)..(801): n is a, c, g, or t
atgggctacctgcacgaaggccacgcttcgctgataaagcactgcaagtcgcggtgcgattcgattgtggtttccgtgttcgttaacccgatgcagttcggagaggacgaggacttcgcaaggtacccacacgacctggagagcgaccaagccctgtgcctcaagcacggcgtgaccgtgctgttcgtcccagaagagaaggagatataccccacgggcttcggcacgttcattgaccccgggcggatgggacaggtcctctgcggcaggtaccgccctgggcacttccgaggcgtcgtcaccgtgataggcaagctcctcaatatagtccagcccgacttggtgttttttggccagaaggacctgcagcaggcggccatagtccgcaggatgctccgggacttgaacctgcccatagaactggtcatagcacccacagtccgcgagcccgacggtcttgccatgagctccaggaacacctacctctccccagaggagcgcaggcgggcactgtgcatatcgagggccctgttcaaagcggaggacgcattcaaggcgggcttgcgctcgtcacaggagctgataggcaccgccaagaagaatctgaacgagctggacgagatccagtactgcgaactggtcgatgccctgacgatggatcctatcgagggtcaggtcggccgcctcgcgggtctttgcgttgcggggaaaatcgggacgactaggctaatagacaacgtgctgctttccgaagccagcgaccccacgcggctcttgtcccttgtggcgtttccggaatag

SEQ ID NO: 8274 - protein, 266 aa, Unknown
  Obtained from environmental sample
  DOMAIN (1)...(249): Pantoate-beta-alanine ligase
  misc_feature (1)..(266): Xaa is any amino acid
MGYLHEGHASLIKHCKSRCDSIVVSVFVNPMQFGEDEDFARYPHDLESDQALCLKHGVTVLFVPEEKEIYPTGFGTFIDPGRMGQVLCGRYRPGHFRGVVTVIGKLLNIVQPDLVFFGQKDLQQAAIVRRMLRDLNLPIELVIAPTVREPDGLAMSSRNTYLSPEERRRALCISRALFKAEDAFKAGLRSSQELIGTAKKNLNELDEIQYCELVDALTMDPIEGQVGRLAGLCVAGKIGTTRLIDNVLLSEASDPTRLLSLVAFPE

SEQ ID NO: 8275 - DNA, 777 bp, Unknown
  Obtained from environmental sample
  misc_feature (1)..(777): n is a, c, g, or t
ttgtcagatcggccgagatcctgtattttcatgacaggtattctgacagttctgcctctttggcagacgcatattttacgcaggtctttgtctaccctgcagttgctgaccaatccccgcctcattgtgatcgccgtttttgctctgagtcttattatcggcatcgcgctttttgggtttcttaaatacaagaagcggtattttttctggatagtgtacgcttttacgattgttgttttttcgttaggcgcttcttatgccgcccgtgtactgctaaagaattaccagatcatgaggctcattgtgttcctcgatccgaatatagacccaagaggggctggctggcatattatacaatccgtcacggccattggttcgggagggcttaaggggcagggttatttgaaaggaacccagagtcattaccgcttccttccagaacagagcaccgactttatcttttcgattttttccgaggagacgggctttatcggcggaattgcggtatttatcctgttcctgataatctgcctcaggcttttacagataataaaaataacttcagacccctttgccgcatatatctgcgccggcctggccggtatgttcagcttccacttcattattaacgtgggcatgactatgggcattatgccgattaccggtattcccctgctgtttatatcttacggcggttccgcgatgttctcggcgatgataggaatagggcttgccctgagtatacatatcagaaggtatatcccccccgcgttatga

SEQ ID NO: 8276 - protein, 258 aa, Unknown
  Obtained from environmental sample
  DOMAIN (6)...(254): Cell cycle protein
  misc_feature (1)..(258): Xaa is any amino acid
MSDRPRSCIFMTGILTVLPLWQTHILRRSLSTLQLLTNPRLIVIAVFALSLIIGIALFGFLKYKKRYFFWIVYAFTIVVFSLGASYAARVLLKNYQIMRLIVFLDPNIDPRGAGWHIIQSVTAIGSGGLKGQGYLKGTQSHYRFLPEQSTDFIFSIFSEETGFIGGIAVFILFLIICLRLLQIIKITSDPFAAYICAGLAGMFSFHFIINVGMTMGIMPITGIPLLFISYGGSAMFSAMIGIGLALSIHIRRYIPPAL

SEQ ID NO: 8277 - DNA, 315 bp, Unknown
  Obtained from environmental sample
  misc_feature (1)..(315): n is a, c, g, or t
ttgattttaccggaggccggcacatacacagtaaagaaggncgatacattgtcggaaatatcaaggcatgcctataatgatggtttttattatcccgtcattatgctcgcttcgcagggcgtgattataaatcctgacaaaattcagcccggtatggagttgacaattcccgatcttgaaagaaacaaagccaacgctaacagcagaaaaagcatgaaaaactgtcttaacggatttgccaacattgaaaaaaataagtcaaagccgaatcagggcttgatcgacggttttaggaaacgtgcagacgaactttaa

SEQ ID NO: 8278 - protein, 104 aa, Unknown
  Obtained from environmental sample
  DOMAIN (9)...(57): LysM domain
  misc_feature (1)..(104): Xaa is any amino acid
MILPEAGTYTVKKXDTLSEISRHAYNDGFYYPVIMLASQGVIINPDKIQPGMELTIPDLERNKANANSRKSMKNCLNGFANIEKNKSKPNQGLIDGFRKRADEL

SEQ ID NO: 8279 - DNA, 714 bp, Unknown
  Obtained from environmental sample
  misc_feature (1)..(714): n is a, c, g, or t
atgttaagaaccgatcttttaaggttaaatcacgccatggacaggtttatgcctgttcttactccattgtccgttgcgcttggtctgctttttcccaacttttttctgccgctgcgcccctatgtgattttattgttcagcattatgacattttcaggcgcgttaaaacttaccgccgttgagttaggcttagctgtaaaaagccctgctcctattttacttttctttttctccgctcatgtgttaatgccgttagccgctctttttttatcttcgcagtttattcaaaatccggatgtaatcgcaggttttgttcttctttttgccggtcctacggcggtttccggctttatttggtcggcaatttttaaagcggataaggcattgggactttctttaattttgcttgataccatgcttgccccgcttgtcgttccgggaacgctttcaattcttatgggaacaaaagtcgcaatggacattagcgggatagcggtttctttgatttttatggttgtagttcccactataataggtgtaacgttaaacgaaaccagtaagggagtgatacctcanaagatttgccctgcgataaatccgtttgcaaaattctgtctgatgctcgntattgcggccaattctgcgggcatagcgcatattttaaaattaacgatactctcccttggaagacgggtgttcctttgtttgttttaa

SEQ ID NO: 8280 - protein, 237 aa, Unknown
  Obtained from environmental sample
  DOMAIN (43)...(220): Sodium Bile acid symporter family
  misc_feature (1)..(237): Xaa is any amino acid
MLRTDLLRLNHAMDRFMPVLTPLSVALGLLFPNFFLPLRPYVILLFSIMTFSGALKLTAVELGLAVKSPAPILLFFFSAHVLMPLAALFLSSQFIQNPDVIAGFVLLFAGPTAVSGFIWSAIFKADKALGLSLILLDTMLAPLVVPGTLSILMGTKVAMDISGIAVSLIFMVVVPTIIGVTLNETSKGVIPXKICPAINPFAKFCLMLXIAANSAGIAHILKLTILSLGRRVFLCLF

SEQ ID NO: 8281 - DNA, 810 bp, Unknown
  Obtained from environmental sample
  misc_feature (1)..(810): n is a, c, g, or t
gtgctatcaagatacacaggaagttcaacccgtgtccgtgtaccatctgaaattggcggaatcccagttaaggcgatttatggttatttttattatcaagagcgttttggttatagttattctgctacatttaacagtaaaaaacttgaagctgtccaaatacccgaaggcattacgtacatcggcagaaatgcgttcaaaaaaaacaatctggcaagcgttaccataccgaacagcgttacattcatcggagatggtgcattcgaagaaaacaaatttacaagcattaccatcccaaacggagttacgtatctcagtgggtttaatgaaaatcaactaaccagcgttaccattccaaacaccgttatgtccatcggaaatagcgcatttagtggcaataaacttaccagcattaccattccgaacagcgttacggtcatcggcaatagtgcatttgaaaacaatcaactgaccagccttaccattggcaacagtgttaaaattatcaatgattctgcgttcaggtttcataaactgaccagagtcaccattccaaagagcgttacatacattagaaaaggagcattttaccaatcggatcagtcgggtaattcagaatcgcttgatcctgtaactcgtagaagtgtacctgcaactctgacaagcgtaacattcgaaggtacaattccttcggataacttttttcaaaaacttacatccgctgatattcctgtattcaatggcgatctgcgtgacaagttttacgctacaaacaaacaaatggaacaccggggacatatagaggcgtag

SEQ ID NO: 8282 - protein, 269 aa, Unknown
  Obtained from environmental sample
  misc_feature (1)..(269): Xaa is any amino acid
MLSRYTGSSTRVRVPSEIGGIPVKAIYGYFYYQERFGYSYSATFNSKKLEAVQIPEGITYIGRNAFKKNNLASVTIPNSVTFIGDGAFEENKFTSITIPNGVTYLSGFNENQLTSVTIPNTVMSIGNSAFSGNKLTSITIPNSVTVIGNSAFENNQLTSLTIGNSVKIINDSAFRFHKLTRVTIPKSVTYIRKGAFYQSDQSGNSESLDPVTRRSVPATLTSVTFEGTIPSDNFFQKLTSADIPVFNGDLRDKFYATNKQMEHRGHIEA

SEQ ID NO: 8283 - DNA, 594 bp, Unknown
  Obtained from environmental sample
  misc_feature (1)..(594): n is a, c, g, or t
gtggagactgaacgccaacttgacatttgcatttcctcaaaaggaaggttttatcagggattcctgcttgcatccccccaggcgtccatgcgcgatccggttgtaaattcgtttgttttttccgcgttaatctcaaccgcctataacgccatacaagccacgacggccgatgcggaatcattaaaaaattcaatggatattcaggttgaacgtttcttacttgaaaacccgttcgacagcgaaaagataaacaacgatgaatacctaattaaacttttccgtgacttgaaggatgtggtacggatttatttgtgtaataaaaaaggcgtccagctctccaataatattgagcgggaatcggataatatcatatgccgcgattataaaaataaaatttgggcgtggcgcggattttttcatgaaacaatgaaggcctttatccgaggcagaaaaagctgtttgtcaaacccgtaccgtgattttacgacaaaagaaaaaatatgcacctactgttatgcgataaccgatgatatattcttatttgcggatatgttaaaaaattcggaggagacaaaggattatgccgttagatag

SEQ ID NO: 8284 - protein, 197 aa, Unknown
  Obtained from environmental sample
  misc_feature (1)..(197): Xaa is any amino acid
METERQLDICISSKGRFYQGFLLASPQASMRDPVVNSFVFSALISTAYNAIQATTADAESLKNSMDIQVERFLLENPFDSEKINNDEYLIKLFRDLKDVVRIYLCNKKGVQLSNNIERESDNIICRDYKNKIWAWRGFFHETMKAFIRGRKSCLSNPYRDFTTKEKICTYCYAITDDIFLFADMLKNSEETKDYAVR

SEQ ID NO: 8285 - DNA, 648 bp, Unknown
  Obtained from environmental sample
  misc_feature (1)..(648): n is a, c, g, or t
atgtccggggttcagctccttataaacgcaagtctgggctggtacggcgccgcatccctgggggtggataacggcggagacattgccctttcggcaatgaatatcatcggcaccataagtatgctgatattgatgcccgtgtttggcataaaccaaggcgcccagcccatcctgggctacaattacggggcgcagcagtactcaagggtactgcatacctatgttttggctgtgatcgcggcaaccgttatttgcattgttggttttgccgccggtatgttgtttcccgtggccctggttcatctctttgcgcccgagggcagcccggtactcctggagttttcatcctgggccatgcgggtctatctcctcctccttccccttaacggtttccagatagtctcgtcgaacttttttgtggtaaccggaaggccccggatgtctatcttccttacgatgttacggcaattgctggcgtttgttccctgtcttttaattttcgggagattgtggggccttcgcggaatcgccgtcgcctctccggtggcggacggtttctcctttatcctgacaggatttttgattttctttgaattgaggaaactgaggcggcacccccccgtaccccatgtacaagccccttactaa

SEQ ID NO: 8286 - protein, 215 aa, Unknown
  Obtained from environmental sample
  DOMAIN (2)...(165): MatE
  misc_feature (1)..(215): Xaa is any amino acid
MSGVQLLINASLGWYGAASLGVDNGGDIALSAMNIIGTISMLILMPVFGINQGAQPILGYNYGAQQYSRVLHTYVLAVIAATVICIVGFAAGMLFPVALVHLFAPEGSPVLLEFSSWAMRVYLLLLPLNGFQIVSSNFFVVTGRPRMSIFLTMLRQLLAFVPCLLIFGRLWGLRGIAVASPVADGFSFILTGFLIFFELRKLRRHPPVPHVQAPY

SEQ ID NO: 8287 - DNA, 783 bp, Unknown
  Obtained from environmental sample
  misc_feature (1)..(783): n is a, c, g, or t
atggttaatatgcgttttatttatgcttcgattatcttccttctccttttcccttcctgtacaaagcgcgaagctgttaaccaagaaaacaatgcggttaacgaacgccaaaaagaggttacaattgacgaaatttatgataattggcttcgcgcaacggaaattgccgcttctcttgacgaccgcctgctcgcggctcaggttctaatcagcgggattgaaggcaagggcagcctccaggcgcacatagtaaccttgttaagcgaattcccgacgggcgggattatgcttttcaagtacaatcttgacacggacaacgattcaatacgctccttgattaatcaaaccgccgcgcttgtaaacagcgagtcgggcattacgccgtttatagcggtagatcatgaaggaggcacagtaaaccgtttcaggcgcggcacagccgacttgccggacgcttcctcttattgggaactctcgcttgctcagggcaagcagaccagccttaaaaaaatagaaaatgacagtttaaggacgggcaaggaaataaaagagttgggaatcaatgtaaatttcgcgcctgtggcggaatacttaaatgacggtaaccgtgtctttttaagccgccgttcctacgggcccgacccgctttttacggcaaacgcggctcangcctttatcaccggaatggaacaggccggagtcttatgcgtaatcaagcattttcccggaatcgcgggaaacgatccccactactgggcttccgtaattacggggacaagctga

SEQ ID NO: 8288 - protein, 260 aa, Unknown
  Obtained from environmental sample
  SIGNAL (1)...(25)
  DOMAIN (118)...(260): Glycosyl hydrolase family 3 N terminal domain
  misc_feature (1)..(260): Xaa is any amino acid
MVNMRFIYASIIFLLLFPSCTKREAVNQENNAVNERQKEVTIDEIYDNWLRATEIAASLDDRLLAAQVLISGIEGKGSLQAHIVTLLSEFPTGGIMLFKYNLDTDNDSIRSLINQTAALVNSESGITPFIAVDHEGGTVNRFRRGTADLPDASSYWELSLAQGKQTSLKKIENDSLRTGKEIKELGINVNFAPVAEYLNDGNRVFLSRRSYGPDPLFTANAAXAFITGMEQAGVLCVIKHFPGIAGNDPHYWASVITGTS

SEQ ID NO: 8289 - DNA, 600 bp, Unknown
  Obtained from environmental sample
  misc_feature (1)..(600): n is a, c, g, or t
atgtacaaatacgtattaacacaagcgggaagattgacagtgataccagatttcggtagtagcatccccgccaatttatatgatgcgtatgttaaatattataacgctgatggtacggagattagatcaagaaatcccacgagttcatccagtgactatattgatttagaattgggtacatattacgtcgagattaccccatatggaagccgtaccggaacatatactataagcgctgtgtttactgccgcaggaaacaatgaaacagaaccaaataatgagcgtgcatccgcgcatcaattaacatcaggtcaagcggtaattggttttataagttatcaggataataaagacatgtaccgggttgtcttggcgcagtcaaagaaattgacggtgaacgtaaatcttggcagtaacaattcggtaggagtatacgatgcatatgttaaatggtacgacattgacggtaatttgcttaggagttcaaatcctacgggttcgtacagtgacaatatggacttggcagccggtacttattacatcgaaatcactccatatggaagtcataccggaacgtatactttgacggctacgtggtaa

SEQ ID NO: 8290 - protein, 199 aa, Unknown
  Obtained from environmental sample
  DOMAIN (116)...(197): Bacterial pre-peptidase C-terminal domain
  misc_feature (1)..(199): Xaa is any amino acid
MYKYVLTQAGRLTVIPDFGSSIPANLYDAYVKYYNADGTEIRSRNPTSSSSDYIDLELGTYYVEITPYGSRTGTYTISAVFTAAGNNETEPNNERASAHQLTSGQAVIGFISYQDNKDMYRVVLAQSKKLTVNVNLGSNNSVGVYDAYVKWYDIDGNLLRSSNPTGSYSDNMDLAAGTYYIEITPYGSHTGTYTLTATW

SEQ ID NO: 8291 - DNA, 405 bp, Unknown
  Obtained from environmental sample
  misc_feature (1)..(405): n is a, c, g, or t
ttgcaaacattccttagcgatacccagtcggtgctgtttgccaccgactcgttttgggaaggggtggacgcgccaggcgacaccctgcggctggtgatactctgccgcttgcctttcaggaccccaagcgacccggttttcgaggcccgccgtgaggcggtggaaaaaaacgggggtaatcccttcatggatctttcccttccggaagcggtgatgaaattcaaacagggttttggccggctgatgcgccgttccagcgaccggggcgttgtcgcggtgctggacggacgaatcctgaaaaagcgttacgggacatttttccgtgagtctctgccggaaaccctcaccagcttcggcagctttgacgggatactgcgcgatacggagaattttctgtatccctga

SEQ ID NO: 8292 - protein, 134 aa, Unknown
  Obtained from environmental sample
  misc_feature (1)..(134): Xaa is any amino acid
MQTFLSDTQSVLFATDSFWEGVDAPGDTLRLVILCRLPFRTPSDPVFEARREAVEKNGGNPFMDLSLPEAVMKFKQGFGRLMRRSSDRGVVAVLDGRILKKRYGTFFRESLPETLTSFGSFDGILRDTENFLYP

SEQ ID NO: 8293 - DNA, 900 bp, Unknown
  Obtained from environmental sample
  misc_feature (1)..(900): n is a, c, g, or t
ttgccgatgcctccggggctttcgtatagcgggcggctcaagcccattatcaagcggtttttgtccgaggaaggccgctggctttccgcgatagatcacctaactgcttttttgagggggcaggatcgggagtggggacattttttggtcagggcaaccacggcgatgcccggcggcccccgttttgactcctgccttgcggagcttggcaacgccgggggagccgccccggaagacgctcccctgttggcgagcaaaatgttagccgacatttccgattttatcaccacaacccttgatccttgctttgcattggttcgttatgtgccatcgccattgacggaactggatttggggttccgtgattttgccgcagtaaaggccgggcttaacggttacattatggaaaatttctaccgaccctttcttgaaaccgaatggaaagagcttgacagcttgatgaatgccgatgcgcccggggctgcttcaaaaatctttttgggattgagcataccgttccctggctgccttgccggggcgctggtctgcgcggaatcggccaaagcgtattttaagggcaaggtttgtacagtcgcgggcggcggctatgtgaacaccgagctgcgttttttaggcgatgagcaactttttgattttgttgattacctttcgtttgatcggggttacggcgcgttagacgcaattattaaaagggaattgtgcagggcatccgatgaggaatcaaacattgaaaataagcctttgtataaaacaatgtttttggatcagccagggaatattgttaaagatgaatcgattaacggcgattatgacggcgatggaaaacgcattgacgacgaagctgcaacttccattttccccgattattcggggtattga

SEQ ID NO: 8294 - protein, 299 aa, Unknown
  Obtained from environmental sample
  misc_feature (1)..(299): Xaa is any amino acid
MPMPPGLSYSGRLKPIIKRFLSEEGRWLSAIDHLTAFLRGQDREWGHFLVRATTAMPGGPRFDSCLAELGNAGGAAPEDAPLLASKMLADISDFITTTLDPCFALVRYVPSPLTELDLGFRDFAAVKAGLNGYIMENFYRPFLETEWKELDSLMNADAPGAASKIFLGLSIPFPGCLAGALVCAESAKAYFKGKVCTVAGGGYVNTELRFLGDEQLFDFVDYLSFDRGYGALDAIIKRELCRASDEESNIENKPLYKTMFLDQPGNIVKDESINGDYDGDGKRIDDEAATSIFPDYSGY

SEQ ID NO: 8295 - DNA, 408 bp, Unknown
  Obtained from environmental sample
  misc_feature (1)..(408): n is a, c, g, or t
ttgtcagattggccgagactcgcggcgctctggccgatgtccgataaacttgattacgcttattcgggcatcaacctttacaccaattatgacggcaaaaacggctctttcggcaatacgcttgttgaatcttcaaccggcgatattgaaaattcatcggtttacgcgtcgataagcgaagacggcgcgcttcatgttattttattgaataaaaacatacacaaaccggaaaagtttttatttacaataaattccgacgcgcattatacaaattttgtatattatgggtttaacgcgaaaagctccgttattaaaaaatatggttcaggcgctcttcccggcggagcaggcggtttttcgctgcagataatgccgatgtccgccgttcatcttgtttttactttgtaa

SEQ ID NO: 8296 - protein, 135 aa, Unknown
  Obtained from environmental sample
  misc_feature (1)..(135): Xaa is any amino acid
MSDWPRLAALWPMSDKLDYAYSGINLYTNYDGKNGSFGNTLVESSTGDIENSSVYASISEDGALHVILLNKNIHKPEKFLFTINSDAHYTNFVYYGFNAKSSVIKKYGSGALPGGAGGFSLQIMPMSAVHLVFTL

SEQ ID NO: 8297 - DNA, 456 bp, Unknown
  Obtained from environmental sample
  misc_feature (1)..(456): n is a, c, g, or t
ttggctgtaagctggtttgtgttgtacaagcgtccgtggggcttaaggcttcgcgccgccggcgagcatccgcaggctctcgcttccgcgggggtaaatgtaattaaactccggtatacggctgtaattatttccggccttctcgcggggctggcgggcggctgtatcgttcttacccaggacattcaatttaccgtaagcacgattaatggaaaaggttttatcgcccttgccgcggtttcattcgggcgctggctgccgttgggcatactcggttccagtttcctgttcggcgtatcctcaagcatggcggttaacattgttaacatccaaaaactgcagtttctgccttccgaagtgttcaacatgatgccgtttttaattaccttgataacccttgtattgttcagcggaaaagagactgcgcccaaggcgcttgggcagaaagatttttag

SEQ ID NO: 8298 - protein, 151 aa, Unknown
  Obtained from environmental sample
  misc_feature (1)..(151): Xaa is any amino acid
MAVSWFVLYKRPWGLRLRAAGEHPQALASAGVNVIKLRYTAVIISGLLAGLAGGCIVLTQDIQFTVSTINGKGFIALAAVSFGRWLPLGILGSSFLFGVSSSMAVNIVNIQKLQFLPSEVFNMMPFLITLITLVLFSGKETAPKALGQKDF

SEQ ID NO: 8299 - DNA, 630 bp, Unknown
  Obtained from environmental sample
  misc_feature (1)..(630): n is a, c, g, or t
ttggacgactattacaagctgcttggcgtaaagccgggagcgagcgcggcggaaattaaaaaagccttccgtaagaaggcaaaaaagcttcatccggatattgcgggcgcgtcccattccggggcaatgcggaaattaatcgcggcctatgaagcgttatctgatttaaacaggcgttttgactatgacagggcatattctacttacgccaagaaaaccggatttgattaccgcacatggctgaacgagcaggaaaaacctgaatataaagccaaattaattttttatgagcttttacatcttcaggaagacaaagcaattgagatttggagaaaatacggcggacttgattttcaactggaaaaacacatggaaagggaagattggatggattgccagtacatacttgcggaagaattggacaggagacactttagttttgaagcctttaaactgcttgcagtcattcttgccgaagaacaccgccgcccttactttaatcattttactattgatataaagaattatgttaaaactatcgttaataaaagactaaggcaacaggtagacaatgaaacatggattgcctgtattaaatcattaattggcgtaggtttttctgatctttga

SEQ ID NO: 8300 - protein, 209 aa, Unknown
  Obtained from environmental sample
  DOMAIN (3)...(63): DnaJ domain
  misc_feature (1)..(209): Xaa is any amino acid
MDDYYKLLGVKPGASAAEIKKAFRKKAKKLHPDIAGASHSGAMRKLIAAYEALSDLNRRFDYDRAYSTYAKKTGFDYRTWLNEQEKPEYKAKLIFYELLHLQEDKAIEIWRKYGGLDFQLEKHMEREDWMDCQYILAEELDRRHFSFEAFKLLAVILAEEHRRPYFNHFTIDIKNYVKTIVNKRLRQQVDNETWIACIKSLIGVGFSDL

SEQ ID NO: 8301 - DNA, 300 bp, Unknown
  Obtained from environmental sample
  misc_feature (1)..(300): n is a, c, g, or t
atgaatttttttgaatcaataatgcttgtttgtttcggctttgcatggccgctttccatatataaatcttttgtatccaaaaaaacggcaggtaaaagcctattgttcctattagtgctgcaaataggttatgtggccggtgttttgtttaaactaactgaatactggagtaatttaaaaacaaaccctaacgagactatcagtataaatttatacttatacattcttaattttgtaatgataacaatagatgaattattatatctgagaaaccgcaggatagaagcggcaagtaagtaa

SEQ ID NO: 8302 - protein, 99 aa, Unknown
  Obtained from environmental sample
  misc_feature (1)..(99): Xaa is any amino acid
MNFFESIMLVCFGFAWPLSIYKSFVSKKTAGKSLLFLLVLQIGYVAGVLFKLTEYWSNLKTNPNETISINLYLYILNFVMITIDELLYLRNRRIEAASK

SEQ ID NO: 8303 - DNA, 417 bp, Unknown
  Obtained from environmental sample
  misc_feature (1)..(417): n is a, c, g, or t
gtgcagatccgcaaaaaaggaagcgcgcttggcatagagcctcttgaaacaaccgtggaaccggcggatatcagcatcaaaattgaaaataaaatcagccgtgatattaatattattccttcctttaaagggtttatagcggaaggatacgaaatgacaagccagtcaataaatccttcttcaattaccgcggaaggcccgaggagcattatcgaatcgatatctgaattcaatacggccccaatagatcttgagggacgtttcgggaatttttccattttagttaatattattgttaatgatccgttaattattacgcatggaaacagtatgatcgaataccgcgcggcaatcaggcaaataccaagggaacttcccgccccaattcaaacttttaaagaggccgaagaagaatga

SEQ ID NO: 8304 - protein, 138 aa, Unknown
  Obtained from environmental sample
  DOMAIN (36)...(118): YbbR-like protein
  misc_feature (1)..(138): Xaa is any amino acid
MQIRKKGSALGIEPLETTVEPADISIKIENKISRDINIIPSFKGFIAEGYEMTSQSINPSSITAEGPRSIIESISEFNTAPIDLEGRFGNFSILVNIIVNDPLIITHGNSMIEYRAAIRQIPRELPAPIQTFKEAEEE

SEQ ID NO: 8305 - DNA, 876 bp, Unknown
  Obtained from environmental sample
  misc_feature (1)..(876): n is a, c, g, or t
gtgaacgacggcttttatcccctgggttcctgcaccatgaagtacaatcccaaaatacacgaggagcttgccacacttccaggatttaccaatatccatccccttcagccccttcacacagtacagggctgtatgacacttctgggtcttgcggcagactgcctaaacgagatttccggtatggatgccacgagtttccagcccagcgccggggcccagggtgaattggcgggccttctcctttttaaggcctatcacaagagccgcaaagacgaggccaggaaaaagatccttgtccctgacagcgcccacggaactaatcccgccagcgcggtcatggcaggttttgaggtgctgaatattccctcaggtaaagatggctgtgtggaccttgaggccctgaaaaacagcgtcggtcctgacaccgcgggactcatgctcaccaatccaaataccctgggggtgttcgaccccaatattcttgagataacccgcattattcataaagccgggggactcaattactatgacggcgcaaacctcaacgccatcatgggcatagtgcgccctggggacatgggttttgacgcggttcacttcaacctccacaagagcttttccaccccccacggcggcggcggtccaggcctgggctccttggggtgcaaaaagtgtctgtccccctttatgcccctttcgggttacggtcttaatggcgccgaattcgcggtttccaatgaaataaaagataccagccagagcataggtagggtccgggcgttttggggtaatttcctcgtggcagtaaaagccgcggcctacatcctcaccctgggaaaagagaacattcccgaagtgagccgtaacgcggtatga

SEQ ID NO: 8306 - protein, 291 aa, Unknown
  Obtained from environmental sample
  misc_feature (1)..(291): Xaa is any amino acid
MNDGFYPLGSCTMKYNPKIHEELATLPGFTNIHPLQPLHTVQGCMTLLGLAADCLNEISGMDATSFQPSAGAQGELAGLLLFKAYHKSRKDEARKKILVPDSAHGTNPASAVMAGFEVLNIPSGKDGCVDLEALKNSVGPDTAGLMLTNPNTLGVFDPNILEITRIIHKAGGLNYYDGANLNAIMGIVRPGDMGFDAVHFNLHKSFSTPHGGGGPGLGSLGCKKCLSPFMPLSGYGLNGAEFAVSNEIKDTSQSIGRVRAFWGNFLVAVKAAAYILTLGKENIPEVSRNAV

SEQ ID NO: 8307 - DNA, 369 bp, Unknown
  Obtained from environmental sample
  misc_feature (1)..(369): n is a, c, g, or t
atgaacataccggaagatctaaagtacaccaaatcccatgaatgggtgagggttctggataacgggctcgtagaaataggcctgagcgattatgcccaggagcagttgggggacattgtgtttgtcaacctgcccaaggctggggacagtcttcgcaaaggaacggttttcgcggatgtggaatccgtaaaagcggtttccgacatttacagccccatggacggcacggtcaaagaacgcaacgcggaattgctcgatgctccggagctcatcaataaatcaccttacacctgttggtttatccgtgccgaaggtgttctcgaggccggggaactcctttcggcggcagaatacaaggcccttctttaa

SEQ ID NO: 8308 - protein, 122 aa, Unknown
  Obtained from environmental sample
  DOMAIN (7)...(122): Glycine cleavage H-protein
  misc_feature (1)..(122): Xaa is any amino acid
MNIPEDLKYTKSHEWVRVLDNGLVEIGLSDYAQEQLGDIVFVNLPKAGDSLRKGTVFADVESVKAVSDIYSPMDGTVKERNAELLDAPELINKSPYTCWFIRAEGVLEAGELLSAAEYKALL

SEQ ID NO: 8309 - DNA, 612 bp, Unknown
  Obtained from environmental sample
  misc_feature (1)..(612): n is a, c, g, or t
atgctccggagctcatcaataaatcaccttacacctgttggtttatccgtgccgaaggtgttctcgaggccggggaactcctttcggcggcagaatacaaggcccttctttaagaggcgcggtatgggctcttatgtaccaaacaccgacaatgatcggcagcaaatgctccaattccttggaaagtcttctatagaagagcttttttccccgattccccaatcagtgcgggtaaaggatctcgcgcttccttcgggcatggcggaagcggagttggcccggaaaatcagcgccctggcccaggaaaacaaggtcttccccacaattttcagaggcgcgggggcgtaccggcattatatccccgccgcggtcaagcggatcagttccaacgaaaccttcacaactgcctatactccctatcaggccgaaataagccaaggcatacttcagtccatttttgagtaccagaccatgatctgcgaactcaccggcatggacgtgtccaatgcctcggcctacgatggggcgagcgccgcggcggaggcaataaacatgtgccggggaggacagagacagaatatctacgtttccgctgccgcccatcccaagtga

SEQ ID NO: 8310 - protein, 203 aa, Unknown
  Obtained from environmental sample
  DOMAIN (43)...(203): Glycine cleavage system P-protein
  misc_feature (1)..(203): Xaa is any amino acid
MLRSSSINHLTPVGLSVPKVFSRPGNSFRRQNTRPFFKRRGMGSYVPNTDNDRQQMLQFLGKSSIEELFSPIPQSVRVKDLALPSGMAEAELARKISALAQENKVFPTIFRGAGAYRHYIPAAVKRISSNETFTTAYTPYQAEISQGILQSIFEYQTMICELTGMDVSNASAYDGASAAAEAINMCRGGQRQNIYVSAAAHPK

SEQ ID NO: 8311 - DNA, 555 bp, Unknown
  Obtained from environmental sample
  misc_feature (1)..(555): n is a, c, g, or t
atggaaaataaaccaaatgatactcatgtaggaattagtaaatttttgagtttaatattgaggcattcacctcaaacaattcatttaaatattgataaatatggctgggctgatattgatgagttaattcaaaacgcgaataaatataaaagaatgcatttaactattgatttaataaacacaatagttaagaccaatgacaaacaacgttttatattatctgatgatgggaaaagaattcgcgctaaccagggacatagtataaaagttgatttagaattggaagctaaaacacctcctgatattctatatcatggaacggcaaaccgttttattgactcaattatgaaagatggattaaagcctatgacaaggcaatatgttcatctttcccaaaccgaagaaacagcattaacagttgggaaaagacatgggaaaccaattgtattgtatataaacgctaaaagtatgtttgaagagggctgtaaattttatttatccgagaataatgtttggctggtgaacaaagtaccggcaaaatatataaaacaataa

SEQ ID NO: 8312 - protein, 184 aa, Unknown
  Obtained from environmental sample
  DOMAIN (5)...(182): RNA 2'-phosphotransferase, Tpt1 / KptA family
  misc_feature (1)..(184): Xaa is any amino acid
MENKPNDTHVGISKFLSLILRHSPQTIHLNIDKYGWADIDELIQNANKYKRMHLTIDLINTIVKTNDKQRFILSDDGKRIRANQGHSIKVDLELEAKTPPDILYHGTANRFIDSIMKDGLKPMTRQYVHLSQTEETALTVGKRHGKPIVLYINAKSMFEEGCKFYLSENNVWLVNKVPAKYIKQ

SEQ ID NO: 8313 - DNA, 570 bp, Unknown
  Obtained from environmental sample
  misc_feature (1)..(570): n is a, c, g, or t
ttgtttgacaataccagcgaacatctcacaaacatcacggtaagcgagttaaatccggtatattgcagtattgacggggtgttatttgataaagacaagagcgtactcattttatatccggaaaataaaggtaaaacagattatgttattcccgatggaatacaatacattaatgacttggcattttatggctgtaaacgcctggtcaatatcgttcttcctgacagcgttagatttattggtgatcacgcattcgcaagatgtaaacggcttaaaacagtcaccctctccagcaaactatgctacgctaaagaatatgaaattaaaagccgcacatatcttcaaactattttgatgtcaaaattttcaaaaatcaaacacaatgcttttggaaggtttgaagggcagtttgtataccgggataaaggaggttttacggaaaccttagcggaaaaaaaatctaaagaattacaagaagaatctggtaaacatgaattacaagaggaatctgataaacgtatattaacaaaagaagaggttgatagacttctgaaagaaataaaactataa

SEQ ID NO: 8314 - protein, 189 aa, Unknown
  Obtained from environmental sample
  misc_feature (1)..(189): Xaa is any amino acid
MFDNTSEHLTNITVSELNPVYCSIDGVLFDKDKSVLILYPENKGKTDYVIPDGIQYINDLAFYGCKRLVNIVLPDSVRFIGDHAFARCKRLKTVTLSSKLCYAKEYEIKSRTYLQTILMSKFSKIKHNAFGRFEGQFVYRDKGGFTETLAEKKSKELQEESGKHELQEESDKRILTKEEVDRLLKEIKL

SEQ ID NO: 8315 - DNA, 657 bp, Unknown
  Obtained from environmental sample
  misc_feature (1)..(657): n is a, c, g, or t
gtggtgctcgcggctcttgaaaacgcgcttcgcctgagttccagagctatcgcggatagccgtgttgtgataagcggcgccggggcagccggtatagcgatagccaaaatattgtccggatcgggtgccggtgagatcatactctgcgactcgcagggaatagtctcgcgcgatcgaaaggatctgaatccatataaacagcaatttgcggtcagcgaatccggcgggctcgcggacgcggttcgcggggcggatgtttttataggcgtcagcgctccggcgatcctgacctccgccatggtgcggaccatgcgcccgcagccgatcatatttgcgctttccaatcctgtaccggagatcatgccggaggaactggcgggcagcgacgcgatcgtcgcgaccgggcgcagcgattatcccaatcagatcaataatgtgctcgccttccccggtatctttgcgggcgctctggccgcgcgtctgcaaaccattactccggagatgcaccgcaaggcggcgcgcgcgcttgcctcgcttgttgacgatcaggaactcgcttcggggcgcgtcattccttcggtttttgatccgcgcgtcgcccgcgctgtcgctaacgccgttaacgccgttaacgccgttgagggaacgacagcctga

SEQ ID NO: 8316 - protein, 218 aa, Unknown
  Obtained from environmental sample
  DOMAIN (1)...(213): Malic enzyme, NAD binding domain
  misc_feature (1)..(218): Xaa is any amino acid
MVLAALENALRLSSRAIADSRVVISGAGAAGIAIAKILSGSGAGEIILCDSQGIVSRDRKDLNPYKQQFAVSESGGLADAVRGADVFIGVSAPAILTSAMVRTMRPQPIIFALSNPVPEIMPEELAGSDAIVATGRSDYPNQINNVLAFPGIFAGALAARLQTITPEMHRKAARALASLVDDQELASGRVIPSVFDPRVARAVANAVNAVNAVEGTTA

SEQ ID NO: 8317 - DNA, 411 bp, Unknown
  Obtained from environmental sample
  misc_feature (1)..(411): n is a, c, g, or t
gtgggcaaaatatccatcagcgataatatactcaagaaaccggcaaggctcagtgatgaagaatttaacgaaatgaaaaaacacgcgatttttggcgagcaaataatcgaaaagattgaggctctggcaatggaaagcgattttttaaactacgcgaaaatatttgccgcaagccatcacgaaagatgggacggctcaggctacccgcgaagcctgaaggaaaatgaaatacccctgctgggccgcattatggcgattgccgacgtgtacgacgcgcttacctcggaacgtccctacaaaaaagcctttagccacgaggaggcggtacggattatcactgagggcagcggaacacagtttgatcccgagctggtaaaagtattcatccgcacggcggaacgatttaagtag

SEQ ID NO: 8318 - protein, 136 aa, Unknown
  Obtained from environmental sample
  DOMAIN (1)...(93): HD domain
  misc_feature (1)..(136): Xaa is any amino acid
MGKISISDNILKKPARLSDEEFNEMKKHAIFGEQIIEKIEALAMESDFLNYAKIFAASHHERWDGSGYPRSLKENEIPLLGRIMAIADVYDALTSERPYKKAFSHEEAVRIITEGSGTQFDPELVKVFIRTAERFK

SEQ ID NO: 8319 - DNA, 732 bp, Unknown
  Obtained from environmental sample
  misc_feature (1)..(732): n is a, c, g, or t
ttggcagaaaagaaaaaaaaagcggcgttttggaaacattcagaaagctcaaagacgagggcccttatccgtcacatctgcgtttcaagtcatcttataaaggatgatattaaagagctgcttttganaggggtattcgagggcgtcctctttggctattcggcgtataacttcagaacgcggcagcccgcgtttgacgccataagggaaaaaaagctcggcgctgttgtgatgaacccgctgggcggcggagttattccccggcatcctgaacgctttggctttttaaagcgggaggacggcgaggacaccgttgcggcggccctgcgcttcctctgggatcataaggaaataagcgttacccttgtgggttttgatacgcttcagcatattaagcaagcgcttgacgcgatggagggctacaagcccaggacagaagcggaattggcggcgcttaaagaaagcgtccatgcctctcttgaaggaatctgtaccggctgcgcttactgtgatgattgtcctcaagacattcccattcccaagttcatggacgcttataaccaaaagatcctcagcgagccggataaaaaagacccgattggagatcgcttaaagtggcattggaatcttgagcgctcagtcgcaggtaaatgcaccgcctgcgggaaatgcgagaaggcatgcactcagcacatcaagattatagagcggctaaaagaaatagcgggataa

SEQ ID NO: 8320 - protein, 243 aa, Unknown
  Obtained from environmental sample
  misc_feature (1)..(243): Xaa is any amino acid
MAEKKKKAAFWKHSESSKTRALIRHICVSSHLIKDDIKELLLXGVFEGVLFGYSAYNFRTRQPAFDAIREKKLGAVVMNPLGGGVIPRHPERFGFLKREDGEDTVAAALRFLWDHKEISVTLVGFDTLQHIKQALDAMEGYKPRTEAELAALKESVHASLEGICTGCAYCDDCPQDIPIPKFMDAYNQKILSEPDKKDPIGDRLKWHWNLERSVAGKCTACGKCEKACTQHIKIIERLKEIAG

SEQ ID NO: 8321 - DNA, 723 bp, Unknown
  Obtained from environmental sample
  misc_feature (1)..(723): n is a, c, g, or t
atggaaaaagtaactgtcatttttctcccggccccctcctccctaaatgatgatatgcgtaaattttctcagggcctaaaagccgaagaggggattctgcttccggtggagctgcctccgggagaaaaaagccttgatcctgatacgctgtcctgggagatgatcatttcggggatgttgagagttatctcttcccccgaaacgattacctttcaaggagtctctaacgttcctgacgagtggatcgattattaccggcgttttgttttagccgtaaagccggagatttaccatgagtttaccggcgcttccataataaaagccagaaacggcgaatttgacatggccctggagatcaacgccgttttagagggcctcttcccaggatcccccggcgtgcttttaaacaaggccctgatactggaagacagagcggcatctcttgaaaaaaaaggccgccaggcggacagggagaatgccgaagctctgcaagcttacgaaacagccctttccatggaaccggttttgccggacacgctatttaacgcgggttttttctttctgcgcagaaatagttttacaagggcaaaggattgcttttctctttacatcgcggagggggaaaaatctggacttgccgccgagtctgaccacttacagtggtcaggcgaaagttcccctccggttattcccgaggacaaaaaaaagcaggcggagaaataa

SEQ ID NO: 8322 - protein, 240 aa, Unknown
  Obtained from environmental sample
  misc_feature (1)..(240): Xaa is any amino acid
MEKVTVIFLPAPSSLNDDMRKFSQGLKAEEGILLPVELPPGEKSLDPDTLSWEMIISGMLRVISSPETITFQGVSNVPDEWIDYYRRFVLAVKPEIYHEFTGASIIKARNGEFDMALEINAVLEGLFPGSPGVLLNKALILEDRAASLEKKGRQADRENAEALQAYETALSMEPVLPDTLFNAGFFFLRRNSFTRAKDCFSLYIAEGEKSGLAAESDHLQWSGESSPPVIPEDKKKQAEK

SEQ ID NO: 8323 - DNA, 426 bp, Unknown
  Obtained from environmental sample
  misc_feature (1)..(426): n is a, c, g, or t
atggaaaagaagagttattctgatatctttgaaggcggcaagactttcggtcaggcgttgcttgaaccgcaccgttcgtacataaagctgctgcctctgatggacgcggggaaggtcaagggttgcgcccacataacgggcggcgggttcgtcgacaatgtggacaggatacttccgcaaaattgcgacgcggcgataaacgccaagtcgtgggagccgctgccgatattccgttacttgcaaacgacgggcggcgtggagaacgcggagatgtaccgtacgttcaacatgggtatagggatggcggtggtcgtcggtaagggtgatgcggacgccgttttgcgcgacggcgctttggccgagtttgaacccgtgcttatcggcgagatcgtttcgggaacagggaaggtgcgaatggagttttga

SEQ ID NO: 8324 - protein, 141 aa, Unknown
  Obtained from environmental sample
  DOMAIN (2)...(140): AIR synthase related protein, C-terminal domain
  misc_feature (1)..(141): Xaa is any amino acid
MEKKSYSDIFEGGKTFGQALLEPHRSYIKLLPLMDAGKVKGCAHITGGGFVDNVDRILPQNCDAAINAKSWEPLPIFRYLQTTGGVENAEMYRTFNMGIGMAVVVGKGDADAVLRDGALAEFEPVLIGEIVSGTGKVRMEF

SEQ ID NO: 8325 - DNA, 486 bp, Unknown
  Obtained from environmental sample
  misc_feature (1)..(486): n is a, c, g, or t
atgagtaatatagtcgttgctttagatataggttccgcttttgtccgcgcccttatttgcgaacatgatgaaaaaggagtcttaaagataatcggggcgagtgttaaatcttctacgggattaagaaaaggagtcgtcgtaaatattgaagcaacgcttcgctcggttacagaagcaattgaagacgctgaaatgatggcgggcattcaagttgaagactgctgggtgggcataggcggaaatcatataaacgggcttaattcgcgcggtgttgtgggcatatcccaaaaaaaacgcgatacaaaagaaagggaaataagccaggaagacattgaccgcgtaatagaagctgcaaaagctgtcgtaattcctactgacaggcagatactgaaagtaattccgcagaattataaagtggacgatcaaaaaggcataaaggatcccctgaatatgctcggcatccgctttgatgtgaggtgcatataa

SEQ ID NO: 8326 - protein, 161 aa, Unknown
  Obtained from environmental sample
  DOMAIN (5)...(161): Cell division protein FtsA
  misc_feature (1)..(161): Xaa is any amino acid
MSNIVVALDIGSAFVRALICEHDEKGVLKIIGASVKSSTGLRKGVVVNIEATLRSVTEAIEDAEMMAGIQVEDCWVGIGGNHINGLNSRGVVGISQKKRDTKEREISQEDIDRVIEAAKAVVIPTDRQILKVIPQNYKVDDQKGIKDPLNMLGIRFDVRCI

SEQ ID NO: 8327 - DNA, 561 bp, Unknown
  Obtained from environmental sample
  misc_feature (1)..(561): n is a, c, g, or t
atgaatttttacaaaataaaagaaatatacccctggctttacagcatatatgatccccaagacgtattttgctacttagccgtcggaaaagaaaaagccctgctttttgacacggtatacggaatcggcaatctgccttcggcaattaaagaaataaccgacaaacccgtatatgtcgttcttgggcacggccatcttgatcacgccaacggcgcttgtcaatttgaagaagcgtggatacatgaggctgattttgaattatgccgccttcacacgtcggaagaataccgtcaaatagcccttaagcaaataaaagaatacggcataaaagcgccggatgattttaagcccgatgaatacctaaaagccggaacaggcaatttaaaaaaaatgaaagaaggtaaaatattcgatctaggcggcttgcatatagaagtgataggcatgggcgggcacaccgccggttcaataggaatccttgccaaagaaccaaaggtactgctgacaagcgattcggcgacgcctcctcgtgccgctcgtgccgatctgatcattggttaa

SEQ ID NO: 8328 - protein, 186 aa, Unknown
  Obtained from environmental sample
  DOMAIN (21)...(185): Metallo-beta-lactamase superfamily
  misc_feature (1)..(186): Xaa is any amino acid
MNFYKIKEIYPWLYSIYDPQDVFCYLAVGKEKALLFDTVYGIGNLPSAIKEITDKPVYVVLGHGHLDHANGACQFEEAWIHEADFELCRLHTSEEYRQIALKQIKEYGIKAPDDFKPDEYLKAGTGNLKKMKEGKIFDLGGLHIEVIGMGGHTAGSIGILAKEPKVLLTSDSATPPRAARADLIIG

SEQ ID NO: 8329 - DNA, 741 bp, Unknown
  Obtained from environmental sample
  misc_feature (1)..(741): n is a, c, g, or t
ttggctatcatagtcttcttgatccttgcccttgttatctttcttctttccagaagactccatgattcacctaagcgggtaatcactcgggcagccgccccattgccgaagaaacaggaaaggatcgatataagtagtaatacaataagcagtaatagaccggaacctgcagtaaaggcaggaagcctgagcccagaccggaggtccgcagagactttacctcggacgtctccgcagaatacaaatcacggcaccgcactttccgcttatctggaaaaacagaaaaacgccggtgctcctcccctcgcctatcctcctctaaaattgaagcctctgcccaaagacgaggctgaagctaatttttcttttaaagacgggcctcccatgctttctctttttgtcgcggatcagaataccgccataggaaaacgaaatatccatatactcaaagaaggttaccgctacacaataggaggaggaaattcggatttccttatcttcctggttcctgttccgcctcgaattgcggaacttttgtttgatggaaagcagtgtaccttgtatatcattcagcctaagtactttcctgatatagactccggtaaggttcccaactgcataggtaagacaatccgggttatctccgatagacaatatgagctccatatcaaggttgagcgttatgaggatccccttatcgctctgaataaactgctcaattctattatcgtaccgaattag

SEQ ID NO: 8330 - protein, 246 aa, Unknown
  Obtained from environmental sample
  misc_feature (1)..(246): Xaa is any amino acid
MAIIVFLILALVIFLLSRRLHDSPKRVITRAAAPLPKKQERIDISSNTISSNRPEPAVKAGSLSPDRRSAETLPRTSPQNTNHGTALSAYLEKQKNAGAPPLAYPPLKLKPLPKDEAEANFSFKDGPPMLSLFVADQNTAIGKRNIHILKEGYRYTIGGGNSDFLIFLVPVPPRIAELLFDGKQCTLYIIQPKYFPDIDSGKVPNCIGKTIRVISDRQYELHIKVERYEDPLIALNKLLNSIIVPN

SEQ ID NO: 8331 - DNA, 819 bp, Unknown
  Obtained from environmental sample
  misc_feature (1)..(819): n is a, c, g, or t
gtgaaactaaaaaatccggtttttgaaagccagacgaaaaacaagctgggaaattcggatattcgaagctggatagtccaggaagtaaaggacgccacggaagactggcttcataaaaataccgaagcggccaaaaaactggagcacaagattctggccaacgaaagtctccgcacggagcttaatcaggtaaagaaagaggcgcgggaagccgcaaaaaaaatcgcccttaagatccccaagcttaaagactgcaagtaccaccttgaggacggcgaggagggggaactatcgaccatctttattacagagggagattccgccgcaggctctatggtttcaagcagggacgtgatgacccaggccatctttgcccttcgcggcaaggttgaaaacgtgtttggcaaaaagcgggcggccatttacaaaaacgaggaactttacaacatgatgatggccctgggaatagagaacgatgtttccggcctccgttacgccaggatcgtgatcgcgaccgacgctgactttgacggctttcatatcaggaatcttcttttaactttctttctttcctattttgaagagctcgtaacagcaggcaggatatatatccttgaaactccccttttcagggtgaggaacaagaaagaaaccacttactgctacaacgccgatgaaagagacgcggcggtttacgctctgggcagccaggctgaagtaacccgctttaagggccttggggaaattaacccgaaggaattcggccagtttatcggcaaagacatacgccttggtccggtgtcggtgagtaccccttaa

SEQ ID NO: 8332 - protein, 272 aa, Unknown
  Obtained from environmental sample
  misc_feature (1)..(272): Xaa is any amino acid
MKLKNPVFESQTKNKLGNSDIRSWIVQEVKDATEDWLHKNTEAAKKLEHKILANESLRTELNQVKKEAREAAKKIALKIPKLKDCKYHLEDGEEGELSTIFITEGDSAAGSMVSSRDVMTQAIFALRGKVENVFGKKRAAIYKNEELYNMMMALGIENDVSGLRYARIVIATDADFDGFHIRNLLLTFFLSYFEELVTAGRIYILETPLFRVRNKKETTYCYNADERDAAVYALGSQAEVTRFKGLGEINPKEFGQFIGKDIRLGPVSVSTP

SEQ ID NO: 8333 - DNA, 417 bp, Unknown
  Obtained from environmental sample
  misc_feature (1)..(417): n is a, c, g, or t
ttggcgatctggagcattatccttntcctgcgttccncggtgttgcacgctttcggtcttggagaagaagctttccgttatgccgaggggatgatgtttatctatctcgttaccggtgccctgcgaacctgcaactacataaacaacaatattttcagggccggtggcgagccgatcttcggcacagtgatagaaagtatcggcctttttttattcagcatcccggcggcggcaatcgcgggttttgtttttcactggcccttcctcgccgtgttcttcatgctcttcctggacgaattcctccgcataggcatttttctctggtacttgaactcaggcagatgggtaaaacctgtaacgcaactcggcagggagaaactaagcgaattcaaaacaaattttgtaaggaagcgttga

SEQ ID NO: 8334 - protein, 138 aa, Unknown
  Obtained from environmental sample
  misc_feature (1)..(138): Xaa is any amino acid
MAIWSIILXLRSXVLHAFGLGEEAFRYAEGMMFIYLVTGALRTCNYINNNIFRAGGEPIFGTVIESIGLFLFSIPAAAIAGFVFHWPFLAVFFMLFLDEFLRIGIFLWYLNSGRWVKPVTQLGREKLSEFKTNFVRKR

SEQ ID NO: 8335 - DNA, 609 bp, Unknown
  Obtained from environmental sample
  misc_feature (1)..(609): n is a, c, g, or t
gtgagatacttctttagaacagaatacgacggcacgcgtttttgcggctggcagaatcaacctaacggcatcagcgtccagcagctcatagaggaggcgctgaccgtggttctccgcgccccctgccccgtcgtcggcgccggacgtaccgacgccggggttcacgcccgcggccagggcgcccacttcgacgcgcccgattctgttgacgtcaaccccgaaaaattgaccctctccctcaacgcccttctgcccccggagatagccgtctacggcatggttccggtgcgccccgacttccacgctcgctattccgccgtttcccggcgttacatatattatttttccgatagaaagaatccgctcaactataagagggtgtggatgatatattatccggtagattgggagcgcgtggcttccgaggttaagcatattgtggggcggcacgactttacggcgttttgctcctccggcgccgattcgtacgacaaggagtgcgacgtgtcgtcagcggccttgtcttgccgcgagaacggcgtgagggtgttcaccatagaggcgaaccgttttatctacaagatggttcgttcgcttggggcacgctga

SEQ ID NO: 8336 - protein, 202 aa, Unknown
  Obtained from environmental sample
  DOMAIN (5)...(105): tRNA pseudouridine synthase
  misc_feature (1)..(202): Xaa is any amino acid
MRYFFRTEYDGTRFCGWQNQPNGISVQQLIEEALTVVLRAPCPVVGAGRTDAGVHARGQGAHFDAPDSVDVNPEKLTLSLNALLPPEIAVYGMVPVRPDFHARYSAVSRRYIYYFSDRKNPLNYKRVWMIYYPVDWERVASEVKHIVGRHDFTAFCSSGADSYDKECDVSSAALSCRENGVRVFTIEANRFIYKMVRSLGAR

SEQ ID NO: 8337 - DNA, 321 bp, Unknown
  Obtained from environmental sample
  misc_feature (1)..(321): n is a, c, g, or t
atggtagaaaaaataagaagcactaccgtaatagcggtaagaaaagacggcaaggtcgccatggctggagacggtcaggtgacaatgggcgatacggttatgaaaaataacgcgcgtaaagtccgccgtcttatggacggaaaggtgctttgcggttttgcgggcgctacggcggacgcgtttacgctctttgatcgttttgaagaaaagttaaaggaatactcaggcgacttggcaagagccgccgtggaattggcgaaagaatggcgcatggatcgaaatttaagacggctgaggcgctctgcggctcggccgatctga

SEQ ID NO: 8338 - protein, 106 aa, Unknown
  Obtained from environmental sample
  misc_feature (1)..(106): Xaa is any amino acid
MVEKIRSTTVIAVRKDGKVAMAGDGQVTMGDTVMKNNARKVRRLMDGKVLCGFAGATADAFTLFDRFEEKLKEYSGDLARAAVELAKEWRMDRNLRRLRRSAARPI

SEQ ID NO: 8339 - DNA, 561 bp, Unknown
  Obtained from environmental sample
  misc_feature (1)..(561): n is a, c, g, or t
atggcggaatttgcctctcttccgcaacaaaccggaatcttctggcccgaaagggataaggcgcttattatggcaatgtattcggcgggacttcggatttcggaagtggtggcgctttccatggcgaatatatccgccgatcttgacgaggcgaaaataacaggtaagggcgggaaacagcgttttgtgtttttcagcgacgaggcggttgcggcgattcaggagtatctgccgcaaagggcggaacttttaaaaacagccggagttgactggaaaaaaacagctttgtttatcaacagaaaaggacagcccatttcaattcccggagtgcgctggataatttcccgttacgcgcttcattcagggaccggaaaaaacattcatccgcacgcgcttcgccacagttttgccacccatcttgtaaattcgggctgcgatgtacgcattgttcaggaaatgctgggacactcaagcatttccaccacacagcgttatacgcatgttaatcttgaaaaaatgaaaaaggtatacgcggcttcgcatccgcacgcgggaggttga

SEQ ID NO: 8340 - protein, 186 aa, Unknown
  Obtained from environmental sample
  DOMAIN (7)...(175): Phage integrase family
  misc_feature (1)..(186): Xaa is any amino acid
MAEFASLPQQTGIFWPERDKALIMAMYSAGLRISEVVALSMANISADLDEAKITGKGGKQRFVFFSDEAVAAIQEYLPQRAELLKTAGVDWKKTALFINRKGQPISIPGVRWIISRYALHSGTGKNIHPHALRHSFATHLVNSGCDVRIVQEMLGHSSISTTQRYTHVNLEKMKKVYAASHPHAGG

SEQ ID NO: 8341 - DNA, 756 bp, Unknown
  Obtained from environmental sample
  misc_feature (1)..(756): n is a, c, g, or t
atgagtgacaatactgaaagaaagccggccagaggttttggcggcggcatgggcggacgcggcggcatggtcggcgaaaaggctaaggatttcaaagggacatggggcaagctgatacgctattgtaaaagctatattcctgtcattgtgattgcccttgtcatcgcggctctgggtacggctattcaaataatcggccctgataagatgaaagacatggcgaatgaaatcatgaaagggcttcccgcgatgataaacggaatccccttccttggcgcgattgattttaccgccatagtagatattggcatgctgcttgtttttctttactcgttgtcggctgttttaagctttaccgaaaattttatcatggcgacggtaaccgcgaaaatatcaaaaaaattgaggacggatatctcgcaaaaaatcaacaaactgccgctcaaatactttgataaaacgagctatggcgatgtcatcagccgagtgaccaacgatgttgacgcgatagggcaaacaatgaatcaaagccttgatatgctggtaagggcaattaccatgtttatcggatcgatggttatgatgttttacaacagctggattctggcgcttgtcgctataggttccaccattatcggatttgttctgatgatgtttattatgaaaaagtcccaaaagtattttaaggcgcagcagcaagggcttggcgatattaacggccacatcgaagagattattccggccacaatatgttaa

SEQ ID NO: 8342 - protein, 251 aa, Unknown
  Obtained from environmental sample
  misc_feature (1)..(251): Xaa is any amino acid
MSDNTERKPARGFGGGMGGRGGMVGEKAKDFKGTWGKLIRYCKSYIPVIVIALVIAALGTAIQIIGPDKMKDMANEIMKGLPAMINGIPFLGAIDFTAIVDIGMLLVFLYSLSAVLSFTENFIMATVTAKISKKLRTDISQKINKLPLKYFDKTSYGDVISRVTNDVDAIGQTMNQSLDMLVRAITMFIGSMVMMFYNSWILALVAIGSTIIGFVLMMFIMKKSQKYFKAQQQGLGDINGHIEEIIPATIC

SEQ ID NO: 8343 - DNA, 717 bp, Unknown
  Obtained from environmental sample
  misc_feature (1)..(717): n is a, c, g, or t
atggctaatttgtttgattatatttcctggcggggagatttggaatttgaccaatctccgtttaactcggttgacaacattgttttttcccaactgtcttatctgccgatggatggtattgttcccggccctcatgagcgcggcagcatcactattgaggaactggctgtaaagtatgcgataatacagcggtacagcccttccggatcaaccaatgatattacggttaacgatgcgatttctgttatcaacgcgattggatcggttccccgttataaagactgtaagctgtttgcttacaccaacaatatcgaccttgagcaggaaaaacagtttgccgctttttgcgcgataatcggcaggaaacatttttcaaaaaaaatgcttgtggtttaccggggtacggatatgagtcttatcggctggaaagaaagttttaacatgagcctcattacctctataccctcgcaaaaagaagctgtatcctaccttgagaaaacaacagggagattcctttatcctctgattatagccggacattcaaagggagggaatctggcgatttacgcgtccgccttttgcggcaaagatatccaaaaccgcatcactgccatttacagcaatgacgcgccgggctttcataaacaagtgatacagagccaaggctaccaggcaatctgcgcccggatccagccttttatccgcagtcgtcattaa

SEQ ID NO: 8344 - protein, 238 aa, Unknown
  Obtained from environmental sample
  misc_feature (1)..(238): Xaa is any amino acid
MANLFDYISWRGDLEFDQSPFNSVDNIVFSQLSYLPMDGIVPGPHERGSITIEELAVKYAIIQRYSPSGSTNDITVNDAISVINAIGSVPRYKDCKLFAYTNNIDLEQEKQFAAFCAIIGRKHFSKKMLVVYRGTDMSLIGWKESFNMSLITSIPSQKEAVSYLEKTTGRFLYPLIIAGHSKGGNLAIYASAFCGKDIQNRITAIYSNDAPGFHKQVIQSQGYQAICARIQPFIRSRH

SEQ ID NO: 8345 - DNA, 618 bp, Unknown
  Obtained from environmental sample
  misc_feature (1)..(618): n is a, c, g, or t
atgggacacgataaactatttcagaaaaaaaatgtgctgacacgtcccgaaaagacacgtaaactgcgcaggattttgattgtatgcgaaggcacaaaaaccgaaccaaactattttagaggttttaaagctaccaatcccgaagtatttgatgacattgacgtacagggaataggatataatacggcttctttagtaacagaggcgataaaaataaaaaatgaagcaatccaaaaaaatgagccgtatatcgaaacctggtgtgtctttgataaagacgatttctctattgagtcatttgaaaaagcgacaagactggctgaacaaaaccaaataaaatgcgcttattccattgaagcttttgaaatatggtatatgcttcattataatttttatgatactgctttttcccgatcacagtataaggagaaactttcagaattacttaaaaaaccatatgtaaaaaatgacccggaaatttatttgcgtttaagcaaaaaacaaagcatagctatacaaaacgcaagaaaactttacaacaaacaatgcttactgccgttaaaagacagaaatccgatttacactgtattccaactggttgaacgattaataggctag

SEQ ID NO: 8346 - protein, 205 aa, Unknown
  Obtained from environmental sample
  misc_feature (1)..(205): Xaa is any amino acid
MGHDKLFQKKNVLTRPEKTRKLRRILIVCEGTKTEPNYFRGFKATNPEVFDDIDVQGIGYNTASLVTEAIKIKNEAIQKNEPYIETWCVFDKDDFSIESFEKATRLAEQNQIKCAYSIEAFEIWYMLHYNFYDTAFSRSQYKEKLSELLKKPYVKNDPEIYLRLSKKQSIAIQNARKLYNKQCLLPLKDRNPIYTVFQLVERLIG

SEQ ID NO: 8347 - DNA, 720 bp, Unknown
  Obtained from environmental sample
  misc_feature (1)..(720): n is a, c, g, or t
ttggtcggcgtggacctccgtcacgtcctccgagaagaggtcccttattacgcgcgtggtgatccccagttcgcggtggaccagcttggttccgcttccggagagggcctccgtctgcgttttgcgccacgcgtccagcaggatgtgtatctcgcttacgaactcggtctcggagaccttcaagccgttcgtccgcactatgaagccgattccggggggcttgatctgcgatatgagctttttgagcttcgaccggcgggcggagtcgctcgttttcttcgagacgcctatgaagtctgtgtcgggcacgagcaccagaaagcgtccggccaggcttatctgggtggtgaccttggcgcctttggttcttataggctctttggccacctgcaccaggatctcctgccccttggtcagcaccttttcgatggggattctggggactttgcggctcttggcgtttttgccgccccgcccggcgaagcggtccatcatctcgtcctcttccattatcagcgacgggtctacgtcggaggcgtggaggaaggcgcacttgtcgagcccgatgtctacgaacgccgcctgaagtccggggagtatggacacgaccttgccccggtagatgtttcccaccagccggaagtaatccggccgctcgaccaccagctccacaaccttgtcgtttcaagcagcgcggcgcgctctctcggccgattctga

SEQ ID NO: 8348 - protein, 239 aa, Unknown
  Obtained from environmental sample
  misc_feature (1)..(239): Xaa is any amino acid
MVGVDLRHVLREEVPYYARGDPQFAVDQLGSASGEGLRLRFAPRVQQDVYLAYELGLGDLQAVRPHYEADSGGLDLRYELFELRPAGGVARFLRDAYEVCVGHEHQKASGQAYLGGDLGAFGSYRLFGHLHQDLLPLGQHLFDGDSGDFAALGVFAAPPGEAVHHLVLFHYQRRVYVGGVEEGALVEPDVYERRLKSGEYGHDLAPVDVSHQPEVIRPLDHQLHNLVVSSSAARSLGRF

SEQ ID NO: 8349 - DNA, 891 bp, Unknown
  Obtained from environmental sample
  misc_feature (1)..(891): n is a, c, g, or t
gtggaaaaccccatagtgcaagaaactataggcgatggaaaaggaatagttggcaatgcagagggattaagcgagactgtgaacgataaagccgacagcgctttagctgaggcagaggcagttgacacacaaaataaaaatgcaaccgaaggggaggcaaacgaaaaatcaaattctgtaactcctggcgatcctgtactggcaactacaggaagctatgtttttgaagttgaggacattgaaataacaggcagcagctttggaatcaaaagaaagtacataagcaacgaaaaaataattggaaacatgggaaaaggctggctgttttcattagacagcaggataatgcgcgggataacaatagtaaatacttcaggagtaaaatcgctggtaaacgaaatatcgcaatgcagcgacgagctgcggaagaaagccgaagacttgctgatcatgacagcggaaatgaataacaaaacaaaagaagccgcacaagcagcatacgatgaaataatgcaaatggcagacgggatagacggtgtacaccaagaagcaagcggtaaattggcagaattggaatcaataaattcccgtgggcaacagcttgcggctctaaacaagttcagtaaatttcgaggcagtcccggcaattatgaaagatttgggaatgagtaccttcttcttataagcgagaatgggataccgcatgtttttgcgccttccggaagcggaacatggagcccaataagtaccccagagcgtctttatgaaaaaatcaccagtgttaatggcggcggcgctnacagcatggcgggggttgtactcaccgagcgcggaagacgcaggaaacattatgacggtaaccgaatgttaatttggggtaacggaatttaa

SEQ ID NO: 8350 - protein, 296 aa, Unknown
  Obtained from environmental sample
  misc_feature (1)..(296): Xaa is any amino acid
MENPIVQETIGDGKGIVGNAEGLSETVNDKADSALAEAEAVDTQNKNATEGEANEKSNSVTPGDPVLATTGSYVFEVEDIEITGSSFGIKRKYISNEKIIGNMGKGWLFSLDSRIMRGITIVNTSGVKSLVNEISQCSDELRKKAEDLLIMTAEMNNKTKEAAQAAYDEIMQMADGIDGVHQEASGKLAELESINSRGQQLAALNKFSKFRGSPGNYERFGNEYLLLISENGIPHVFAPSGSGTWSPISTPERLYEKITSVNGGGAXSMAGVVLTERGRRRKHYDGNRMLIWGNGI

SEQ ID NO: 8351 - DNA, 462 bp, Unknown
  Obtained from environmental sample
  misc_feature (1)..(462): n is a, c, g, or t
gtgcatatttatttgcaaccggaaaaaagagaggaatctccatatcttggcacaatagccaaaagtgatatttgcatagaagcaggaccccaagcacacggaacgcttgatgcgaaaattttttttaaggtggaacgaattgtctttcgctttttggaacttgcaaaagcttatgataacggagctttgccaaaaatagacgatgttgaaacattcaaggaaatgcggagcatcgattacccaagagattccaaaggcaacatagctgccattatacaccccgcgctacaaggcaaggatttttgcgaacttaaaagcggaatgccgatatttatgggctttgacggaaaagaaatactctggcaaggcgaaacctgttaccctacttttataaatgaggctgcatattacgaaaaaggaatagctatgagtttagcggagaaaagggtgagttatttttag

SEQ ID NO: 8352 - protein, 153 aa, Unknown
  Obtained from environmental sample
  misc_feature (1)..(153): Xaa is any amino acid
MHIYLQPEKREESPYLGTIAKSDICIEAGPQAHGTLDAKIFFKVERIVFRFLELAKAYDNGALPKIDDVETFKEMRSIDYPRDSKGNIAAIIHPALQGKDFCELKSGMPIFMGFDGKEILWQGETCYPTFINEAAYYEKGIAMSLAEKRVSYF

SEQ ID NO: 8353 - DNA, 363 bp, Unknown
  Obtained from environmental sample
  misc_feature (1)..(363): n is a, c, g, or t
atgaacgggaaatatttattctcttacaaagctgacataatgatctctgatttttcagggatcattttcgattatatgttcctgcgcgataagccggtattgtatgtcagtcagaattttgaccttcgtccctatgatgcggacgatattgaacatgagctgtggcagttcaaaatagtaaaagagacaggaatagaattacgtgaagatgattttccgcgaataacagaaattataaaaaacgcgggagacagcgaaccccttaaaaacacccgaaaaaaagcccgagaaaccgcatggcagtatcccggagaagcgggaaaacgtgtttttgattttatgatgaaaatcgcagatagctga

SEQ ID NO: 8354 - protein, 120 aa, Unknown
  Obtained from environmental sample
  misc_feature (1)..(120): Xaa is any amino acid
MNGKYLFSYKADIMISDFSGIIFDYMFLRDKPVLYVSQNFDLRPYDADDIEHELWQFKIVKETGIELREDDFPRITEIIKNAGDSEPLKNTRKKARETAWQYPGEAGKRVFDFMMKIADS

SEQ ID NO: 8355 - DNA, 897 bp, Unknown
  Obtained from environmental sample
  misc_feature (1)..(897): n is a, c, g, or t
ttgcagatggcaagagcgttcgctgtttttgcaaaccaggggcgtaatgtcactccaatatcaattcgtacagtagaagatcgtaacggcagagttgtatttgatattgaaagggatgtccgtcagagacagcggcggttaccgaataacggtcaggttatcagtccgcaaaacgcctatgtcatgaccagattaatggagtttgtcgttacaggcggcactcttgcttatggaaccagttcaggatcaaagttaacttacaaggacagcgaaggaaaaacattcaagatgcctcttgccggaaaatcgggaactactcaaaactggtcggatgcgtgggtagtaggatacactccctattatacaacggcaatgtggtacggttttgacaaacccggtaactcattggggatttcacaaaccggtgaaatgttgacgtctcctctttgggggaactatatgcgcgatattcacaacgggcttccgcaaaaaagttttacgcgcccgtcgggaatttcagatgccggtgtttgcagaggatcgggtcttttagcgacggaatcatgccctcaaacgatttatcttccctttctggaaggaaccgttccggggcgttactgtgacatacatggaaacacaggcgctttgccgggatcaagactcccttctactactgcgccgattaataatgttttggatccttctatattagatgagattccaagacctaaattacagttagatttatttcctgagttgaatcaaccgcagcaaaggcaaaatcaggttcagagccagaataacagaaatcaaccaagaaatactccccctgagaataatccccgcaacaatccaaggaataatcaaactacaatccctcgtgccgctcggccataa

SEQ ID NO: 8356 - protein, 298 aa, Unknown
  Obtained from environmental sample
  misc_feature (1)..(298): Xaa is any amino acid
MQMARAFAVFANQGRNVTPISIRTVEDRNGRVVFDIERDVRQRQRRLPNNGQVISPQNAYVMTRLMEFVVTGGTLAYGTSSGSKLTYKDSEGKTFKMPLAGKSGTTQNWSDAWVVGYTPYYTTAMWYGFDKPGNSLGISQTGEMLTSPLWGNYMRDIHNGLPQKSFTRPSGISDAGVCRGSGLLATESCPQTIYLPFLEGTVPGRYCDIHGNTGALPGSRLPSTTAPINNVLDPSILDEIPRPKLQLDLFPELNQPQQRQNQVQSQNNRNQPRNTPPENNPRNNPRNNQTTIPRAARP

SEQ ID NO: 8357 - DNA, 813 bp, Unknown
  Obtained from environmental sample
  misc_feature (1)..(813): n is a, c, g, or t
atgcgccattttatgtctgtcgacccaaagtacggctcaagtacggaacgcggtattataccgttccattcgttcgatgttataaatgtggaaattcacgaaaacaaacatgtcgaaattattcaaaaaaacaaagatgaatggaaaacggctttaagaaacctgtcatggctttttgcaatgacggataatgattataacgatataaaacagcattatatttacctgcttttcaagtttgcgcacatcgccgttcctaacgcgctaatggctgcaaaatataaaaaaggtttcaacgatcccaatgttgtcccggattatatgaaaatggattttcatgatgacaacggcagcatagacgcttatatcagcgaaaagcctcctattctggtttacaatgattacgaattagcaagttattccaagacaagaatcgcctgcaatatgatcagggatttaaacaccgcgtgggtatttgatcctctttatgacggcaggaatttgattgagtgtatgggaatacaggggcatgagactgtaagtcctactatggcaagcagaaatcaaacttacatatcggcgtttgccgggcttattgataaaggcttgctggattgtatatgttattccgagattgatatgaaacaacccgattccgcccccggcggcggttcaaaagcgcctgaagttttaaaccaaaaacaagccgacgcccttggttaccagtacgcgctgctttttaaggtattcgaaaaatataaaaaatatattgaccatgttattatttggagtccttttggcgcgggtttatga

SEQ ID NO: 8358 - protein, 270 aa, Unknown
  Obtained from environmental sample
  misc_feature (1)..(270): Xaa is any amino acid
MRHFMSVDPKYGSSTERGIIPFHSFDVINVEIHENKHVEIIQKNKDEWKTALRNLSWLFAMTDNDYNDIKQHYIYLLFKFAHIAVPNALMAAKYKKGFNDPNVVPDYMKMDFHDDNGSIDAYISEKPPILVYNDYELASYSKTRIACNMIRDLNTAWVFDPLYDGRNLIECMGIQGHETVSPTMASRNQTYISAFAGLIDKGLLDCICYSEIDMKQPDSAPGGGSKAPEVLNQKQADALGYQYALLFKVFEKYKKYIDHVIIWSPFGAGL

SEQ ID NO: 8359 - DNA, 471 bp, Unknown
  Obtained from environmental sample
  misc_feature (1)..(471): n is a, c, g, or t
atggacgctgcttgtttttgccggcagcgcgaacaggctggccggaagttcgctttcggcgccggcattgtctgccgggcgaacagggcgaaacagcgttgcggcggactttgctttcggctgaacgcgtcgccagataacggagtggacacaatgacgacagtgagcagtgatcgtatccggatcaagcttaaagcttacgattaccgcatccttgacaaggctgtggcggaaatcgtggacacggcgcgcaatacgggcgcccgcgtggccgggccaatccccttgccgacgaatattcataaggtgacggtgaaccgcgcggtgcatgcggacaaaaagtcccgcgagcagttcgaaacccgtatccacaagcggcttatggacattcttgagcccacgcagcagaccgtggacgccttgggcaagctcagcctgcccgccggcgtggatgtggaaatcaagctttag

SEQ ID NO: 8360 - protein, 156 aa, Unknown
  Obtained from environmental sample
  DOMAIN (59)...(154): Ribosomal protein S10p/S20e
  misc_feature (1)..(156): Xaa is any amino acid
MDAACFCRQREQAGRKFAFGAGIVCRANRAKQRCGGLCFRLNASPDNGVDTMTTVSSDRIRIKLKAYDYRILDKAVAEIVDTARNTGARVAGPIPLPTNIHKVTVNRAVHADKKSREQFETRIHKRLMDILEPTQQTVDALGKLSLPAGVDVEIKL

SEQ ID NO: 8361 - DNA, 333 bp, Unknown
  Obtained from environmental sample
  misc_feature (1)..(333): n is a, c, g, or t
atggcgtcaggactcaaggctgtacagaaactgcacaaaggccggggcgccctgccaagagccatctgcgcgggttctgacgaagtagccgttggaattctcttctatctgtacgaacagagaattgccgtacccgaagaaaccgcaataatcagtattgataacattgaaatcgccgaatacaccaatccccagcttacctgtataaacgttcaaaaaagggctatgggttaccgcgccgtggaaatgattgttaatcgcgccgccggacggggagaaaacgccctgaccctgctattgcccacaaatcttgttatacgcaaatcatcatag

SEQ ID NO: 8362 - protein, 110 aa, Unknown
  Obtained from environmental sample
  misc_feature (1)..(110): Xaa is any amino acid
MASGLKAVQKLHKGRGALPRAICAGSDEVAVGILFYLYEQRIAVPEETAIISIDNIEIAEYTNPQLTCINVQKRAMGYRAVEMIVNRAAGRGENALTLLLPTNLVIRKSS

SEQ ID NO: 8363 - DNA, 648 bp, Unknown
  Obtained from environmental sample
  misc_feature (1)..(648): n is a, c, g, or t
atgattattgatgaaaattatcttgacgcggatttcaggcgcattttgggaattaacatttttgaagatgtcgcgtggtttaataaagaaggatttgaagacgctctgttctatacttcattgttctttatggtagaaggttctgtaaatattttaatggaagaaagaatcaaccgcattgtaaaaatttatgacgtgctgaaaaaagcggaagaaaaatccggctatcgttttgataatctcctggaatatttagtgtctatatcagcgaaaacaaaacctgtaaagactaaatctgccggaaaacccgtccctgtcgcggaaaaagtaaaaacacccgcaaaaacgaagcctttaaaggcagaatctgacaagattaagcctgccgcaaaaaccgcagggaaaaaatcggagaaacccgcagagaagcccaaggcgaaaagcgcggcaaaggcagtgaaaaaaaccggcgcggttgttaaggcaaaaccgacaaagtcggcgaagccggtgaaagcaaaagctgataaagctaaatcagccaagccgaaaccgaaagtaaaagccgtaaaaacaaaggcaaagccggagaaggcgaaatccggcaaaagtaaaacgacctcaaaaacaaaggggaagaaaaagtga

SEQ ID NO: 8364 - protein, 215 aa, Unknown
  Obtained from environmental sample
  misc_feature (1)..(215): Xaa is any amino acid
MIIDENYLDADFRRILGINIFEDVAWFNKEGFEDALFYTSLFFMVEGSVNILMEERINRIVKIYDVLKKAEEKSGYRFDNLLEYLVSISAKTKPVKTKSAGKPVPVAEKVKTPAKTKPLKAESDKIKPAAKTAGKKSEKPAEKPKAKSAAKAVKKTGAVVKAKPTKSAKPVKAKADKAKSAKPKPKVKAVKTKAKPEKAKSGKSKTTSKTKGKKK

SEQ ID NO: 8365 - DNA, 849 bp, Unknown
  Obtained from environmental sample
  misc_feature (1)..(849): n is a, c, g, or t
ttgttcgtaggcggcgcaaacatcaacagcttgcaggggcttaacactcctattgcagataacggcgaattgatgattgttccggctatcgcgggcggcagtggcgaccatgtcggcgaccatgtcggcgaccatgtcggcacggagcttaccaatgaagaaattgcccgttacagccgacacttgcttttgccggaaataggcgttgaggggcaaaaaaaattaaagtctgcaaaagtactcattgtcggtacgggcgggcttggcgcgccgattgccctgtatcttgcggcggcgggcgttggaacaatcggcctggtggatttcgacgtggtagacgaatcgaatcttcaacggcaaattattcacagcacgcgcgacgtgggcaggccaaaagtggcttcggcaaaggacagaatcaaggggataaacccgctggtgaacgtgatgacacataacgcaatgttgacaagccggaacgcgctggaactttttgccgattatgacattatcgccgacggaacggacaactttcaaacgcgctaccttgtaaacgacgcctgcgtatttttgggcaaactgaacgcctacggctcggtgtttcaatttgacggacaggcgactgttttcggcgcgaaagacggcccctgctaccgctgcctctacccgtccccgccgcctccgggacttgtcccctcctgcgcggaaggcggagtcatgggcgtactgcccgggattatcggaaccattcaggcggcggaaacgattaagctcattgtaggcggcgcgaagccgttgattggccgcctgcttttgtttgacgcgtggcgcatggcgttccgcgaataa

SEQ ID NO: 8366 - protein, 282 aa, Unknown
  Obtained from environmental sample
  DOMAIN (213)...(282): MoeZ/MoeB domain
  misc_feature (1)..(282): Xaa is any amino acid
MFVGGANINSLQGLNTPIADNGELMIVPAIAGGSGDHVGDHVGDHVGTELTNEEIARYSRHLLLPEIGVEGQKKLKSAKVLIVGTGGLGAPIALYLAAAGVGTIGLVDFDVVDESNLQRQIIHSTRDVGRPKVASAKDRIKGINPLVNVMTHNAMLTSRNALELFADYDIIADGTDNFQTRYLVNDACVFLGKLNAYGSVFQFDGQATVFGAKDGPCYRCLYPSPPPPGLVPSCAEGGVMGVLPGIIGTIQAAETIKLIVGGAKPLIGRLLLFDAWRMAFRE

SEQ ID NO: 8367 - DNA, 732 bp, Unknown
  Obtained from environmental sample
  misc_feature (1)..(732): n is a, c, g, or t
gtgaggcaaaaaaagaaggaaggcaaaattaggcacatcgggttttcttttcatgacaacgccgagctgctggataaaatattgaccgagcatccagagatggaatttgtgcaattgcaaattaattatctagacatagacgacatcaacatcgaatcaggcaagtgctatgaagtcgccaaaaaacatgacaaagacatcttcgtcatggagcctgtgaaaggtggcgcattggcaaacgtgcctagcgaagtggccgcactgtttaagttgcatagccccaatgcgtccccagcctcatgggcactgaggtacgccgcgtcttttgataatgtcgttatggtactaagcggcatgaacagcatggaacaactaattgaaaacaccaccaaaattgatcattttgaccctatcaccaacgaggaacaggccatcatccaacaagcggccaaaatgctgaaagagtctgttgctatccagtgttctgaatgccgctactgcatggcggactgcggcaaaaagatggccattcccgaatatttttcaatttacaacaatttaatgcgcggcggcccctcccaaaagcctctagcgatgggctactacggcaatctggccttgagccacgggaaggcctcagagtgcgaccaatgcggaaaatgtgaaagcctctgtccgcagcacctgccgatcatcaagcacttgaagctggttgcggcggagctgggataa

SEQ ID NO: 8368 - protein, 243 aa, Unknown
  Obtained from environmental sample
  misc_feature (1)..(243): Xaa is any amino acid
MRQKKKEGKIRHIGFSFHDNAELLDKILTEHPEMEFVQLQINYLDIDDINIESGKCYEVAKKHDKDIFVMEPVKGGALANVPSEVAALFKLHSPNASPASWALRYAASFDNVVMVLSGMNSMEQLIENTTKIDHFDPITNEEQAIIQQAAKMLKESVAIQCSECRYCMADCGKKMAIPEYFSIYNNLMRGGPSQKPLAMGYYGNLALSHGKASECDQCGKCESLCPQHLPIIKHLKLVAAELG

SEQ ID NO: 8369 - DNA, 549 bp, Unknown
  Obtained from environmental sample
  misc_feature (1)..(549): n is a, c, g, or t
ttgatggccgagcccttacgcataggcgatactgtttcggcgcagtcggcgctgtttgtggtcggcgacctttccgtcctgcgtgtggaaacctttgtgccggagcgtttcgtctcgtctatcagactgggtctcggcgcctcggtgaatctggaggctcttcccggcgaaacatttccggcggagatagacgaggtaaaccccgtgcttgatccggcgagcagaaccctgcgtataaggctccgctttaccggcaggggcgcggcggattcccggattaaggcggggatgttcgcgacaatcagccttgtcacaagaaccagggccaacgtgccaatcatacccagaacttcggtaatcaacacctacggctcatggatagccttcattatagatgaaaacaatattgcccgccggcgctcgctggaattgggcatagaaaacgaaagattttttgaagtgataagcggcatcagccttggagaacgggttgttaccgccgggcagaattttcttacagacggcgaccctgttcgcattgtggaatag

SEQ ID NO: 8370 - protein, 182 aa, Unknown
  Obtained from environmental sample
  misc_feature (1)..(182): Xaa is any amino acid
MMAEPLRIGDTVSAQSALFVVGDLSVLRVETFVPERFVSSIRLGLGASVNLEALPGETFPAEIDEVNPVLDPASRTLRIRLRFTGRGAADSRIKAGMFATISLVTRTRANVPIIPRTSVINTYGSWIAFIIDENNIARRRSLELGIENERFFEVISGISLGERVVTAGQNFLTDGDPVRIVE

SEQ ID NO: 8371 - DNA, 714 bp, Unknown
  Obtained from environmental sample
  misc_feature (1)..(714): n is a, c, g, or t
ttgagggattttttaactgggccggaagtttccgttctcgcgtttacggacggaaaaaccgtagtccccatggtttcgtccatgacccacaaacgcgcntacgacggcaatgaaggccccaacacgggcggcatgggcgtaatcgcgcctaatccccactacacggacgaaattgccgcaatatgcgaaaaaaccatatttttacccagcattaacgcgatgcaggaagaaggctgtcctttcaaaggctgcctgtactttgggcttatgctcaccaagagaggcccggttgttattgaatacaactgccgcttcggagacccggaagcgcaggcggtactgcccctgctggaaacaagcctgttggaagtgatggaagccgtaacggacgagaggctttctgaaacaaagattagctggaaaaacgcgcattgcgcctgcgtaatactggcaagcggaggttatccgctctcttataagaccggttttgccattacagggctttgtgaggccgaaaaaagcggagcggaggtctgtcatgccggaaccgaatacaggcaggcggaaggcttatttgtaacttcaggaggccgcgttttaggcgtaaccgccgtagataaaaccataaaaacagcccttgaaaaagcctataaagctgttgattttattaattttgaaggaattcactaccgaaaagacataggaaagtactaa

SEQ ID NO: 8372 - protein, 237 aa, Unknown
  Obtained from environmental sample
  DOMAIN (1)...(110): Phosphoribosylglycinamide synthetase, ATP-grasp (A) domain
  misc_feature (1)..(237): Xaa is any amino acid
MRDFLTGPEVSVLAFTDGKTVVPMVSSMTHKRAYDGNEGPNTGGMGVIAPNPHYTDEIAAICEKTIFLPSINAMQEEGCPFKGCLYFGLMLTKRGPVVIEYNCRFGDPEAQAVLPLLETSLLEVMEAVTDERLSETKISWKNAHCACVILASGGYPLSYKTGFAITGLCEAEKSGAEVCHAGTEYRQAEGLFVTSGGRVLGVTAVDKTIKTALEKAYKAVDFINFEGIHYRKDIGKY

SEQ ID NO: 8373 - DNA, 426 bp, Unknown
  Obtained from environmental sample
  misc_feature (1)..(426): n is a, c, g, or t
gtgaattacgatgtccgcaaaaacgacccatactcaatttacagctctcttgattttaatgtccccgttgcaaccgagggcgactgctatgcgcgttacatagtgcggatacaggagattcacgaatcgatgaaaattttggaacagtgcatagccaaattcccagaagggccgtaccgttccgcttcaaaaccgagctacaaattgccagcaggcaaatactacgctcaaacagaaaccgcaaaaggcatctatggtacatatatagtggcggacaaaggcgacaagccttatcgcatccacacccgtagcccaagttttgcgaatctgttttccctaaacgaaatgagcaaggggcataaagtctccgatttggtgactataatggctacccttgaccccgtaataccagaaatagacaggtag

SEQ ID NO: 8374 - protein, 141 aa, Unknown
  Obtained from environmental sample
  DOMAIN (1)...(141): Respiratory-chain NADH dehydrogenase, 49 Kd subunit
  misc_feature (1)..(141): Xaa is any amino acid
MNYDVRKNDPYSIYSSLDFNVPVATEGDCYARYIVRIQEIHESMKILEQCIAKFPEGPYRSASKPSYKLPAGKYYAQTETAKGIYGTYIVADKGDKPYRIHTRSPSFANLFSLNEMSKGHKVSDLVTIMATLDPVIPEIDR

SEQ ID NO: 8375 - DNA, 384 bp, Unknown
  Obtained from environmental sample
  misc_feature (1)..(384): n is a, c, g, or t
atgagtaatccaaacgagggaatttattggaattcagaccgcaaaatgcggcttttgttcgcgttttgcggctttgcaatgttttttgcgctgctttactatttatccgatgtgctaaccccatttatcatagcgtttttgctggcatatattttaaaccccatcgtgaatattttgcaaaaaagagttaagcataggtggatagcttctattatagtattaatggcactgctcatcatctgcattggggcactgctcatatttgtcccgatgattgttgaccaagccatgaatttagggcgtctgttgcaaaaatacgcaagtgacagtacatggaaagcaacccttatggaatatatgccaaaagagatttgggataaataa

SEQ ID NO: 8376 - protein, 127 aa, Unknown
  Obtained from environmental sample
  misc_feature (1)..(127): Xaa is any amino acid
MSNPNEGIYWNSDRKMRLLFAFCGFAMFFALLYYLSDVLTPFIIAFLLAYILNPIVNILQKRVKHRWIASIIVLMALLIICIGALLIFVPMIVDQAMNLGRLLQKYASDSTWKATLMEYMPKEIWDK

SEQ ID NO: 8377 - DNA, 684 bp, Unknown
  Obtained from environmental sample
  misc_feature (1)..(684): n is a, c, g, or t
gtggcgctgggggtcgtgctgtacctgtatttctccgtgggcggcgagggcgcgccgacgcgcggcgaggtgacctcgctgtatattccgtttttcaagaatccggttgtcgacctcggatcgctgtggattccttttggcgtactgcttataatgggcgaatcaaacgcggtcaatttttccgacgggcttgacgggctgttggccggcctgctgatcctcgtgttcatcgccctggcgatacttacctatatttccggccgaaccgactacgccacatacctgggcataccgtacattcagggcgcgggggagcttacggtcgtctgccttgcgattgtcggcgcgctgatcggttttttatggttcaacgcccacccggcggaggtcttcatgggcgacgtgggcagtctttccctgggcggaattgtcgcggttatttcccttattataaagaaggaaatactggttcttataataggcggcgtgttcgtgctggaaatagcgtcggtcattattcaggtaatatcatttaagctgcggaagaagagggtgtttttgatgtcgccgctgcaccatcactttgaactgagcggctgggcggagaccaaggtcgtgacccgcttttggatattgggagggctttttgcgataatcgccctttcaactttgaagatacaatag

SEQ ID NO: 8378 - protein, 227 aa, Unknown
  Obtained from environmental sample
  DOMAIN (1)...(157): Glycosyl transferase family 4
  misc_feature (1)..(227): Xaa is any amino acid
MALGVVLYLYFSVGGEGAPTRGEVTSLYIPFFKNPVVDLGSLWIPFGVLLIMGESNAVNFSDGLDGLLAGLLILVFIALAILTYISGRTDYATYLGIPYIQGAGELTVVCLAIVGALIGFLWFNAHPAEVFMGDVGSLSLGGIVAVISLIIKKEILVLIIGGVFVLEIASVIIQVISFKLRKKRVFLMSPLHHHFELSGWAETKVVTRFWILGGLFAIIALSTLKIQ

SEQ ID NO: 8379 - DNA, 723 bp, Unknown
  Obtained from environmental sample
  misc_feature (1)..(723): n is a, c, g, or t
atgaattatattgcaaattcaatagtaaaacctctcaaacaaaaagggcttatagacggaatgggaatgcagtctcatcttgacgtaaggacgggaactccgtatccaagcgcatctgattacggaacagccataacaacctataagaatttaggcgttgagattcatgtatcggaattggacgcgaccgttaccgacggcaatgaaagctattttccggcacaagcaacatattataaagatataatgaaccagattctcaccaagggcggcagcgctgttacagccgttgtagtttggggcattcaagacaatcaatcatggcgcagcagcagaaaaccgttgcttttcaacgcttccggcaataaaaaagccgcgtatacttccgtatacaatctcatccctcagtcggaatggggcgacggtaaaaaccccagtgttggcgggaatacaggcggcggcaacaccgacatcaacgtaacgtgcaatgtagataacctcaactcgagttacgttgcggggagcagcgtcccgaggccgaacgtgagttgcggggccaacgggggtgcggcgggagcggcctcattcagcattaacggcgcggctatagacggatggagttctccgaacggcacacaggccctatacaataccggcacaaggaccgttacgttaaacagccttcaatgcggtggcgtcaacgtaacccctcggcgccggtaa

SEQ ID NO: 8380 - protein, 240 aa, Unknown
  Obtained from environmental sample
  DOMAIN (2)...(134): Glycosyl hydrolase family 10
  misc_feature (1)..(240): Xaa is any amino acid
MNYIANSIVKPLKQKGLIDGMGMQSHLDVRTGTPYPSASDYGTAITTYKNLGVEIHVSELDATVTDGNESYFPAQATYYKDIMNQILTKGGSAVTAVVVWGIQDNQSWRSSRKPLLFNASGNKKAAYTSVYNLIPQSEWGDGKNPSVGGNTGGGNTDINVTCNVDNLNSSYVAGSSVPRPNVSCGANGGAAGAASFSINGAAIDGWSSPNGTQALYNTGTRTVTLNSLQCGGVNVTPRRR

SEQ ID NO: 8381 - DNA, 858 bp, Unknown
  Obtained from environmental sample
  misc_feature (1)..(858): n is a, c, g, or t
gtgaggggagtgcttgccgctatcgccgcagggctttccgaagggattaaagaatttatcgttcctgcggaaaacgccggagaggcggctattcttgcgcaaaaaggcgcgcggtttacagccgctgaaaatctacaggaagcggttaatgcgctttttatcagagagaaacaaggcgctcttccggcgtcattggccgcggacgcaaacacagacggcgctttaggcattttccccgaaggtgatttttccgaagtgcgggggcaggctgtttacaagcgggctttggaaattgccgccgccggagggcacaatgttttggtcttcggaccgccgggcgcagggaaaacaatgctggcccgcaggcttacttcaatcatggctccgcttacccccgacgaggcggtcgaagttacccgcctttacagccttgccggtccctttatgaataacggcggccgttactcgcaaaaatttatcgaccgccttatcacgaatgcgccgtttcgcgcgccgcatcattcggccagcgccgagggaattttaggcggcggcagaaatcctcgccccggagaaatcagccttgcgcatttcggcgtgctttttcttgacgaagcgcccgagttcagaatcaacgtattgcaggcgctccgtgagccgctggaagacagggtaatcagcatttccagagcggaagggcctgtgcgcctgcccgccgaattccagatgcttatggcggctaacgcctgtccgtgcggacggctcggtatccgtgatacagacaacccctgtttctgctcgcccgaagaatcaaccgctactggcgaaagttcagcggagcgctgttggacagggtaa

SEQ ID NO: 8382 - protein, 285 aa, Unknown
  Obtained from environmental sample
  DOMAIN (105)...(263): ATPase family associated with various cellular activities (AAA)
  misc_feature (1)..(285): Xaa is any amino acid
MRGVLAAIAAGLSEGIKEFIVPAENAGEAAILAQKGARFTAAENLQEAVNALFIREKQGALPASLAADANTDGALGIFPEGDFSEVRGQAVYKRALEIAAAGGHNVLVFGPPGAGKTMLARRLTSIMAPLTPDEAVEVTRLYSLAGPFMNNGGRYSQKFIDRLITNAPFRAPHHSASAEGILGGGRNPRPGEISLAHFGVLFLDEAPEFRINVLQALREPLEDRVISISRAEGPVRLPAEFQMLMAANACPCGRLGIRDTDNPCFCSPEESTATGESSAERCWTG

SEQ ID NO: 8383 - DNA, 825 bp, Unknown
  Obtained from environmental sample
  misc_feature (1)..(825): n is a, c, g, or t
gtgatggccgagagggtttgcgtcatgaaagacgggcgcattgccgtttgtgataagacggaaaaaatttttgccaatactgccctgcttgaagaaaacggcatacaagcgccgcgtgaagcggatattgaaaaagtttttactgccggaagcaaacctgttttaacggaagcggttaaaattacaaatttttgttttaattatgacaaaacgggcgtctccatagaaaacataaatctgaatgttgcagataacgattttctggcgattgtagggaagaacggatgcggaaaaacaactttgttaaaatgcgttacagggcttttacgtccttcttccggcgaaatttttattcgcggaaagaatacaaaagacctttccgtatcggatatttcaaaagaaacaggttttgttatgcaaaatccggacagccagctttttaccgattccgtttttaacgaagtttcctttgccctgaaaaacgcatctctttcgaaagcggaaatacaaaagcgggtaaatgaagcgcttgctaccgtggggcttaaggaacccgacgcttttcctcacgctttaagcagagctgatcgtacaaaagttgtaattgcctcagttttggctatgggcagcaaaattttaatttttgacgaagttgatataggacaggattacaaaggctgtattcatattatgaatatagcaaaagagcttcattcaaggggctgtacaattatttttgttacgcataatatgtctcttgtatgcgaatatgcccgcagagtaattgttatgaacaggaacggaatactgcaatatgaaaaataa

SEQ ID NO: 8384 - protein, 274 aa, Unknown
  Obtained from environmental sample
  DOMAIN (85)...(268): ABC transporter
  misc_feature (1)..(274): Xaa is any amino acid
MMAERVCVMKDGRIAVCDKTEKIFANTALLEENGIQAPREADIEKVFTAGSKPVLTEAVKITNFCFNYDKTGVSIENINLNVADNDFLAIVGKNGCGKTTLLKCVTGLLRPSSGEIFIRGKNTKDLSVSDISKETGFVMQNPDSQLFTDSVFNEVSFALKNASLSKAEIQKRVNEALATVGLKEPDAFPHALSRADRTKVVIASVLAMGSKILIFDEVDIGQDYKGCIHIMNIAKELHSRGCTIIFVTHNMSLVCEYARRVIVMNRNGILQYEK

SEQ ID NO: 8385 - DNA, 663 bp, Unknown
  Obtained from environmental sample
  misc_feature (1)..(663): n is a, c, g, or t
atggtaattagagagagcagcctggaattttccactgaaggagaaaatgtcaggcatttcaaggccgatataagccctgtctttgataaagataataaacgtatagggatgatcattctggtttcggacgttacagaacatgtaaatttcgttaaagaactggaaaaggccgcctacacggacagtcttacgggtctttataacaggaaacatttttcagaacttgcggtggcggaaattcaaagagcgtccaggcttggccaattattatatatgacaatgctggattttgattttttcaaaagcataaacgataactacggccacaccgcgggagatttggttttaaaaacagcctcggaagttatccataaaagcgttcgttcatacgatctgctttgccgttacgggggcgaggaatttgtcctgctttttgccgtcaggaatgaagccgaagcttccgttgtagcggaaagaatcagaaaaggcgtagaaaattgcgttattaactacgaagaacacattttaaatattacatgcagtataggcatggcgaaattcttaagcaacgataacatagaaaccgcaataaagaaagccgacgaagccctttacaccgcgaaaaaagcggggcgtaatcaggtaaaaatatatgagccgtaa

SEQ ID NO: 8386 - protein, 220 aa, Unknown
  Obtained from environmental sample
  DOMAIN (54)...(214): GGDEF domain
  misc_feature (1)..(220): Xaa is any amino acid
MVIRESSLEFSTEGENVRHFKADISPVFDKDNKRIGMIILVSDVTEHVNFVKELEKAAYTDSLTGLYNRKHFSELAVAEIQRASRLGQLLYMTMLDFDFFKSINDNYGHTAGDLVLKTASEVIHKSVRSYDLLCRYGGEEFVLLFAVRNEAEASVVAERIRKGVENCVINYEEHILNITCSIGMAKFLSNDNIETAIKKADEALYTAKKAGRNQVKIYEP

SEQ ID NO: 8387 - DNA, 861 bp, Unknown
  Obtained from environmental sample
  misc_feature (1)..(861): n is a, c, g, or t
atgaccggcagggttcaggaaaatctgaaccgcataaaagatgaatcctcttttgtggaaaatgtcggaaaacggatcggcgatgtcaaggaaaaggttgaaagttatgataaagaaattgcctccctgggcaaaaagctgaataccatagaggatcatttcacgcgggaaaacacgcaggcgctggaaagagcgatagaagaaatcataagcgccgcccgatcaactgtcgccgatttggaagagggtgcccgtgccatggagcgggaaatggaagaacgccgggaaacggcggataaatttgaccgtgaaagggaagaaaaattactccacaacgagaagcagttcgagaaaattttttcggaagccattgatcgggcgggtatccgggcggacaaggccgaggaagcggcagtcgccaaactccgcgatcaggcgcaggaacggctaaccctcatcaaaaccagttttgaggaaaagattaaatccgttcaggaaaccatcaagataaaactcgccgagattcaggagcaggtcaaggtcaaccgcgaagaatggaaaaccgaaaccgccgccatcgagacccgccagaaaacatacagcgccgactggaaaaaagatatgcaggaacttaacctcttcgcgaaacaacagcaggacatctggaataaagatattgaggaacttaacctctttgtaaaacaacagcaggacaactggaaccgggatatcgaggtattaaacgtcctcgcccggcagcaaagagagcaatggaacaaggatatgcaggaattcactgtccgcgcggagcagcagacggaaggcctgggcgcggcgatacagaagcaaaaggaagaatga

SEQ ID NO: 8388 - protein, 286 aa, Unknown
  Obtained from environmental sample
  misc_feature (1)..(286): Xaa is any amino acid
MTGRVQENLNRIKDESSFVENVGKRIGDVKEKVESYDKEIASLGKKLNTIEDHFTRENTQALERAIEEIISAARSTVADLEEGARAMEREMEERRETADKFDREREEKLLHNEKQFEKIFSEAIDRAGIRADKAEEAAVAKLRDQAQERLTLIKTSFEEKIKSVQETIKIKLAEIQEQVKVNREEWKTETAAIETRQKTYSADWKKDMQELNLFAKQQQDIWNKDIEELNLFVKQQQDNWNRDIEVLNVLARQQREQWNKDMQEFTVRAEQQTEGLGAAIQKQKEE

SEQ ID NO: 8389 - DNA, 759 bp, Unknown
  Obtained from environmental sample
  misc_feature (1)..(759): n is a, c, g, or t
gtgaataaattatccaatatccttgttacagggggcgccgggtttatcggcgttaattttatacgctttctttttaaggaaggctgcttaaagcctgagtttacgggcagggtagttaatttagatgcccttacctacgcgggaaatatagcaagtttaaaagagattgacgccaaatttgggggcagccggtacttttttgaaaagggcgatatatgcgaccgtcctctggtagaagcaatttttaaaaaatacaatattgatacggtggtacattttgccgccgaaagccatgtggaccgttcaatcctggatcctgaaatatttattaagactaatgtattagggacccttaacctccttgatgcagcccggaacgcctggaaagactccagggatgttctattccaccatgtaagcaccgatgaagtgtacggttccctgggggagacagggcgttttaaggagaataccccttacgctccccgttccccctattcggccagtaaagccgcaagcgaccatctggcaatgtcgtattaccatacttttggactacctgttaccgtttcaaactgttccaataattacgggccctaccagtttccggagaaattaattccccttatgattcttaatatgcttgaaaggcaaccgcttccggtttacggggacggaaaaatatacgcgactggctttttgcggaaaatcattgcaacgccggtttggaaaatcaatgcaaaaggcatagcccggtga

SEQ ID NO: 8390 - protein, 252 aa, Unknown
  Obtained from environmental sample
  DOMAIN (7)...(241): Polysaccharide biosynthesis protein
  misc_feature (1)..(252): Xaa is any amino acid
MNKLSNILVTGGAGFIGVNFIRFLFKEGCLKPEFTGRVVNLDALTYAGNIASLKEIDAKFGGSRYFFEKGDICDRPLVEAIFKKYNIDTVVHFAAESHVDRSILDPEIFIKTNVLGTLNLLDAARNAWKDSRDVLFHHVSTDEVYGSLGETGRFKENTPYAPRSPYSASKAASDHLAMSYYHTFGLPVTVSNCSNNYGPYQFPEKLIPLMILNMLERQPLPVYGDGKIYATGFLRKIIATPVWKINAKGIAR

SEQ ID NO: 8391 - DNA, 516 bp, Unknown
  Obtained from environmental sample
  misc_feature (1)..(516): n is a, c, g, or t
atggacacgcccgaccggacaaggattgcggggcaaattgtaactggtctgggtttcttgtgcagcggtataatttttaaggacggcgtgaatgtccgaggcttaaatacggcggctactatatggtgtacggcggctatcggcattttagcaagctcgggatttatactgttcgcgttcgtggcaactgtattgttgattggcgcgaatgttattctaaggcctatttcaaacaaaatcagtcccatgtttgatgaaactggtaaatgttatcagataacggccgtctgcgcggatgataaaaaaaagcttatccgttccataattatagaacatatttcctcatcaaaattagttcttactgatttggagagcaagtatattgccgatgacaaggttcaaatcatagcaaaaatgcacgctttcggcaaacaccgggaagaaattgcggaaactttgattgacaaaatccgcgaagaagagcatgttagttccgttggttgggaaatattgtaa

SEQ ID NO: 8392 - protein, 171 aa, Unknown
  Obtained from environmental sample
  DOMAIN (2)...(81): MgtC family
  misc_feature (1)..(171): Xaa is any amino acid
MDTPDRTRIAGQIVTGLGFLCSGIIFKDGVNVRGLNTAATIWCTAAIGILASSGFILFAFVATVLLIGANVILRPISNKISPMFDETGKCYQITAVCADDKKKLIRSIIIEHISSSKLVLTDLESKYIADDKVQIIAKMHAFGKHREEIAETLIDKIREEEHVSSVGWEIL

SEQ ID NO: 8393 - DNA, 852 bp, Unknown
  Obtained from environmental sample
  misc_feature (1)..(852): n is a, c, g, or t
ttgtcgcagatagcgggcagcgtgagcgctgtaaccataacgccgaaggacggcaaatcaggcggggtaataaccatttattatgcgggaacggacggaaccaattacgaaaaaagcacaaccgtaccgtcggctgtcggcaagtacgcggtaacttttgatatagcgacggcggtaggctggaacgcggtaaatgacttgagcgcgggaacgctggtgattgccgaacaaactgccaactctcaaaccccgacagccgccgattttaccgtcaacggcctgtcgcagatagcgggcagtgtgaacgccgtaaccattacgccgaatcagggcaaatcaggcggggcgataactatttattatacgggaacggacggaaccaattacgaaaaaagcgcagccgtaccatcggctgtcggcaagtacgcggtaacttttgacatagcggcggcgttaggctggaaagcggtaaatgacttgagcgcgggaacgctggtgattgccgaacaaactgccaactttcaaaccccgaccgtcaccgattttactgtcaacggcctgtcgcagatagcaggcagtgttaccgctgtaaccataacgccgaaacaaggcaagtcaggcggggtgataaccatttattatgcgggaacagacggaaccaattacgaaaaaagcacaaccgtaccgtcggctgtcggcaagtacgcggtaacttttgacatagcggcggcgttaggctggaaagcggtaaacggcttgagcgcgggaatgctggtaattgccgaacaaaaccgtcaactctcaaaccccgaccgtcaccgaattttactgtcaacggcctgtcgcagatag

SEQ ID NO: 8394 - protein, 283 aa, Unknown
  Obtained from environmental sample
  misc_feature (1)..(283): Xaa is any amino acid
MSQIAGSVSAVTITPKDGKSGGVITIYYAGTDGTNYEKSTTVPSAVGKYAVTFDIATAVGWNAVNDLSAGTLVIAEQTANSQTPTAADFTVNGLSQIAGSVNAVTITPNQGKSGGAITIYYTGTDGTNYEKSAAVPSAVGKYAVTFDIAAALGWKAVNDLSAGTLVIAEQTANFQTPTVTDFTVNGLSQIAGSVTAVTITPKQGKSGGVITIYYAGTDGTNYEKSTTVPSAVGKYAVTFDIAAALGWKAVNGLSAGMLVIAEQNRQLSNPDRHRILLSTACRR

SEQ ID NO: 8395 - DNA, 624 bp, Unknown
  Obtained from environmental sample
  misc_feature (1)..(624): n is a, c, g, or t
atgggcagaagcaataacattagccgtgtggttcttctggggccgattcacgacaaacgtgaaaaaggcgtttttctgtcggattcccacttatttcatacgccggttgggaatatcacagtagacaaggatattaccgaagaacttgaatttgcaagtgaatatatggaaattaatgatattccccaccttggggaacactcaatagagattcttcttccttttgtaaaatattgcttcccgtacgcctcgattattccggttcttatggggcagccggaacaaaaatacataaaagaccttgcctcgacgcttaaaaacgtgattgcccccatacttgatgaaactttgctggtagtttcctgcaatctatcctgtaatgaggataaaacgattgcgcaaaatcaggcgcaggagtgccttaatttgatagtagggaaaaaagtatcttcccttacttctgccattctggacggcaggttgaatccctgcggaggcgcccttgcggcaagccttttggagagtggtcttgtggacggtaaaacctgttatgccgaagaaatgttcagtgccgccggcatggaccacaacacggttttttacagcgcggtttcttttgaatag

SEQ ID NO: 8396 - protein, 207 aa, Unknown
  Obtained from environmental sample
  DOMAIN (1)...(205): Protein of unknown function DUF52
  misc_feature (1)..(207): Xaa is any amino acid
MGRSNNISRVVLLGPIHDKREKGVFLSDSHLFHTPVGNITVDKDITEELEFASEYMEINDIPHLGEHSIEILLPFVKYCFPYASIIPVLMGQPEQKYIKDLASTLKNVIAPILDETLLVVSCNLSCNEDKTIAQNQAQECLNLIVGKKVSSLTSAILDGRLNPCGGALAASLLESGLVDGKTCYAEEMFSAAGMDHNTVFYSAVSFE

SEQ ID NO: 8397 - DNA, 747 bp, Unknown
  Obtained from environmental sample
  misc_feature (1)..(747): n is a, c, g, or t
atggcctaccggaaccttaggaacccaagtttcctgaccataacgggccgcactctggttacatcggtaatttctactattataacgattttgatagcccttcctggcggttttttcatggcccgcagcaaaaaccagaccgtgctgctcctgataataatcatcccgttctggaccaatttccttatccgcgttttcgcctggatgaacatccttgggaacaatggttttataaacgaatttcttatgcgctttaagctcatatccgagtacattccctttatgtacaaccagaaggcggtaaccctcgtactgatctacatgtaccttccttacgcgatacttcccctgttttctacaatcgacaaattcgatttttcgcttctggaagccgcaagggatcttggagccggcaaactcacttcgataatcctggtacttttgcctaatataaaaggcggcctttttaccgcagttctatttaccttcattcccatttttggcgcttacgctgtgcctcagcttgtgggcggcaaggattcctatatgctggggaatataattgcagatcaaatacttaaatccagaaactggcctttggcttcggcgatttccatggtgcttacggtagtaacaacggtgggcgtccttgtgatgatgaacatccagcgccgcgaagctttgcgcgccacagatacctcttcggctgcttcggaagaacgcgccgccgcaggagcaaaggcatga

SEQ ID NO: 8398 - protein, 248 aa, Unknown
  Obtained from environmental sample
  DOMAIN (15)...(232): Binding-protein-dependent transport system inner membrane component
  misc_feature (1)..(248): Xaa is any amino acid
MAYRNLRNPSFLTITGRTLVTSVISTIITILIALPGGFFMARSKNQTVLLLIIIIPFWTNFLIRVFAWMNILGNNGFINEFLMRFKLISEYIPFMYNQKAVTLVLIYMYLPYAILPLFSTIDKFDFSLLEAARDLGAGKLTSIILVLLPNIKGGLFTAVLFTFIPIFGAYAVPQLVGGKDSYMLGNIIADQILKSRNWPLASAISMVLTVVTTVGVLVMMNIQRREALRATDTSSAASEERAAAGAKA

SEQ ID NO: 8399 - DNA, 378 bp, Unknown
  Obtained from environmental sample
  misc_feature (1)..(378): n is a, c, g, or t
atgaaaataaccaaacaagaacgggatgaactccttgcaagaatagagcgtggtctggtgctaaacgaagcccagcttgagtcgacatcggttcgctacgaaaaactggaagcccgcgggctcgattacacaggcaaaacaacgatagccaagcaggccatcgagactggttcgcttttggatataacctggccaggtcgggacggcgaaccaaattcgacaatcggaatacctcagtcgattgagaaaaaagaaggtgagaatatcctggttctcaggaccagcgggaattcagaaagcgccgcaagggtgctaaaaattcccatcggaaagatcagccttttacggcgcatcaaacaatcaatttttggagagtaa

SEQ ID NO: 8400 - protein, 125 aa, Unknown
  Obtained from environmental sample
  misc_feature (1)..(125): Xaa is any amino acid
MKITKQERDELLARIERGLVLNEAQLESTSVRYEKLEARGLDYTGKTTIAKQAIETGSLLDITWPGRDGEPNSTIGIPQSIEKKEGENILVLRTSGNSESAARVLKIPIGKISLLRRIKQSIFGE

SEQ ID NO: 8401 - DNA, 720 bp, Unknown
  Obtained from environmental sample
  misc_feature (1)..(720): n is a, c, g, or t
ttggattttgcccagccaaaattaagcggcctaccggtttcatccagggcgggaacaggttccgtaatttcagtntgcggcatacaaaaacctgtcacaattcatgcttttttccttatcttctttttggtactatttattatgcaggtgatttcgccaaaaaacaaggttaatagtacaaacaactatgccggtatgaaggcactgatcatggggcttgggctccatggcggcggcctcgaatcggcccggtatctggcggaaaagggcgcaattgttaccgtaaccgatcttagggacgaaaccaccctaaagccaaccattgaaaagctaaaagacttccccatccgttacgtcttgggtagacacgagatcgaagacttcaggaattccgatttaatagtaaaaaatcccgcagtcacgccaaattcgccttatctacaggccgcaaaaaggatagaaacggatatttccctttttcttgccgcctgccaggccaggcttgtggcagtaacaggctccaagggcaagtcgagcgtttcatctgccattcactttgtgctgaacgagcagggacagaccccgcgcagaaaggcctggctagggggcaacatcgccatttcgcccctaagcttccttgacgagctgggcgaagaagatgacgtggtactggagctttccagctggcagttgggagatcttcgaggtcgcggcctttga

SEQ ID NO: 8402 - protein, 239 aa, Unknown
  Obtained from environmental sample
  misc_feature (1)..(239): Xaa is any amino acid
MDFAQPKLSGLPVSSRAGTGSVISVCGIQKPVTIHAFFLIFFLVLFIMQVISPKNKVNSTNNYAGMKALIMGLGLHGGGLESARYLAEKGAIVTVTDLRDETTLKPTIEKLKDFPIRYVLGRHEIEDFRNSDLIVKNPAVTPNSPYLQAAKRIETDISLFLAACQARLVAVTGSKGKSSVSSAIHFVLNEQGQTPRRKAWLGGNIAISPLSFLDELGEEDDVVLELSSWQLGDLRGRGL

SEQ ID NO: 8403 - DNA, 840 bp, Unknown
  Obtained from environmental sample
  misc_feature (1)..(840): n is a, c, g, or t
ttgtctttcttcttcaacgcgcacaacgacttcctggaagaggtcgcaaaataccgcgcggcccggcgcctgtgggctcgcatcatgaaggagcgcttcggagcgaagaaccccaaggcccagatgctgcgcttccacacccagacggccggctgcacgctgacagcccagcagcctgaaaacaacgtcatccgcgttacgctgcaggccctggctgccgtcctgggcggaactcagtcactgcacaccaacagcatggacgaggccctggccctgccaagcgagaaaagcgtggagatagcgctccgcacccagcaagtcatcgcctacgagagcggcgtgacagacaccatcgaccccctggccggcagctacgtcatcgaaaagctgaccgacgacatagaggccggtgcaatggactacatcaaaaaaatcgacgacatgggcggcatgttggtcgccatcgaaaagggcttcccgcaaaagcatattcaggacgccgcctacgaataccagaagtccgtcgagtccaaagacacggttgtcgtgggcgtcaaccagttccagaccaaggagtccggcgcggccggccgcaagctgctgcgcgtggatgcctccgtcgaggagcgccaggtcgggaagctcaaaaagctccgggagacccgcgacaacgtagcggtgaaagatcgcctcgaaagcattcgcaagggcgcgcgcgacgaaaacgtaaacctgatgccgctgattctcgacgcagtgcgcgtgtacgccaccgagggcgaaatctgcggcgtcctgcgcgaggagttcggcgagtacgtcgaaaacatcgtcctctag

SEQ ID NO: 8404 - protein, 279 aa, Unknown
  Obtained from environmental sample
  DOMAIN (1)...(273): Methylmalonyl-CoA mutase
  misc_feature (1)..(279): Xaa is any amino acid
MSFFFNAHNDFLEEVAKYRAARRLWARIMKERFGAKNPKAQMLRFHTQTAGCTLTAQQPENNVIRVTLQALAAVLGGTQSLHTNSMDEALALPSEKSVEIALRTQQVIAYESGVTDTIDPLAGSYVIEKLTDDIEAGAMDYIKKIDDMGGMLVAIEKGFPQKHIQDAAYEYQKSVESKDTVVVGVNQFQTKESGAAGRKLLRVDASVEERQVGKLKKLRETRDNVAVKDRLESIRKGARDENVNLMPLILDAVRVYATEGEICGVLREEFGEYVENIVL

SEQ ID NO: 8405 - DNA, 939 bp, Unknown
  Obtained from environmental sample
  misc_feature (1)..(939): n is a, c, g, or t
ttgctcgagctttcttccatgcgcacttttgtaattaacggcaaggacagggatgaactgatcgaaagggcggaactcgcgagggacgcgtttaatgccgcgcgaatagcggtaaatttcaggccgaggggagaaaggccggaattgcggttattcccgaacagggaagccgccgcatatctggcgattccggccgcgcagatggcggaaactctgtatatacttaacgagggcgttgccgccgcaaggctggaaatcgagggcaggccgcttgatgtgcgcgtaacaggggaagactttgccgcaggcgatataacaggccgccttgagcggattcccctgaaaacgccgcagggtaaaaccgtgtatcttggttcgctcggcagaatagaacgcagggaagcggaagcgtctctcgcgcggctggaccgcagcgacgttatttacgcggatattgcgccgaacaaaaaaatgtccgtaacggcaaacaatacagccgcgcggtttccctggtttaagggagcggacagctctgtttttgtccgctaccgcgattcccttatcctttatgtttttctggtgataatccttttgtatatggtaatcggcgcgcaatttgaatctttccttcttccgttaatactcatgctgagcattcccttttctctggcgggagccgggccattgcttttactcacaggttccatgatagattcgggcgcggtcttcgggcttgccgcgctgtttggccttgttgtgaataacagcctcattctttttgaggtcagcagcgagaaaatcagcgcgggtctttccgtgaaagaggcggtttacagcggagccgcagaacgcctgcgggcgataataattacaacggcgactacggttttcgcccttttacctttggtgctaagccctaatgggctcggccgaatctga

SEQ ID NO: 8406 - protein, 312 aa, Unknown
  Obtained from environmental sample
  misc_feature (1)..(312): Xaa is any amino acid
MLELSSMRTFVINGKDRDELIERAELARDAFNAARIAVNFRPRGERPELRLFPNREAAAYLAIPAAQMAETLYILNEGVAAARLEIEGRPLDVRVTGEDFAAGDITGRLERIPLKTPQGKTVYLGSLGRIERREAEASLARLDRSDVIYADIAPNKKMSVTANNTAARFPWFKGADSSVFVRYRDSLILYVFLVIILLYMVIGAQFESFLLPLILMLSIPFSLAGAGPLLLLTGSMIDSGAVFGLAALFGLVVNNSLILFEVSSEKISAGLSVKEAVYSGAAERLRAIIITTATTVFALLPLVLSPNGLGRI

SEQ ID NO: 8407 - DNA, 756 bp, Unknown
  Obtained from environmental sample
  misc_feature (1)..(756): n is a, c, g, or t
atgccaaaatggaatacagaaaataaggccgctagggactacctaacaggcgctgcctgttactggattaaggaatgtgatattgacgcctggcgccttgatgtttccgacgaagtatcgtttgattttttacatgcgttttcttcagcagtcaggcaaataaaagatgatttttatataattggcgaaatgtggcatgacggcacacagtggattaacgccaattgttttgattccgtaatgaattatccgctgggttttgttatacaggattattttttgaaagacaaaatttcgcttgcggaatttaactggcgtttgtttctttcaatttcacgatacagtaaaatgcataccgaaggggcattcaatttactggattcacatgatacagcccgtattttaacagtggcaaacggaaataaacaggcggttcgcaacgcgttaaccatgcagctaatgcttccaggttctccatgtatatactatggtactgaagttggtatggaggggggacataaaaatgacgacaaccgccgtccgatggtatgggatgaaaaaaaacaggataaggatttatttaagtatatacagtatctaatagatttcaggaaacggaatattaatttaataaataaatgcagcatagattttacgatttctgaagatgggaacggtaaatggatatttaagcatgaaaataaatttattacattaaagtatataaagaaaatattagaaatagaaacgaattaa

SEQ ID NO: 8408 - protein, 251 aa, Unknown
  Obtained from environmental sample
  DOMAIN (1)...(204): Alpha amylase, catalytic domain
  misc_feature (1)..(251): Xaa is any amino acid
MPKWNTENKAARDYLTGAACYWIKECDIDAWRLDVSDEVSFDFLHAFSSAVRQIKDDFYIIGEMWHDGTQWINANCFDSVMNYPLGFVIQDYFLKDKISLAEFNWRLFLSISRYSKMHTEGAFNLLDSHDTARILTVANGNKQAVRNALTMQLMLPGSPCIYYGTEVGMEGGHKNDDNRRPMVWDEKKQDKDLFKYIQYLIDFRKRNINLINKCSIDFTISEDGNGKWIFKHENKFITLKYIKKILEIETN

SEQ ID NO: 8409 - DNA, 801 bp, Unknown
  Obtained from environmental sample
  misc_feature (1)..(801): n is a, c, g, or t
atgcttacttccatagatactgcaaatgcgcttgcagacagcttgctttctgggtacagcgagataaataccgaacttgttgatataaataaattgagaagcgagcgtatgaaaattaaatttacaaaaatgcaaggttgcggcaacgattatatttacataaactgttttgatttaaacataaattcaccggagtcgctctcggttcttttatccgacaggcattacggcataggcggcgatggcgtggttttgattatgcgctccgatgttgccgatgcaaaaatgaggatgttcaacctagatggtagcgaaggtaaaatgtgcggaaacgcaatccgctgtgttgcgaaatatttatacgacaataacattatcagaaaattgcaaatgagcatagaaacgttaagcggcataaaaaaactttatttaatcactcaaaatgggtttgtttcgtccgttaaagttgatatggggcatgccgtgctggaaccggaaaagataccggttaagttttctggtgaaaacgcggtggcaaaacaagtgaccattggcggcgaggcatatactatcacttgtgtttctatgggtaatccccacgcggttgtgttttgcgaggacgttgagaatttacgtgtttccgagataggtcctttgtttgaaaaagaccctttgttcccagacagagtgaataccgaattcgtagaggttatggatagaaatcatttgaaaatgcgagtttgggagcgtggtagcggtgaaacgctcgcttgcgaaacggagcctgcgcatcggtggtag

SEQ ID NO: 8410 - protein, 266 aa, Unknown
  Obtained from environmental sample
  DOMAIN (192)...(266): Diaminopimelate epimerase
  misc_feature (1)..(266): Xaa is any amino acid
MLTSIDTANALADSLLSGYSEINTELVDINKLRSERMKIKFTKMQGCGNDYIYINCFDLNINSPESLSVLLSDRHYGIGGDGVVLIMRSDVADAKMRMFNLDGSEGKMCGNAIRCVAKYLYDNNIIRKLQMSIETLSGIKKLYLITQNGFVSSVKVDMGHAVLEPEKIPVKFSGENAVAKQVTIGGEAYTITCVSMGNPHAVVFCEDVENLRVSEIGPLFEKDPLFPDRVNTEFVEVMDRNHLKMRVWERGSGETLACETEPAHRW

SEQ ID NO: 8411 - DNA, 519 bp, Unknown
  Obtained from environmental sample
  misc_feature (1)..(519): n is a, c, g, or t
atggagcgtttttcgttttttttcgctattttgggttcttttctcgtttttgcctgttcaagcaaaactagtccgctagaagaagaacttttctcatcttcatctgaggtctcatcctcatcagaagtgcttgctttgtccagcagctttttatcaagcagttctatatcaagcggttctttatacagtagttccgttgcggcttcaagttcaagttctgtaccgccgagcagttcaagcgtagaaaattccagcagttcgggtgtgacagccagtgatattattcatatttatctggcttttgggcagtcaaatatggaagggcaatgttcgcagagtaattcggtagtttaccaagacgtactcccagactcatacaaagaaaacgtagattcacgttttcaagttatgacagcagttgccggagattataaacttgcaaaaaatggcagccaaaaacgcgaacaaggcaaatggtacacagcggtccgccgctcggccattctgaccatctgttaa

SEQ ID NO: 8412 - protein, 172 aa, Unknown
  Obtained from environmental sample
  SIGNAL (1)...(18)
  misc_feature (1)..(172): Xaa is any amino acid
MERFSFFFAILGSFLVFACSSKTSPLEEELFSSSSEVSSSSEVLALSSSFLSSSSISSGSLYSSSVAASSSSSVPPSSSSVENSSSSGVTASDIIHIYLAFGQSNMEGQCSQSNSVVYQDVLPDSYKENVDSRFQVMTAVAGDYKLAKNGSQKREQGKWYTAVRRSAILTIC

SEQ ID NO: 8413 - DNA, 342 bp, Unknown
  Obtained from environmental sample
  misc_feature (1)..(342): n is a, c, g, or t
gtggatgtcggggcaggcaaagaaaaggtgaacgaaaggatcaagaattcgatagaagaagaattcgtttcatccgttacaggttattccagtgttgagacggatggttccgctgtaaacattgagaacggcaaggttaataatgtgctgttacccttgtggattttaaacacaaagtacaacgacgagaattatcaatttatcatgaacggccagacgggcaagttcacaggcaaactgccggttgacaaaagaaaagccatgaaattcgggcttatgttcattgcgatttttggcacggtctttaccgctgttattcaattgcttcgcgtttttttataa

SEQ ID NO: 8414 - protein, 113 aa, Unknown
  Obtained from environmental sample
  misc_feature (1)..(113): Xaa is any amino acid
MDVGAGKEKVNERIKNSIEEEFVSSVTGYSSVETDGSAVNIENGKVNNVLLPLWILNTKYNDENYQFIMNGQTGKFTGKLPVDKRKAMKFGLMFIAIFGTVFTAVIQLLRVFL

SEQ ID NO: 8415 - DNA, 933 bp, Unknown
  Obtained from environmental sample
  misc_feature (1)..(933): n is a, c, g, or t
atgaaacgggcaaatcttggtgctatgacgaccagcccgttcaattgcgatagatacggcagattatacgattgggcgacggcgagattcgcgtgtcctctaggatggcacctgccgacccgccaggaatggacaacgctgaccgatgtcgataaaaagaaaggtgccggcaaatccggcattatgctgaaagctaaaaccggttgggatgaaatattctgtgacaaatccgataaccgctgttcaaacacaaccggagttgacagcccgtacaaaaacggcggtggcgccgacaactacggattttcggcaatgcccggcggcttccgccaccccaacgatgatagattcaatgccggatggatttggggagaaacaccgggcaaattcgccggcatcggcaacagcgctacgtggtggacggacacggagcgaaacgacgacgacacctacaccataagcctatacaacttcgactcgcgcgcgtttgacggcgccaacaacagaaacagcggctactcggtgcgttgcctgctggacagagacaatgcgacggaggaagaggctgaagaaacaacggaaaccgcggaagaaatagcaaggaagccgtcgaacgcaaacataatcaaattcatccctgcgggttatcgcatcttttccgaagacggcgaagatgggataatgcgcggcgatttgaacggggacggcgcggacgattatgtcctcatcatcaaggcgaccgacaaaaagatgtttgtgcgccgcgatgaagacgatccgaagagtaaaatagtagatcgtaatcgtcgcggtatcatgattttttttaaagacggcgatgaatacaagcttatattggagaaccgcaaatgtttcgagtcggaaaacgaggacggcggtgcctattttccgccggatctcggtgtgaaataa

SEQ ID NO: 8416 - protein, 310 aa, Unknown
  Obtained from environmental sample
  misc_feature (1)..(310): Xaa is any amino acid
MKRANLGAMTTSPFNCDRYGRLYDWATARFACPLGWHLPTRQEWTTLTDVDKKKGAGKSGIMLKAKTGWDEIFCDKSDNRCSNTTGVDSPYKNGGGADNYGFSAMPGGFRHPNDDRFNAGWIWGETPGKFAGIGNSATWWTDTERNDDDTYTISLYNFDSRAFDGANNRNSGYSVRCLLDRDNATEEEAEETTETAEEIARKPSNANIIKFIPAGYRIFSEDGEDGIMRGDLNGDGADDYVLIIKATDKKMFVRRDEDDPKSKIVDRNRRGIMIFFKDGDEYKLILENRKCFESENEDGGAYFPPDLGVK

SEQ ID NO: 8417 - DNA, 633 bp, Unknown
  Obtained from environmental sample
  misc_feature (1)..(633): n is a, c, g, or t
atgatcctgctctccggctggaaacgcaagtacccgttatacgatccgttctgcggttccggcaccatcctcgccgaggctctgatgtacgcgtgggacatggcgcccggactggcgagagcaaactcttcgccgggtttcgccattgacaggctgcttatcgccgacggtaaaatcgaagaaacaatccgggccgaatttcgcgccaggatcaattttgaacggcttatccggcttgccggaagcgacggggaccctgaatgttcggcgcttgccctgtcaaacctgaaaaaggttcacgcgttagctggaaacaactgcccccagcttccgcttgttacgacaacgcccatgaacatggcgaggtccccttttgaggccgaggacgaggatgagccgcggggctttatcattaccaacccgccctatggcaaacggctgggggacatagaggcctcgctcgcgatttacagggagatggcggttttggcggagaactttcccggctggaaactcgccgtgataagcgatcatcccggctttgaatcttttttcggcaggaaggcggattcatgccgcgagattaccggcggggcagttcccgcgtacttttaccagtatgaaaaactataa

SEQ ID NO: 8418 - protein, 210 aa, Unknown
  Obtained from environmental sample
  DOMAIN (1)...(206): Putative RNA methylase family UPF0020
  misc_feature (1)..(210): Xaa is any amino acid
MILLSGWKRKYPLYDPFCGSGTILAEALMYAWDMAPGLARANSSPGFAIDRLLIADGKIEETIRAEFRARINFERLIRLAGSDGDPECSALALSNLKKVHALAGNNCPQLPLVTTTPMNMARSPFEAEDEDEPRGFIITNPPYGKRLGDIEASLAIYREMAVLAENFPGWKLAVISDHPGFESFFGRKADSCREITGGAVPAYFYQYEKL

SEQ ID NO: 8419 - DNA, 549 bp, Unknown
  Obtained from environmental sample
  misc_feature (1)..(549): n is a, c, g, or t
gtgttaatgcgttttatcgcgctctgcccctttatcggcatgagcaccgacgaggacaaatcaatcgggatgggcctggccgtcgtgtttgtgacggttatagccaccgcggtcacctggccgatatacaggtttatccttgaaccgctggggctggtgttccttcagttgctggtcttcatcctggtaatcgcctcgctggtgcagcttgttgagtattttcttaaaaaatccgtgcccggcctgtacaagggcatgggtatctacctcgcgctgattacgactaactgcgccattctcgccgttacccttgacgtgataaacaacaactgcgtttttaccggcaagccctatactttcattgaatccattgtttacgccatcggcgtcgccctgggtttcctgctttccatgctgttattggcgggtatccgcaaccggctcaggacaagccctgttcccctgtttctaaaagggacgccggtgcttttcgccgccacggcgctgctttcaatcgcctttatgggctttaaggggctggtgcagtga

SEQ ID NO: 8420 - protein, 182 aa, Unknown
  Obtained from environmental sample
  DOMAIN (1)...(182): Rnf-Nqr subunit, membrane protein
  misc_feature (1)..(182): Xaa is any amino acid
MLMRFIALCPFIGMSTDEDKSIGMGLAVVFVTVIATAVTWPIYRFILEPLGLVFLQLLVFILVIASLVQLVEYFLKKSVPGLYKGMGIYLALITTNCAILAVTLDVINNNCVFTGKPYTFIESIVYAIGVALGFLLSMLLLAGIRNRLRTSPVPLFLKGTPVLFAATALLSIAFMGFKGLVQ

SEQ ID NO: 8421 - DNA, 492 bp, Unknown
  Obtained from environmental sample
  misc_feature (1)..(492): n is a, c, g, or t
atgaagcttttgctccatgcctgctgcgctccgtgttcaatccagtgtgttgaatcccttgctgaagagggcattatgcctgatcttttctggtataatccaaacatccatccctataccgaataccgctcgcggcgggacgcgctttgctattattccctgcaaaaaaatctccagttatataccgaagacgaatacggccttcgttcttttgtcaaagctgtctcttcctttgagcaaagcgatgatcgctgcctttactgttaccgtataagactggaaaaaactgcccgcatggcagcggaaagatccttcgacgctttctccacaaccctccttataagcccatatcaaaaccatgacgctattaaagaaattggagagcaggcagcgaataatttttcagtaaaatttctttatcgggattttcgcttgcgctttaaagcagggcaaaaacaggccagggattccggttactatatgcagaaatag

SEQ ID NO: 8422 - protein, 163 aa, Unknown
  Obtained from environmental sample
  SIGNAL (1)...(21)
  DOMAIN (3)...(160): Uncharacterized BCR, COG1636
  misc_feature (1)..(163): Xaa is any amino acid
MKLLLHACCAPCSIQCVESLAEEGIMPDLFWYNPNIHPYTEYRSRRDALCYYSLQKNLQLYTEDEYGLRSFVKAVSSFEQSDDRCLYCYRIRLEKTARMAAERSFDAFSTTLLISPYQNHDAIKEIGEQAANNFSVKFLYRDFRLRFKAGQKQARDSGYYMQK

SEQ ID NO: 8423 - DNA, 384 bp, Unknown
  Obtained from environmental sample
  misc_feature (1)..(384): n is a, c, g, or t
atgctcatgtaccatgccagggtagaagaggaattctcggcagcacactttntgagccattacaatggaaaatgcgagaagctccacgggcacaattaccgtgtccgcgtctggatccgcggcgaaaaactaaatgagggcggaatgcttattgatttttcactattaaaaaaaatgttaagggaggttttgactgttctcgatcattcaaatttaaacgatatggaatttttttttaacgatccaagcgccgagcgtatcgcaaaattcatttttgaggaaattcaaaagaaactgccggatgaaggaacaggcaagtccattttgtgggcggttgatgtttatgaaaatacccgcagcatggcaaggtactcgctccaatga

SEQ ID NO: 8424 - protein, 127 aa, Unknown
  Obtained from environmental sample
  DOMAIN (3)...(127): 6-pyruvoyl tetrahydropterin synthase
  misc_feature (1)..(127): Xaa is any amino acid
MLMYHARVEEEFSAAHFXSHYNGKCEKLHGHNYRVRVWIRGEKLNEGGMLIDFSLLKKMLREVLTVLDHSNLNDMEFFFNDPSAERIAKFIFEEIQKKLPDEGTGKSILWAVDVYENTRSMARYSLQ

SEQ ID NO: 8425 - DNA, 795 bp, Unknown
  Obtained from environmental sample
  misc_feature (1)..(795): n is a, c, g, or t
atgaaaaaactgttatacctttttttattttctatgtttacatgccccgttttcagcgcgtctctggaagagcttgtcgatcaagagatggctgcttcgttaaggaccgcgccggaaccggtcaccgaactgcaaattaaaaaccccaatccccggctcatgcccaaacatgaggaattgcgacgtcttgtccgggaaacccttcgcggactggaacccaatatccttgtggagactctttccctataccagcgcccgcagtcttcacggcaaaccgcagatacatcaggctggagccgtgatgaacagaccggtatatttaaccaggtgactgctttaagcaccctggccggaatccaatactattccgaaagccgtaaagccatgcgtgttttttacgaatcctcaacggttatagatgatcccgccaaaaaaaaacctcaacctgatccgtcatttaccgtttaccccgactcgctgtccttatacgcccggcaaaaggaccttacctttggagacaatatttaccgttttgaataccacactgacgccgacatcattcttttttcgcaggaaaatctcagctccatgaatttgggtattatccccgcgataggcaaaaacaaattccgcacggttatggcggtaattgacgctggggattcgcttttgatttacgcggcggcaatggcgaaaaccgcttccgtccccggaatgggcgatcgcataggctcctcgtttaccaatcgcgtaaaagccatactcaagtggtttgtggggcgcgttgaaatataa

SEQ ID NO: 8426 - protein, 264 aa, Unknown
  Obtained from environmental sample
  SIGNAL (1)...(19)
  misc_feature (1)..(264): Xaa is any amino acid
MKKLLYLFLFSMFTCPVFSASLEELVDQEMAASLRTAPEPVTELQIKNPNPRLMPKHEELRRLVRETLRGLEPNILVETLSLYQRPQSSRQTADTSGWSRDEQTGIFNQVTALSTLAGIQYYSESRKAMRVFYESSTVIDDPAKKKPQPDPSFTVYPDSLSLYARQKDLTFGDNIYRFEYHTDADIILFSQENLSSMNLGIIPAIGKNKFRTVMAVIDAGDSLLIYAAAMAKTASVPGMGDRIGSSFTNRVKAILKWFVGRVEI

SEQ ID NO: 8427 - DNA, 900 bp, Unknown
  Obtained from environmental sample
  misc_feature (1)..(900): n is a, c, g, or t
ttgataaatcatatcaaacagttaatttctgtagatgcaaaaaaattggagtatattattgccgctcaaatagcgggcggtcatgtcattttggcggactcgcacggggtgggtaaaacttctctcgcgcgggcgttggcgcagtctatcaagtggcgccctgaggatttagcggctaaaactgccgtgactaaaaccggcgctaaaaataccgccgtcaaaatggaagggttcagccgtatccagtgtaccgtcgatcttcttcctcaggatattcttgggtttaaccgatttatcggtcattcgggagagatgatttttaacaagggtcctgtattcgcgcattttgtgttatgcgacgagattaatctgcttacaccgaaaacgcagggaagtttttttcaagttatggaagaacagagcgtgactatcgaggggaaattgtatcaattgacagaccctttctttataattgcaacaatgaatttaaagggcgttcatttgttcccgctgcccacgcctcagcttgatcgttttatgattcgcctctctctcggctatccaagcgaggaagacgaaacggaaattataaacaagcacggaaaaattgacgcgtgggataagtttacaagcgtcatagacagcgcggatttaatccgctggaaaaaaatggtggacactgtgcagatgcaccccgacgttacttcctaccttgtaaattgcgtccgtcaaaccagagttcaccccgacattgagactccggcgagtccgcgcgcgggtgtacgtatttcgcggctggcgcgttctctcgctctctgccgcggtatggactatgttccggtcgatatttatcaagaaatttttatacattcaatggctcacaggataattaccccgtga

SEQ ID NO: 8428 - protein, 299 aa, Unknown
  Obtained from environmental sample
  DOMAIN (28)...(234): ATPase family associated with various cellular activities (AAA)
  misc_feature (1)..(299): Xaa is any amino acid
MINHIKQLISVDAKKLEYIIAAQIAGGHVILADSHGVGKTSLARALAQSIKWRPEDLAAKTAVTKTGAKNTAVKMEGFSRIQCTVDLLPQDILGFNRFIGHSGEMIFNKGPVFAHFVLCDEINLLTPKTQGSFFQVMEEQSVTIEGKLYQLTDPFFIIATMNLKGVHLFPLPTPQLDRFMIRLSLGYPSEEDETEIINKHGKIDAWDKFTSVIDSADLIRWKKMVDTVQMHPDVTSYLVNCVRQTRVHPDIETPASPRAGVRISRLARSLALCRGMDYVPVDIYQEIFIHSMAHRIITP

SEQ ID NO: 8429 - DNA, 927 bp, Unknown
  Obtained from environmental sample
  misc_feature (1)..(927): n is a, c, g, or t
ttgcaaaacctaaagcgcatttccattgacagcgataaactgaccgcactgccggagccgttctgtaaattaaaaaacctccaagagcttcgcctggatacttttgtcttgaaagcgctgcctgccgctttcggcaatctcacctcgttgaaatacattgatattttttcaggctcgttgatcgctcttcctgagagctttggcgacctaaagaaactgataaaccttaccatcgatgcccataacgttaaaaagctcccggattcgtttagaaaactctcttacataaaaaacccggaaatcctgataggccaaagtgaaccggtattgccttggaagaaggttaaagcaaaaaagagcagcacagcaagctttgaagagttttcaaccatgagctggcagtatcgtagaaaactttttgaaacatactcaataaaacaattggaaaccctgctttgttcagcgccgcaggattttacacctacaagagaagataaagaacttttcaaggatattatgagtgaaaggcgctacaggctaaaaagcaaattcaaatggactgaggaaaacaaaaagcgcattgcaaaagtaagcaacgaatttcttaaagcatgggaggatggtattgccaaggcaaaattgattttcgaggcgctatacaaaaaagaaaagaacaaaaatttcttccaggataaatatcatatcgaaattatcctgtatccggaaattctattttcagacgatgacgaaagaagtgattggaaactgtacaatgctatcaccagatatctttataatgaaagtgaattgaatatgcgcatctgctataacccggtaaccaaaaacgtggacagtttcgggaaagatattcatatcaagaaagaatcgagctggaatatcgaaggctttggcgatattgaactttga

SEQ ID NO: 8430 - protein, 308 aa, Unknown
  Obtained from environmental sample
  misc_feature (1)..(308): Xaa is any amino acid
MQNLKRISIDSDKLTALPEPFCKLKNLQELRLDTFVLKALPAAFGNLTSLKYIDIFSGSLIALPESFGDLKKLINLTIDAHNVKKLPDSFRKLSYIKNPEILIGQSEPVLPWKKVKAKKSSTASFEEFSTMSWQYRRKLFETYSIKQLETLLCSAPQDFTPTREDKELFKDIMSERRYRLKSKFKWTEENKKRIAKVSNEFLKAWEDGIAKAKLIFEALYKKEKNKNFFQDKYHIEIILYPEILFSDDDERSDWKLYNAITRYLYNESELNMRICYNPVTKNVDSFGKDIHIKKESSWNIEGFGDIEL

SEQ ID NO: 8431 - DNA, 846 bp, Unknown
  Obtained from environmental sample
  misc_feature (1)..(846): n is a, c, g, or t
gtgggtactcaacgggcaggggcgggtacattggtaaacggcgacatggaaccggcgcagggatttccggcgctaccgggagtcagaccctccgctcctccggccgcntacgggggcaggctttacctgtgcggcgaggatggaagagtctataccattgacacaaacggcgatcagggcgcatgggaatcttcattcttgacggctctccgttctccgccttcgttcctttcggttcaggcaaaacgcggcgggcgcgattacgcggcagtttatcccaagagctttttcggcgagatttggctccttgacgcggaaggcaaggctttacccaactggcccgcgtcactgccagacgcgctgccaggcggcggcgaagaggaaaatgtgagcggcagttccggtatcggtttcggttcgccgctgttatttgtccgcgacaaccgcgtacatacggcctttgttacccaggcgggagagttcctggtttttgatgaaaacgccgctgtcgttccgcccttccccctcatacttgacggtgttttttaccagcagccgatttttgacggtgattttttctggctgatttcatctaacgggacgctgtttcagataagccccgcgggtgaaattttatatcaagtcattcccggcttctcggtaatggaagaaggatatataacggcttttgacagcgatggcgataaagttcccgaaatcttcatctcaggcgaggggaatgccctgcacggttattcccgcaatttccgttcactggaaggtttccccctgccggtatggggaaagccccctgtttgtcgattccagcggcaacgcgaaagctga

SEQ ID NO: 8432 - protein, 281 aa, Unknown
  Obtained from environmental sample
  misc_feature (1)..(281): Xaa is any amino acid
MGTQRAGAGTLVNGDMEPAQGFPALPGVRPSAPPAAYGGRLYLCGEDGRVYTIDTNGDQGAWESSFLTALRSPPSFLSVQAKRGGRDYAAVYPKSFFGEIWLLDAEGKALPNWPASLPDALPGGGEEENVSGSSGIGFGSPLLFVRDNRVHTAFVTQAGEFLVFDENAAVVPPFPLILDGVFYQQPIFDGDFFWLISSNGTLFQISPAGEILYQVIPGFSVMEEGYITAFDSDGDKVPEIFISGEGNALHGYSRNFRSLEGFPLPVWGKPPVCRFQRQRES

SEQ ID NO: 8433 - DNA, 879 bp, Unknown
  Obtained from environmental sample
  misc_feature (1)..(879): n is a, c, g, or t
ttggggtttacaaaggtgggcttcgcaggctgcgggcctctggacgaatgtagggggcgggtgggtgattggttttcaagcggcatgcggggagcgctggactacctttcgcccgaaatgacctttggtcacaccaaagtgtttcccgaagccaagacggccctagtggtctttttcccttatgcccgtcctaacgcaattcctggggatgcgccaggcagcctgaaactgagccgctacctctggggagccgactaccacagggtcttgaaaaaacgcctgacggaactgctggggcgcgtccagagcgttctcccaagcgcaaacggtcgcgtctgcgttgacactgcgcccgtcatggaacgcgccttggccgtgcgcgcgggcctcggctggcaggggaaaaacacgctcttgatagccggtgagcagggcagttggggctttctgggggtgttgctcttggatgtggagatggagccagactcgccattcactggggataggtgcggcacctgcatgcgctgcgtggattcctgtcccacaaaggcgcttgcccccttccgcctggactgctgccgctgcctctccacatggaacatcgagcgcgaggggccgcctgaggacgtggccgaggccatcgccaagacgggctgggtggctggctgcgacatctgccaagaggtgtgcccctggaacggcgcccctgtctggggtgaccccgccctttggggcggcaactccccgctccacaccggagccgcctctgatctccgcgtaacgccaagccgctggatgaaactcaccgcccgcaccgcactgaggcgtgtcaggcaccgccactgggaagcgacgctaaagatagccaccaagaaatag

SEQ ID NO: 8434 - protein, 292 aa, Unknown
  Obtained from environmental sample
  DOMAIN (163)...(186): 4Fe-4S binding domain
  misc_feature (1)..(292): Xaa is any amino acid
MGFTKVGFAGCGPLDECRGRVGDWFSSGMRGALDYLSPEMTFGHTKVFPEAKTALVVFFPYARPNAIPGDAPGSLKLSRYLWGADYHRVLKKRLTELLGRVQSVLPSANGRVCVDTAPVMERALAVRAGLGWQGKNTLLIAGEQGSWGFLGVLLLDVEMEPDSPFTGDRCGTCMRCVDSCPTKALAPFRLDCCRCLSTWNIEREGPPEDVAEAIAKTGWVAGCDICQEVCPWNGAPVWGDPALWGGNSPLHTGAASDLRVTPSRWMKLTARTALRRVRHRHWEATLKIATKK

SEQ ID NO: 8435 - DNA, 618 bp, Unknown
  Obtained from environmental sample
  misc_feature (1)..(618): n is a, c, g, or t
ttggtggctatctttagcgtcgcttcccagtggcggtgcctgacacgcctcagtgcggtgcgggcggtgagtttcatccagcggcttggcgttacgcggagatcagaggcggctccggtgtggagcggggagttgccgccccaaagggcggggtcaccccagacaggggcgccgttccaggggcacacctcttggcagatgtcgcagccagccacccagcccgtcttggcgatggcctcggccacgtcctcaggcggcccctcgcgctcgatgttccatgtggagaggcagcggcagcagtccaggcggaagggggcaagcgcctttgtgggacaggaatccacgcagcgcatgcaggtgccgcacctatccccagtgaatggcgagtctggctccatctccacatccaagagcaacacccccagaaagccccaactgccctgctcaccggctatcaagagcgtgtttttcccctgccagccgaggcccgcgcgcacggccaaggcgcgttccatgacgggcgcagtgtcaacgcagacgcgaccgtttgcgcttgggagaacgctctggacgcgccccagcagttccgtcaggcgttttttcaagaccctgtggtag

SEQ ID NO: 8436 - protein, 205 aa, Unknown
  Obtained from environmental sample
  misc_feature (1)..(205): Xaa is any amino acid
MVAIFSVASQWRCLTRLSAVRAVSFIQRLGVTRRSEAAPVWSGELPPQRAGSPQTGAPFQGHTSWQMSQPATQPVLAMASATSSGGPSRSMFHVERQRQQSRRKGASAFVGQESTQRMQVPHLSPVNGESGSISTSKSNTPRKPQLPCSPAIKSVFFPCQPRPARTAKARSMTGAVSTQTRPFALGRTLWTRPSSSVRRFFKTLW

SEQ ID NO: 8437 - DNA, 681 bp, Unknown
  Obtained from environmental sample
  misc_feature (1)..(681): n is a, c, g, or t
gtggcggtgcctgacacgcctcagtgcggtgcgggcggtgagtttcatccagcggcttggcgttacgcggagatcagaggcggctccggtgtggagcggggagttgccgccccaaagggcggggtcaccccagacaggggcgccgttccaggggcacacctcttggcagatgtcgcagccagccacccagcccgtcttggcgatggcctcggccacgtcctcaggcggcccctcgcgctcgatgttccatgtggagaggcagcggcagcagtccaggcggaagggggcaagcgcctttgtgggacaggaatccacgcagcgcatgcaggtgccgcacctatccccagtgaatggcgagtctggctccatctccacatccaagagcaacacccccagaaagccccaactgccctgctcaccggctatcaagagcgtgtttttcccctgccagccgaggcccgcgcgcacggccaaggcgcgttccatgacgggcgcagtgtcaacgcagacgcgaccgtttgcgcttgggagaacgctctggacgcgccccagcagttccgtcaggcgttttttcaagaccctgtggtagtcggctccccagaggtagcggctcagtttcaggctgcctggcgcatccccaggaattgcgttaggacgggcataagggaaaaagaccactag

SEQ ID NO: 8438 - protein, 226 aa, Unknown
  Obtained from environmental sample
  misc_feature (1)..(226): Xaa is any amino acid
MAVPDTPQCGAGGEFHPAAWRYAEIRGGSGVERGVAAPKGGVTPDRGAVPGAHLLADVAASHPARLGDGLGHVLRRPLALDVPCGEAAAAVQAEGGKRLCGTGIHAAHAGAAPIPSEWRVWLHLHIQEQHPQKAPTALLTGYQERVFPLPAEARAHGQGAFHDGRSVNADATVCAWENALDAPQQFRQAFFQDPVVVGSPEVAAQFQAAWRIPRNCVRTGIREKDH

SEQ ID NO: 8439 - DNA, 633 bp, Unknown
  Obtained from environmental sample
  misc_feature (1)..(633): n is a, c, g, or t
atgattgccgagctttttgacatggacagcactctttatactcatgacgagtacgcaaaaacccagatcgacctgcccataaaacgccttgcggaaaaaagcggaaaaacatttgaacagatgaatgaagaagttacacagtaccggaaaaactgggcggaaactcataacggacaggctgtcagcctttcaaatacttttttggcgttcggcgtttctatcgaagaaaatatcagttggagagatgaattgctacggccggaagactatcttaaacctgacaatcaacttcgctgtgttcttcaggtattggcttcccgtttcagccttgcggttgtcaccaataacacggtatcaattacggtacgcacactctctgttttgggaatagacgacataataaaaaacattgtaggtcttgataccgtaaaagcttcaaagcccgataaaattcattttttaaaagcggctgaactttgcggaacatccgcagaacaatgtatttccataggagatcgatacgatatagatattgcccttccgttggaaatgggaatgggaggaattcttgtagataatgtcgaggacatatacaaactgccggatctgttcgcttccggcaacgccgtataa

SEQ ID NO: 8440 - protein, 210 aa, Unknown
  Obtained from environmental sample
  DOMAIN (1)...(194): haloacid dehalogenase-like hydrolase
  misc_feature (1)..(210): Xaa is any amino acid
MIAELFDMDSTLYTHDEYAKTQIDLPIKRLAEKSGKTFEQMNEEVTQYRKNWAETHNGQAVSLSNTFLAFGVSIEENISWRDELLRPEDYLKPDNQLRCVLQVLASRFSLAVVTNNTVSITVRTLSVLGIDDIIKNIVGLDTVKASKPDKIHFLKAAELCGTSAEQCISIGDRYDIDIALPLEMGMGGILVDNVEDIYKLPDLFASGNAV

SEQ ID NO: 8441 - DNA, 423 bp, Unknown
  Obtained from environmental sample
  misc_feature (1)..(423): n is a, c, g, or t
atgagcggaaataaaatagaagtaaacaaccttgatcttttttacggcgattttaaggcattgtcaaaaataaatttttcgcttgcggaacaggatgtggcggcgctcatcgggccttccggctgcggaaaatcaacgtttatacgcatattgaatcggatgaacgatttaattccttcatgccgcataacaggcgaggtcttgctggatggcaaggatatttacggcacaatggatgttacggaactgcgcagccgggtgggtatggtgtttcaaaaaccaaatccttttaacatgagcgtatttgacaatgtcgcttatggaaagcgcatgcagggattaaaaaacaaaggaaagatcgcggacattgtagaaatttcactgcgaaaggcggctctttggaacgaggtaaaagacagatga

SEQ ID NO: 8442 - protein, 140 aa, Unknown
  Obtained from environmental sample
  DOMAIN (31)...(140): ABC transporter
  misc_feature (1)..(140): Xaa is any amino acid
MSGNKIEVNNLDLFYGDFKALSKINFSLAEQDVAALIGPSGCGKSTFIRILNRMNDLIPSCRITGEVLLDGKDIYGTMDVTELRSRVGMVFQKPNPFNMSVFDNVAYGKRMQGLKNKGKIADIVEISLRKAALWNEVKDR

SEQ ID NO: 8443 - DNA, 486 bp, Unknown
  Obtained from environmental sample
  misc_feature (1)..(486): n is a, c, g, or t
atgttctgcagaatgttaaatttcggccagtcaataatagccggcgcttttacattaagcataatgatactgcctgttattatacgcacaaccgaagaatcacttaaatcaattccagacactttccgcgaaggttctcttgcgttaggcgcaaccaaattccagacaattattcatgtagttctgccttcagcactgccgggaattgtaacctctgtgatccttgctatcggcagagtggtcggagaatccgcgcctgtactgcttacggtcggccttaccaaaaatataccgcgtaccatttttgaatcaggaagaaccctgacaatccacctttattatctgacaaacgaagcggtgcgtcctgaagatttcggcattgctttcgcgacagcgttcgttctgataattcttgttgtaataataaataccgcgacgaaaattatgaccgcaaactttagaaaaaaacttggagacgtgcaatga

SEQ ID NO: 8444 - protein, 161 aa, Unknown
  Obtained from environmental sample
  misc_feature (1)..(161): Xaa is any amino acid
MFCRMLNFGQSIIAGAFTLSIMILPVIIRTTEESLKSIPDTFREGSLALGATKFQTIIHVVLPSALPGIVTSVILAIGRVVGESAPVLLTVGLTKNIPRTIFESGRTLTIHLYYLTNEAVRPEDFGIAFATAFVLIILVVIINTATKIMTANFRKKLGDVQ

SEQ ID NO: 8445 - DNA, 810 bp, Unknown
  Obtained from environmental sample
  misc_feature (1)..(810): n is a, c, g, or t
gtggagctcccttattgccaagcccgcagagcggggcaatttgttattctgcagatcgatgccgagtggggtgaacgaattccgcttaccattgccgatgcggacagtgaaaaaggaacaatcaccatggtttttcaggcggtaggagctacaacccaccggctggcagttaaagaaccgggagattgcgttgatacgatactgggccctctgggaaatcccactcacatcgaaaaattcgggtctgtggtgtgtattggcggcggtatcggcgtggctcccctgtaccccattgtgcaggcaatgaaagaggcgggaaataaagtcacggcaattatcggagcccgaaccagagagctggtgatttttgaagaccggatgcggaaatacgccgacgagcttattgtcgtaacagatgacggatcgtacggacgcaaagcgttggtcaccgggccgctcaaagaacgttgcgttcaggccccaaagccggatatgacggtggctatcggtccgcccgtcatgatgaaattctgcgttaaaaccaccgccgaatttaacgtgcccatcatggtatcccttaacacgatcatgattgacggaacgggaatgtgcggcggctgccgtgttaccgttggggatcaaactaaatttgtctgcgtcgacggtccggaattcgacggccaccaggtggactttgacaacatgatgctgcgcatgcgcgcgttcaagagcagggaagatgaggatcatcaccgctgtcatcttgaacttcatataccggaaaccgccgcaacgccggaaaccctgtag

SEQ ID NO: 8446 - protein, 269 aa, Unknown
  Obtained from environmental sample
  DOMAIN (84)...(180): Oxidoreductase NAD-binding domain
  misc_feature (1)..(269): Xaa is any amino acid
MELPYCQARRAGQFVILQIDAEWGERIPLTIADADSEKGTITMVFQAVGATTHRLAVKEPGDCVDTILGPLGNPTHIEKFGSVVCIGGGIGVAPLYPIVQAMKEAGNKVTAIIGARTRELVIFEDRMRKYADELIVVTDDGSYGRKALVTGPLKERCVQAPKPDMTVAIGPPVMMKFCVKTTAEFNVPIMVSLNTIMIDGTGMCGGCRVTVGDQTKFVCVDGPEFDGHQVDFDNMMLRMRAFKSREDEDHHRCHLELHIPETAATPETL

SEQ ID NO: 8447 - DNA, 462 bp, Unknown
  Obtained from environmental sample
  misc_feature (1)..(462): n is a, c, g, or t
gtgatgcggtttgttttcagcgccgttattcttattctcctcggctcttttcccgctgccgcccagtcgcccggcggaaccgagacgcaatcagtctccgcgatggagaattaccgtcttggcagggaccttgaaagcctgaaccgcataaacgaggcgaatacccattacaatgaagcggtacgccaatgccttgctgaagtttccggcaacgccgcctcgcgcaccacctatacggttttaacatggactttacagaggcaaagaaaatataacgaagtcgtaacatggggggaacggggtctcagattatttcctgacgaataccgcattatggaaacaatgggagaggcgtttttttatcttgaggattacacgcgttcgctttcctatatgcagcgttatacaaacgccttaccccagggggatcgggtttccgtcgcgtattttttttcgcggtga

SEQ ID NO: 8448 - protein, 153 aa, Unknown
  Obtained from environmental sample
  SIGNAL (1)...(21)
  misc_feature (1)..(153): Xaa is any amino acid
MMRFVFSAVILILLGSFPAAAQSPGGTETQSVSAMENYRLGRDLESLNRINEANTHYNEAVRQCLAEVSGNAASRTTYTVLTWTLQRQRKYNEVVTWGERGLRLFPDEYRIMETMGEAFFYLEDYTRSLSYMQRYTNALPQGDRVSVAYFFSR

SEQ ID NO: 8449 - DNA, 531 bp, Unknown
  Obtained from environmental sample
  misc_feature (1)..(531): n is a, c, g, or t
gtgatgaaccaattcataggcacggtaagcattacaggcggtacggtttcggcgacgggatatgcggtgtccaacgctggcagtggcacggtaagcattaccggcggcacggtttcggcgacgggatgtgcggtgtacaccctttccgctggcatggtgaacattaccggcggtacggtttcggcgacatcgggctatgcggtgtacacctatataaacgcctgcaaaataactgtgtcgggaactgcaaaggttacctcggcaaacacaaacaccgaacaaggcacaatttatcttagaggcggatctgacacgaccacagtgctagaaataaccggcggcacggtagaaaatacatcggccggtaccggcaacgcggtacgcaacgattccatcggtgcggtaagcatctcaggtggcacggtctccaaagccggagacggcaattatgcggtgtacaaaggcagctttaccggcgggataaccatcggagcaggggcaacgattgtggggaataaatacggattttaa

SEQ ID NO: 8450 - protein, 176 aa, Unknown
  Obtained from environmental sample
  SIGNAL (1)...(22)
  misc_feature (1)..(176): Xaa is any amino acid
MMNQFIGTVSITGGTVSATGYAVSNAGSGTVSITGGTVSATGCAVYTLSAGMVNITGGTVSATSGYAVYTYINACKITVSGTAKVTSANTNTEQGTIYLRGGSDTTTVLEITGGTVENTSAGTGNAVRNDSIGAVSISGGTVSKAGDGNYAVYKGSFTGGITIGAGATIVGNKYGF

SEQ ID NO: 8451 - DNA, 810 bp, Unknown
  Obtained from environmental sample
  misc_feature (1)..(810): n is a, c, g, or t
gtgacgctcgccgaatatacccggcaaatgggcntgcacgtcctcctgcttgccgactcgaccagccgttgggcgcaggcgatgcgcgaaatgtcgggccgcctggaggaaatccccggcgaagaagccttccccgcataccttgaatcgacgattgccagcttctacgaacgggccggcattgtaaggctcagggacggcagcgccggttccgtcaccatcggcggcacggtcagcccggcgggcggtaactttgaagagccggtaacccaggccaccttgaaggtcgtcggggcattccacggcctctcccgcgagcgttccgacgcccgcaaattccccgccattcacccgatggattcctggtcaaagtaccaggggatcatcgacgcggaaaaagtcggctacgcccacggtttcatgcggcggggcgctgaggtcgagcagatgatgaaggttgtcggcgaagaagggaccagcattgaagattatgtcgtctaccttaaaggcgaccttatcgacgcggtgtacttccagcagaactccttcgacgaagttgacgccgcggtcaaaccggaacgtcagatctacacctttgccaaactgctgaaaatccttgcatcgcagttgactttccacgataagaacgaagcccgtatctggtttaaccggctcaggcaaaagttcctcgactacaacggctcaaaatggcaggatagccgcttcaagactcttgaaaaagagattgaagatacggtaaagaatcaatcgaaaggcctggacaaggccgctgaaaagtacttggcgtaa

SEQ ID NO: 8452 - protein, 269 aa, Unknown
  Obtained from environmental sample
  DOMAIN (1)...(123): ATP synthase alpha/beta family, nucleotide-binding domain
  misc_feature (1)..(269): Xaa is any amino acid
MTLAEYTRQMGXHVLLLADSTSRWAQAMREMSGRLEEIPGEEAFPAYLESTIASFYERAGIVRLRDGSAGSVTIGGTVSPAGGNFEEPVTQATLKVVGAFHGLSRERSDARKFPAIHPMDSWSKYQGIIDAEKVGYAHGFMRRGAEVEQMMKVVGEEGTSIEDYVVYLKGDLIDAVYFQQNSFDEVDAAVKPERQIYTFAKLLKILASQLTFHDKNEARIWFNRLRQKFLDYNGSKWQDSRFKTLEKEIEDTVKNQSKGLDKAAEKYLA

SEQ ID NO: 8453 - DNA, 324 bp, Unknown
  Obtained from environmental sample
  misc_feature (1)..(324): n is a, c, g, or t
ttgattcatccaattcttgcgaaaaacatggacaaggcgtttaaaaggcgctttttatacaagattgaatttgaaaaaccggatttggaaatccgaaaatcaatttggcaaacgcttattccggatttgtccaaaaatgaagttgatgttttagcggataaattcgcgttttcgggcggacaaatagaaaatatagcaagaagaaggacagtagcggaagtttttaataacaaagctccttcattggaaaaattaattgatttttgcattgaagaaaaatcagaaacagacgaaagcgtaaagattgggtttaaggccgattag

SEQ ID NO: 8454 - protein, 107 aa, Unknown
  Obtained from environmental sample
  misc_feature (1)..(107): Xaa is any amino acid
MIHPILAKNMDKAFKRRFLYKIEFEKPDLEIRKSIWQTLIPDLSKNEVDVLADKFAFSGGQIENIARRRTVAEVFNNKAPSLEKLIDFCIEEKSETDESVKIGFKAD

SEQ ID NO: 8455 - DNA, 831 bp, Unknown
  Obtained from environmental sample
  misc_feature (1)..(831): n is a, c, g, or t
gtgcgcctggattccaacctttcggccggctacgatttccccccccattatgattcggccggcgccctcctcataacntacggccaggattggcccaagatcctgggcatcatgaagcgggccctgagcgaatacattgtcgggggccttaaaaccaccatcccctttttcctccgcctcctggatatgcccgagttccgccggggcgagttcaccacccgcttcgtcggccgccggcccgagttgttggagtatcgcgacctggcctccgaggccgtgcgcctggcccgcctggccgctgaaatatccgtcctcggccacaaccccttcgtgggcctgggggactaccgcacggccgacacgccccggctgccgcgcttcgaattggttctgccccccttgggcaccgaggtcctgaccgcgccgtcggcctatgcccggggcgaccgccgggccctcttggaccagttgcgggattcgaaacaagtccacctggtggacaccacctgccgggacgtcacccagtccaacagcggcaaccgtttccgcctggcggaagacgccctggtgggcccctacctggacaactgcggctttatggccctggagaccggcggcggagcccacttccacgtggccctcctggccaacatgacctaccccttcaccgaggcggcccgctggaacgaattcgcccccaaaaccttgaagcaggtcctggtccgctccaccaacctattgggctaccggccccagccggccaacctcatggagaaaacgcggggagataatagcccgccacttccacctggtccgctgctttatttttga

SEQ ID NO: 8456 - protein, 276 aa, Unknown
  Obtained from environmental sample
  DOMAIN (1)...(77): Biotin carboxylase C-terminal domain
  misc_feature (1)..(276): Xaa is any amino acid
MRLDSNLSAGYDFPPHYDSAGALLITYGQDWPKILGIMKRALSEYIVGGLKTTIPFFLRLLDMPEFRRGEFTTRFVGRRPELLEYRDLASEAVRLARLAAEISVLGHNPFVGLGDYRTADTPRLPRFELVLPPLGTEVLTAPSAYARGDRRALLDQLRDSKQVHLVDTTCRDVTQSNSGNRFRLAEDALVGPYLDNCGFMALETGGGAHFHVALLANMTYPFTEAARWNEFAPKTLKQVLVRSTNLLGYRPQPANLMEKTRGDNSPPLPPGPLLYF

SEQ ID NO: 8457 - DNA, 486 bp, Unknown
  Obtained from environmental sample
  misc_feature (1)..(486): n is a, c, g, or t
atggctggttcaaagaagacattttgggatctagcgcttgaaattacaggcaaggatgaaggtgcgaccgccgccctcaaaacggttagaaaccagatacaggccgttcaggcggccgctaaacaactcggggcagactggaaagggtttacccaaaacgccactaaacttgttgcgggggttgtgggcggcgccacggctgccaccgccgcagtagtggcggcggccaacagctttgccgacaccggtgtagcaattcaaaggacagccggcgcggtgggcatgggggtagaagcgtaccaacagatgcagtacgccatgactagatccggccttagcgcgcaagagtttgattctgctttagagaaatttaacctgactgtaaggcaaggggcggccggaaatgaagccgcggcgaaacaactggaagctgttggcctatcggcttcaaaactcgcgtcaataagcccgagccctcgcccataa

SEQ ID NO: 8458 - protein, 161 aa, Unknown
  Obtained from environmental sample
  misc_feature (1)..(161): Xaa is any amino acid
MAGSKKTFWDLALEITGKDEGATAALKTVRNQIQAVQAAAKQLGADWKGFTQNATKLVAGVVGGATAATAAVVAAANSFADTGVAIQRTAGAVGMGVEAYQQMQYAMTRSGLSAQEFDSALEKFNLTVRQGAAGNEAAAKQLEAVGLSASKLASISPSPRP

SEQ ID NO: 8459 - DNA, 549 bp, Unknown
  Obtained from environmental sample
  misc_feature (1)..(549): n is a, c, g, or t
atggcggtgggacgcgcatatggaataatgagcccggaacgaagcgcaattgaggttgccggaaccgacttaatgaacgaaactttcagaagctacggtttgggaatttacgttatagcggtaaaattgcagaatatcgatcctccggctggaagcgtacaacaggcttttgacgatgtaaacaaggccattcaggatatgaatcggcttatcaacgaaggcatgcaggtttataacgaagaaataccgaaagcaaggggcgaagcggaacgcatggttttagtcgcccaagggtacgcctcggaacgtgtaaacagggcaaaaggcgatgtagcccgtttcaattcagtctatgatgaataccggcgttcgcccgaagtaacaaggcaaaggctttactatgaaatggtcgaagaggtatttggtaaagaagtagacatgaccattatcgaccgtaatcttaaaaatttcctgccaatgctaaatgtaaacaacaacagagtaccagcgcaaaacacgccttcacagagcgctcagggaggcaggtaa

SEQ ID NO: 8460 - protein, 182 aa, Unknown
  Obtained from environmental sample
  misc_feature (1)..(182): Xaa is any amino acid
MAVGRAYGIMSPERSAIEVAGTDLMNETFRSYGLGIYVIAVKLQNIDPPAGSVQQAFDDVNKAIQDMNRLINEGMQVYNEEIPKARGEAERMVLVAQGYASERVNRAKGDVARFNSVYDEYRRSPEVTRQRLYYEMVEEVFGKEVDMTIIDRNLKNFLPMLNVNNNRVPAQNTPSQSAQGGR

SEQ ID NO: 8461 - DNA, 324 bp, Unknown
  Obtained from environmental sample
  misc_feature (1)..(324): n is a, c, g, or t
atgaaaaaaccatttacaacgataattgtcattgcggttatttttatcggtattattgtcgccggtcccctgtttgtaattgaagaaggcgaacaggcggtagtcgtgcagatggggcggattgtgcggattgttacaaatgccggtcttcatataaaaacgccgtttatagatgaaattgtccgttacccaaaaaaaatcatggcttgngacggagagcagacaagtattcccacacgggaaaagcagtacatttgggttgatgttacggcgcgctggcgcatttccgatcctcaaaattttatgaatcgatctctacaatag

SEQ ID NO: 8462 - protein, 107 aa, Unknown
  Obtained from environmental sample
  SIGNAL (1)...(26)
  misc_feature (1)..(107): Xaa is any amino acid
MKKPFTTIIVIAVIFIGIIVAGPLFVIEEGEQAVVVQMGRIVRIVTNAGLHIKTPFIDEIVRYPKKIMAXDGEQTSIPTREKQYIWVDVTARWRISDPQNFMNRSLQ

SEQ ID NO: 8463 - DNA, 846 bp, Unknown
  Obtained from environmental sample
  misc_feature (1)..(846): n is a, c, g, or t
gtgacctggtccagcagtagcaccagcgtcgccaccgtgaccagcgccggcctcgtcaccgccgtctcgccaggcagcgcgacaatcacggtcaaaacggcggacggcaacaagaccgacacctgcgccgtcactgtaattcctgtgccggtcaccagcgtgacgctcaacaataccgcgctgaccattgccaaaggcaacagcgaaacgctcacagccaccgtcctgcccagcaacgcaaccaacaagagcgtcacatggtctagcagcaatacaagcatcgccacagtcaccagtggcggtcgcgtcaccgccgtggcggccggtacggctaccatcactgtcaccacagtggatggtggaaagacggctacatgcgccgtgacagtgactcaggccgtgactggggtgacgcttgataggacaaggatgagtctcattgtgggcgatagtggtcaactcactgccacagtgcagccgtcagatgccacaaacaagaatgtcgtgtgggagaccaacaacggcaacgccacgattagctccactactggctcgacaattaccgtgacgggcgcgtacgttggcaccacaatagtgaaagccatcacatccgatggcggcaagactgccatatgtacggtaacagtctatccagcacccgcgaaggactgggcggcagtgtcggcgggcggagatacgctcgccctcaagaccgatggcagtctctgggcgtggggaggcaaccattgggggcagctcggtgtcggcaccagcgacgataatgcacacagcatacctgttcgcgtgggcactgctaggactggaaggtcgtctcggccgatctga

SEQ ID NO: 8464 - protein, 281 aa, Unknown
  Obtained from environmental sample
  SIGNAL (1)...(21)
  DOMAIN (133)...(214): Bacterial Ig-like domain (group 2)
  misc_feature (1)..(281): Xaa is any amino acid
MTWSSSSTSVATVTSAGLVTAVSPGSATITVKTADGNKTDTCAVTVIPVPVTSVTLNNTALTIAKGNSETLTATVLPSNATNKSVTWSSSNTSIATVTSGGRVTAVAAGTATITVTTVDGGKTATCAVTVTQAVTGVTLDRTRMSLIVGDSGQLTATVQPSDATNKNVVWETNNGNATISSTTGSTITVTGAYVGTTIVKAITSDGGKTAICTVTVYPAPAKDWAAVSAGGDTLALKTDGSLWAWGGNHWGQLGVGTSDDNAHSIPVRVGTARTGRSSRPI

SEQ ID NO: 8465 - DNA, 687 bp, Unknown
  Obtained from environmental sample
  misc_feature (1)..(687): n is a, c, g, or t
atgatgggtattttatatattatcggcactcccataggaaacttgggagatctctcttttagggccgtagagatttttaaatccgccgatctggcagcctgtgaagatacccggcaaaccctaaaattgctcaaccatttgggaatccgccttccccttctttcttgcagggcccaaaatgaagacagtgccgcttccagggtaattgcttgcctgaacgaaggcaaaaccgtagcctacgccagcgatgccggtacaccgggcttaagtgacccaggatccaggcttgcagcaaaagcagcggcagcgggccacgaagtgatccctataccgggtccttcggcttttgccgccctggtttccgtagccggaggggtcggagacaaaactgtggtttttgagggctttttgtcctccaaagcgggccgccgcaaggccaggctcaaagagttgttgaataccggctgggcctttgtcctttatgaatcgccctttagaatttgtaaacttttgggggatctggccgatcttgacagtaaacggtatatttgtgtgggcagggagatgaccaaggttcatgaagaatatgtacggggcacggcggaagaaatttttgctttttttgcaaagaaagaacgccaaatgggagaatttgccctttatatagctggtcacaatcacaaataa

SEQ ID NO: 8466 - protein, 228 aa, Unknown
  Obtained from environmental sample
  DOMAIN (4)...(205): Tetrapyrrole (Corrin/Porphyrin) Methylases
  misc_feature (1)..(228): Xaa is any amino acid
MMGILYIIGTPIGNLGDLSFRAVEIFKSADLAACEDTRQTLKLLNHLGIRLPLLSCRAQNEDSAASRVIACLNEGKTVAYASDAGTPGLSDPGSRLAAKAAAAGHEVIPIPGPSAFAALVSVAGGVGDKTVVFEGFLSSKAGRRKARLKELLNTGWAFVLYESPFRICKLLGDLADLDSKRYICVGREMTKVHEEYVRGTAEEIFAFFAKKERQMGEFALYIAGHNHK

SEQ ID NO: 8467 - DNA, 504 bp, Unknown
  Obtained from environmental sample
  misc_feature (1)..(504): n is a, c, g, or t
gtgtatgagtgcgccatatcgtataacccgaggacttacgaggaggggaagaagatcgggtggaaggacggtttccgtgccctttactgcatatttcattacagcgcccacacggcgccgctgcctatgcagatattgatttatctatttataggcggggtgtctatggtttccaacatggtattctttatattgggcgaccttctttccgttccggtgaattattccattgtgggcgcgtttgtcttggcggcggcggttaattatgtgttgtgtgtcctgattctgtttaggcataaagcgaggtggaggacgtccggggagttgtttttttacggcgtggctacggggctcatgggtttgattgatttcgggttgaccagggtgttgattgcgttgagcggttggcttatcttgccgaagtttgcggcggcggtcgcggggtttgtcgggaactttttactgaggaagtggttggtgtttccggagagaaagaagaaatga

SEQ ID NO: 8468 - protein, 167 aa, Unknown
  Obtained from environmental sample
  DOMAIN (47)...(161): GtrA-like protein
  misc_feature (1)..(167): Xaa is any amino acid
MYECAISYNPRTYEEGKKIGWKDGFRALYCIFHYSAHTAPLPMQILIYLFIGGVSMVSNMVFFILGDLLSVPVNYSIVGAFVLAAAVNYVLCVLILFRHKARWRTSGELFFYGVATGLMGLIDFGLTRVLIALSGWLILPKFAAAVAGFVGNFLLRKWLVFPERKKK

SEQ ID NO: 8469 - DNA, 657 bp, Unknown
  Obtained from environmental sample
  misc_feature (1)..(657): n is a, c, g, or t
atggatcatcttcgctggcatcagcacgggccggacgaactggcccattacgcaaaggacgcctacgacatcgaatacctgtttcccatgggctggagggaactggaaggcgtgcataaccgtaccaattacgatttaaaccgccatacccaatactccggcaaggatatgcagtatatagaccaggacaataacaacgaacgctacattccctttatcattgagacttcggcgggccttacgcggaatgtgctgatgatcctctgcgacgcctacgatgaggagaaggtcgccgataagggcaatgacgacgactggcggacagtgctgcgcttccatccgagccttgcgcctgtcactgtcgcggtgctgcccctgatgaaaaaagacggccttgcggaactggcccaggacatacgccaaacattaaaagaagattttacggtcgattatgatcaagccggggccattggccgccgctaccgtcggcaggatgaggcgggcacgcctttctgcgtaaccgttgactaccagtccaaagacgacggcactgtcaccctgaggttccgggattccatggagcagatcagggtaccgaaatcggaactctcaacgcggctgcgccgggagataaaggaatacaagaggattaaataa

SEQ ID NO: 8470 - protein, 218 aa, Unknown
  Obtained from environmental sample
  DOMAIN (120)...(210): Anticodon binding domain
  misc_feature (1)..(218): Xaa is any amino acid
MDHLRWHQHGPDELAHYAKDAYDIEYLFPMGWRELEGVHNRTNYDLNRHTQYSGKDMQYIDQDNNNERYIPFIIETSAGLTRNVLMILCDAYDEEKVADKGNDDDWRTVLRFHPSLAPVTVAVLPLMKKDGLAELAQDIRQTLKEDFTVDYDQAGAIGRRYRRQDEAGTPFCVTVDYQSKDDGTVTLRFRDSMEQIRVPKSELSTRLRREIKEYKRIK

SEQ ID NO: 8471 - DNA, 378 bp, Unknown
  Obtained from environmental sample
  misc_feature (1)..(378): n is a, c, g, or t
gtgacagattggccgagtctgattccctgtcttccgcggctcgcggagcgcctgcagcacgttgatccgaaactcgggcgcctcgtcaagaaagagcacgccgaagtgcgcaaggctgatttctcccgggcgcggattcctgccgccgccgagaattccttccgcgctcgccgaatgatgcggggcgcgaaacggcgcgtttgtgataaggcggtcgataaatttttgcgcgtaacggccgccgttattaaaaaaaggaccggcaaggctgtaaaggcgcgtaacttcgaccgcctcgtccggtgtaagcggcgccatgatggaagtaagccgccgcgccagcatagtctttcccgcgcccggcggcccgaagactaa

SEQ ID NO: 8472 - protein, 125 aa, Unknown
  Obtained from environmental sample
  misc_feature (1)..(125): Xaa is any amino acid
MTDWPSLIPCLPRLAERLQHVDPKLGRLVKKEHAEVRKADFSRARIPAAAENSFRARRMMRGAKRRVCDKAVDKFLRVTAAVIKKRTGKAVKARNFDRLVRCKRRHDGSKPPRQHSLSRARRPED

SEQ ID NO: 8473 - DNA, 588 bp, Unknown
  Obtained from environmental sample
  misc_feature (1)..(588): n is a, c, g, or t
gtgcgtcatagccaggggtttttctcggtcgccacaacctgccacaactgcggcggcgaaggctacataatcgacaaaccctgtaacgattgcggcggagcgggaacacaaaagaagcggcaaaaaattatggttaccattcccgcaggcgtagaaaacggcaagcgtgtggtaattcccaaacagggcgacgcaggtcccaacggcggtccgccgggagacttatacgtttttatcagagtgaaaccgcacgaatattttgaacgtcaagccgctgatctttactgcgccgttcctatttcgataactcaagcggctctcggcgcggacattcacgttacaacgcttgataacaagacaataaaagtaaaagtaccggcgggtattcaaaacggaaaaatgctccgtatccacaacgagggcgtgccgatgggtaatcaaagaggcaatctctacatcaaactttttgtgcaaatccccgaaaaactttcccgcaaaggcaaagacctccttgaagaacttgccaaaattgagggacagaacgacagcccgaagcctatcccgctatcgcagcttggagatgtgtaa

SEQ ID NO: 8474 - protein, 195 aa, Unknown
  Obtained from environmental sample
  DOMAIN (1)...(42): DnaJ central domain (4 repeats)
  misc_feature (1)..(195): Xaa is any amino acid
MRHSQGFFSVATTCHNCGGEGYIIDKPCNDCGGAGTQKKRQKIMVTIPAGVENGKRVVIPKQGDAGPNGGPPGDLYVFIRVKPHEYFERQAADLYCAVPISITQAALGADIHVTTLDNKTIKVKVPAGIQNGKMLRIHNEGVPMGNQRGNLYIKLFVQIPEKLSRKGKDLLEELAKIEGQNDSPKPIPLSQLGDV

SEQ ID NO: 8475 - DNA, 402 bp, Unknown
  Obtained from environmental sample
  misc_feature (1)..(402): n is a, c, g, or t
atgatcagaatcggccgagccgcggcgttattttatttacagggactgtttcgcatggaacagggtaaaagaaaaatgaataaccatttttgcccgaccaacccgaaaacgacggcgataatcacaaggcgcgcaaaaagacttttttcccgcgccatgcacaagacttcgcccgatcgcatctttcatcttctgcccgatgagggctgtgaaaacgtctggtgtcaatgtccgccctgccgcgctttccgtcccgttgatcagtatctgattggcgtaaacgccgcggcggacgcgctcgcaaaacttgatccgcaggcaaagctggcatacgttgattttgacacggagcctgaggcggcgagggttaagagcagaaagaatatgattatttgcgagtga

SEQ ID NO: 8476 - protein, 133 aa, Unknown
  Obtained from environmental sample
  misc_feature (1)..(133): Xaa is any amino acid
MIRIGRAAALFYLQGLFRMEQGKRKMNNHFCPTNPKTTAIITRRAKRLFSRAMHKTSPDRIFHLLPDEGCENVWCQCPPCRAFRPVDQYLIGVNAAADALAKLDPQAKLAYVDFDTEPEAARVKSRKNMIICE

SEQ ID NO: 8477 - DNA, 429 bp, Unknown
  Obtained from environmental sample
  misc_feature (1)..(429): n is a, c, g, or t
ttgtggtataataaatatatgtgtattgttcatacagaaataactttaaaaaatgcgggagatgtgcttaatgtcaggcgcgggattgtaaaatatcctgaaatccgccaaacaacaatacaagttgtggttgatacaggcgcaatgacactggttattaatgaccaactgcgccaacagttggggcttgatgtggtaggaataaaacaggcgacattggcggacgacacaaaaaaaacagtgcaaatagccgaacccgtagaaatccactggaaaaatcgctcaatgatatgtcagccttgggtagtaaattcaggaagaatacttttaggcgcaataccgcttgaagatatggatttaatagttgaccccgccaaacaagaattaatcggcgctcacggcgatgaagaagttggtcttttgctgtaa

SEQ ID NO: 8478 - protein, 142 aa, Unknown
  Obtained from environmental sample
  misc_feature (1)..(142): Xaa is any amino acid
MWYNKYMCIVHTEITLKNAGDVLNVRRGIVKYPEIRQTTIQVVVDTGAMTLVINDQLRQQLGLDVVGIKQATLADDTKKTVQIAEPVEIHWKNRSMICQPWVVNSGRILLGAIPLEDMDLIVDPAKQELIGAHGDEEVGLLL

SEQ ID NO: 8479 - DNA, 720 bp, Unknown
  Obtained from environmental sample
  misc_feature (1)..(720): n is a, c, g, or t
atggccgagagtaaatgcgcggttacgacccggacgtttttcgtttacgtaaagggcggcagatgcgagaactgcgaaggcggcggtacaatcaggatcgagatgaacttcctgcccgacgtatatatcacctgcgacgtgtgccagggcaggcgtttcaacaaagagacgcttgaaatacggtacaaaggcaaaaatatagccgaggtgctggacatgaccatcgaggaagcggcggattttttcgccccaatcccgcaggtcgcacgcaagatgcagaccttgctctctgtggggcttggctatataaaactcggccagtccgcgcttaccctttcaggcggcgaggcccagcgcgtcaaactcgccctggagctttcaaggcgttcaacaggcagcacgctgtatatccttgacgagccgacaacgggccttcattttgccgatgtcaaacagctaatggacgttatacaacggctggcggatcaggggaatactgttataatgatagagcataaccttgacgtacttttgcaggccgatcatattattgatttgggtcccgagggaggggacaagggcggggaggtcgtggcgacaggcactccggaacaggtagccgcattggcctcggccaccgcaatttcctacacggggcattatataggggaaatgctggcacgtgaaaaaaagaagaggaaacaatccggacgaaaatga

SEQ ID NO: 8480 - protein, 239 aa, Unknown
  Obtained from environmental sample
  DOMAIN (29)...(190): ABC transporter
  misc_feature (1)..(239): Xaa is any amino acid
MAESKCAVTTRTFFVYVKGGRCENCEGGGTIRIEMNFLPDVYITCDVCQGRRFNKETLEIRYKGKNIAEVLDMTIEEAADFFAPIPQVARKMQTLLSVGLGYIKLGQSALTLSGGEAQRVKLALELSRRSTGSTLYILDEPTTGLHFADVKQLMDVIQRLADQGNTVIMIEHNLDVLLQADHIIDLGPEGGDKGGEVVATGTPEQVAALASATAISYTGHYIGEMLAREKKKRKQSGRK

SEQ ID NO: 8481 - DNA, 447 bp, Unknown
  Obtained from environmental sample
  misc_feature (1)..(447): n is a, c, g, or t
gtgtcagatggccgagctgatcacaaaaaggtgaagcttgccctgaagcacggctttgaagtgattctctgcattggggaactgctggaagagcgcgaggccggcaaggtcgaggctgtatgcgaatcccagaccgtgaaaggtcttgagggtgtcagcgcctctgatttagcgaatatcgtcattgcctacgagccggtttgggccattggcaccggaaagacagccaccccggaagacgcggaggcggttcacgcctttgtgcgcaaggtgatcgctcgtctctacggacaggctgccgcggataaaatcatcatccagtacggcggttcggttaaaccggacaacgccgcccagttgatggccaaagagaacattgacggcgccctggtcggcggcgcggctcttaaaccggatacctttgttcctatcgcaaaatttaattag

SEQ ID NO: 8482 - protein, 148 aa, Unknown
  Obtained from environmental sample
  DOMAIN (1)...(145): Triosephosphate isomerase
  misc_feature (1)..(148): Xaa is any amino acid
MSDGRADHKKVKLALKHGFEVILCIGELLEEREAGKVEAVCESQTVKGLEGVSASDLANIVIAYEPVWAIGTGKTATPEDAEAVHAFVRKVIARLYGQAAADKIIIQYGGSVKPDNAAQLMAKENIDGALVGGAALKPDTFVPIAKFN

SEQ ID NO: 8483 - DNA, 411 bp, Unknown
  Obtained from environmental sample
  misc_feature (1)..(411): n is a, c, g, or t
gtgtatgttgacgaagaggacaacatcgaaggtgaagtagaatattacctcacaaatccgcttaatatatcagttgatgatattggggcaaaagccgtcgaatacggcggcatagtgattcccgcccatgttgaccgcgccgctttctccatgacaagccagctcggcgtaatagtaaaaggcccctggacggcgcttgagtgcgtccgcattccaccggtttttaacgggcagcccctggataccctgggctatcctttaaccacatcctcagacgcccattaccctgaacatattgtccgccgcccgttccaattagatataactgttgaagaattgcagcccggcggccccggaacaatggccgacatggaggcgtttaaacaggcattggggaaaagaccaaaataa

SEQ ID NO: 8484 - protein, 136 aa, Unknown
  Obtained from environmental sample
  misc_feature (1)..(136): Xaa is any amino acid
MYVDEEDNIEGEVEYYLTNPLNISVDDIGAKAVEYGGIVIPAHVDRAAFSMTSQLGVIVKGPWTALECVRIPPVFNGQPLDTLGYPLTTSSDAHYPEHIVRRPFQLDITVEELQPGGPGTMADMEAFKQALGKRPK

SEQ ID NO: 8485 - DNA, 702 bp, Unknown
  Obtained from environmental sample
  misc_feature (1)..(702): n is a, c, g, or t
atggggttagacatgaaaaccagaaaaaatatttgcgcgaggatttacaggcgctaccaaaaagcgggcaagagagacaaggctataatccttggcgaatatgccccaatgcttgagcataaccgggattacttggcccacctgctagccaattggggtaaaacagtgtatgccccttgcgacgggaaacccgtcaaatatgtcgctaaaccgcccataaaggcccgcaataaggcccctaaaaacaaaaaaacagggaggccggaaaagtaccataaagccttcgcagcagttctattaagcctctgggagtttttcgactttcagtgcggcaagctgttagcccccctgctaaaggggatggaaggttttttggttcaagagtttaatctaagcgaagaggtacgggcgctgcttttgtctgtcagcccggcaaccatcgaccggaagctcaggaaccagaaaaaaagatgccgccttaaaggcatgcataccaccaagcccggaacgctcctaaaaagccagattcctatacgggtctgttttgaccgggatgagaagcggcccggttttttcgagcttgatacggtcagccattgcggcgcgaatgcaaagggccaattctgccagactttgaccgtcaccgacgtgggctcggggtggaccgaagaatgcgcgcttttgaacaacgcccaccgctaa

SEQ ID NO: 8486 - protein, 233 aa, Unknown
  Obtained from environmental sample
  misc_feature (1)..(233): Xaa is any amino acid
MGLDMKTRKNICARIYRRYQKAGKRDKAIILGEYAPMLEHNRDYLAHLLANWGKTVYAPCDGKPVKYVAKPPIKARNKAPKNKKTGRPEKYHKAFAAVLLSLWEFFDFQCGKLLAPLLKGMEGFLVQEFNLSEEVRALLLSVSPATIDRKLRNQKKRCRLKGMHTTKPGTLLKSQIPIRVCFDRDEKRPGFFELDTVSHCGANAKGQFCQTLTVTDVGSGWTEECALLNNAHR

SEQ ID NO: 8487 - DNA, 777 bp, Unknown
  Obtained from environmental sample
  misc_feature (1)..(777): n is a, c, g, or t
atgcaattccacgccataagggatcccggcaaaaaaaacgccggcgttctttgggggctgaaatccgaaaaaagctcaagtcttgtccctgttcccgactgccccatcgccgatcccggaatcaggaagctgttatgcgaagaaaaaaaaacgcttgtaacgcctttgggcaaagaccgcttcaccgtatacgcgcgcggcggtttgtttctaagtgaagggtgcgtaaatcgagggaaaacgcgaatcctggatcacgaaattacgcttgacgcctcgctgtttttccagagcaacggctctatgcttgaaaaacttgccgcggatttacttgccgtcgcgggggaagcggatcgctccatgcccatggccgacctgttctgcggcgtaggcacatttgccgcgtttctggggaagctgttccccaaagcggctttggttgaggataacaaagccgccgtcgccctcgcccgcgtgaacgttaacgcaccggcagagtttttcgcccaacgcggcgaagactgggccgaacacggcaatccccgcgattttggctttattgtcgttgacccgccgcggcagggcttaagcaaaagccttgccctccggcttgcctcggaaggccctccccttttggcctatgtttcatgcgatcccgcgaccctggcaagggacagcaagatactgacggcgggaaattacacgctgagagaattgcgcttctatgatttttaccctcaaacagcgcatattgagagtttggcggtgtttacataa

SEQ ID NO: 8488 - protein, 258 aa, Unknown
  Obtained from environmental sample
  misc_feature (1)..(258): Xaa is any amino acid
MQFHAIRDPGKKNAGVLWGLKSEKSSSLVPVPDCPIADPGIRKLLCEEKKTLVTPLGKDRFTVYARGGLFLSEGCVNRGKTRILDHEITLDASLFFQSNGSMLEKLAADLLAVAGEADRSMPMADLFCGVGTFAAFLGKLFPKAALVEDNKAAVALARVNVNAPAEFFAQRGEDWAEHGNPRDFGFIVVDPPRQGLSKSLALRLASEGPPLLAYVSCDPATLARDSKILTAGNYTLRELRFYDFYPQTAHIESLAVFT

SEQ ID NO: 8489 - DNA, 486 bp, Unknown
  Obtained from environmental sample
  misc_feature (1)..(486): n is a, c, g, or t
ttgtttgaaaatttcatacgtttgataattcaagaaataggtattaattgtaaatccggcgttattcaagttccggttatggttgatggaaatcctgagttcaatatgagttatcaacacgatctaataattgagaataatgaagatataaaagtaattggttctattaaaacttcaagtaaagaccgtttagataaaatattcattgataaatttctctacaataaacttacagaaaaatcaataccgcacattgcaatttttctcaatgatattcaaagaaaaaacacaaaaaccgaaaatgaatacggtataaactcaacatttttatcaggacatttcaaaggatatacaattaaacttaatccacttgatggtgtttattattgtgatattcgtcctaatatgcaaacagaaaatatattgaaagaatacataaagacatttgataatttgttaattgaagatatttggaaactgatttaa

SEQ ID NO: 8490 - protein, 161 aa, Unknown
  Obtained from environmental sample
  misc_feature (1)..(161): Xaa is any amino acid
MFENFIRLIIQEIGINCKSGVIQVPVMVDGNPEFNMSYQHDLIIENNEDIKVIGSIKTSSKDRLDKIFIDKFLYNKLTEKSIPHIAIFLNDIQRKNTKTENEYGINSTFLSGHFKGYTIKLNPLDGVYYCDIRPNMQTENILKEYIKTFDNLLIEDIWKLI

SEQ ID NO: 8491 - DNA, 501 bp, Unknown
  Obtained from environmental sample
  misc_feature (1)..(501): n is a, c, g, or t
gtgggcgtctttgtgaattcttttagcagaacaaccatagatggtctttacgcttgtggcgaaattgcagctacaggcgtcacgggagcgaaccgcttggcatcaaattctctgcttgaaagtgtggtttttgctttgagagcttgtgaggatataaataagaaggtggctcgtgaggggcggctagtggctagcagaaagcaaatcaaactgaataattttaactgtcaaaaattaaagaagcaggttcagactattatgtgggagtattgcgggattgtgcgttctatcaatggcttgaaaactgggctaaaaaaattgaaagaacttgaaaatacctcttttgactcttttgaatttcgcaattttgtgcaaagcgcaaggcttattgtggaaagtaccctaaaacgaaaggaatccagaggtttgcaatgcctaacggattatccgcagaaaaattcaaagtatttgaagcattttactttggtaaaagatatttaa

SEQ ID NO: 8492 - protein, 166 aa, Unknown
  Obtained from environmental sample
  DOMAIN (80)...(166): Fumarate reductase/succinate dehydrogenase flavoprotein C-terminal domain
  misc_feature (1)..(166): Xaa is any amino acid
MGVFVNSFSRTTIDGLYACGEIAATGVTGANRLASNSLLESVVFALRACEDINKKVAREGRLVASRKQIKLNNFNCQKLKKQVQTIMWEYCGIVRSINGLKTGLKKLKELENTSFDSFEFRNFVQSARLIVESTLKRKESRGLQCLTDYPQKNSKYLKHFTLVKDI

SEQ ID NO: 8493 - DNA, 882 bp, Unknown
  Obtained from environmental sample
  misc_feature (1)..(882): n is a, c, g, or t
atggcggtgaaaaatccctcttttttattgcgtttcggaaatttcctgtatgccgccaatgaaaccggaagagcgggaatagtatccgctttgtcagtaggagatcagaatgctttgactttcctcaatagccgggaggcatccggtgccggaacctgccatgtagccgtaatgaacaactatctttacgcagcgaattatgaaagcggcagcatctttggcattgaaattcttcccgacggctccctcggcggtgttgtagcggaaatacagcacgaaggctcaggcccgaatcctgaccgccagaaagggccccacgcgcattcggttaatcctgttccgggggctaattttctgattgccgccgaccttggggccgacagtctgttttgctataaccagcggagagacggttctctcgttccggacagtataagccctgttgtttcggcaccggcgggcggtgggccacggcatatagcaatccatcccagcggtaaacttttttatgtcgttatggaaatgggtgtaagccttgcttgctataaatttacaaagtcaggtgtgaaaccagaggcagtgtatcttcttatagaaggagcatttactcaagcggataccgctgccgacatccattttacggaggatggaacaaggctatatgcttctgtaagaggaaagaaccttatctcggtctttagtaccgtcgagggcgcttcaccgcgtttaataggttcttatccgacttttggagacagccccagaaacttctgcctttcccccggggaggaatttgtcctcatcgcccatcaggctaccggccatgtaactgtctgtccgatagattcccaaacaggggcagtggaaacgcgcttgttctga

SEQ ID NO: 8494 - protein, 293 aa, Unknown
  Obtained from environmental sample
  misc_feature (1)..(293): Xaa is any amino acid
MAVKNPSFLLRFGNFLYAANETGRAGIVSALSVGDQNALTFLNSREASGAGTCHVAVMNNYLYAANYESGSIFGIEILPDGSLGGVVAEIQHEGSGPNPDRQKGPHAHSVNPVPGANFLIAADLGADSLFCYNQRRDGSLVPDSISPVVSAPAGGGPRHIAIHPSGKLFYVVMEMGVSLACYKFTKSGVKPEAVYLLIEGAFTQADTAADIHFTEDGTRLYASVRGKNLISVFSTVEGASPRLIGSYPTFGDSPRNFCLSPGEEFVLIAHQATGHVTVCPIDSQTGAVETRLF

SEQ ID NO: 8495 - DNA, 354 bp, Unknown
  Obtained from environmental sample
  misc_feature (1)..(354): n is a, c, g, or t
gtggacaaagttatagaaaagccgataatggacatgagtgccccggaacattggggaatatttttccggtatttgaccgataaggcaaaacgcgggaaaataaacgaaataataaagtgtgaggagggaatagccatggcaagcgaagtattgataactatcagcaaggatgaggaagaacggttccgactgatgagtaaagaaaaatatgaacttgatctgcagagcaagatgacttacgaaaaaaggcaagcgagacaggaaggaaagcaggaagggaaacaggaaatactcgatctgctgaaaagcggcaaatctgcggaagagataatcagggactatagcagcaagtaa

SEQ ID NO: 8496 - protein, 117 aa, Unknown
  Obtained from environmental sample
  misc_feature (1)..(117): Xaa is any amino acid
MDKVIEKPIMDMSAPEHWGIFFRYLTDKAKRGKINEIIKCEEGIAMASEVLITISKDEEERFRLMSKEKYELDLQSKMTYEKRQARQEGKQEGKQEILDLLKSGKSAEEIIRDYSSK

SEQ ID NO: 8497 - DNA, 309 bp, Unknown
  Obtained from environmental sample
  misc_feature (1)..(309): n is a, c, g, or t
ttgacggatcagattcggcacgagcggaacgtccgcgntatgacaataacaaagagcaaccgccgcgtctcggttcaggttgttgatgacagtaagggacatactttggccagcgcttctacgcttgaaaaagaacttaaaaacatcaaagcgactgtcgaaggcgccggaaagttaggtgaaataataggcaaacgtctgcttgaaaaaaacataaagactgttgtttttgatcgcaacggttatttatatcacggaattgttaaggctttggccgacggaagccggaaagcaggcatagagttttag

SEQ ID NO: 8498 - protein, 102 aa, Unknown
  Obtained from environmental sample
  DOMAIN (1)...(102): Ribosomal L18p/L5e family
  misc_feature (1)..(102): Xaa is any amino acid
MTDQIRHERNVRXMTITKSNRRVSVQVVDDSKGHTLASASTLEKELKNIKATVEGAGKLGEIIGKRLLEKNIKTVVFDRNGYLYHGIVKALADGSRKAGIEF

SEQ ID NO: 8499 - DNA, 636 bp, Unknown
  Obtained from environmental sample
  misc_feature (1)..(636): n is a, c, g, or t
atggcgaaaactgaagatatgatagaagaagacggagaagtcgaagttgaatccgcagttgaagatacagtggatgaagttcgtgcctcaggcagagaaggcagaggcgaaggacgacgtagagagcggggaagagatcgcgatagagaacattctgaaaaagaatttgtcgaaaaacttgtcaagcttaaccgtactgcaaaagttgttaaaggtggtcgccgtttttccttctcagctctcactgtcattggagaccgcaaggggagagtcggctatggtttcgggaaagcaaatgatgtctcagaagctatccgcaagagcatagacaaagcgaaacgcaaaatgattcacctgcctgttaaaaacggtacaatcccccatgaagtaacagggcttttcaaagcgtcccgtgtcttgcttaaacccgcttgttcgggaacaggaataatcgccggaggagctgttcgcgccattatggaagccggcggcgttaccgatgtgctttcaaaatccattggttcgtccagtcaatacaatgtagtaaaagcgacatttgattgtattaacaaaatgatggacgcaaggactatatcaagaaacaggggtaaatccctgaatgagctgtggggntag

SEQ ID NO: 8500 - protein, 211 aa, Unknown
  Obtained from environmental sample
  DOMAIN (130)...(203): Ribosomal protein S5, C-terminal domain
  misc_feature (1)..(211): Xaa is any amino acid
MAKTEDMIEEDGEVEVESAVEDTVDEVRASGREGRGEGRRRERGRDRDREHSEKEFVEKLVKLNRTAKVVKGGRRFSFSALTVIGDRKGRVGYGFGKANDVSEAIRKSIDKAKRKMIHLPVKNGTIPHEVTGLFKASRVLLKPACSGTGIIAGGAVRAIMEAGGVTDVLSKSIGSSSQYNVVKATFDCINKMMDARTISRNRGKSLNELWG

SEQ ID NO: 8501 - DNA, 303 bp, Unknown
  Obtained from environmental sample
  misc_feature (1)..(303): n is a, c, g, or t
ttgcgcgttatgacgagtatggtttttgctcttctttgcttcaccggcatntttgtcatgttttttcatataatgcgcagcctggagaaaatccaggaacacatgcgcaacgaacatgcccaactcagggtgcaaatacgcgcgcttgaagcccgtctggacgcgctgaccggcacggcgtcttctgtccccgcttctccgtccgatacgtcccgggctcccctgatgcttattcccaaagaccctctggacgccgctccggatgacccgctggcgcggtttgaacccagacgccaggcatag

SEQ ID NO: 8502 - protein, 100 aa, Unknown
  Obtained from environmental sample
  SIGNAL (1)...(29)
  misc_feature (1)..(100): Xaa is any amino acid
MRVMTSMVFALLCFTGXFVMFFHIMRSLEKIQEHMRNEHAQLRVQIRALEARLDALTGTASSVPASPSDTSRAPLMLIPKDPLDAAPDDPLARFEPRRQA

SEQ ID NO: 8503 - DNA, 528 bp, Unknown
  Obtained from environmental sample
  misc_feature (1)..(528): n is a, c, g, or t
atgcctgatgtcattaataaggtaatgtcgttcattaacagggacggcgaaggcgaatcggaaaaagacatactgctaaagcagatagccaaagatatttctcaaaacaaatacgccaaattttaccgtgtaaggcagcaggaggcggacgtttctttggggcagttattttacaatctgtataaacttgtttaccctatgcaagtttttctgaaagacccggccaaagtaaccaaaatcaggcagatcacccttgaagcttttttggataagaaaacgatggatcttatcaagaagcttagccttgaagcagtgaacgaaaatatgaaagccggaagcgatgtaataaaaattctggaagatgatcttgccgctttaactgcgggatttgacagcccaagaattgtagcggcggacaaatgccacaacctcatcgcttccataaaacaatttgtgtctttcgattttagttcgttaatcagaaagttcgatcccgagttaaagagggggattttcttactcagttga

SEQ ID NO: 8504 - protein, 175 aa, Unknown
  Obtained from environmental sample
  misc_feature (1)..(175): Xaa is any amino acid
MPDVINKVMSFINRDGEGESEKDILLKQIAKDISQNKYAKFYRVRQQEADVSLGQLFYNLYKLVYPMQVFLKDPAKVTKIRQITLEAFLDKKTMDLIKKLSLEAVNENMKAGSDVIKILEDDLAALTAGFDSPRIVAADKCHNLIASIKQFVSFDFSSLIRKFDPELKRGIFLLS

SEQ ID NO: 8505 - DNA, 855 bp, Unknown
  Obtained from environmental sample
  misc_feature (1)..(855): n is a, c, g, or t
ttgtcttgtattagtctcaagacccaggaagagaagctttccccgccgcgttccacggacgcaataaggcttgatgatattaaaaaatatgtcccgctggaaccggtaagggcgattgaccttattggtatataccgcgagacataccgggttaccgatgaggaagaaatcgcggctgaacttatggaaatggagaaagcggcgactcaaggggtgaaggatcttcttgataaagcaattgaggaaaagcgctgggatgacgccgcgtcatacagccgttctctggcgtgtattgagccgcaataccaggataccgaatccggctatatacttgccttcgcgaagaaaaaactggaggaaaacgataatctcagcgcttttcttgccgccgtgcatgcccatgaactgaaccccctgtcttttgatgacgcggcgctttttcttgaacgcgcggtgcaggcaaaacagcgccgggcagccgcgtattttctcgctgccgcccagaaaacaggttccgttgccaaaatccccgcgccttcagccgaatatgccaggggttctgacagcgtcgccgccatgatcaacggcgtcgccacggtagtggttgacaggggtataaaaattgagcgcggcatgggttacgcggacaggattttgggctccgctttttttatcgattcaacgggccttttaataaccaattaccatgtaatcgcgagcgaggtagaccccaagtatgagggatactcccgcatgtatatcaggatgggcgacagttcaagtccccgtatgccggcgcgggtaataggctatgacaaggcgctggatctcgcgttgattaaaacaggagtataa

SEQ ID NO: 8506 - protein, 284 aa, Unknown
  Obtained from environmental sample
  misc_feature (1)..(284): Xaa is any amino acid
MSCISLKTQEEKLSPPRSTDAIRLDDIKKYVPLEPVRAIDLIGIYRETYRVTDEEEIAAELMEMEKAATQGVKDLLDKAIEEKRWDDAASYSRSLACIEPQYQDTESGYILAFAKKKLEENDNLSAFLAAVHAHELNPLSFDDAALFLERAVQAKQRRAAAYFLAAAQKTGSVAKIPAPSAEYARGSDSVAAMINGVATVVVDRGIKIERGMGYADRILGSAFFIDSTGLLITNYHVIASEVDPKYEGYSRMYIRMGDSSSPRMPARVIGYDKALDLALIKTGV

SEQ ID NO: 8507 - DNA, 714 bp, Unknown
  Obtained from environmental sample
  misc_feature (1)..(714): n is a, c, g, or t
atgatggaatacgacggcgacacccatgttcccaaacgctacctggtaagccctccctcaattgacagaaccatgggggaataccttgccgcaaccggcgtaagaaccctggcgatttcagaaacccagaagtacggccacgttacttacttttttaacggcaaccgtaccggcaaattcgacgataagctggaagactacgtggaaataaaaagcgacatagtcccctttgaagagcgcccctggatgaaatgcgccgacatcgccgaccgggtaattgaagccgcaggttcgggcaaatacgactttatccggctgaatttccccaacggggacatggttggccatacgggcatttaccaggctgtggtctgctcgatggaggctatggatctccagataggccgcatcgcgcacgcggtggagaaagcaggcggcatcatagttattacagcagaccacggtaacagcgacgacatgtacgagcacgacaaaaaaaccggcgctgtgtcgctcaagccagatggcacgccaaaagccaaaaccgcccacagccttaaccccgttccatgcgtcatcttcgacccggagtgcaagggagaataccctgcaaaaagcggtgaaggcgacctgaacgaaggcttaggcattagctcaatcgcggcgacctgtattcaactgctttgggtatactccaccggaggattacgataa

SEQ ID NO: 8508 - protein, 237 aa, Unknown
  Obtained from environmental sample
  DOMAIN (82)...(213): Metalloenzyme superfamily
  misc_feature (1)..(237): Xaa is any amino acid
MMEYDGDTHVPKRYLVSPPSIDRTMGEYLAATGVRTLAISETQKYGHVTYFFNGNRTGKFDDKLEDYVEIKSDIVPFEERPWMKCADIADRVIEAAGSGKYDFIRLNFPNGDMVGHTGIYQAVVCSMEAMDLQIGRIAHAVEKAGGIIVITADHGNSDDMYEHDKKTGAVSLKPDGTPKAKTAHSLNPVPCVIFDPECKGEYPAKSGEGDLNEGLGISSIAATCIQLLWVYSTGGLR

SEQ ID NO: 8509 - DNA, 678 bp, Unknown
  Obtained from environmental sample
  misc_feature (1)..(678): n is a, c, g, or t
gtgattggaaatcccggatgttatcccacaggcggttccctcggcgcgtttccggctttggcgaagggaatgaaccgcacggatattccagtaattattgactccgtaagcggcgttacgggcggcggcagggaaccgtcccgctcgttccattatgccgaatgtgcggattccatatcggcgtataaaatttcctcccacagacattcgcctgaaattgagcgtaatctcgcgctaatggcggctgtagggaacaatcccgcgccgaggataatttttactccgcgtcttgcgcccgtaaacaggggaattctcagcgtcatttacatcgcgctttgtgaaaagtggagcgtgaaggcgaataaaacttatatgccgccttcagacgatgttgaagtaagaacgtctgaaatccgcgatatttataccgacttttataaggatgaaccgtttattcgggtacttccgctaggccttaccgccgccaccaaccgcgtgcgaatgtcgaattactgcgacatttccgttcatgttgacattaacggttccacattgatagtgactaccgccattgataacatggttaaaggcgccgccggccaggccattcaaaatatgaacattttattcggttttgacgaaagggccggtcttgaagcggtaccaattattttttag

SEQ ID NO: 8510 - protein, 225 aa, Unknown
  Obtained from environmental sample
  SIGNAL (1)...(21)
  DOMAIN (20)...(196): Semialdehyde dehydrogenase, dimerisation domain
  misc_feature (1)..(225): Xaa is any amino acid
MIGNPGCYPTGGSLGAFPALAKGMNRTDIPVIIDSVSGVTGGGREPSRSFHYAECADSISAYKISSHRHSPEIERNLALMAAVGNNPAPRIIFTPRLAPVNRGILSVIYIALCEKWSVKANKTYMPPSDDVEVRTSEIRDIYTDFYKDEPFIRVLPLGLTAATNRVRMSNYCDISVHVDINGSTLIVTTAIDNMVKGAAGQAIQNMNILFGFDERAGLEAVPIIF

SEQ ID NO: 8511 - DNA, 897 bp, Unknown
  Obtained from environmental sample
  misc_feature (1)..(897): n is a, c, g, or t
gtggcaattgaagctggctattcaatcgttgtcattgattcgctcacccacgaatgggctgctagtggtggaatcctagacgaaaaagccaccaaagacatgcagggcggcaacagctacaccaactggaacggcatcaagcaaatccacaatgcttttgtggaatcgttgctacaggccccgatccatattgtcgcaactttaagaagcaaaactgactatgttctggaaaccaccacaaacaagtatggcaaggaagtccaaagccccagaaaggtcggcatggccccgatctccagcgacggcatagactacgagttttcaattgtgttcgacattgaccgtgcaacgcacatggcagttgcgtccaaagaccgcaccgcgatgttcggcaacaaggccatgttcctgaccccccagatcggcaagcagataaaggcgtggctggagggcggcgcaagcgcacctagccccgtcagtggacagaagcccgtgcagaagcccgcgcaaacacagagcgaggcccctgcgccagcgcagcccaaagctaagggcggcaggaaagccaaagagcagcagcaggcccaagaagcaccaccagcaagccaagggggagcaatgggagatgaaccggattctccaatcgtccagcttctctccccagagcagcggaacagaatccgcctctacctgaacagctacaaagttgacttccaagcgttcctcaactgggcgaagtccaagggcctcatttcacccgacagcgattcaaccgacttcggcatagacgacattcgcgccgacaagttcgagtatctggagagcctgttcaaccatgaaaagtcgcgcatggcctttatccagcacctcaacaatccggctgcaaagacggcgtag

SEQ ID NO: 8512 - protein, 298 aa, Unknown
  Obtained from environmental sample
  misc_feature (1)..(298): Xaa is any amino acid
MAIEAGYSIVVIDSLTHEWAASGGILDEKATKDMQGGNSYTNWNGIKQIHNAFVESLLQAPIHIVATLRSKTDYVLETTTNKYGKEVQSPRKVGMAPISSDGIDYEFSIVFDIDRATHMAVASKDRTAMFGNKAMFLTPQIGKQIKAWLEGGASAPSPVSGQKPVQKPAQTQSEAPAPAQPKAKGGRKAKEQQQAQEAPPASQGGAMGDEPDSPIVQLLSPEQRNRIRLYLNSYKVDFQAFLNWAKSKGLISPDSDSTDFGIDDIRADKFEYLESLFNHEKSRMAFIQHLNNPAAKTA

SEQ ID NO: 8513 - DNA, 357 bp, Unknown
  Obtained from environmental sample
  misc_feature (1)..(357): n is a, c, g, or t
atgaaatttgaaccacaaaagccgtatatcacgcacgaaaatattgccgggtcaatcaccccccatgactactcctgcgcactacgtgcgggggcgtcagcaaactacattcttatcaataacgagcgacgaccaacggcccgcgagttgttgaggctgcaaggatttcctgacacattcaaaattgttgttccttacaattgcatacggaaacaaactgggaacagcgttgctgtgccagttattaaagctgtggcacgagaaatgttagtagccttaaaacgttttgaaataaaaaggtgcgaactttccgcctgccgagacgtagcaaatctatcaattgctttgcaagcatga

SEQ ID NO: 8514 - protein, 118 aa, Unknown
  Obtained from environmental sample
  misc_feature (1)..(118): Xaa is any amino acid
MKFEPQKPYITHENIAGSITPHDYSCALRAGASANYILINNERRPTARELLRLQGFPDTFKIVVPYNCIRKQTGNSVAVPVIKAVAREMLVALKRFEIKRCELSACRDVANLSIALQA

SEQ ID NO: 8515 - DNA, 687 bp, Unknown
  Obtained from environmental sample
  misc_feature (1)..(687): n is a, c, g, or t
atgtggctggcgaggcttgtggcttcgtttatgtcgtgcgtggaaaagatggccgtcgtgccggtatctttcaaaatccgcccaaggtcggccatcagcggcctcttggtcggcgcgtccaatgcggaaaaaggttcgtccaacagcatcagctcgggccctattgcaaaggctctggccaggctgacccgctgcgactcgccgccggacagctttcgcgcagaacggcccagcaggtgggatacgccaaacaatgcggcggcggcggcggccctctctctcctctccgcctttggaaccctgcgaagccgcagaccggattcgatgttagctcctaccagcgaatcaaacaggagcggctcttggaaggccaaggtgacatggcggcgcagctttgcaaaggcggcgcgtcctgcgacttcctcacccttgaagaaaatctttccttccacaggctccagcagccctgccaggcacagcattagcgtcgtcttgccagacccatttgggcccagcacggccaaaacctgcccccgcccaacagccaactcggacacgcccagcacccgcgcccccccctgggccgccacaaggctttcgatgcgaatgatggtctgcatggatgaatgtcggagttgcggtgacagaatcagtctatatagcaattcaatttattgtagtccataa

SEQ ID NO: 8516 - protein, 228 aa, Unknown
  Obtained from environmental sample
  misc_feature (1)..(228): Xaa is any amino acid
MWLARLVASFMSCVEKMAVVPVSFKIRPRSAISGLLVGASNAEKGSSNSISSGPIAKALARLTRCDSPPDSFRAERPSRWDTPNNAAAAAALSLLSAFGTLRSRRPDSMLAPTSESNRSGSWKAKVTWRRSFAKAARPATSSPLKKIFPSTGSSSPARHSISVVLPDPFGPSTAKTCPRPTANSDTPSTRAPPWAATRLSMRMMVCMDECRSCGDRISLYSNSIYCSP

SEQ ID NO: 8517 - DNA, 573 bp, Unknown
  Obtained from environmental sample
  misc_feature (1)..(573): n is a, c, g, or t
gtgattataggcggtattttaatatcacctatattactgttaatctcgattttgataaaaattacatccaggggacctgtattgtataaacaaaagcgactaggcaagaacggaaaatatttctttacatacaaattccgttctatggcagttgatgcggagcagcagcttcaaaatttaattgataaagattctttattaaaaacagaatgggaacagaagcataaacttcaaaatgatccaagaataacaagtataggcagattattacgcagaacaagttttgatgaattgcctcagcttattaatatattaaaaggagaaatgtcgcttgtggggccgcgcccgattgtagatgaagaagtgataaaatacggagaagattataatctggtattctcaaataaaccgggattgacaggtctttggcagatatccggaagatcagacacaaaataccatgacagaatagcttacgatacatattatctgcaaaactggtctatatggctggacctatggataatctataaaacattcggcgttgtaatttcaggaaaaggcgcatattaa

SEQ ID NO: 8518 - protein, 190 aa, Unknown
  Obtained from environmental sample
  DOMAIN (2)...(190): Bacterial sugar transferase
  misc_feature (1)..(190): Xaa is any amino acid
MIIGGILISPILLLISILIKITSRGPVLYKQKRLGKNGKYFFTYKFRSMAVDAEQQLQNLIDKDSLLKTEWEQKHKLQNDPRITSIGRLLRRTSFDELPQLINILKGEMSLVGPRPIVDEEVIKYGEDYNLVFSNKPGLTGLWQISGRSDTKYHDRIAYDTYYLQNWSIWLDLWIIYKTFGVVISGKGAY

SEQ ID NO: 8519 - DNA, 729 bp, Unknown
  Obtained from environmental sample
  misc_feature (1)..(729): n is a, c, g, or t
atgaagaaagagcagcatagtccgacggcgcactccgcgccccctgattctcccgacggcgatgtggaaattcttgaggcggatgatcaggaaatccaggatatcgagctgacggacgatgacgagggcgatgtccccgtcattgacgtgggagacgaagacgccgccctgcgggacaaaagcctgcccatgccggccaatgtccgcgacagtctgcatctgtatctgagggaagtgagccgttttcccctgctcaagccggacgaggagcagcggcttgccagacgcgtgcgggaacacaatgacagcgaggccgcctttcagctcatttcctcccatttgcggctggtggtcaaaatcgccatggattttcagcgccgctggatgcagaacgtgctggatctcattcaggaaggcaatgtgggactgatgcgcgccgtcaacaagttcgatcccgacaagggcatcaagttctcctattacgccgcgttctggattaaggcgtatatcctgaagttcatcatggacaactggcggatggtcaaaatcggcaccacgcagacccagcgtaaactgttctacaacctgaaccgggaacggcaaaaactcatcaacgaaggcttcgacccggatgcggccatgctctcctcccgcctcggcgtcagtgaagaaccaggtgctggagatggagcagcgcctggcggcggcggacgcctctttcgccgataa

SEQ ID NO: 8520 - protein, 242 aa, Unknown
  Obtained from environmental sample
  DOMAIN (69)...(105): Sigma-70 factor, region 1.2
  misc_feature (1)..(242): Xaa is any amino acid
MKKEQHSPTAHSAPPDSPDGDVEILEADDQEIQDIELTDDDEGDVPVIDVGDEDAALRDKSLPMPANVRDSLHLYLREVSRFPLLKPDEEQRLARRVREHNDSEAAFQLISSHLRLVVKIAMDFQRRWMQNVLDLIQEGNVGLMRAVNKFDPDKGIKFSYYAAFWIKAYILKFIMDNWRMVKIGTTQTQRKLFYNLNRERQKLINEGFDPDAAMLSSRLGVSEEPGAGDGAAPGGGGRLFRR

SEQ ID NO: 8521 - DNA, 585 bp, Unknown
  Obtained from environmental sample
  misc_feature (1)..(585): n is a, c, g, or t
ttgccggggcttacgcttaccgccgccagcacggaaacttccagcccttctaggtactcttcgagaataacgcttttcccggcttcccccaggctgctttcctccatgaacgaggaaagggtttgctttgcttcggcaaaatcagccgcgacaaccactcccttgcccgccgcaaggccgtcggccttaattaccaagggcgatggatttgtttccttcgctttgccaaaatgtttttcggcgtatttcaaggcgtccgcatggtttgtaaaatttttgctcgccgctgtgcgtattttatacttgcccataaaggactttgagtataccttgctggtttcaagccgtgcggctttttgccctggcccgacaatcgcaagtcccgcgctacggaagcggtcaacgatgccttcagccagcggcgcttcgggccccaccaccgtaaggtcaatgccttcttttttggcaaatcccaaaagcagttcctggcctttttcggtttcgggactctcgttgcccatcgggaggtttacagttttttcttctgtggcagtcccgccgtgccggagcggcaaaaatctctga

SEQ ID NO: 8522 - protein, 194 aa, Unknown
  Obtained from environmental sample
  misc_feature (1)..(194): Xaa is any amino acid
MPGLTLTAASTETSSPSRYSSRITLFPASPRLLSSMNEERVCFASAKSAATTTPLPAARPSALITKGDGFVSFALPKCFSAYFKASAWFVKFLLAAVRILYLPIKDFEYTLLVSSRAAFCPGPTIASPALRKRSTMPSASGASGPTTVRSMPSFLANPKSSSWPFSVSGLSLPIGRFTVFSSVAVPPCRSGKNL

SEQ ID NO: 8523 - DNA, 810 bp, Unknown
  Obtained from environmental sample
  misc_feature (1)..(810): n is a, c, g, or t
atgggcaatagcgcctacaagaatgtcttccgccacgccgcagttattgatggcctcgtttggaaaccctttattctcagcaagagcgttatcattgccccgggagaggttgtaaattgggcgccgctcttcaagtgcgagcaacacttcgaacagatgggtcagataatgacgcagttcgacaagaatcacattgaaaagatcggtctcgtcaagatggactttttgggactgcgcagcctcaccatcgtccaagacacgcaacgccttgtcaaaaaatatcacggcatagatattgatttgtgtaaattacccgacggcgaccaaaaagcgcttgacttgttcggcagcggcgagaccacaggcatattccagtttaagtctaacggcatgaaggactacctgcgcaaactgaaaccgagcggcatagaagatttgatagcgatggtcgccctatataggccggggcccatggataatatcaatatgttcattgaccgcaagcacggcagggagaaaatcgagtatctccacccgtgccttgagaagattctcggcgtaacctacggcgtaatcgtctaccgagagcaggtgatgcgcatcgcgcaggttatgggaaaatttacgatggggcaagcggatattctgtgtaacgcgattagaaagaagcagaccgccgagatggaagaggcgggcggcaagtttattgagggcgcggtgtcgcaaggtatagataaaacggtcgcgaaagaggtgtacgacctcctcgtaatgtttgccggttacaccttcctcagagcgcaagcctag

SEQ ID NO: 8524 - protein, 269 aa, Unknown
  Obtained from environmental sample
  DOMAIN (3)...(243): Bacterial DNA polymerase III alpha subunit
  misc_feature (1)..(269): Xaa is any amino acid
MGNSAYKNVFRHAAVIDGLVWKPFILSKSVIIAPGEVVNWAPLFKCEQHFEQMGQIMTQFDKNHIEKIGLVKMDFLGLRSLTIVQDTQRLVKKYHGIDIDLCKLPDGDQKALDLFGSGETTGIFQFKSNGMKDYLRKLKPSGIEDLIAMVALYRPGPMDNINMFIDRKHGREKIEYLHPCLEKILGVTYGVIVYREQVMRIAQVMGKFTMGQADILCNAIRKKQTAEMEEAGGKFIEGAVSQGIDKTVAKEVYDLLVMFAGYTFLRAQA

SEQ ID NO: 8525 - DNA, 594 bp, Unknown
  Obtained from environmental sample
  misc_feature (1)..(594): n is a, c, g, or t
atggcgcaaacgcgaactgttaaaaaacccgattttgactcagtatgggcggctttacaggaagtagccgcaagtcagaaagagactgccaaacggcaagaagagactgaccgcctaatgaaagaaactgaacgcctgcaaaaaaataatgcccgtgaaatcggaaaactcggcggccgttttggggaaatgatagagtatatggttgtgccgaacctgcttgcaaaattcaaagctcttggttttgtttttgagaaagtccatcaacagagttctatagaagatgagaaaaataatattttcgcggaaatagacattacccttgaaaacggcgacaaggtaatgattattgaagtaaagtccaaaccgaaaaccgaagatattacagaacatattgagcgcatgaaaaaagtcagagcccacgcggatattcacaatgacaagaggaaatatcttggcgcgattgtcggaatggtatttaagaaagaagaaaaaacattcgctatgaaaaacggattttatgtcattgagccgtcgggagattcgtttattatcaccgcgcccgaagggatctattccccgcgggaatggtaa

SEQ ID NO: 8526 - protein, 197 aa, Unknown
  Obtained from environmental sample
  misc_feature (1)..(197): Xaa is any amino acid
MAQTRTVKKPDFDSVWAALQEVAASQKETAKRQEETDRLMKETERLQKNNAREIGKLGGRFGEMIEYMVVPNLLAKFKALGFVFEKVHQQSSIEDEKNNIFAEIDITLENGDKVMIIEVKSKPKTEDITEHIERMKKVRAHADIHNDKRKYLGAIVGMVFKKEEKTFAMKNGFYVIEPSGDSFIITAPEGIYSPREW

SEQ ID NO: 8527 - DNA, 453 bp, Unknown
  Obtained from environmental sample
  misc_feature (1)..(453): n is a, c, g, or t
ttgacagcatttgggttccgagttatacttgaagcaaaaaaactggacacgataaagaacgcgctgatggagcttctaaaacaaagcttccgtcctgaatttctgaatcgaattgacgagactgtgatcttcaaccggcttggcaaagacgagattgcaaaaatcgtggacatccagctcgcgctgttaagctcccgcctggccgaacgcaaggtggagctaaagcttaccaaagcggccaaggaactgcttgccgaacgcggttacgatccgcttttcggcgcaagacccctgaagcgcgcaatccaggctgacctggaaaatcccctggcaaaggcgattatttcaggaaggataaaagaaggcgacacagtaaccgcagacaaaaattccgaaacagggggcgaggcgctctcgttcaaaaagagcgccgcttctaagcgggaacagtaa

SEQ ID NO: 8528 - protein, 150 aa, Unknown
  Obtained from environmental sample
  misc_feature (1)..(150): Xaa is any amino acid
MTAFGFRVILEAKKLDTIKNALMELLKQSFRPEFLNRIDETVIFNRLGKDEIAKIVDIQLALLSSRLAERKVELKLTKAAKELLAERGYDPLFGARPLKRAIQADLENPLAKAIISGRIKEGDTVTADKNSETGGEALSFKKSAASKREQ

SEQ ID NO: 8529 - DNA, 444 bp, Unknown
  Obtained from environmental sample
  misc_feature (1)..(444): n is a, c, g, or t
atggatgcacnnctggaagtagtcaggggaattatgagaccatacggaataactgtggactgtgttaattcaggacaaggagcggttgatattattaaaaacggaaaaataaaatacaacgcgatttttatggattacatgatgcctgaaatggacggccttgaagctacacgtatcatccgaaacgagatagggactgagtatgccaggacagtgccgatcattgcccttactgccgatgccgtcgttggcagcgccgaaatgtttttacaaaacggttttcagggtcttctttctaaacccataaacatgaaggaaatgaattcgattatcaatacttttgtcaggaatatggaatatgaagcagaggaggggagaaaaacaaaggtattgcaaaacgccggccagacaacacgcagcagcctttttactgttcccgcttag

SEQ ID NO: 8530 - protein, 147 aa, Unknown
  Obtained from environmental sample
  DOMAIN (2)...(112): Response regulator receiver domain
  misc_feature (1)..(147): Xaa is any amino acid
MDAXLEVVRGIMRPYGITVDCVNSGQGAVDIIKNGKIKYNAIFMDYMMPEMDGLEATRIIRNEIGTEYARTVPIIALTADAVVGSAEMFLQNGFQGLLSKPINMKEMNSIINTFVRNMEYEAEEGRKTKVLQNAGQTTRSSLFTVPA

SEQ ID NO: 8531 - DNA, 435 bp, Unknown
  Obtained from environmental sample
  misc_feature (1)..(435): n is a, c, g, or t
gtgatgcggaatcggatcctgaccatttcgcttggatggcgccttaacagcttgataccatacagctccgactttcaggcgataagaaatacagaagaccagattagaacaataaacatcgggcttgcgcagctaattcgcgcaacggaaatcgagatttacaatactgtgctgtcgctggaaaaaaccaggacgagtctggaggcgttgcagcaaactgtttccctcgcggaaagagcttacaggcttacggagcaggcgtatcaggcgggattacaggattattttcaggtgcagagcgccgcgcagtctcttcaacaggcccgcgttcaattactggaacaacaattcaattaccttaatggattaatcgatcttgaatattctatcggggttccgttcggcaccctcagttcaaaaggaagcaatcaatga

SEQ ID NO: 8532 - protein, 144 aa, Unknown
  Obtained from environmental sample
  misc_feature (1)..(144): Xaa is any amino acid
MMRNRILTISLGWRLNSLIPYSSDFQAIRNTEDQIRTINIGLAQLIRATEIEIYNTVLSLEKTRTSLEALQQTVSLAERAYRLTEQAYQAGLQDYFQVQSAAQSLQQARVQLLEQQFNYLNGLIDLEYSIGVPFGTLSSKGSNQ

SEQ ID NO: 8533 - DNA, 324 bp, Unknown
  Obtained from environmental sample
  misc_feature (1)..(324): n is a, c, g, or t
gtggacggggctttttcccgcaaattgccgcgcaaagaaaactttaattcgcacgaaaaactttccgcgttaataaatcatttggaagatcttgcaaagcccattatatggaaaaaaaactcaaaagagcttggatttttaggccttttcacggacggagacggaaattactggtttagggcgtcacgcggctttcacacctgcttaaacgaaagcctttccagccttgaatcattgattgacgaattaggcgaagaagttgatcttgaacaaaaacatgtcgtgaatcaatgttaccgcagattatcggactatttggggtaa

SEQ ID NO: 8534 - protein, 107 aa, Unknown
  Obtained from environmental sample
  misc_feature (1)..(107): Xaa is any amino acid
MDGAFSRKLPRKENFNSHEKLSALINHLEDLAKPIIWKKNSKELGFLGLFTDGDGNYWFRASRGFHTCLNESLSSLESLIDELGEEVDLEQKHVVNQCYRRLSDYLG

SEQ ID NO: 8535 - DNA, 306 bp, Unknown
  Obtained from environmental sample
  misc_feature (1)..(306): n is a, c, g, or t
ttgtactcggctgcgcaagccatcaaaagcccaagccccacgacgacgacgtctacggctcgcgggcttacggctacttcctcgacggcaacatgccgctggcggttgagacctacaagaaggggtacgcgtcggcgcggaagaccgaccacggccacggggcggccagatacctctccaacatcgggcgggtctactacgagatggggggcatggacagcgccgtcttataccaccgcagggcctacgatgaatttaaggccatcggcgacggcgaccacgcctctatggccgcggcgttcctag

SEQ ID NO: 8536 - protein, 101 aa, Unknown
  Obtained from environmental sample
  misc_feature (1)..(101): Xaa is any amino acid
MYSAAQAIKSPSPTTTTSTARGLTATSSTATCRWRLRPTRRGTRRRGRPTTATGRPDTSPTSGGSTTRWGAWTAPSYTTAGPTMNLRPSATATTPLWPRRS

SEQ ID NO: 8537 - DNA, 726 bp, Unknown
  Obtained from environmental sample
  misc_feature (1)..(726): n is a, c, g, or t
gtggatgcttccggcagcgtatacgcggcgggataccaatggggtaacggcacctttacctacggcgcgaatgtttctattaagggaaaatctttttatatatcgtcgtccggcactcgcgcttacttaaaaaatgcggtactggtgaagtatgattccaacggtacggcgctctggggcatacagcccgacacaggggcggggaattctgagacaggaacagtattcttcgcggcagcagtagattcttccggtaatgtgtacgcggcgggagattcggatggtactggtaatgggttgtataccagcagagcgctgttgacgaagtacaattccggcggtgaagcgcaatgggtgaagttaataagcaggcccccgggttccagctcctctaacggcttttcaagattcagcgccatagcggtagattcctcagacaatatatacacagcgggacgccagtccagtaactacacttatacctacggccctggggtttccgctcagggaacctacatcttgcacaatgtagtactggttaaatatgattccagcggcacggcgcagtgggcgcaaacggtcagtgcgggagacagaatctcacaattcaatgcggtcgcggtagattcttcaggcaacatatacgcggcgggaaaacaggaggtaccggtatatttacctatggcacgggagcttccgcccagggaatatctaacgataatttag

SEQ ID NO: 8538 - protein, 241 aa, Unknown
  Obtained from environmental sample
  misc_feature (1)..(241): Xaa is any amino acid
MDASGSVYAAGYQWGNGTFTYGANVSIKGKSFYISSSGTRAYLKNAVLVKYDSNGTALWGIQPDTGAGNSETGTVFFAAAVDSSGNVYAAGDSDGTGNGLYTSRALLTKYNSGGEAQWVKLISRPPGSSSSNGFSRFSAIAVDSSDNIYTAGRQSSNYTYTYGPGVSAQGTYILHNVVLVKYDSSGTAQWAQTVSAGDRISQFNAVAVDSSGNIYAAGKQEVPVYLPMARELPPREYLTII

SEQ ID NO: 8539 - DNA, 558 bp, Unknown
  Obtained from environmental sample
  misc_feature (1)..(558): n is a, c, g, or t
atgataaaatatccaaagaatatcatggaatttgaaaaggaatttaccagtgaaaagcaatgtcaagaatacctgatgaaacttcggtatgcagatggagtatatacctgtccaaaatgcggaagtaaaaaatcatggcaagtaagaaaaaacatttacgaatgcgcggaatgtcatcatcaggaatcaatattatccgggacattatttcaggacacacataaaccattgatgctttggtttcgggcaatctggtatgtaacgtcactaaagactgggaccagcgcactcggattgcaacggattttaggcataggtagttacaagacagcatggacttggctacacaagatacggagggcaatggtacgtccaggtcgggacaggctttcagggcgtgttgaagttgatgaaacgtatttcggagccccagaaaagggtggaaaacgtggtcgaggtactgaaaacaaggtattagctgctattgcggtagaaacgaacgaaaagattgtaggtcggattcgtgtcagtatgctgacagatgctcggccgatctga

SEQ ID NO: 8540 - protein, 185 aa, Unknown
  Obtained from environmental sample
  misc_feature (1)..(185): Xaa is any amino acid
MIKYPKNIMEFEKEFTSEKQCQEYLMKLRYADGVYTCPKCGSKKSWQVRKNIYECAECHHQESILSGTLFQDTHKPLMLWFRAIWYVTSLKTGTSALGLQRILGIGSYKTAWTWLHKIRRAMVRPGRDRLSGRVEVDETYFGAPEKGGKRGRGTENKVLAAIAVETNEKIVGRIRVSMLTDARPI

SEQ ID NO: 8541 - DNA, 924 bp, Unknown
  Obtained from environmental sample
  misc_feature (1)..(924): n is a, c, g, or t
gtgataattctagcggcgacaaaccgccccgacgttctggatccggccctgctgcggcccggccgcttcgacaggcaggtagtagtcgctatgccggacattaaggagcgcgaggcgatcttgcagatacactcggcaaagattcccctgggaaaagatgttgatcttacccgtgtagcgcgggcgacgccggggatgagcggggccgatattgccaacctggtgaacgaggcggccctgcacgcggcccgcaaggacaaaccggatgtggaaatgcatgactttgaggaagcgcgggacaaagtactgatgggcgtagcccgcagcaccctcgttgtgtctgaaaaggaacgccggatgactgcgatgcacgaggcgggtcatgccctgctgcattacttcctgaaaaacgccgaccccctgcacaaagttaccatagtcccccacggccgggcgctgggcatggccctgtccctgccggaggaagacagttacagccgcacgcgaggctggatagaggatagaatcgccatttgttacggcggctggatcgctgaaaaattaatcttcaatgagaccacaaccggcacaaagcaggacatacagcaggcgacggagatggcccgccacatggtctgcgaatggggcatggccgaggaaatggggcctgttgcatacggtcaggaagaagaacctatcttcctcggcaaggaaatcgccaggcataaggattattccgaagagaccgcccggcgcatcgacaaggctgtcaaggaaattctggacatcgcgcgcgaggaagcggagcgcattatccgcgaacagaangcagggcttgaagctcttgccgacgccctgctcagtaaagaaacccttgttgatgacgnaggtacgcagatacttggtgtangtaaccaatattaa

SEQ ID NO: 8542 - protein, 307 aa, Unknown
  Obtained from environmental sample
  DOMAIN (1)...(84): ATPase family associated with various cellular activities (AAA)
  misc_feature (1)..(307): Xaa is any amino acid
MIILAATNRPDVLDPALLRPGRFDRQVVVAMPDIKEREAILQIHSAKIPLGKDVDLTRVARATPGMSGADIANLVNEAALHAARKDKPDVEMHDFEEARDKVLMGVARSTLVVSEKERRMTAMHEAGHALLHYFLKNADPLHKVTIVPHGRALGMALSLPEEDSYSRTRGWIEDRIAICYGGWIAEKLIFNETTTGTKQDIQQATEMARHMVCEWGMAEEMGPVAYGQEEEPIFLGKEIARHKDYSEETARRIDKAVKEILDIAREEAERIIREQXAGLEALADALLSKETLVDDXGTQILGVXNQY

SEQ ID NO: 8543 - DNA, 438 bp, Unknown
  Obtained from environmental sample
  misc_feature (1)..(438): n is a, c, g, or t
gtgggggactatggtaactttgtgcagggggtcggcgtttttcaggaagtaatgcagcagggcatgacccgcctcgtgcatcgcagtcatccggcgttccttttcagacacaacgagggtgctgcgggctacgcccatcagtactttgtcccgcgcttcctcaaagtcatgcatttccacatccggtttgtccttgcgggccgcgtgcagggccgcctcgttcaccaggttggcaatatcggccccgctcatccccggcgtcgcccgcgctacacgggtaagatcaacatcttttcccaggggaatctttgccgagtgtatctgcaagatcgcctcgcgctccttaatgtccggcatagcgactactacctgcctgtcgaagcggccgggccgcagcagggccggatccagaacgtcggggcggtttgtcgccgctag

SEQ ID NO: 8544 - protein, 145 aa, Unknown
  Obtained from environmental sample
  misc_feature (1)..(145): Xaa is any amino acid
MGDYGNFVQGVGVFQEVMQQGMTRLVHRSHPAFLFRHNEGAAGYAHQYFVPRFLKVMHFHIRFVLAGRVQGRLVHQVGNIGPAHPRRRPRYTGKINIFSQGNLCRVYLQDRLALLNVRHSDYYLPVEAAGPQQGRIQNVGAVCRR

SEQ ID NO: 8545 - DNA, 747 bp, Unknown
  Obtained from environmental sample
  misc_feature (1)..(747): n is a, c, g, or t
atgtcggtaaataatgaaacaggttccgttactgacatcgcttcccttatagacattattcgaaaacaaactcctcctgttcattttcactgcgacattgttcaggctgtgggaaaagttcctattgatatttccggttggggaattgattccgcttcaataagcgctcacaaaatcggggggccgcgcggaattggccttttatatctgcgtcattctgcaggccagagcaagaccgaagttttttacaagggaggcggacaggagaacggaataaggggcgggacagaaaatatacaaggcgctatagctcttgcaaattgcatggaaatgtacgcaaactctaaaacattacacgaaaattatgaaagcgcgaaagctcgctggaataaattgatcactaccctttcggctattgaacgctgtacgataattccacagcagcgttcactgcatttaggcgtacaaaacaataatacagacagattttcgccgtatattttacaggttggttttaaaggtatccccggcgaggttttggcgcgcgctcttgacgatcttggttttgcggtttccacaggttccgcctgttcatcatcatcccctgaacgtccggttcttgccgcaatgggtatcgaagaaaatttaaggatagaaggtatacgcatttcacagggttttacaaccacagatgaggatattgacctcttattaaacgctattgcggaggtattaaaattcctgtaa

SEQ ID NO: 8546 - protein, 248 aa, Unknown
  Obtained from environmental sample
  DOMAIN (2)...(237): Aminotransferase class-V
  misc_feature (1)..(248): Xaa is any amino acid
MSVNNETGSVTDIASLIDIIRKQTPPVHFHCDIVQAVGKVPIDISGWGIDSASISAHKIGGPRGIGLLYLRHSAGQSKTEVFYKGGGQENGIRGGTENIQGAIALANCMEMYANSKTLHENYESAKARWNKLITTLSAIERCTIIPQQRSLHLGVQNNNTDRFSPYILQVGFKGIPGEVLARALDDLGFAVSTGSACSSSSPERPVLAAMGIEENLRIEGIRISQGFTTTDEDIDLLLNAIAEVLKFL

SEQ ID NO: 8547 - DNA, 516 bp, Unknown
  Obtained from environmental sample
  misc_feature (1)..(516): n is a, c, g, or t
ttggccgagcctgaatggattaaaaaatcagtccctccgctttttgattattgctgggaaattaccggcatatctttaccccaaagccttttaatttttgagagtgtttggtttaactgtaacatcaccgtaagcgagctcaatccgaaattttacagtattaatggggttctgtttgataaagaaatgaaatcacttattgtatatccaagaaataagaatgaaacagattatgcaataccagatggaatacaatatatttcagctaaagcatttctcggatgcatgaacctggttaatattaccctgccagagggtattaggttaattagcgattatgcgttcgcagggtgtgatagtattaaagctatagtgcttcctatgagcctacagtacattggggagtatattgttataggctgcagaaatcttgaaaccattacgctttcaaggaaaacaaaaatagggcataaggcttttgaggaatttacagggaaacttgtatatcgggattaa

SEQ ID NO: 8548 - protein, 171 aa, Unknown
  Obtained from environmental sample
  misc_feature (1)..(171): Xaa is any amino acid
MAEPEWIKKSVPPLFDYCWEITGISLPQSLLIFESVWFNCNITVSELNPKFYSINGVLFDKEMKSLIVYPRNKNETDYAIPDGIQYISAKAFLGCMNLVNITLPEGIRLISDYAFAGCDSIKAIVLPMSLQYIGEYIVIGCRNLETITLSRKTKIGHKAFEEFTGKLVYRD

SEQ ID NO: 8549 - DNA, 903 bp, Unknown
  Obtained from environmental sample
  misc_feature (1)..(903): n is a, c, g, or t
ttgccgccttatttgaagggcgcgcggcggatcctcaagggcaggggtgaattcctggaactgcttgtcacggcggcattgcccggaggccacgtccttattgaggacaatccggggctgggaaaaaccaccgtggcgaagacgctggcgaaactaatcgaggggaaaaaagggctcgtttttaaacgtatacagtttacccccgacctcctgccctacgacattacgggcgtcgacgtctttgatcccaaaacgctgaaattccgctttgtgcccggccccgtgcttgccaatatcgtgcttgccgacgaaataaaccgcgccactcccaaggtgcagtccgccctgctcgaggtgatggccgagaggcaggtgaccatcgggcagaccagccaccgccctctggaaccttttctggtgcttgccacgcaaaacccaatcgaaagcgaggggacttttcccctgccggcggcccagcttgaccgttttatgatgaaactttcgatggggtaccccggcagggaagcggaacttgccatactcgatgaaaatcccgccgagaaaggactggcgaacctcaagcccgttatcaggctggcggatttcctggaggcgaaaaaagccgccgcggaagtgttctgccatcaggcgctgaaagaagccgttgccgacattatccgcgacaccaggattcaccgggcttttacactgggggcaagcccccgcgccggcctgcattttcttgacgcggcaaaggcgcatgccttggtgcgcgggcggaattatattattgacgaggatctgacaatactcgcctctccggtgcttgcccacagggtgaggctccgcgatcccaaggcgcagggagataaatttattcgggagatctgcctgcgagaatag

SEQ ID NO: 8550 - protein, 300 aa, Unknown
  Obtained from environmental sample
  DOMAIN (31)...(223): ATPase family associated with various cellular activities (AAA)
  misc_feature (1)..(300): Xaa is any amino acid
MPPYLKGARRILKGRGEFLELLVTAALPGGHVLIEDNPGLGKTTVAKTLAKLIEGKKGLVFKRIQFTPDLLPYDITGVDVFDPKTLKFRFVPGPVLANIVLADEINRATPKVQSALLEVMAERQVTIGQTSHRPLEPFLVLATQNPIESEGTFPLPAAQLDRFMMKLSMGYPGREAELAILDENPAEKGLANLKPVIRLADFLEAKKAAAEVFCHQALKEAVADIIRDTRIHRAFTLGASPRAGLHFLDAAKAHALVRGRNYIIDEDLTILASPVLAHRVRLRDPKAQGDKFIREICLRE

SEQ ID NO: 8551 - DNA, 534 bp, Unknown
  Obtained from environmental sample
  misc_feature (1)..(534): n is a, c, g, or t
atgaccgaatgtgcccagaaaatggatgaaaacgaaacaatactggcagaccagaaaaaaggtttctggcagaaactgcggcttttgatccgctcaatgatgaatgccgaaccggaagaactgatctatgaactgcagtttatcgaacaggccacaggcgccataaaaaaagaaacactcaattttcaccaattccgggcggatatagataaaaaaatcagaatccttgcgggaatgagcggccaggggccggttttcgccaaactcaaggcaatgaacgaagaacagataaccggatacctggaacggacaatccgggacctgcaatactaccaccggacgctgacatcccttgatgaatattttaagtcaagcgttcctgtcggtgaacggggaaaaataaaaggcataaaacccgaattggcgtccattaaaaacagcattgtaagagccaaccaattgcggcatgagtatatcgcccaaaaggaagaagaagaacagatgaaacgtctgggaattaattccaatacctga

SEQ ID NO: 8552 - protein, 177 aa, Unknown
  Obtained from environmental sample
  misc_feature (1)..(177): Xaa is any amino acid
MTECAQKMDENETILADQKKGFWQKLRLLIRSMMNAEPEELIYELQFIEQATGAIKKETLNFHQFRADIDKKIRILAGMSGQGPVFAKLKAMNEEQITGYLERTIRDLQYYHRTLTSLDEYFKSSVPVGERGKIKGIKPELASIKNSIVRANQLRHEYIAQKEEEEQMKRLGINSNT

SEQ ID NO: 8553 - DNA, 495 bp, Unknown
  Obtained from environmental sample
  misc_feature (1)..(495): n is a, c, g, or t
gtgatacggattacgccgtctcaggaggctgaacgcattgccggcntgatggccgccgcgtggaaggcattgggcgttcctgtccgggtggaagtagttccctatggccgctattttgaggcacttaaaattgaaggctacacggtgggttttaccacctggatcggcgactttgccgacccatatactttcctgcaaatgtggcgcagggattccaatctcaatgacgcccaatacagcgacgatgattttgaggagttgatggaaaaatccatgctggaagaaggcgaaacccgctgggcgacgctcggcgaagcggaaaagctgcttcttgagcgcggttcagttataccggtttcattttctccggcgataaatatagttgacataaacgaactgggcggctggttccccaacgccctggacatccacccctttaaatacctgaatttcagggcgttccgcccccttcccggcgtggtaatggcaagataa

SEQ ID NO: 8554 - protein, 164 aa, Unknown
  Obtained from environmental sample
  misc_feature (1)..(164): Xaa is any amino acid
MIRITPSQEAERIAGXMAAAWKALGVPVRVEVVPYGRYFEALKIEGYTVGFTTWIGDFADPYTFLQMWRRDSNLNDAQYSDDDFEELMEKSMLEEGETRWATLGEAEKLLLERGSVIPVSFSPAINIVDINELGGWFPNALDIHPFKYLNFRAFRPLPGVVMAR

SEQ ID NO: 8555 - DNA, 804 bp, Unknown
  Obtained from environmental sample
  misc_feature (1)..(804): n is a, c, g, or t
atggcgcagggccttttcgcttctctcttaatcggtactatcattaatactctgggcacccagctccatataccggtactcaacagaatcggcgaatttgccacatcgggtgcgggcgcggcaatggcagtcgctatcggtttcgcgctgcaggcgccgccatttgtactgtattcgctggttgccgttggcgcggccgccaacagcctgggcggcgcgggaggcccgctggcggtattctttatcgcccttattgcggttttcttcggaaaactcgtctccaaagttacgccgatagatctcattgttactcccgccgtaacaataattgccggcgttttggccgcaatgcttctggctcctccgataggaaaattcgcaaacctgttcggcatggtcgtaatgtgggcaaccgatatgcagcctttcataatggggattctggtatccgcgattgtaggcattgtgctgacccttccaatcagttcggcggcactctgcgccgcccttgggctcgtcggtttggcaggcggcgcggctgtagccggatgctgtgcccacatggtcggtttcgcggctgcttcctacagggagaacaagattggcggccttttggctcagggtgtgggaacctctatgctgcaagttcccaatcttatgaaaaaacccatattgtggatacccgcagtagcggcttccataattaacgggcctgtggcgacagttgtctttaaactgaaaatgaacggcccccccgtttcttcaggcatgggcacttcaggcatggtaggccctatcggctaa

SEQ ID NO: 8556 - protein, 267 aa, Unknown
  Obtained from environmental sample
  DOMAIN (1)...(233): Phosphotransferase system, EIIC
  misc_feature (1)..(267): Xaa is any amino acid
MAQGLFASLLIGTIINTLGTQLHIPVLNRIGEFATSGAGAAMAVAIGFALQAPPFVLYSLVAVGAAANSLGGAGGPLAVFFIALIAVFFGKLVSKVTPIDLIVTPAVTIIAGVLAAMLLAPPIGKFANLFGMVVMWATDMQPFIMGILVSAIVGIVLTLPISSAALCAALGLVGLAGGAAVAGCCAHMVGFAAASYRENKIGGLLAQGVGTSMLQVPNLMKKPILWIPAVAASIINGPVATVVFKLKMNGPPVSSGMGTSGMVGPIG

SEQ ID NO: 8557 - DNA, 306 bp, Unknown
  Obtained from environmental sample
  misc_feature (1)..(306): n is a, c, g, or t
atgccattactgcctttttcaagccaggccgaaaacagccaggcaaaacttgccgtcctcattgacgctgacaatacgcagcctgccataatcgaagggcttctggatgaagtcgcaaaatacggagtggccagcatcaagcgcatttacggagactggaccagcgtccaccttcgatcctggaaggatcggcttttggcgaacgcgatccagccaatccagcagttttcatacaccacagggaaaaacgccaccgacagcgcgatgattatcgatgcgatggatctgctttacagcgaaaagtag

SEQ ID NO: 8558 - protein, 101 aa, Unknown
  Obtained from environmental sample
  misc_feature (1)..(101): Xaa is any amino acid
MPLLPFSSQAENSQAKLAVLIDADNTQPAIIEGLLDEVAKYGVASIKRIYGDWTSVHLRSWKDRLLANAIQPIQQFSYTTGKNATDSAMIIDAMDLLYSEK

SEQ ID NO: 8559 - DNA, 378 bp, Unknown
  Obtained from environmental sample
  misc_feature (1)..(378): n is a, c, g, or t
atgaaaataaccaaacaggaacgggatgaactccttgcgagaatagagcggggcctggtattgaatgaagcccagcttgaatcgacatcggtgcgctatgaaaaactggaagcccgcgggctggattacacaggcaaaacaacgatagcaaagcaggctatcgaaaccggttcgcttttggagataacctggcctggacgggacggagaacccaattcgacaatcggaataccgcagacgattgagaaaaaagaaggtgagaatattcttgttctcagaaccagcgggaattcagaaagcgccgcaagggttttaaaaattcccatcggaaagatcagccttttacggcgcattaaacaatcaatttttggagagtaa

SEQ ID NO: 8560 - protein, 125 aa, Unknown
  Obtained from environmental sample
  misc_feature (1)..(125): Xaa is any amino acid
MKITKQERDELLARIERGLVLNEAQLESTSVRYEKLEARGLDYTGKTTIAKQAIETGSLLEITWPGRDGEPNSTIGIPQTIEKKEGENILVLRTSGNSESAARVLKIPIGKISLLRRIKQSIFGE

SEQ ID NO: 8561 - DNA, 411 bp, Unknown
  Obtained from environmental sample
  misc_feature (1)..(411): n is a, c, g, or t
atggccgagttttcaaggccgcgaaattcgggaagccagacgatgctggaaaaaataatgggtactattcccatcatggaacctcgcatggaagatgtcgccaccggcatgggcggcataataatccaggtcgccgtttacagaaatttcccaaacgcgataggttattcgtttttattttattcgacggagatggtaaaaaacgatcagatcaaattattatccgtcgagggcatttatccttcaagggaaacaatacaaaacggaacttatccgttttccgacagtttttacgcgatatatgttgacactgaggataaaaatgaaaatattgaagtattcattgattggatattgtcggaacaagggcaggagcttattgagaagacaggatacacaccaatacaatga

SEQ ID NO: 8562 - protein, 136 aa, Unknown
  Obtained from environmental sample
  misc_feature (1)..(136): Xaa is any amino acid
MAEFSRPRNSGSQTMLEKIMGTIPIMEPRMEDVATGMGGIIIQVAVYRNFPNAIGYSFLFYSTEMVKNDQIKLLSVEGIYPSRETIQNGTYPFSDSFYAIYVDTEDKNENIEVFIDWILSEQGQELIEKTGYTPIQ

SEQ ID NO: 8563 - DNA, 684 bp, Unknown
  Obtained from environmental sample
  misc_feature (1)..(684): n is a, c, g, or t
atggaattaacctacgaaaatgcggaaacagccagccctgccgataaaaagcttaattggcttgccgcttttggtttgcaagccgttgataatttgaaaccctctgaatatgcagtgaaactctcagaaaagcatatcgcgggcaaaatgagcatttatcaagttgaaaataccattgaaaaatattacaatggaaagaactttgataccaaaagtaggcaaaatgaagcggatattgtttctgccagaatagtaaaaattttgagcaataaaactttttcgctaagcgagaattctctaaaaaatattcataaaactctgttcaaaggttttaaaaattgcgagcctggcaagtatcgcaaaatggatatagtgaaagccgaatggattttagatagcgatacggttcaatatgcgcattttgaggatatagaagatgaaattgctttgattttaaataaagaggaacaagcaaaagatattgaaataaatcacattttgaattttatctcaaaaatatggcaaatacatccttttttggaaggcaacaccagaaccaccgcagtttttgcaatcaagtatttgagaaatcttggtacaaagttgataattctccttttgaaaagaacgcaaaatttttcggaaatgctcttgtccgttcaaaatacagaaatgcggttttga

SEQ ID NO: 8564 - protein, 227 aa, Unknown
  Obtained from environmental sample
  DOMAIN (100)...(223): Fic protein family
  misc_feature (1)..(227): Xaa is any amino acid
MELTYENAETASPADKKLNWLAAFGLQAVDNLKPSEYAVKLSEKHIAGKMSIYQVENTIEKYYNGKNFDTKSRQNEADIVSARIVKILSNKTFSLSENSLKNIHKTLFKGFKNCEPGKYRKMDIVKAEWILDSDTVQYAHFEDIEDEIALILNKEEQAKDIEINHILNFISKIWQIHPFLEGNTRTTAVFAIKYLRNLGTKLIILLLKRTQNFSEMLLSVQNTEMRF

SEQ ID NO: 8565 - DNA, 384 bp, Unknown
  Obtained from environmental sample
  misc_feature (1)..(384): n is a, c, g, or t
gtggtgaacataacggaccaattccgccagccctccaaaaagtccggcgttcaggagggcctgtccttggtgaacggcatggcacataccgcgaggcgtgtcataaacgaggacgagcgcggtctgcactccgactacgggcgctggctggaggagctggctccctacancgctgggagcgaccctgccaagggcggctatctgcacacagggaccggcgaggacaacggcgacgcgcaccacaagcgtcagataatgggcagggaggtggtggtggccgtcacggagggcaagctgcacttcggcccttgggagcagatattctacggggagtttgacggcaaacgggacaagagggtgatgatcaagataatcggggagtga

SEQ ID NO: 8566 - protein, 127 aa, Unknown
  Obtained from environmental sample
  DOMAIN (1)...(125): Uncharacterised protein family UPF0047
  misc_feature (1)..(127): Xaa is any amino acid
MVNITDQFRQPSKKSGVQEGLSLVNGMAHTARRVINEDERGLHSDYGRWLEELAPYXAGSDPAKGGYLHTGTGEDNGDAHHKRQIMGREVVVAVTEGKLHFGPWEQIFYGEFDGKRDKRVMIKIIGE

SEQ ID NO: 8567 - DNA, 729 bp, Unknown
  Obtained from environmental sample
  misc_feature (1)..(729): n is a, c, g, or t
gtggctgtgcgccttccggctctggctgtggcaaggcagctcatcgccttatcctcaggcgcgattgcggctccgagcgccaacccttttggctttttaagccctaccagcgcggaacatgtgctggccatgcttggcgataaagttgaaattatccttgacggcggcccgacgcaggtagggcttgaatctaccgtgcttgatatttgcagcgggcaagcccgcatactcaggccgggcggcgttccaaaggaagccattgaagccgttatcggcccccttaccgaaggtcccgccctggatgagactgccgtgaatgactccggcatgaatgaagccgcaatttatgacaccgccgtttatggcgccgccatttatggcgcagaatctcccggcatgatgaaaagccactatgccccgcgtactcccctggaagcatatgattttgaaactttgagcaaaatacccgccgataataacagcgcgtttctcttttttgattattcatcatataaactgtggcaaaaacatcaaaaactgccgctggataaatcattaattaaattcctcagcgaaaccggaaatatcaccgaagccgcggcgcattttttccaatccctgcatgaactggacaaattgggaatcagccggatatgcgcccaactcgcgcccgaagaagggctgggaagggcgataaacgacaggctgcgaaaagccagcaacaaataa

SEQ ID NO: 8568 - protein, 242 aa, Unknown
  Obtained from environmental sample
  SIGNAL (1)...(23)
  DOMAIN (82)...(241): SUA5 domain
  misc_feature (1)..(242): Xaa is any amino acid
MAVRLPALAVARQLIALSSGAIAAPSANPFGFLSPTSAEHVLAMLGDKVEIILDGGPTQVGLESTVLDICSGQARILRPGGVPKEAIEAVIGPLTEGPALDETAVNDSGMNEAAIYDTAVYGAAIYGAESPGMMKSHYAPRTPLEAYDFETLSKIPADNNSAFLFFDYSSYKLWQKHQKLPLDKSLIKFLSETGNITEAAAHFFQSLHELDKLGISRICAQLAPEEGLGRAINDRLRKASNK

SEQ ID NO: 8569 - DNA, 360 bp, Unknown
  Obtained from environmental sample
  misc_feature (1)..(360): n is a, c, g, or t
atggcggctgcggagcaggccgggaaaaaagttatcggcgttgacgttgaccaggcaggcgaatcccgcacagtcattacttccgcgatgaaaggccttcaagcatcggtctatgcctgtatttccgattattacaacggtaagttccccggcggaaagacccaggtttttgaagcggccaacaacggcgtcgggcttcccatggcgacttccaaattccagagcttcaaacaggcggactatgacgcgatattcaaggacctcgcttccggcaaaatcccccggatggataacctggacagcgaaggaagcccaaaggtagtccctgttaccatagtcaaggttactgaagttaagtag

SEQ ID NO: 8570 - protein, 119 aa, Unknown
  Obtained from environmental sample
  misc_feature (1)..(119): Xaa is any amino acid
MAAAEQAGKKVIGVDVDQAGESRTVITSAMKGLQASVYACISDYYNGKFPGGKTQVFEAANNGVGLPMATSKFQSFKQADYDAIFKDLASGKIPRMDNLDSEGSPKVVPVTIVKVTEVK

SEQ ID NO: 8571 - DNA, 552 bp, Unknown
  Obtained from environmental sample
  misc_feature (1)..(552): n is a, c, g, or t
gtggcatcctatgtgggtcagacagccaagctggtggcgcagcaatgcgacgacgctatgggcggcatactttttatagacgaagcgtatgcgttgaaacaaggtccgcaggacagtttcgggcaggaagctgtagatacgcttcttaagcggatggaagacgacaggggcaaatttgtggttatagccgcgggctatacaaaagaaatgaacgaatttctggcgtctaacagcgggtttaaatcgcggttttcggattatatcaactttgacgactacaatacatcagaaatgcgggaaatttttataggaatgtgtaaaaagaaaaatattaaatttgctcccggctttgacgaagccctgcaaaagaggttgaaagaattatatgaaggaagaaacgcccagtttgccaacgcccgtacggttaggcaattatttgataaaacaagagaaaatgtttcaggcagggttcttgccatgaagaaacccgaagaagagctgaagcgtgaaatattaatcatgcgtcctgaagatttggatatgaccgtatag

SEQ ID NO: 8572 - protein, 183 aa, Unknown
  Obtained from environmental sample
  misc_feature (1)..(183): Xaa is any amino acid
MASYVGQTAKLVAQQCDDAMGGILFIDEAYALKQGPQDSFGQEAVDTLLKRMEDDRGKFVVIAAGYTKEMNEFLASNSGFKSRFSDYINFDDYNTSEMREIFIGMCKKKNIKFAPGFDEALQKRLKELYEGRNAQFANARTVRQLFDKTRENVSGRVLAMKKPEEELKREILIMRPEDLDMTV

SEQ ID NO: 8573 - DNA, 918 bp, Unknown
  Obtained from environmental sample
  misc_feature (1)..(918): n is a, c, g, or t
ttgatcggaacgcacaggattatccagcgcgacgtggcgtttaaaaaccttgggttaatcgtcattgacgaggagcagcgtttcggcgtgaaggacaaggagcggctcaaggaactcaagaccaatgtcgactgccttaccctttcggcgacccccataccgcggaccctgcacatgagcctcctgaaaatccgcgacatgagcctgctggcgacggccccttccggaaggcagccaatcgagaccatcattgaggaatacagcgacgagaggctggtcagggccataagggacgaggttgagaggggagggcaggtcttctttctccataaccggatcgaaaccctgcgggatacaaggataaggatcgaacgccttgtgccggagattttggcggaaaccgcgcacgggcagatggacgcgcaggagcttgaggatgtgatgcaccgctttgtgcacggcggctttcacgtgcttgtatccacgacgataatcgaaaacggcatagacatacccaatgtcaataccattatcattgaccgcgccgacatgtacggcgtgtcccagttgtaccagctccggggcagggtgggccgcagcgaccgcgtcgcttacgcctacctcctgtacccgcagggcggggaaattaccgaactcgccatgaaacgcctccaggtgatctccgattttacggaactgggttccggtttcaagatcgccatgaaggacatggagatacggggcgccgggaacctcctgggcagggagcagtcaggcgacatttattccgtgggttttgatctgtacctcaggctcctggacgaggcggtaaggcgccttgagaattcagattatgaggccgagtggaaaccatcctggaactggaatactcgggcttcatcccggacacttatatga

SEQ ID NO: 8574 - protein, 305 aa, Unknown
  Obtained from environmental sample
  DOMAIN (124)...(201): Helicase conserved C-terminal domain
  misc_feature (1)..(305): Xaa is any amino acid
MIGTHRIIQRDVAFKNLGLIVIDEEQRFGVKDKERLKELKTNVDCLTLSATPIPRTLHMSLLKIRDMSLLATAPSGRQPIETIIEEYSDERLVRAIRDEVERGGQVFFLHNRIETLRDTRIRIERLVPEILAETAHGQMDAQELEDVMHRFVHGGFHVLVSTTIIENGIDIPNVNTIIIDRADMYGVSQLYQLRGRVGRSDRVAYAYLLYPQGGEITELAMKRLQVISDFTELGSGFKIAMKDMEIRGAGNLLGREQSGDIYSVGFDLYLRLLDEAVRRLENSDYEAEWKPSWNWNTRASSRTLI

SEQ ID NO: 8575 - DNA, 684 bp, Unknown
  Obtained from environmental sample
  misc_feature (1)..(684): n is a, c, g, or t
gtgattaaagccgttgcctttgatctggacggaaccctctatcccaattaccgtctgtactgtcgtatttttcccggccttttgctccatctgcgtttttattccgcctttaacacagcacgccacaagcttcacggtttggaagaaacggaaaataccgtttcaatggacgctgaaggagcttcattctacgacaaacaggcttcccttatggcaggttttctaagaaaaaacaaggaagaaattctgcaaaagcttgagtgcatggtataccgggggtgggaaaaacttttttccgggataaaaacttttccccatatcaaagaagttttgacggctcttcgcaccgcggggcttaagctggcccttctttcggattttcctccggaacgtaaaattgcccttttgggactggacagtttttttgatctaatcctttcttcagaagaaacgggggcgcttaaaccttccggtattccttttaccgccatggctcgttccttaaaacttttacccggcgaaatcctctatgtgggaaacagtccccgttatgatgtggaaggcgccagaaaagcggggatgaaggcagccctgatccggcgtagcctgttcagtaccggccatgttcgccatgacggcggggcggattttgttttccaggactatcgccaattattggaataa

SEQ ID NO: 8576 - protein, 227 aa, Unknown
  Obtained from environmental sample
  DOMAIN (2)...(202): haloacid dehalogenase-like hydrolase
  misc_feature (1)..(227): Xaa is any amino acid
MIKAVAFDLDGTLYPNYRLYCRIFPGLLLHLRFYSAFNTARHKLHGLEETENTVSMDAEGASFYDKQASLMAGFLRKNKEEILQKLECMVYRGWEKLFSGIKTFPHIKEVLTALRTAGLKLALLSDFPPERKIALLGLDSFFDLILSSEETGALKPSGIPFTAMARSLKLLPGEILYVGNSPRYDVEGARKAGMKAALIRRSLFSTGHVRHDGGADFVFQDYRQLLE

SEQ ID NO: 8577 - DNA, 375 bp, Unknown
  Obtained from environmental sample
  misc_feature (1)..(375): n is a, c, g, or t
gtgctggtgaaaacagtattgatagtggacgactcccgaattatgcggaatattgttagaaacacatcttctgaactcaaaattcccacccggtttttggaagcgggaaacggcaaggaagcccttcaaatagtgctggctgagacggttgacctgatactactggactggaatatgccggagctttcgggaattgattttcttaggcaagtcagggatattgacaagtacaagaacattcccattatcatgataaccagtgaatctgccaagtataatgttattgaagcattaaaaagcggcgccaccgattatatagtcaagccgattagtggaaagatttttttagaaaaactttctaaaattttcgcataa

SEQ ID NO: 8578 - protein, 124 aa, Unknown
  Obtained from environmental sample
  DOMAIN (4)...(120): Response regulator receiver domain
  misc_feature (1)..(124): Xaa is any amino acid
MLVKTVLIVDDSRIMRNIVRNTSSELKIPTRFLEAGNGKEALQIVLAETVDLILLDWNMPELSGIDFLRQVRDIDKYKNIPIIMITSESAKYNVIEALKSGATDYIVKPISGKIFLEKLSKIFA

SEQ ID NO: 8579 - DNA, 357 bp, Unknown
  Obtained from environmental sample
  misc_feature (1)..(357): n is a, c, g, or t
atgtccgaaggctatgaaactattgtaggcganagaggcgtaggactttccggagggcagagacagcggatagccttggcgcgcgctttggcaataaagcctgctgttttaattcttgatgacacaacttctgccgttgatagtgaaactgaaagatatattcaagataaacttcgacacctagactataagtgtacgaaaatcattattgcacaaagaataacctcctttcgcggagcggatatgattttagttatggataatggaaaaatcattgaaagaggaactcacgaagagttaatcgcaaataaaggattttataattatatctggaaattacaaaatagtgcagaataa

SEQ ID NO: 8580 - protein, 118 aa, Unknown
  Obtained from environmental sample
  DOMAIN (1)...(89): ABC transporter
  misc_feature (1)..(118): Xaa is any amino acid
MSEGYETIVGXRGVGLSGGQRQRIALARALAIKPAVLILDDTTSAVDSETERYIQDKLRHLDYKCTKIIIAQRITSFRGADMILVMDNGKIIERGTHEELIANKGFYNYIWKLQNSAE

SEQ ID NO: 8581 - DNA, 492 bp, Unknown
  Obtained from environmental sample
  misc_feature (1)..(492): n is a, c, g, or t
atgaaaacgttgatacaagcgcaccggggggcttcggcttactgcccggaaaatacgctggaggcgtttgccaaagcaatggaaatgcgcgccgacggcattgagcttgacgtacacctcagcaaagacggtgaaattgtcgttgcccatgacgcgcggctggagcgtgtttcaaacggagaggggtttataaacgaccatacacttaaagagcttaagtcgctggactttggcaaattgtcctccgacggccacacatgccgtatcccgacgctctccgaggttttctcgctggttaagcctacggtcatcaccgtaaatgttgagttaaaaactaccgagcgcatgtaccctgaacttccccgaaagctcctcgcccttgcagatgaatacgcgatgggagaacgcgtcatctactcatcattcaaccattactccctaaaggaaataaaaagcgctggatccctcagccaaggttgggctgctgtatga

SEQ ID NO: 8582 - protein, 163 aa, Unknown
  Obtained from environmental sample
  DOMAIN (8)...(163): Glycerophosphoryl diester phosphodiesterase family
  misc_feature (1)..(163): Xaa is any amino acid
MKTLIQAHRGASAYCPENTLEAFAKAMEMRADGIELDVHLSKDGEIVVAHDARLERVSNGEGFINDHTLKELKSLDFGKLSSDGHTCRIPTLSEVFSLVKPTVITVNVELKTTERMYPELPRKLLALADEYAMGERVIYSSFNHYSLKEIKSAGSLSQGWAAV

SEQ ID NO: 8583 - DNA, 357 bp, Unknown
  Obtained from environmental sample
  misc_feature (1)..(357): n is a, c, g, or t
gtgaagggaccgaaaccttccgtttccgattccccgctgaccgacgtatttcaggctctcatcgccgggcctaacgcgggagaaaaaagctcaggcttaatttcgctgatccctccggcgacgaaactgctttccgcaagtgttaggggaaacacagcgtacatcagttttaacgaagagtttcagtacaacacctacggggtggaaggatacgccggtcagttacggcaggttgtctttaccgctacggagttccccaatgtcactgatgtgcagattttaattgaagggcggcgtattgattaccttggcgaaggcgtatgggttggcagtccggtaagcagggagatgttgtga

SEQ ID NO: 8584 - protein, 118 aa, Unknown
  Obtained from environmental sample
  misc_feature (1)..(118): Xaa is any amino acid
MKGPKPSVSDSPLTDVFQALIAGPNAGEKSSGLISLIPPATKLLSASVRGNTAYISFNEEFQYNTYGVEGYAGQLRQVVFTATEFPNVTDVQILIEGRRIDYLGEGVWVGSPVSREML

SEQ ID NO: 8585 - DNA, 426 bp, Unknown
  Obtained from environmental sample
  misc_feature (1)..(426): n is a, c, g, or t
ttgatggccgagcggccgagtagatatccggcgctgtacccgactttgctttttacggcgcgctttgaaagcaggcaagtgtggacgcccgctatggccgcgtcgggggctttgtcggccctggctggattttttgcggtcgcgggaacttacggccgctgccacgcgggtttctcaggcggcctcggctggagcgctatcgcggttgcgcttgtcgcgggaaacaggccacttgcactgatacccgccgcgttagttttcggctggctcaagtcaggctccgatttcgcgctgcttgccgccgggcttaacatcgaaacttcttcgctcattcaggcggcggttctgctttttgcgacagtgcgttttactcccctttgggagcgccttgtcgtttcaaccgttatgcggaaaagccatgattga

SEQ ID NO: 8586 - protein, 141 aa, Unknown
  Obtained from environmental sample
  misc_feature (1)..(141): Xaa is any amino acid
MMAERPSRYPALYPTLLFTARFESRQVWTPAMAASGALSALAGFFAVAGTYGRCHAGFSGGLGWSAIAVALVAGNRPLALIPAALVFGWLKSGSDFALLAAGLNIETSSLIQAAVLLFATVRFTPLWERLVVSTVMRKSHD

SEQ ID NO: 8587 - DNA, 609 bp, Unknown
  Obtained from environmental sample
  misc_feature (1)..(609): n is a, c, g, or t
ttgccgccgggcttaacatcgaaacttcttcgctcattcaggcggcggttctgctttttgcgacagtgcgttttactcccctttgggagcgccttgtcgtttcaaccgttatgcggaaaagccatgattgaaggacttcttaacagcgcggccccgctcatgttggctggtcttggcgctcttctttcggatctttccggcgcgctggcagtttttatcgaaggcttcatggtgaccggctctttcttctcctggatttttaccgactgggcaggctcggtattttttgggacattgctaagcgccttactcgccgctctcgctggttgggctttggcccgttttgtcagagtcagcggggcaaatccttttatcgcggggctcgccctgaacatggcggcatcgggagtcaccacttcactttcaacggtctggtttagaaccaagggagttttacaaaatcccgcaatacaaattccccagcctgtgcgtttgcctttgattgacagtgtaccgttaattggcaagatcatttcgggacacagcccattcacatataccgcctgggcctgcgcgttgattctggcaatagggctgaaaaaactgtag

SEQ ID NO: 8588 - protein, 202 aa, Unknown
  Obtained from environmental sample
  misc_feature (1)..(202): Xaa is any amino acid
MPPGLTSKLLRSFRRRFCFLRQCVLLPFGSALSFQPLCGKAMIEGLLNSAAPLMLAGLGALLSDLSGALAVFIEGFMVTGSFFSWIFTDWAGSVFFGTLLSALLAALAGWALARFVRVSGANPFIAGLALNMAASGVTTSLSTVWFRTKGVLQNPAIQIPQPVRLPLIDSVPLIGKIISGHSPFTYTAWACALILAIGLKKL

SEQ ID NO: 8589 - DNA, 537 bp, Unknown
  Obtained from environmental sample
  misc_feature (1)..(537): n is a, c, g, or t
ttgacgggcatatggctcggattgcttcttgatatcgcccaaaaagaaaaagatatacccgctgtgcgaaaactgtcatacaggtttattgaggattattttaaaatagaacactatcaaatttacaaggcatccttcagttcagccgaatgggctgatgaacgggagaaacttttctttcattacagtagcaagaaacgtttcagtcattctgcgacggattttctggtggcagaaaatgaaatagagcgtctcttgaattatgttgaaaagtatctttctattggtgaccttgaaagatattataaggtatttgcctccgagtaccctgaaaaaaccctggagatgttcagagaaggtttaattctatatgctgacaataataccggaagatcatactatgaacacatcctgtcattattgaagaaaatgtccaagattaagggcggtaaaaaagctgcatcggatctggtagcggatttcagatcacactacaagaaccgcagggcaatgatggaagtattgagagggttttga

SEQ ID NO: 8590 - protein, 178 aa, Unknown
  Obtained from environmental sample
  misc_feature (1)..(178): Xaa is any amino acid
MTGIWLGLLLDIAQKEKDIPAVRKLSYRFIEDYFKIEHYQIYKASFSSAEWADEREKLFFHYSSKKRFSHSATDFLVAENEIERLLNYVEKYLSIGDLERYYKVFASEYPEKTLEMFREGLILYADNNTGRSYYEHILSLLKKMSKIKGGKKAASDLVADFRSHYKNRRAMMEVLRGF

SEQ ID NO: 8591 - DNA, 741 bp, Unknown
  Obtained from environmental sample
  misc_feature (1)..(741): n is a, c, g, or t
ttgtaccaccgttgcctccgctggtgtttgaactccgctaccgccgccgatgcttgcactatattagggttgggcatatatccatatatactacctatcgccgttaccgtaccaccgctgattgtgattgtgccaccgtcaccgaggagaccgccgcctatgcccgcaccaccttggctgccagtcgccgttacaattccgccgctgatgttgattatgccgccgcttttgccgttatcgttgcctgtactgccaccaccgatgcctgcaccttgggtaccaccagtcgcagttatcgccccgcctgagacgttgattgtaccactgctgtctcttttgctgccaccgatgcctgcaccggagttatcgccagtagcagtcagcttacccataatgttagcatctaaggactgggcatatatacttaagctattgcctatagaaacatttattccagcgttttcgaaatttccattcaccgtcacattgctgctgttttcaagaatgatatgtgctacgcctgaaacattgagtgttgcgttgcggttcaaattaccgcgaacaaggaaccagccgtacaaattgtcaattgcggctatattttctgagttaataacgatgacattgtttgctgtttgtgctatgccgtttttgtctatgtatgggacgttgtttattgagttgcggtctatcaaacttatgctagggatttcgataaaaccatttttgcttcctgtgtaa

SEQ ID NO: 8592 - protein, 246 aa, Unknown
  Obtained from environmental sample
  misc_feature (1)..(246): Xaa is any amino acid
MYHRCLRWCLNSATAADACTILGLGIYPYILPIAVTVPPLIVIVPPSPRRPPPMPAPPWLPVAVTIPPLMLIMPPLLPLSLPVLPPPMPAPWVPPVAVIAPPETLIVPLLSLLLPPMPAPELSPVAVSLPIMLASKDWAYILKLLPIETFIPAFSKFPFTVTLLLFSRMICATPETLSVALRFKLPRTRNQPYKLSIAAIFSELITMTLFAVCAMPFLSMYGTLFIELRSIKLMLGISIKPFLLPV

SEQ ID NO: 8593 - DNA, 456 bp, Unknown
  Obtained from environmental sample
  misc_feature (1)..(456): n is a, c, g, or t
atgctccatgaaaaggggccgggcattgtgctggtgacaagctaccatgacggcaaagtaggcgggcgggcgggcggcgggcctggcgatgaaagaaaaatagggatgctggcttcggacaaaagcggggtttattcaataaacacgccggaactgcccataggcgccggcatggcgggatcgggtgatattaccgcgtcggtgttcctgtcccgctaccttgaaaccggcgatgtcaaaaaaaccctggaactatgcaccgcgtccatatatggcatcatagaagcaagctggcagatccgaaatggcaaagttttctctcaatcgagagataagttttctcccgattcggaaaaaacttatatatctggtccggggttgatggaattaaggataatacaggctcaaaatgagcttatatcgcctacacattcttttgaagcgcacaggctttag

SEQ ID NO: 8594 - protein, 151 aa, Unknown
  Obtained from environmental sample
  misc_feature (1)..(151): Xaa is any amino acid
MLHEKGPGIVLVTSYHDGKVGGRAGGGPGDERKIGMLASDKSGVYSINTPELPIGAGMAGSGDITASVFLSRYLETGDVKKTLELCTASIYGIIEASWQIRNGKVFSQSRDKFSPDSEKTYISGPGLMELRIIQAQNELISPTHSFEAHRL

SEQ ID NO: 8595 - DNA, 666 bp, Unknown
  Obtained from environmental sample
  misc_feature (1)..(666): n is a, c, g, or t
ttgggcgtgctggacgcttcggagtgtccacccacctacggggtggagccgggcatggtcatggggctgatcgcaggcgggcaggaagctctgacaaagtccattgagtctgccgaagacagggcagatgatggggtaagggagcttaaggccctgggctttgataagaaagatgtgctagtgggcattaccgcatcaggccaggcgccttacgtgctgggtgcgctggaatacgcccgcaacattggcgcggtaaccgccgcaataagctgtaacgccaattcaaaaacctttgattacgcccggcaccggctctacgcaaatgtgggccccgaggtggtaaccggctctaccaggatgaaaagcggcacggcccagaagctcatcctcaatatgcttaccaccgccgccatgatccgcatggggaaggtctacaagaacctaatggtggatctgaagccggtgaatcataagctagtcctcagatccattaggctcatccgggaagttacgggctgtacaccagaagaagccagggaaaaatttgacgcatcgggaaagcgtccaaaaacagccattgtaatgatcttgctaaaaaaggatagggacgaggccgagaaactgctgaaagaagcggacggccatatcagcctgcttatagaatag

SEQ ID NO: 8596 - protein, 221 aa, Unknown
  Obtained from environmental sample
  misc_feature (1)..(221): Xaa is any amino acid
MGVLDASECPPTYGVEPGMVMGLIAGGQEALTKSIESAEDRADDGVRELKALGFDKKDVLVGITASGQAPYVLGALEYARNIGAVTAAISCNANSKTFDYARHRLYANVGPEVVTGSTRMKSGTAQKLILNMLTTAAMIRMGKVYKNLMVDLKPVNHKLVLRSIRLIREVTGCTPEEAREKFDASGKRPKTAIVMILLKKDRDEAEKLLKEADGHISLLIE

SEQ ID NO: 8597 - DNA, 471 bp, Unknown
  Obtained from environmental sample
  misc_feature (1)..(471): n is a, c, g, or t
gtggaaaagacatacctcacccgcgaagggtacgaaaagatggccgccgacctcaaacagatgcaaaccgtgaagaggcgcgaaatcttagagcaattggagatggcccgcgcccacggcgacctgcgtgaaaacgccgagtacgaggcggcaaaacacgcattgcagatgctcgacatccgcataggcgagatgcacgaaaagatcgcctcggcggagatattcagcaccgacaatatctcaaccgacaaggtggtcataggaacgaaggtaacgctttgggacttctcctacgaggaagaggtggtgtactggatcaccggctcggacgaggccgacccggcggcggggaagatatcgatcaactcaccggtagccacagcactgctaggccacgcagtaggagaccaaatcgaagttaaggcgcctaagggagttatgagatacgagattaagaagattgacaggtga

SEQ ID NO: 8598 - protein, 156 aa, Unknown
  Obtained from environmental sample
  DOMAIN (80)...(156): Prokaryotic transcription elongation factor, GreA/GreB, C-terminal domain
  misc_feature (1)..(156): Xaa is any amino acid
MEKTYLTREGYEKMAADLKQMQTVKRREILEQLEMARAHGDLRENAEYEAAKHALQMLDIRIGEMHEKIASAEIFSTDNISTDKVVIGTKVTLWDFSYEEEVVYWITGSDEADPAAGKISINSPVATALLGHAVGDQIEVKAPKGVMRYEIKKIDR

SEQ ID NO: 8599 - DNA, 492 bp, Unknown
  Obtained from environmental sample
  misc_feature (1)..(492): n is a, c, g, or t
ttgaaagccgtagtacaaagagttcaagacgcgagtgtcaccgttgacgggatcgtgaaggggagcattagcaaaggtttgcttgtttatcttggcgttgcgcataacgacactcaagctgacgcagattggctttccgaaaaaatagcgtatttaagaatttttgacgacgaagagggaaagatgaacctgtcccttaaagatttggcgtctcttgataacaaagcgggagttcttgccgtttcgcagtttacgctgttggctgacgctcgaaaaggcagacgcccctcatggaacgcagcggctccgcctgaaaaagcgaaacaactctacgagtattttacagacgcagtaagaaagacgggactcatctgcgaatgcggagaatttcaggcgcatatgatggttaagtataccaatgacggacctgtcacgattattctggataccgaagaaattacaaaaacctccttttcaaaacaacccgattag

SEQ ID NO: 8600 - protein, 163 aa, Unknown
  Obtained from environmental sample
  DOMAIN (28)...(150): D-Tyr-tRNA(Tyr) deacylase
  misc_feature (1)..(163): Xaa is any amino acid
MKAVVQRVQDASVTVDGIVKGSISKGLLVYLGVAHNDTQADADWLSEKIAYLRIFDDEEGKMNLSLKDLASLDNKAGVLAVSQFTLLADARKGRRPSWNAAAPPEKAKQLYEYFTDAVRKTGLICECGEFQAHMMVKYTNDGPVTIILDTEEITKTSFSKQPD

SEQ ID NO: 8601 - DNA, 393 bp, Unknown
  Obtained from environmental sample
  misc_feature (1)..(393): n is a, c, g, or t
atgatacttgtcctcgctcttgccgccgccgctatttacggtattgttttctttattaaaagatcttccaaacaaaccgtcacgaacgatcctttcctaaaaatcttagcaagttcccatctgggttttaaccgttatgtgcatatcgcctccgtaggctccaaggcgtggctcctgggagcgagcgaaggcggagtgaatctaataagtgaaattgaagataaagaaataatagacgcgatgcttcttgaggattccaaaaaaagcgcagagacccaaagccgttttcctgattttttatcaattcttcgccgtcttggaactccggctcaagtcggttcttcaggcattgacgaaattcgcaagcgccgcgaaaggcttaaggggttgtga

SEQ ID NO: 8602 - protein, 130 aa, Unknown
  Obtained from environmental sample
  misc_feature (1)..(130): Xaa is any amino acid
MILVLALAAAAIYGIVFFIKRSSKQTVTNDPFLKILASSHLGFNRYVHIASVGSKAWLLGASEGGVNLISEIEDKEIIDAMLLEDSKKSAETQSRFPDFLSILRRLGTPAQVGSSGIDEIRKRRERLKGL

SEQ ID NO: 8603 - DNA, 516 bp, Unknown
  Obtained from environmental sample
  misc_feature (1)..(516): n is a, c, g, or t
gtgatgcgattaacaaattttttttacaataaacaacttttaaacgacgctaataaaaaaaagaagacttattataaattgacaatgtttgctttatttactgttttttttgttctctttccagcggtaacaaacgcgcaggaacagtttcctgacagggcggcgcagggaactacgaatttaacgcctactcccaatcctcctgtggttccttttatcgacttaacgatacgaaatccgcagaacggacaagaagtggcgttttcattacagttactgcttcttttaaccgttctttctctagctcccagcattattatactaatgacaagttttttgcgagtttcaatagttttggattttattaaacgcgcgctttcattacagcaggttccgcctaatcaggtaattttaggcatatcgctttttcttacagtggttatcatgtggcctacatttgacgcaatttataccaattccataaagccgcttttccgcccgttcgctttcggttga

SEQ ID NO: 8604 - protein, 171 aa, Unknown
  Obtained from environmental sample
  DOMAIN (95)...(170): FliP family
  misc_feature (1)..(171): Xaa is any amino acid
MMRLTNFFYNKQLLNDANKKKKTYYKLTMFALFTVFFVLFPAVTNAQEQFPDRAAQGTTNLTPTPNPPVVPFIDLTIRNPQNGQEVAFSLQLLLLLTVLSLAPSIIILMTSFLRVSIVLDFIKRALSLQQVPPNQVILGISLFLTVVIMWPTFDAIYTNSIKPLFRPFAFG

SEQ ID NO: 8605 - DNA, 516 bp, Unknown
  Obtained from environmental sample
  misc_feature (1)..(516): n is a, c, g, or t
atgagagaattgggattagtggttaatgggttggaatacgcatttaattttccattccatactcctcaaagatgcaacaccgtatcctcactcctcactccttactcctcacttcccataatcgatctccagtggtttgccgacagtgacgacgaggacgctcccggcaagactgagccgccgtccgagcaaaaattaaaacggttaagggaagaagggcaggtagtaaaaagccaggagttgatcggcgctatcggtttattactgcccgcgctgttattgctttttatggctccttccatgttgaaaacctgcgttgaaatggtgcggtttttcttcttgcgtgttgtggaattggatccggcgaaagacgctattattgcgggaaacttttttatattcttcgcgcggcttgtttttccgattatcatagtcgcccttgtgtcggcgatattttccaatgtggtacaaaccggcggctggctgttacgacaaaaaccatactcgggaatctga

SEQ ID NO: 8606 - protein, 171 aa, Unknown
  Obtained from environmental sample
  misc_feature (1)..(171): Xaa is any amino acid
MRELGLVVNGLEYAFNFPFHTPQRCNTVSSLLTPYSSLPIIDLQWFADSDDEDAPGKTEPPSEQKLKRLREEGQVVKSQELIGAIGLLLPALLLLFMAPSMLKTCVEMVRFFFLRVVELDPAKDAIIAGNFFIFFARLVFPIIIVALVSAIFSNVVQTGGWLLRQKPYSGI

SEQ ID NO: 8607 - DNA, 390 bp, Unknown
  Obtained from environmental sample
  misc_feature (1)..(390): n is a, c, g, or t
ttggcgtttttatcaacttttaatggcttttggcgttccgtgcaatcgataaatgttatgtcctgnattgacggaagagaacatgttgttggaatgtttgcatccggacttgcgcgcctgtttatggacgcgtttgttatctcgcttcccattctgggtacattgtttttaacatcgttaactacagggcttatatcaaaagccgcgcctcaggtaaatattctttcggaaggattccccatttccatcaccaccgcctttctgctcattttcgcgtcgcttccttttatgatcgaagcgtttggtcgtgtaattgattccggttttaacaacatcgaatctctctatgttcaaatcggcaggcagattacggcaggaggcgggttatga

SEQ ID NO: 8608 - protein, 129 aa, Unknown
  Obtained from environmental sample
  misc_feature (1)..(129): Xaa is any amino acid
MAFLSTFNGFWRSVQSINVMSXIDGREHVVGMFASGLARLFMDAFVISLPILGTLFLTSLTTGLISKAAPQVNILSEGFPISITTAFLLIFASLPFMIEAFGRVIDSGFNNIESLYVQIGRQITAGGGL

SEQ ID NO: 8609 - DNA, 771 bp, Unknown
  Obtained from environmental sample
  misc_feature (1)..(771): n is a, c, g, or t
gtggctaaaatttgtctttgcctgacagcaaaaactcttgatcgaaatctggagattctcaacaaataccgaaaacacgcggacattgcggaactccgcgttgattgtcttgagcctaatgaacgctttctaataaggcggtttccggcgcagacggatatacctgttattttaacaatccgaagggatgttgacggcggtttttttaacagcggcgagggatcgcgtattaatctgatggcgcaggggcttgcatacgccgatgctgacaggcggcggaattttgcttaccttgatatagaagaagatctgaatgttcccagtctggaagaggcagcgcgagcatttggaacaaggatcatacgttcatgccataatttaaaaaactcctgtgtggattttctgggtaaaatacgctcaatgcgccattccgaagatgagatagttaaactggccgtgatggtaaattccacaagggatgtacttgatcttcagcgcgccggaaaagaaagtcggggtcaggaaaagatcctgattgcaataggtcatctcggcgtgtacagcaggatacttgctgaacagttcggttcctttatcagttacgccagcgcgttttcagagcctgacgttccgcagatcgcgcaaggacagcttgatatccgggagctgtcngagctgtaccgtttccgtagcattacaactaacacaaaaatatacggcgttaccggatatacgcctaatgtagccagaaaacctcatttttcaacatga

SEQ ID NO: 8610 - protein, 256 aa, Unknown
  Obtained from environmental sample
  DOMAIN (4)...(226): Type I 3-dehydroquinase
  misc_feature (1)..(256): Xaa is any amino acid
MAKICLCLTAKTLDRNLEILNKYRKHADIAELRVDCLEPNERFLIRRFPAQTDIPVILTIRRDVDGGFFNSGEGSRINLMAQGLAYADADRRRNFAYLDIEEDLNVPSLEEAARAFGTRIIRSCHNLKNSCVDFLGKIRSMRHSEDEIVKLAVMVNSTRDVLDLQRAGKESRGQEKILIAIGHLGVYSRILAEQFGSFISYASAFSEPDVPQIAQGQLDIRELSELYRFRSITTNTKIYGVTGYTPNVARKPHFST

SEQ ID NO: 8611 - DNA, 348 bp, Unknown
  Obtained from environmental sample
  misc_feature (1)..(348): n is a, c, g, or t
gtgatgcgtgccgtaaccgacagcggccccacagcacccaacagtcccatgcccgaaaccatacaaaacattttcaccattctcgaagcagtatctacccccgacacggtacagcacttccgcagcaaatacagcgattgcagcattcgctacggcgacctcaaaaaacaactggcagcagacatctgcaaagcaacgttgcctatccgtgaacgcatagaagccattggcaacaacagcgactacctgcgaaaagtagcgcaggaaggcgctgcccgcgcccgcgaaagtgcacaggccacgctgcgggaagtgcgaaaggcagtgggattaatgggtaattattaa

SEQ ID NO: 8612 - protein, 115 aa, Unknown
  Obtained from environmental sample
  misc_feature (1)..(115): Xaa is any amino acid
MMRAVTDSGPTAPNSPMPETIQNIFTILEAVSTPDTVQHFRSKYSDCSIRYGDLKKQLAADICKATLPIRERIEAIGNNSDYLRKVAQEGAARARESAQATLREVRKAVGLMGNY

SEQ ID NO: 8613 - DNA, 720 bp, Unknown
  Obtained from environmental sample
  misc_feature (1)..(720): n is a, c, g, or t
atgacgcgctttatgaatgaaaaagcacgcatagatcaaattcaaaacgattatgacaaacttataagaactcataattccgtggaagaaaggctggctaaatttacggattataacgacactcttgaggatgtaatgttaaaaatgcgcaaacttgacgataaaataaaggaaaccgatgaaaaataccagcgcatagagcgcaagagcgacgttatcgatgaaacaaacgagagcataaccaacaacttcaacaaactgcaaaaaacagagaccgctattaacaacgccgaaattattataaaagatcttttagatcaaattgaagaaatacgatcttctattgagaccttgtccgcggaaagcgagaaagcaaataacgcgctggaaaaaatcgccgttcttgacgattctttggcgcaaattgaggaacgcatcgagaaaatgaacgtcgcgcgcaaatggcttgcgggcgttgaaacggaattaaatactttggacaagagtatccgcgaccaattaaaactgaccaaagcgctggttgataaagaaggcaagaaaatacaagcggagagtaagggcggcggcccgcctccgcaaataagggaagacgccataaaattaaaggcgaaaggctggacaacagaagaaatcgcaaacgcgctgcgcctttcaaaaggcgaagttgagctgatactggaaattactccccgcggataa

SEQ ID NO: 8614 - protein, 239 aa, Unknown
  Obtained from environmental sample
  misc_feature (1)..(239): Xaa is any amino acid
MTRFMNEKARIDQIQNDYDKLIRTHNSVEERLAKFTDYNDTLEDVMLKMRKLDDKIKETDEKYQRIERKSDVIDETNESITNNFNKLQKTETAINNAEIIIKDLLDQIEEIRSSIETLSAESEKANNALEKIAVLDDSLAQIEERIEKMNVARKWLAGVETELNTLDKSIRDQLKLTKALVDKEGKKIQAESKGGGPPPQIREDAIKLKAKGWTTEEIANALRLSKGEVELILEITPRG

SEQ ID NO: 8615 - DNA, 360 bp, Unknown
  Obtained from environmental sample
  misc_feature (1)..(360): n is a, c, g, or t
ttgatagtaagttttatgtcgcacacatatacccgcacgtccgctttactggaagaattttcaaattgttttaatgacgctgatattctttacctgcataaaatttattcctccgcaagagaaaattataagggcggagttaacggatttacgctctacgaaaaaacatccgcagtccgctccagcgcgggtaaggggcagactttctataccgaagaaatagacgacgcgtttaagccgttaagcgaaactttaaaaagcggagatatttttatcacacttggggcgggaaataattggaccctcggcgttaaactttttaaatattttagttctaagaatgaggaaaaacatgattag

SEQ ID NO: 8616 - protein, 119 aa, Unknown
  Obtained from environmental sample
  misc_feature (1)..(119): Xaa is any amino acid
MIVSFMSHTYTRTSALLEEFSNCFNDADILYLHKIYSSARENYKGGVNGFTLYEKTSAVRSSAGKGQTFYTEEIDDAFKPLSETLKSGDIFITLGAGNNWTLGVKLFKYFSSKNEEKHD

SEQ ID NO: 8617 - DNA, 519 bp, Unknown
  Obtained from environmental sample
  misc_feature (1)..(519): n is a, c, g, or t
ttgataggaaaagagtttgaatggaagcactatgcgaaacttgccgatgcccctggggtgtttaccctcagcgacatgggaggaattatcaatgccaggccgtttaacctgattgataaattcacgttcataataaatattgactgggtggatcatttttccataaacgggggagagaaaaacctcagtgcggatttacggaaagaaggcgatgaaagcgctttctttctgaatgggagaaaagcgaacacagattcctttaggattttttaccaggctgttattggtcttcttttggacgccgaatacccaggcgctgcccgacagaacgataattcaggggaactgactgtagaataccagcttaataatccgcccggagaacgggcgaccttcaccctcataccctacaaccgggatttttacgccctgagacaggatggggtaacggagtttttgatttccagaaaccaggttcgccgcatttacgaaaccgccgacgcgatgatctatgattag

SEQ ID NO: 8618 - protein, 172 aa, Unknown
  Obtained from environmental sample
  misc_feature (1)..(172): Xaa is any amino acid
MIGKEFEWKHYAKLADAPGVFTLSDMGGIINARPFNLIDKFTFIINIDWVDHFSINGGEKNLSADLRKEGDESAFFLNGRKANTDSFRIFYQAVIGLLLDAEYPGAARQNDNSGELTVEYQLNNPPGERATFTLIPYNRDFYALRQDGVTEFLISRNQVRRIYETADAMIYD

SEQ ID NO: 8619 - DNA, 429 bp, Unknown
  Obtained from environmental sample
  misc_feature (1)..(429): n is a, c, g, or t
gtgaaccttgtcatccaaattctaagagggcatatcgcagataggaacgtgcgctttgtgtttccctcacagatcgcttccgacatgtgggcccggaaaacctgtacccttggaatagcccgctctgtcgcgaagaaccgttttcttgcatgggacgattttaaaaaagaagcaatccaggaaaaggaaacaaaacgccaacctgccacggcggtaatgcgcgatctctttgccgacgccctcgcgaaaagaaattccgaagcgagctttctaaaatccctcatcccgcctgagtattccggcaatggaaaaatctttgcaccgttcatagcccggctgctccctttcgctaagtattgggaaaagttagtggaaaaatttcccgctttgccgnagggatgcttgaagacagggactacgaaacgttaa

SEQ ID NO: 8620 - protein, 142 aa, Unknown
  Obtained from environmental sample
  misc_feature (1)..(142): Xaa is any amino acid
MNLVIQILRGHIADRNVRFVFPSQIASDMWARKTCTLGIARSVAKNRFLAWDDFKKEAIQEKETKRQPATAVMRDLFADALAKRNSEASFLKSLIPPEYSGNGKIFAPFIARLLPFAKYWEKLVEKFPALPXGCLKTGTTKR

SEQ ID NO: 8621 - DNA, 858 bp, Unknown
  Obtained from environmental sample
  misc_feature (1)..(858): n is a, c, g, or t
atggaagaaatttatgcggcaaaaaaggaagttaaaattttagaacttttgccattntgcctcagaaaggcaatgaggcgcaggttgctgcggggttctggaattccaagaaaactggatttgcaaaaaataaattttgcaaaagaaaaattgccctttactttaacagatgggcaagaccatgttttggaacagctaaaaaacggtttggagagcaacaggcaattccacgctcttttgcaaggcgatgttggcagtggaaaaaccgtgattgccttgcttgcaatgattggaatttgcggcacaggcgggcaagtggcttgcatggtacccacagatattttggcaaggcaacatttttccagcatggaaaaaatttttgaaagctctggcttgcggcttgctttgctcaccggctctatgcccacagcgcaacgcagggaggttttagcaggtttaataagcggcgaaattaacgcagttgttggaactcatgctctattttccaaagatgtggaatttaaaaatttgagttttgtgattatagatgaacagcatcgttttggtgtaaatcaaagagaagctcttcttgcaaaaggcaataaaccagatttactggttatgagcgcaacaccaattcctcgcagtttagcgatgaccttttacggagatttggaaccattgattttgcgcgaaaaaccaccgggcagattgccagtttcaacggaactaaaaggtagaagcagccgcgagggaatgaaggattatctttacaaaaaatcttttgttgataatcgttgctactgggttgtgagcagggttcaagaagacgaatttggagaggcggcngtgtgttga

SEQ ID NO: 8622 - protein, 285 aa, Unknown
  Obtained from environmental sample
  DOMAIN (52)...(214): Type III restriction enzyme, res subunit
  misc_feature (1)..(285): Xaa is any amino acid
MEEIYAAKKEVKILELLPXCLRKAMRRRLLRGSGIPRKLDLQKINFAKEKLPFTLTDGQDHVLEQLKNGLESNRQFHALLQGDVGSGKTVIALLAMIGICGTGGQVACMVPTDILARQHFSSMEKIFESSGLRLALLTGSMPTAQRREVLAGLISGEINAVVGTHALFSKDVEFKNLSFVIIDEQHRFGVNQREALLAKGNKPDLLVMSATPIPRSLAMTFYGDLEPLILREKPPGRLPVSTELKGRSSREGMKDYLYKKSFVDNRCYWVVSRVQEDEFGEAAVC

SEQ ID NO: 8623 - DNA, 369 bp, Unknown
  Obtained from environmental sample
  misc_feature (1)..(369): n is a, c, g, or t
ttgtatattctgctggaaccagacacataccagctcaagttccaagaacctgtttcaagggcggaaggagaaaagattccaaaacgtttcaatgaattagaagaaattatcgcaaaaaaccagacaaaaatatttatagcaaaagagcctaacgaaagttttggttcatttacagtccttaaacccactgaaaataactttgcgatggtgttctatcaaacgccgaagatgtatgaatcgcttgccgaattttttgtagaaacatttaacaggcaaagaaaagttcctgaacatgacgcaaaaaacgccgcggtgaaaattgtagaaattttaaagaaacacatgagctttgaaggccagtatagataa

SEQ ID NO: 8624 - protein, 122 aa, Unknown
  Obtained from environmental sample
  misc_feature (1)..(122): Xaa is any amino acid
MYILLEPDTYQLKFQEPVSRAEGEKIPKRFNELEEIIAKNQTKIFIAKEPNESFGSFTVLKPTENNFAMVFYQTPKMYESLAEFFVETFNRQRKVPEHDAKNAAVKIVEILKKHMSFEGQYR

SEQ ID NO: 8625 - DNA, 582 bp, Unknown
  Obtained from environmental sample
  misc_feature (1)..(582): n is a, c, g, or t
atgggtattctgggacgctatccgatagaggaactggataaattgctaactgaacaggcggcggagtacgaaaaagtgagcaacggacggagagtggtcaaggcgttttatattatctacggtactgtatggcccggcggcgacatagggattttaagcaatgaaattcttatgagatatattgattacggccttaaaaacgacattcttgtttttattgatcatcaaatcggcaagtatgatcccgttgattcgcttaaaaggatgctgccgtacctgaaatatcccaatgtccatcttgcccttgatcccgaatggcgcacgttaaaacccctgatagaaataggatcggttaccgcggaagagattaatacagcgcagcaggttatggaagactatataattcaaaacaacatacccggcgagcggatgcttgttattcatcaatttaattatgtgatgataaaaaaccgaagcgcggtaaaagccaacttcaacagggtgcgtcttgttcactgcgccgacggcttcggccatcccggaatgaagcgcgattcttacgcctttaacgcccctggctga

SEQ ID NO: 8626 - protein, 193 aa, Unknown
  Obtained from environmental sample
  misc_feature (1)..(193): Xaa is any amino acid
MGILGRYPIEELDKLLTEQAAEYEKVSNGRRVVKAFYIIYGTVWPGGDIGILSNEILMRYIDYGLKNDILVFIDHQIGKYDPVDSLKRMLPYLKYPNVHLALDPEWRTLKPLIEIGSVTAEEINTAQQVMEDYIIQNNIPGERMLVIHQFNYVMIKNRSAVKANFNRVRLVHCADGFGHPGMKRDSYAFNAPG

SEQ ID NO: 8627 - DNA, 897 bp, Unknown
  Obtained from environmental sample
  misc_feature (1)..(897): n is a, c, g, or t
atggaggggcaaaggatcacgtccgcggccataacggatctggttgaggagggccatgagatcgttgtggttcacggcaacggaccgcaggtggggatgatcgaaaccgcctttgaaactgcggcaaaagccgacaaacattttcccgtactgcccatgtcggtctgcgtggcccttagccagggttatatcggctacgatttgcagaacaccatccgcatggaactcgaccacaggaacatgaaaaatcaagtcgccacgataattacgcaggttgaggttgatcccgccgacaaggcctttgaaaatccgaccaagcccataggcggctttatgagcaaagaaggcgctgagattctgaagtcaaagggtattccggttatggaagacgcgggcaggggctggcggcaggttgtggcttcacctaagccggttaacattatagaggcggaagccatcaaggcgctgctggccgccggccatatccccattgccgctggcggcggggggattcccgtcgccatgaaggacggccagtaccggggcatgagcgccgtcatagacaaggatttttccgcggcgaaactcgctgagcttatcaacgccgatatgctgatcattttaaccgcggtggaaaaagtagcggttaactttggcaagccggatcaaaagtggctggacagcatgacggtcgcccaggcggaacagtacatcgccgaaaaccagttcgccaaaggctcgatgcttcccaaagtgcaggcctccattgcttttgtaaaatcaagcagactcggcgccccacagggcgtggctgtgtcccacagcgcgctgattacactgctcacaaaagcgcngggacgggattgcggaaaaaccgaaccagaaaactcgccataa

SEQ ID NO: 8628 - protein, 298 aa, Unknown
  Obtained from environmental sample
  DOMAIN (3)...(269): Amino acid kinase family
  misc_feature (1)..(298): Xaa is any amino acid
MEGQRITSAAITDLVEEGHEIVVVHGNGPQVGMIETAFETAAKADKHFPVLPMSVCVALSQGYIGYDLQNTIRMELDHRNMKNQVATIITQVEVDPADKAFENPTKPIGGFMSKEGAEILKSKGIPVMEDAGRGWRQVVASPKPVNIIEAEAIKALLAAGHIPIAAGGGGIPVAMKDGQYRGMSAVIDKDFSAAKLAELINADMLIILTAVEKVAVNFGKPDQKWLDSMTVAQAEQYIAENQFAKGSMLPKVQASIAFVKSSRLGAPQGVAVSHSALITLLTKAXGRDCGKTEPENSP

SEQ ID NO: 8629 - DNA, 903 bp, Unknown
  Obtained from environmental sample
  misc_feature (1)..(903): n is a, c, g, or t
ttgcaagtttcagaattcggcacgagaaataccgcgntgatggtaagcggcacggtgcaggaggaagactgcgacggcctgtgctgggaatacattataaaggaagaaaatatcaaacctgagttcgtggtgatcaccgagccgaccaacggcaacatctaccgggggcagaggggccgcatggagatccgcgtcgaggtgaagggcgtttcctgccacggttccgcgcccgaacgcggcgacaacgcgatttacaagatgggggaaataatcgccgaagttaaggctttgaacaagaaactgaaaaaagacaagttcctcggcaaggggactctggcggtttcgcagatctatttcagttcgccctcccgctgcgccgtcgccgacatgtgcgccatttccattgatcgccgcctgacagtgggcgaaacctacaaaagcgccctcgcggaaatcgccgccctgcccaaggtcaaagagtacaaggccaaagtcaccatgtacaaatacgatctgcccagttacacaggcgtggtttatcccattgactgttacttcccgacatgggtcattccggaagacgccaaaccgacaaaggcgatggtaaaagcctataagggaatgttcggcaagcccacggttgacaagtggactttttcgactaacggcgtctcgatcatgggccgaaacaaaatcccctgcataggcttcggccccggcaaggaagagcaggcccacgcccccaacgaaataacctggaaagccgacctcgtccgctgcgccgccgtctacgccgctttaccgagcgtctataccggcgaagagttggaagaaaaaaggagcaaagagccaagagtaaagagcaaagggaagaaagctaagaaaaaagggaacaggggatag

SEQ ID NO: 8630 - protein, 300 aa, Unknown
  Obtained from environmental sample
  DOMAIN (55)...(164): Peptidase dimerisation domain
  misc_feature (1)..(300): Xaa is any amino acid
MQVSEFGTRNTAXMVSGTVQEEDCDGLCWEYIIKEENIKPEFVVITEPTNGNIYRGQRGRMEIRVEVKGVSCHGSAPERGDNAIYKMGEIIAEVKALNKKLKKDKFLGKGTLAVSQIYFSSPSRCAVADMCAISIDRRLTVGETYKSALAEIAALPKVKEYKAKVTMYKYDLPSYTGVVYPIDCYFPTWVIPEDAKPTKAMVKAYKGMFGKPTVDKWTFSTNGVSIMGRNKIPCIGFGPGKEEQAHAPNEITWKADLVRCAAVYAALPSVYTGEELEEKRSKEPRVKSKGKKAKKKGNRG

SEQ ID NO: 8631 - DNA, 954 bp, Unknown
  Obtained from environmental sample
  misc_feature (1)..(954): n is a, c, g, or t
gtgcggtttgtcattcattacaacatgccgaaaagtttggagggctattatcaagaaaccggtcgtgcagggcgcgacggtggagaagggcattgcatcgcgttttacaatcatgatgatattatgaagttggaaaatttcattcgtaaagaaaaagaaagtaaagaaaaagaaaaaggaacgaccgaccaagatatcgccattcaactaattgcagaaacggtgtcgtacgccgaaacgggcatgtgtcgaagaaaaaatatcctgcactatttcggcgaagattttccggacgactattgcggaaactgcgacaattgcctgcatccgaaagaaagaatagatgtaacggacgatgtcgtggttgttttggaaaccatgaatgaaatgatgcaaggctacaaaatcaaacatatttgccatgtgattatggggcagaccacagctcaaatcaaaacgcataaacataacaatttgtcggcattcggacaaggtcagcagaaagaaatttcgcattggaatgcggtgactcgtcagtgtttgatggaacatttgattgaaaaagatatggaaaactacggcaccgtcaagttgacggaaaaaggtcgtcaatacatgaaaaaaccgtatccgattattttggccaaagacatcgattttgaagcggaagcacaagaaatgccggttggaaaggaaggcgaccaacaattgttaacgcttctgaaagatgaactgaaagccttagccaaaaagcaaaacgtaaattcatgggccattttaaccgaaccatcgttgattgatatgaccgtgcaataccccactaccataaaagaaatgagccaaatttcaggcatgggggcgataaaagcggaaaaattcgggcaaccgtttatcaacatcatcaaacgttatgtggaggaaaatgaaatagagcgtccgcagatctggtggtga

SEQ ID NO: 8632 - protein, 317 aa, Unknown
  Obtained from environmental sample
  DOMAIN (233)...(311): HRDC domain
  misc_feature (1)..(317): Xaa is any amino acid
MRFVIHYNMPKSLEGYYQETGRAGRDGGEGHCIAFYNHDDIMKLENFIRKEKESKEKEKGTTDQDIAIQLIAETVSYAETGMCRRKNILHYFGEDFPDDYCGNCDNCLHPKERIDVTDDVVVVLETMNEMMQGYKIKHICHVIMGQTTAQIKTHKHNNLSAFGQGQQKEISHWNAVTRQCLMEHLIEKDMENYGTVKLTEKGRQYMKKPYPIILAKDIDFEAEAQEMPVGKEGDQQLLTLLKDELKALAKKQNVNSWAILTEPSLIDMTVQYPTTIKEMSQISGMGAIKAEKFGQPFINIIKRYVEENEIERPQIWW

SEQ ID NO: 8633 - DNA, 333 bp, Unknown
  Obtained from environmental sample
  misc_feature (1)..(333): n is a, c, g, or t
gtgaattgctccacggctccagcaacctacccggcggcaagacgggccgccttatcgccgccctatttggttttgctccggacggggcttgcctggcccggacggtcgcccgcccggccggtgagctcttacctcaccctttcacccttaccgcgactggcgcggcggtctgctctctgttgcgcttgcccggggttgcccccgctgggcgttacccagcgtcccgccctatggagcccggactttcctcccggcactgaaaacagcgcccggcggtcatccggcccgcccgactcccggctccggtccggccgtcgccagaattttcactga

SEQ ID NO: 8634 - protein, 110 aa, Unknown
  Obtained from environmental sample
  misc_feature (1)..(110): Xaa is any amino acid
MNCSTAPATYPAARRAALSPPYLVLLRTGLAWPGRSPARPVSSYLTLSPLPRLARRSALCCACPGLPPLGVTQRPALWSPDFPPGTENSARRSSGPPDSRLRSGRRQNFH

SEQ ID NO: 8635 - DNA, 435 bp, Unknown
  Obtained from environmental sample
  misc_feature (1)..(435): n is a, c, g, or t
ttgagcgacggctattggctgctccaggccgatggggcttccctgggcaacccgggcgccggcggggccggggcggtcatttatgacgattcgggccaggtggcggcggaaatatcccggttcctggggccggcggtgaccaataacgaagccgagtatcaggctntgctcctcggcctggaacgcctccgggccctgggggccagaaaaatccgcattcgcctggattcggaactggcggtgcgccaggtcaagggcgtctaccgggtcaagaatccccgcctggccgttttgttccgccaagtcatggatcttttggccggttttgaaacttatgacatagctcatgtccgacgggaattgaaccgggcggccgatgccctggccagccgggccgccgccggccggcagcccgggccggcggcggacaactga

SEQ ID NO: 8636 - protein, 144 aa, Unknown
  Obtained from environmental sample
  DOMAIN (3)...(134): RNase H
  misc_feature (1)..(144): Xaa is any amino acid
MSDGYWLLQADGASLGNPGAGGAGAVIYDDSGQVAAEISRFLGPAVTNNEAEYQAXLLGLERLRALGARKIRIRLDSELAVRQVKGVYRVKNPRLAVLFRQVMDLLAGFETYDIAHVRRELNRAADALASRAAAGRQPGPAADN

SEQ ID NO: 8637 - DNA, 849 bp, Unknown
  Obtained from environmental sample
  misc_feature (1)..(849): n is a, c, g, or t
gtggaaacaatacttgcagccgccgtcaaggcagaccttggcagggacggagtttttatcgccgtcggcggcggagtaatcggcgacttggccggttttgccgcctctatttatatgcgcggctgtcgtttcgcccttgtctccactaccctgctcggaatggttgacgcttccgtcggcggcaaaacgggtttcgatcttttcggcataaagaatcttgcgggcagtttttatcccgcgcagagcgtttatataccgacaaacgctctttcaacattgccgcgctccgagataaaaagcggtatggcggaacttattaaaaccgccgtcctttccggcgatgattttcttgatcagttagcgccgttagctgaagtatttgtcaatttagataaatttttggaagacggttctctttataagtgtatagaaagagccgttttatacaagggcggtattgtaagcgaggattttcgggaatcggggaaacggatgcttttaaatcttgggcatactttcgcccatgcccttgaaagcgccgcgggattaggtaatattacgcacggggaagccgtcgcgtggggcatggtacgcgcctgcgaacttggaatagagttgggcgttacgccgcgggaaagagcaaaaaaaattatcgagcttattaaatcgtacggttatgaatgttcctgcccccatccgacagccggtaacaaagatgttttctttgacgcgatgaaaagcgataaaaagaaaaaagacggccgccttaacttcattgttcccgatgataaaagcgcgcgtgtcgtagttcttaaaactgaagaaaaggcgatattagaaaatatataa

SEQ ID NO: 8638 - protein, 282 aa, Unknown
  Obtained from environmental sample
  DOMAIN (1)...(252): 3-dehydroquinate synthase
  misc_feature (1)..(282): Xaa is any amino acid
METILAAAVKADLGRDGVFIAVGGGVIGDLAGFAASIYMRGCRFALVSTTLLGMVDASVGGKTGFDLFGIKNLAGSFYPAQSVYIPTNALSTLPRSEIKSGMAELIKTAVLSGDDFLDQLAPLAEVFVNLDKFLEDGSLYKCIERAVLYKGGIVSEDFRESGKRMLLNLGHTFAHALESAAGLGNITHGEAVAWGMVRACELGIELGVTPRERAKKIIELIKSYGYECSCPHPTAGNKDVFFDAMKSDKKKKDGRLNFIVPDDKSARVVVLKTEEKAILENI

SEQ ID NO: 8639 - DNA, 924 bp, Unknown
  Obtained from environmental sample
  misc_feature (1)..(924): n is a, c, g, or t
atgggggtgaacgcccagctttacgaaatttcttttgcatcatatgagaaaaatactgctgatgtgccgcttatcgttctgagttcggataaaaaaaatcgtatcgtccatcttttggcgtttgacacaataccccatgagcagccctatcttctgcctgaaagaccactttccctggttaacgagagggataagatccgaaaagacgagatggccaaaattgaagctgaactgaccgctctttcgtcccagaaaaaacaactcgaagaccaaaagaactctttgctttatgatattgaatacgagactgccagcgccagtatggaacgcgttgaaaatgacgccgcggcgtcaggcgcgagtatttcctggatttccggctacgctccggcctctgatgtgggtttactcaaacgggcggccagcgaaaacggctgggctttttgcgccgcggatccggctgaagacgatatgcaaattcccacaaagctgaaaaacaacaagcttacagagctcatttatccccttacgggttttctggaaatgtcgccagggtaccgggaagtggatatttccggctggttcctcctcttttttacgctgttcttcggcatgatcttcggggacgccgcatacggcgcggtactctgcctgatttcgctcatcttcatagcgaagacctctaaaaaaggcacgccgctgattttcaaattcctgttgttgatgagcctttcaaactttacctggggtgtccttacctgtgcctggtttggttttgatacttccgcagtgccgcaagtcttgcaaaatttcagtcttcccctcatcgtcaacacgtcgagtgaacctggatggcttgccgcctataacgcgaacaatctctggattcgttccggcctgngtttccgcgtacaacaacattga

SEQ ID NO: 8640 - protein, 307 aa, Unknown
  Obtained from environmental sample
  misc_feature (1)..(307): Xaa is any amino acid
MGVNAQLYEISFASYEKNTADVPLIVLSSDKKNRIVHLLAFDTIPHEQPYLLPERPLSLVNERDKIRKDEMAKIEAELTALSSQKKQLEDQKNSLLYDIEYETASASMERVENDAAASGASISWISGYAPASDVGLLKRAASENGWAFCAADPAEDDMQIPTKLKNNKLTELIYPLTGFLEMSPGYREVDISGWFLLFFTLFFGMIFGDAAYGAVLCLISLIFIAKTSKKGTPLIFKFLLLMSLSNFTWGVLTCAWFGFDTSAVPQVLQNFSLPLIVNTSSEPGWLAAYNANNLWIRSGLXFRVQQH

SEQ ID NO: 8641 - DNA, 870 bp, Unknown
  Obtained from environmental sample
  misc_feature (1)..(870): n is a, c, g, or t
atggtttccatgccccttgttgcggacatccacttcgattataaaatcgcccttcgctgccttgatttcccgatagcaaaaattcgcataaatcccggcaatatcggcggcaaggataaaattaaagcggttgtggaaaaagcggcggcgaattcccggccaatacgggtcggggtcaacgcggggagccttccgatcgatattaggcagcgcgtggactccggttccctgaaaagcgccgaggccctggtactggcggctgagcgggaaattgccgtttttgacgaattgggttttaacagcgttctggtctcaatgaaggcctcctcggttgccgatactataaaggcgaacagaatttttgcggaacggaacgatattcccctacatgtgggggtaaccgaggccggtccgctgatcgccggagtggtgcggaatgctgcggcgcttgtggccctgttgggagatggaataggcgatactatccgggtttccctttcggataccatggagaacgaggtaattgccggacgggagatccttgaaacggtaagggagatgaaaggggcaggggagacgccgggcctgcgcggagtgcgcattgtttcctgtccccgctgcggacgaagcggttttgacacccacgcttttaccgctctttggcagaaccgcctttacgccatggacaagaatattaccgtggcaataatgggctgtgcggtaaacggcccggaagaagccaggctcgctgatataggcattaccggcgctggggacaaggtgcttatcttttcaaggggaaagataatacgcaccatagacgccggccaagcggacgccgctttcgaggaagagttaaggaggatttag

SEQ ID NO: 8642 - protein, 289 aa, Unknown
  Obtained from environmental sample
  DOMAIN (2)...(289): GcpE protein
  misc_feature (1)..(289): Xaa is any amino acid
MVSMPLVADIHFDYKIALRCLDFPIAKIRINPGNIGGKDKIKAVVEKAAANSRPIRVGVNAGSLPIDIRQRVDSGSLKSAEALVLAAEREIAVFDELGFNSVLVSMKASSVADTIKANRIFAERNDIPLHVGVTEAGPLIAGVVRNAAALVALLGDGIGDTIRVSLSDTMENEVIAGREILETVREMKGAGETPGLRGVRIVSCPRCGRSGFDTHAFTALWQNRLYAMDKNITVAIMGCAVNGPEEARLADIGITGAGDKVLIFSRGKIIRTIDAGQADAAFEEELRRI

SEQ ID NO: 8643 - DNA, 360 bp, Unknown
  Obtained from environmental sample
  misc_feature (1)..(360): n is a, c, g, or t
atgtgtcttattgccgctaaaacatcaagttaccctcttctttttgatattatacntaagcatttactgacaccggagatttgtaatgtagctcttaaaaataactttcgattcaatgtggttccacaggaattaaggacgcctgatatatatcttcttgcagtacgggaacacggccataatttacaatatgtaccggaagaactaatgacactggaaatgtgccaaatagcggttcaaaaatatgtatcctggggctataatttacgatatgtgccggaaaaatttaagacgaagaaaatatgccatgacgctgttcaaaatttcggattggcgctggaatttgtgccggaaaaataa

SEQ ID NO: 8644 - protein, 119 aa, Unknown
  Obtained from environmental sample
  misc_feature (1)..(119): Xaa is any amino acid
MCLIAAKTSSYPLLFDIIXKHLLTPEICNVALKNNFRFNVVPQELRTPDIYLLAVREHGHNLQYVPEELMTLEMCQIAVQKYVSWGYNLRYVPEKFKTKKICHDAVQNFGLALEFVPEK

SEQ ID NO: 8645 - DNA, 456 bp, Unknown
  Obtained from environmental sample
  misc_feature (1)..(456): n is a, c, g, or t
atgcgctacgatctgctcttaaagaacggaattgcggtaactccggaaaaaaacttaatagcggatatagccgtaaaagacgggaagattgccattataggcaaattagagccggacgatacctcggaagaaacttatgacgcgaaaggcaaacacattttgccgggcattatagacgcccatgtgcatttccgcgatcccgggcttaccgaaaaagaagattttgaatctggcagtatcgcggccgctttcggaggcgttacctttgttgcggacatgcccaacgtactgccgccgacatcgactacagagcgctttcttgaaaaagtgcaaatcgccgaagagaaatcttatattgatttcgggctttttgccctgctttcaaatgacaatattaatgagatggaaggcttaaaaagagccggcgcgctggatacaaggtttcggccaatctga

SEQ ID NO: 8646 - protein, 151 aa, Unknown
  Obtained from environmental sample
  misc_feature (1)..(151): Xaa is any amino acid
MRYDLLLKNGIAVTPEKNLIADIAVKDGKIAIIGKLEPDDTSEETYDAKGKHILPGIIDAHVHFRDPGLTEKEDFESGSIAAAFGGVTFVADMPNVLPPTSTTERFLEKVQIAEEKSYIDFGLFALLSNDNINEMEGLKRAGALDTRFRPI

SEQ ID NO: 8647 - DNA, 345 bp, Unknown
  Obtained from environmental sample
  misc_feature (1)..(345): n is a, c, g, or t
ttgcgggaagcgggttttgttcctgtccctccgaggccgggaaagataaaagaaacaggctgggatcaggtggaataccttgtaaaacaaatccttagcctgtccaaagagacaaaggtctgccgatgcctaaaacgaagcaaatcaaaagtgcagaagaaacttgaccgcaaagaacggctggaaaacatgaagggcaggatataccttaaaaccgcgccgccaaaaattgcgctgattatcgacgacgtaataaccacaggctctactctggaagtttgctcggaagtcctgaaagaaggcggaacggaaaaagtatacggtttatgccttttttatgattga

SEQ ID NO: 8648 - protein, 114 aa, Unknown
  Obtained from environmental sample
  misc_feature (1)..(114): Xaa is any amino acid
MREAGFVPVPPRPGKIKETGWDQVEYLVKQILSLSKETKVCRCLKRSKSKVQKKLDRKERLENMKGRIYLKTAPPKIALIIDDVITTGSTLEVCSEVLKEGGTEKVYGLCLFYD

SEQ ID NO: 8649 - DNA, 705 bp, Unknown
  Obtained from environmental sample
  misc_feature (1)..(705): n is a, c, g, or t
gtgtatgcggttgaagaatgtcttttcaaacccggaaccatcgacgtgtatgacctgcgcagtattgaagcgcaaaaactcaaaataggccaggtagacgccgcttcaggcgaggcggcttttgtctcggtaaaaaaagtaatcgagcttgcactgaccagcgagattgacgcgaccattaccaatcctctcaacaaagaagcccttaatctggcaggccatcactacgcggggcacactgaaatatacgccgatcttacgaagaccaaggactataccatgatgcttgcggacggggagctacgggtggcccatgtttcaacccatgtttctttgcgggaagcctgcaatcgtgtcaaaaaagacagggttctaagggtagttgaacttgcgtataacgcatgcaggagcttcggcataagcgcgcccagaatagcggtggccgggcttaatccccacgccggagaggggggattgttcggacgggaggagatcgaggaaatcacgcctgctattgaagccgcccaagcaaaaggcattgacgccattggccccattccaccggacacggtttttgccaaagccctggggggcatgtatgacattgtaattgctatgtaccacgatcaggggcatatccctcttaaaacgcagggttttcgctcgacaaagcggcgggaaaatggcagacaatcagcggggtaa

SEQ ID NO: 8650 - protein, 234 aa, Unknown
  Obtained from environmental sample
  DOMAIN (3)...(234): Pyridoxal phosphate biosynthetic protein PdxA
  misc_feature (1)..(234): Xaa is any amino acid
MYAVEECLFKPGTIDVYDLRSIEAQKLKIGQVDAASGEAAFVSVKKVIELALTSEIDATITNPLNKEALNLAGHHYAGHTEIYADLTKTKDYTMMLADGELRVAHVSTHVSLREACNRVKKDRVLRVVELAYNACRSFGISAPRIAVAGLNPHAGEGGLFGREEIEEITPAIEAAQAKGIDAIGPIPPDTVFAKALGGMYDIVIAMYHDQGHIPLKTQGFRSTKRRENGRQSAG

SEQ ID NO: 8651 - DNA, 468 bp, Unknown
  Obtained from environmental sample
  misc_feature (1)..(468): n is a, c, g, or t
atggcgcaccggctgaattcctgggcgcgggcaagggacggcggcagcgcgtaccggcttttcaaaacgctgcttcaaaccggcactctgccgaacctgtgggacacccaccccccgttccagattgacgggaactacggcggcacagcggggatggcggaaatgctgctgcagagcaacggcaatactatcgagccgctggcggcgcttcccgcacagtggtcaaaaggccgttttgagggcctggttgccaggggcaattttgtcatcggctgcgaatgggaaaacgggaaactgggcgccatgacaatcgaggcaaggcgcggcggtgtttgcaaggtacgataccccggcattgccgccgccgttgtcaccgacaaagacgggaagcaagtaacaacggcaacggacaacggcgatctggttattgataccgttgtaaacggaaaatacacaataaagcaatga

SEQ ID NO: 8652 - protein, 155 aa, Unknown
  Obtained from environmental sample
  misc_feature (1)..(155): Xaa is any amino acid
MAHRLNSWARARDGGSAYRLFKTLLQTGTLPNLWDTHPPFQIDGNYGGTAGMAEMLLQSNGNTIEPLAALPAQWSKGRFEGLVARGNFVIGCEWENGKLGAMTIEARRGGVCKVRYPGIAAAVVTDKDGKQVTTATDNGDLVIDTVVNGKYTIKQ

SEQ ID NO: 8653 - DNA, 669 bp, Unknown
  Obtained from environmental sample
  misc_feature (1)..(669): n is a, c, g, or t
atgacaggcatacggatagccgcgcgggcggagttaagccggcggaacgaaatgctgctgaggctttttgcggcgatcagcgcccttgcggcttcgggcctgattatggcggttatgggctacaacccctttgacgtttacgcgaagatcatgtcgggttcgcttggttcggcttaccgcttcagggagacgattaacaaggcaatacctttgtgcgttctttcactgggaaccgcgattgctttcaggatgaaattctggaacataggtcaggaagggcagttttaccttggggcttacggagcatctctggcggcctttgccttcccgaactttcccgcgcccgtcctcctgtcgataatgctgataatgggcatggtattcggcggcctgtgggctttgattccggcgttattgaaaataaaattttcaacaaatgagacgctggtgacattgatgctgaattacatcgcgatcaagtggatttcattcctgcagtacatcgcgtggaaagacccaacggccctcggttttcccaaaatttcccctttcagttccaacgccgtgcttccccgccttttcagtatccatatcggctggataatcagcctctgcctcgcgtttttgctgtacgtattgctgaaaaaaccaagttcggttatgagatag

SEQ ID NO: 8654 - protein, 222 aa, Unknown
  Obtained from environmental sample
  SIGNAL (1)...(30)
  misc_feature (1)..(222): Xaa is any amino acid
MTGIRIAARAELSRRNEMLLRLFAAISALAASGLIMAVMGYNPFDVYAKIMSGSLGSAYRFRETINKAIPLCVLSLGTAIAFRMKFWNIGQEGQFYLGAYGASLAAFAFPNFPAPVLLSIMLIMGMVFGGLWALIPALLKIKFSTNETLVTLMLNYIAIKWISFLQYIAWKDPTALGFPKISPFSSNAVLPRLFSIHIGWIISLCLAFLLYVLLKKPSSVMR

SEQ ID NO: 8655 - DNA, 615 bp, Unknown
  Obtained from environmental sample
  misc_feature (1)..(615): n is a, c, g, or t
ttgccggatgtggttcagaaggctttctcccccggttaccgttcccctgtggggcaggatccctgttatcgggcaggtctttttatacagagcccctatgttttggccggccttatcctcggagcgctgctttatgtttgtnttcgctacacccgcatagggttgaacgcgcgcgcggttggtgaaaaccccgctgtcgccgacgcggccggtattccggtgatcctctataaatatgttcatgtcatgctcggcggttttttatgcggcctgggcggggcatatctttccctggtttttgttccccgctggcaagaaaacatcactgccggcgcgggctggatagcggtcgctctggttattttcagcacatggaatcctctgcgggcgatttttgccgcctgtctctttggcgccctgcgggggctgggtttcaaactgcagaatattgatatgagcattgccggtgtccgtattatttttcattcccagcttctggatatgattccctatcttgccactatcattgtccttttaatcatcaccaggaggaagaagaaggaataccaggcgcccgcgtcccttggcgtgtcgtatttccgtgaagaccgttaa

SEQ ID NO: 8656 - protein, 204 aa, Unknown
  Obtained from environmental sample
  misc_feature (1)..(204): Xaa is any amino acid
MPDVVQKAFSPGYRSPVGQDPCYRAGLFIQSPYVLAGLILGALLYVCXRYTRIGLNARAVGENPAVADAAGIPVILYKYVHVMLGGFLCGLGGAYLSLVFVPRWQENITAGAGWIAVALVIFSTWNPLRAIFAACLFGALRGLGFKLQNIDMSIAGVRIIFHSQLLDMIPYLATIIVLLIITRRKKKEYQAPASLGVSYFREDR

SEQ ID NO: 8657 - DNA, 606 bp, Unknown
  Obtained from environmental sample
  misc_feature (1)..(606): n is a, c, g, or t
ttggaagacatagcaagcgccatgaacctgtcccttgtcgaacacggcttccctgaagtgcctttggtgaaataccgcgacattgtcggatgggggatcatcaggctggcggagctcgccctgccgcaggaggcgcgtacaaaagataacatacactgggtcagcaattacgccagacagcttatggagcgacagccccttgataaatcccttgccaaaccatatcccggcataccggaattattggaggaactgcaaaacagaaaaataaaaactgcggttcttagcaataaaccggactccgctttacgcaggattatagccgcaatttttccgcagcatcatttcaacttagtctggggactgcgccatggcgcagcgccgaagccggatcccgattcagtctgggaactgctggcggatatgggcattaacccccacgaggctgttctcatgggggattcggagattgatatggaaacggcgcaaaacgccggctgctacccccttggcgtaagctggggcttccgttcccgcgacacgctggtatcatcaggcgccgtgactatcatagataagccaagcgagttttttactctactttaa

SEQ ID NO: 8658 - protein, 201 aa, Unknown
  Obtained from environmental sample
  DOMAIN (22)...(175): haloacid dehalogenase-like hydrolase
  misc_feature (1)..(201): Xaa is any amino acid
MEDIASAMNLSLVEHGFPEVPLVKYRDIVGWGIIRLAELALPQEARTKDNIHWVSNYARQLMERQPLDKSLAKPYPGIPELLEELQNRKIKTAVLSNKPDSALRRIIAAIFPQHHFNLVWGLRHGAAPKPDPDSVWELLADMGINPHEAVLMGDSEIDMETAQNAGCYPLGVSWGFRSRDTLVSSGAVTIIDKPSEFFTLL

SEQ ID NO: 8659 - DNA, 447 bp, Unknown
  Obtained from environmental sample
  misc_feature (1)..(447): n is a, c, g, or t
gtgaggcgcgatcctttcgccatgctcccattctgcggctatcacatgggcgattatttccagcactggataaaactgggaaagaaaactccggtggatgcgcagccaaagttctttcttgtgaactggttccgaaaaaccaaaacagggaagtggctctggcccggatacggagaaaacagccgcatactcaaatgggtattcgaacgctgcgacggttccggcaaggcgattgaaacgcctataggtttcattcccacaagcgactccattgaccgtccgaaagatgtaagcgcggaatacatgaaagaacttctcacgattgacgtcgaaggctggaaagaggaacttgaagctgtaaaaaccagccattacccgaagttcggagacaaactgcccaaagaactgacggaacagcttgaagcgatcaaaaatcgtttggtttag

SEQ ID NO: 8660 - protein, 148 aa, Unknown
  Obtained from environmental sample
  DOMAIN (1)...(148): Phosphoenolpyruvate carboxykinase
  misc_feature (1)..(148): Xaa is any amino acid
MRRDPFAMLPFCGYHMGDYFQHWIKLGKKTPVDAQPKFFLVNWFRKTKTGKWLWPGYGENSRILKWVFERCDGSGKAIETPIGFIPTSDSIDRPKDVSAEYMKELLTIDVEGWKEELEAVKTSHYPKFGDKLPKELTEQLEAIKNRLV

SEQ ID NO: 8661 - DNA, 885 bp, Unknown
  Obtained from environmental sample
  misc_feature (1)..(885): n is a, c, g, or t
atggaacaggcggaatacgacaccatgatcaaaatccttatagacgccggcatggcgacgccgctcacaaaacgtccgaattcatacctcttccgctcggacgcgtcggacgtcgcccgcgttgaaaaccggacttacgtagcctcgcgcaagcaggaagacgccggtccgacaaacaactggattgacccggttgagcttaaaagcacgctgacaaggctttatacaaactcaatgcgcggacgcgtcatgtacgtgattccgttttcaatgggtcccgtcggatcgccgatagccaaaatcggcgtacagattacggattctccctacgtcgtcgccaacatgcacataatggcgcgcgtcggcaggcgcgtattaaatgtgctgggcagagatggcgagttcgttccctgtcttcattccgtgggcaaacctttactttcgtgtcaggacgattccggcacgtggccatgcgcaccgctggaaagcaagtatatcgcgcatttccccgaagaaaagaccatctggtcttatggttcgggatatggcggaaacgcgctgcttggcaaaaaatgcttggcgctgcgcatcgcttccgtgattgcccgcgacgaagggtggctggcggagcacatgcttattttgaaaatcacgaatcccgaaggaaaggtcaaatatatcgcggcggcgttcccttccgcctgtggaaagaccaacctggcaatgctgattccgaccgtgcctggctggaaagtcgagactataggcgatgatatcgcctggatgaaacatggcaaagacggcaggctttacgccataaatcccgaagcggggtttttcggcgtcgcgcccggaacatccggagaatccaactcaacgccatga

SEQ ID NO: 8662 - protein, 294 aa, Unknown
  Obtained from environmental sample
  DOMAIN (3)...(294): Phosphoenolpyruvate carboxykinase
  misc_feature (1)..(294): Xaa is any amino acid
MEQAEYDTMIKILIDAGMATPLTKRPNSYLFRSDASDVARVENRTYVASRKQEDAGPTNNWIDPVELKSTLTRLYTNSMRGRVMYVIPFSMGPVGSPIAKIGVQITDSPYVVANMHIMARVGRRVLNVLGRDGEFVPCLHSVGKPLLSCQDDSGTWPCAPLESKYIAHFPEEKTIWSYGSGYGGNALLGKKCLALRIASVIARDEGWLAEHMLILKITNPEGKVKYIAAAFPSACGKTNLAMLIPTVPGWKVETIGDDIAWMKHGKDGRLYAINPEAGFFGVAPGTSGESNSTP

SEQ ID NO: 8663 - DNA, 357 bp, Unknown
  Obtained from environmental sample
  misc_feature (1)..(357): n is a, c, g, or t
atgtttcatccaggcgatatcatcgcctatagtctcgactttccagccaggcacggtcggaatcagcattgccaggttggtctttccacaggcggaagggaacgccgccgcgatatatttgacctttccttcgggattcgtgattttcaaaataagcatgtgctccgccagccacccttcgtcgcgggcaatcacggaagcgatgcgcagcgccaagcattttttgccaagcagcgcgtttccgccatatcccgaaccataagaccagatggtcttttcttcggggaaatgcgcgatatacttgctttccagcggtgcgcatggccacgtgccggaatcgtcctgacacgaaagtaa

SEQ ID NO: 8664 - protein, 118 aa, Unknown
  Obtained from environmental sample
  misc_feature (1)..(118): Xaa is any amino acid
MFHPGDIIAYSLDFPARHGRNQHCQVGLSTGGRERRRDIFDLSFGIRDFQNKHVLRQPPFVAGNHGSDAQRQAFFAKQRVSAISRTIRPDGLFFGEMRDILAFQRCAWPRAGIVLTRK

SEQ ID NO: 8665 - DNA, 609 bp, Unknown
  Obtained from environmental sample
  misc_feature (1)..(609): n is a, c, g, or t
atggcgaatacccggtatgtcatttcgttagtactgaatgcccaccttccctttgtcagggaatacaccgattctgcgcgcccgtccgagctctttgacgacgaggaggcggacacaaagtccgcggacgtaaggttcatagaaaaacctgaaagtgcctgcgaagccgagccggatcaagagcaggatcaggaacttcttgtcccatgttcagtcgaggaaagctggttttttgaggctgtttcggaaacgtacctgcccctgcttggagtatttgaccggcttgagggagcccatattccatttcgtttggggatttccctttcgccggttttggggcaaatgttttccgatgattatctgataaaaaagtacattgcccatctggaacgccagattgagtttggcaggcatgaggttgaacggcttgagggccgggacgaatgcaagcttgcgcagcattattttgaccaggcggttgaacggcacgcggcttttacaatccgttatgaccgtgatatcctcaaggctcttgatcattaccagaaaaagggaagaatcgaactgattgccgcctccgctacaaacgccttctctcggccgatctga

SEQ ID NO: 8666 - protein, 202 aa, Unknown
  Obtained from environmental sample
  misc_feature (1)..(202): Xaa is any amino acid
MANTRYVISLVLNAHLPFVREYTDSARPSELFDDEEADTKSADVRFIEKPESACEAEPDQEQDQELLVPCSVEESWFFEAVSETYLPLLGVFDRLEGAHIPFRLGISLSPVLGQMFSDDYLIKKYIAHLERQIEFGRHEVERLEGRDECKLAQHYFDQAVERHAAFTIRYDRDILKALDHYQKKGRIELIAASATNAFSRPI

SEQ ID NO: 8667 - DNA, 798 bp, Unknown
  Obtained from environmental sample
  misc_feature (1)..(798): n is a, c, g, or t
gtgaacgacgagctaaaaaccccggatacctgggaagtcgccatctccgcctgcggcgatgacaacgagaaaaagaaagcggaattcacccgcctcgttatcgagggcaagctcggagatctggcatttttgagaaacctccgcaagatgcgggaagtgggcgtcgatgacgatgttattcgtaaatcctttgaaagccgaaaatggccctggattatcccctatcagttcataactgcggcggcgcacaataagcaggttgaggatgcgatagaacaggcgatgttcaaatgcctaaaagagcagaaaccgatagggcagaaagtcgcgttactcgttgacgtgagcggatcgatggatgcccgcctttcccggaaatctgagatcaaccgcagggatgtggctatcagcctggcaatccttcttcgcgaaacctgcacgaacgtgatgctttacacgttcaatgacagactgatggagattccagccaggcgcggtttcgcccttcgggattacatcttgcagaacttcggcggcggtaccagcatgtggacttctatcagggaagcggcggcgaaacgcaaaaacgatgttatgatcgtcatcactgacgagcaggccatggatagcgggcaatttaccgatgcagacgccgaccagctgttcatcataaatgtcgcatcatacgagaaaggcgttggctatgaaaagggcgtgacccatatcaacggctggtcagacagctgtgtgaatttcatcagggagtatttaagcgcgaatagcgcaatgggtatatag

SEQ ID NO: 8668 - protein, 265 aa, Unknown
  Obtained from environmental sample
  misc_feature (1)..(265): Xaa is any amino acid
MNDELKTPDTWEVAISACGDDNEKKKAEFTRLVIEGKLGDLAFLRNLRKMREVGVDDDVIRKSFESRKWPWIIPYQFITAAAHNKQVEDAIEQAMFKCLKEQKPIGQKVALLVDVSGSMDARLSRKSEINRRDVAISLAILLRETCTNVMLYTFNDRLMEIPARRGFALRDYILQNFGGGTSMWTSIREAAAKRKNDVMIVITDEQAMDSGQFTDADADQLFIINVASYEKGVGYEKGVTHINGWSDSCVNFIREYLSANSAMGI

SEQ ID NO: 8669 - DNA, 801 bp, Unknown
  Obtained from environmental sample
  misc_feature (1)..(801): n is a, c, g, or t
atgaacggcgccgctaccaaccccgaattcggcgttgtagcccttgccgccacacaggtaaaagcggccattgacgccactatagaactcggcggtcagggctataccttctggggcgggcgcgaaggctacatgagccttatcaataccgaccttaaaagggaaaaagacaactttgcccgttttcttaccatggcgcgggattacggtcgcaaacacggctttaagggccccttctatattgaaccaaaaccgatggagccgaccaaacaccagtacgactttgacaccgagaccgtcatcgggtttttacggcactacggtttggacaaggatttccgcatgaacatcgaagccaaccacgccgagcttgcgggccacgaattcgcccacgagcttgaaaccgccgccgccgccggcttcttcggatcggtggacgcgaaccgcggcgacgcgcagaacggatgggacacagaccagttcccgatgagctactacgaaaccgcgatggcgatgtacacaatccttaaaatcggcggttttaccaccggcggccttaacttcgattcaaaaatccgcagaaactcggttgatcccgccgacctctttatcgcccacatcggcggcatggacgcctttgccgtcggccttgaggtcgccaaccggataatcacagatggaaaaattccttcctttgtcaaaaaacgctatgcttcgttcagcgcgggcgatggcgcgaaattcagcaaaggccagatgacattggagcagcttgcggaaatcggcgccaaagccggttag

SEQ ID NO: 8670 - protein, 266 aa, Unknown
  Obtained from environmental sample
  DOMAIN (1)...(152): Xylose isomerase-like TIM barrel
  misc_feature (1)..(266): Xaa is any amino acid
MNGAATNPEFGVVALAATQVKAAIDATIELGGQGYTFWGGREGYMSLINTDLKREKDNFARFLTMARDYGRKHGFKGPFYIEPKPMEPTKHQYDFDTETVIGFLRHYGLDKDFRMNIEANHAELAGHEFAHELETAAAAGFFGSVDANRGDAQNGWDTDQFPMSYYETAMAMYTILKIGGFTTGGLNFDSKIRRNSVDPADLFIAHIGGMDAFAVGLEVANRIITDGKIPSFVKKRYASFSAGDGAKFSKGQMTLEQLAEIGAKAG

SEQ ID NO: 8671 - DNA, 585 bp, Unknown
  Obtained from environmental sample
  misc_feature (1)..(585): n is a, c, g, or t
ttgattgaaatgcccgcaaagtctgatacggtatatttgtcgcttgtagtgccttgttacaatgaagaaaaaacactgtccaaattttatactgataccgttaagatatgcgagtcggtcaataaaacttttgagataatttttatagacgacggttcaaaagataccacgcttaatattctaagacaaaccgcgtcttgcgacacgcgcgtccattacatttccttttcgcgcaatttcggcaaagaggccgcgatgcttgcgggattacaggcgtcgcagggaacatataccgccattttggacgcggacggccaagacccgccggaactcattccccaaatgctggaagctgtcgagtcgggggaatatgactgcgcgggaacacgacggacaaaccgtaaaggagaaccgcctgtccgctctttttttgcgcggcgtttttacaaaataatgagaaaatataccgatatcgacattgtagacggcgcaagggatttcagacttatgaacagaaggtacatggacgcgcttttatccatgctgaacggcacaggttttccaaaggcatattcccctggatag

SEQ ID NO: 8672 - protein, 194 aa, Unknown
  Obtained from environmental sample
  DOMAIN (14)...(179): Glycosyl transferase family 2
  misc_feature (1)..(194): Xaa is any amino acid
MIEMPAKSDTVYLSLVVPCYNEEKTLSKFYTDTVKICESVNKTFEIIFIDDGSKDTTLNILRQTASCDTRVHYISFSRNFGKEAAMLAGLQASQGTYTAILDADGQDPPELIPQMLEAVESGEYDCAGTRRTNRKGEPPVRSFFARRFYKIMRKYTDIDIVDGARDFRLMNRRYMDALLSMLNGTGFPKAYSPG

SEQ ID NO: 8673 - DNA, 615 bp, Unknown
  Obtained from environmental sample
  misc_feature (1)..(615): n is a, c, g, or t
atgcaggcggcaattgaccacatacagggaacagatgtagcaaacgcgccgggaatggccgctgtagtcggctttgccccggaaaacgtggaagcattaattaccgagtggaaaaatgcggggcttaccggcctttacgctgctaactttaactcgtcaaggcaggtggcggtctctggcagcgccgcggcccttgcagaagcggagaaacgctttaaggaagcgggagcaaaacgctttatgcggcttgcggtggcagggccttaccactcgccctttatgaaagaagcggcggatgtttttgctccctatctggaaaaagtccattttaacgatccgaaaatcccaattttctctaatgtaacaggcaagcaggtattatccggtgccgaagcaaaaggcctggctatcaagcaaattgtagaaccggtacgctggacagaagaagaagcccttatggcaaaatttgagccgaaagagctgcttgaaacaggccccggcaaggttttacagggtctatggaaagacttggggaacggtattccatgttattccgccggtacagcgacggaaatcgacgaactttataacgatgaggcattaaaatgcggttga

SEQ ID NO: 8674 - protein, 204 aa, Unknown
  Obtained from environmental sample
  misc_feature (1)..(204): Xaa is any amino acid
MQAAIDHIQGTDVANAPGMAAVVGFAPENVEALITEWKNAGLTGLYAANFNSSRQVAVSGSAAALAEAEKRFKEAGAKRFMRLAVAGPYHSPFMKEAADVFAPYLEKVHFNDPKIPIFSNVTGKQVLSGAEAKGLAIKQIVEPVRWTEEEALMAKFEPKELLETGPGKVLQGLWKDLGNGIPCYSAGTATEIDELYNDEALKCG

SEQ ID NO: 8675 - DNA, 540 bp, Unknown
  Obtained from environmental sample
  misc_feature (1)..(540): n is a, c, g, or t
atgccgcctttgaccatccccctgatgatcccgaatgaagcggcagggaatatctctatgctgttcggcacaaaggggccggcgtttacacaggttacagcctgcgcttccggcaccgacgcccttgggcaggcgctggaccttatccgggcgggacgctgcgatgtgatcatttccggcggaaccgaagcggttatagtgcctttcgccatcggcggcttccagatgctaaaggccctttcgacaaaacgctgccatgagccggagaaagcctcccgcccgtttgacgccgaccgcgacggtttcgtgcttgccgaagggtcaggcatacttatcctggaaagcgaggaacacgcgaaaagccggggggcaaatatacttgccgaactcgcgggttacggtacaagctccgacgcatatcgcataacagaccctgatccgacacctgttggaggcagcacggcgatgaaaaaacggcatcccctgactcaggccgtaaatcggaggaaatgcattacttcaacgcccacggcactttaa

SEQ ID NO: 8676 - protein, 179 aa, Unknown
  Obtained from environmental sample
  DOMAIN (1)...(118): Beta-ketoacyl synthase, N-terminal domain
  misc_feature (1)..(179): Xaa is any amino acid
MPPLTIPLMIPNEAAGNISMLFGTKGPAFTQVTACASGTDALGQALDLIRAGRCDVIISGGTEAVIVPFAIGGFQMLKALSTKRCHEPEKASRPFDADRDGFVLAEGSGILILESEEHAKSRGANILAELAGYGTSSDAYRITDPDPTPVGGSTAMKKRHPLTQAVNRRKCITSTPTAL

SEQ ID NO: 8677 - DNA, 459 bp, Unknown
  Obtained from environmental sample
  misc_feature (1)..(459): n is a, c, g, or t
ttgtcaacttttttaaaaccgcttgtggcgctggttgtttcaatcctcttgtttgccggacttctcttcctggcggacggtaatcttttaaaatttgtagagactcgtttttataacccttcggttgttagctcttatgttaaggaaaatgcggcggacgcaaaactggttcaaaatcatatagattttcttcaaagccgttttgaagctaccctgacggaatccgccgtacgcagcagttttttgtataaccagagcgctaatgatatttttgaacgttcaaaagtatacggtatattgatggaatcaacggcggggcttcaatccgtgcaatttgttgatagtaacggaataagactgcattattccacttccgccagagatataatgaatcaagatcaaagatccacggcgtatcggaattacaccgagaacccgacatcactgcctatgaagtga

SEQ ID NO: 8678 - protein, 152 aa, Unknown
  Obtained from environmental sample
  SIGNAL (1)...(24)
  misc_feature (1)..(152): Xaa is any amino acid
MSTFLKPLVALVVSILLFAGLLFLADGNLLKFVETRFYNPSVVSSYVKENAADAKLVQNHIDFLQSRFEATLTESAVRSSFLYNQSANDIFERSKVYGILMESTAGLQSVQFVDSNGIRLHYSTSARDIMNQDQRSTAYRNYTENPTSLPMK

SEQ ID NO: 8679 - DNA, 357 bp, Unknown
  Obtained from environmental sample
  misc_feature (1)..(357): n is a, c, g, or t
gtgatacttcctggcggaatgcccggctcaacaaatcttgcggcttcaaaagagacaggctcgctggttaaagaaatggcggctgccggaaaaacggtctgcgcaatttgcgccgctcccgctcttgtgcttgctccacttggtttgcttgccgggaaaaattttacctgttatcctggaatggaagaaaaagtaaattcaacagacagcaaatggtcggacagccgcgtagtaacggacggaaatatcatcacaagccgcggcgccggaacggcgggagaatttgcagttgcgattattgaaaaattactggacaaagccgcagctcagaaaatagcggatgctgttttactgtaa

SEQ ID NO: 8680 - protein, 118 aa, Unknown
  Obtained from environmental sample
  DOMAIN (1)...(104): DJ-1/PfpI family
  misc_feature (1)..(118): Xaa is any amino acid
MILPGGMPGSTNLAASKETGSLVKEMAAAGKTVCAICAAPALVLAPLGLLAGKNFTCYPGMEEKVNSTDSKWSDSRVVTDGNIITSRGAGTAGEFAVAIIEKLLDKAAAQKIADAVLL

SEQ ID NO: 8681 - DNA, 432 bp, Unknown
  Obtained from environmental sample
  misc_feature (1)..(432): n is a, c, g, or t
ttgtttgtttttatgaacgcggacgaaacaatcgctttctacaatacgatcagaaaaaaacaagatgaagtaactgtaacaacagataaagaaaaagaagagcttatcctgcgcgacatatgcccaatgttaaaaattatcacagacggcgaaatatttcctattattgttgtaaaactaggaggccgcggcgcggtagtaatcgccggcggaaatgtttaccgcgaggatacattttctatcattcccagaaatacggtcggggctggagacgctttttgcgccgcattcatatccgcgtggttacgggacaattcgctttccgagtgcgcctctcttggaaacaaagtcgcgcgggaaattcttgaagttcccggaacgcacattaaaagtacaaaattaaaatcattcgcaaagacattacagaaataa

SEQ ID NO: 8682 - protein, 143 aa, Unknown
  Obtained from environmental sample
  misc_feature (1)..(143): Xaa is any amino acid
MFVFMNADETIAFYNTIRKKQDEVTVTTDKEKEELILRDICPMLKIITDGEIFPIIVVKLGGRGAVVIAGGNVYREDTFSIIPRNTVGAGDAFCAAFISAWLRDNSLSECASLGNKVAREILEVPGTHIKSTKLKSFAKTLQK

SEQ ID NO: 8683 - DNA, 582 bp, Unknown
  Obtained from environmental sample
  misc_feature (1)..(582): n is a, c, g, or t
atgcctcgccccgtagtccagccaaggggactgacaagccctttgccaatcaaagaaatcatccccatagaattttttgaaaccagccgaattggtgaggtgcgtctcgtccctctggcaatttgggtgccggtgatatcatttattctgatagcggcgctgttgtgggttgtttacaaaaccaagccagggcttgcaatgcgctccatctcgcgcgacatcgaaaccacccggcttatgggcgtttcggtggacaaaatcatagcccttactttcgcgcttggttccgcgctggccgcgctggccggcatcatgtgggcgctgcgctacccaaggatagaaccctttatgggcgttttccctggcttcaaggcgttcatcgcggcagttttcggcgggattggctcaatcccaggcgcgatgataggcggtctcgtcctcggcttcgtggaaatcatgtcgatcgccttcttccctcatctttcaggttataaggacgctttcgcgttcatacttctaatatttattttgctggtaaaacccactggtttgatgggcgagcgtatggaggaaaaaatatga

SEQ ID NO: 8684 - protein, 193 aa, Unknown
  Obtained from environmental sample
  DOMAIN (3)...(177): Branched-chain amino acid transport system / permease component
  misc_feature (1)..(193): Xaa is any amino acid
MPRPVVQPRGLTSPLPIKEIIPIEFFETSRIGEVRLVPLAIWVPVISFILIAALLWVVYKTKPGLAMRSISRDIETTRLMGVSVDKIIALTFALGSALAALAGIMWALRYPRIEPFMGVFPGFKAFIAAVFGGIGSIPGAMIGGLVLGFVEIMSIAFFPHLSGYKDAFAFILLIFILLVKPTGLMGERMEEKI

SEQ ID NO: 8685 - DNA, 300 bp, Unknown
  Obtained from environmental sample
  misc_feature (1)..(300): n is a, c, g, or t
atgacggccgctggaattgaccgcaaaaaaatcattgtggtggacgatagtctggtaaaccttcttatcgttaaaaacacgtttatcgacaggcatgatatcttcaccgtcccatcgggagaaaagctgttcaggcttcttgaaaaaataactcccgatatgatactgctcgatattgaaatgcccgaaatgaacggctatgaagttataaagattcttaaaaattcgcaagccacagccgatattcccgtcatttttctaaccgcgtcgccagaccctgaaagcgagacaaatgggtga

SEQ ID NO: 8686 - protein, 99 aa, Unknown
  Obtained from environmental sample
  DOMAIN (9)...(98): Response regulator receiver domain
  misc_feature (1)..(99): Xaa is any amino acid
MTAAGIDRKKIIVVDDSLVNLLIVKNTFIDRHDIFTVPSGEKLFRLLEKITPDMILLDIEMPEMNGYEVIKILKNSQATADIPVIFLTASPDPESETNG

SEQ ID NO: 8687 - DNA, 489 bp, Unknown
  Obtained from environmental sample
  misc_feature (1)..(489): n is a, c, g, or t
atggtcaaaatgggtatagcgctcagccctgaggggcggaggattttgccccatctgacggtagaggagaacctgtggctcggcgcttacagccgcagcgacaaagcggaaatacttaaagacatggactacgtatacaacctgttcccgcgcctgaaggagcgccggtctcagaaaggcggcaccctgtcgggaggcgagcagcagatgctcgcggtaggtcgcgccctcatgagccgcccagagctgctgatgctcgacgaaccttccctcggcctggcgcccaagctggtaggcgaggttttcgacatcataagagaaatcaaccatcagggaaagaccgtcctcctggttgagcagaacgccttcgccgccctttcgatagccgacaaggcatacgttctggaggtagggtcgatagccatcactggaaccggaaaggaattgctccaggacccaagagtgaaggatgcatacctgggcggatga

SEQ ID NO: 8688 - protein, 162 aa, Unknown
  Obtained from environmental sample
  DOMAIN (2)...(138): ABC transporter
  misc_feature (1)..(162): Xaa is any amino acid
MVKMGIALSPEGRRILPHLTVEENLWLGAYSRSDKAEILKDMDYVYNLFPRLKERRSQKGGTLSGGEQQMLAVGRALMSRPELLMLDEPSLGLAPKLVGEVFDIIREINHQGKTVLLVEQNAFAALSIADKAYVLEVGSIAITGTGKELLQDPRVKDAYLGG

SEQ ID NO: 8689 - DNA, 786 bp, Unknown
  Obtained from environmental sample
  misc_feature (1)..(786): n is a, c, g, or t
atggatcagatcggccgagaggccctgcgcgagctttccggccgtatggaagaaatgcccgccgaggaaggcttccccgcgtacctgcccacccgccttgccgaattctacgaacgcgcaggccgcgtctccaccctttccggcagcgaaggctcagtctcgatcatcggggcagtctccccgccgggcggtgatttttccgagccggtaacacagcacaccaaacgctttatccgttgtttttgggctttggaccgcgagcttgccaatgcccgccattacccagcgataagctggacggacagctactccgagtacgccgaagaagtgcggccctggtgggaacgggtgaacgcaatctgggctgttgtccgcagccagtgccttgatctgctcaagagcgatcaaaaacttactgagattgtccgactcatcggccctgacgccctgcccgacgagcaaaaacttgtccttgtcacctcagacattatcaaagacggctatttacagcaaaattcattcgatgaaattgatatgtactgcgtccccgcaaaacagatccggctcctggaactgataatggaattccatgagcgcgcaagaacctgcatcaaactgggagcgcccctcaccaaaatttccgtaatgggattaaaagaaggcctgtccaggcttaaaagcacgatcaagaatgaaaatcttggcgaatttgacacattcgcggcaaagatgcgttcccagcttgaagaactggaacggagctaccggaccagggaagtgctgtaa

SEQ ID NO: 8690 - protein, 261 aa, Unknown
  Obtained from environmental sample
  DOMAIN (1)...(104): ATP synthase alpha/beta family, nucleotide-binding domain
  misc_feature (1)..(261): Xaa is any amino acid
MDQIGREALRELSGRMEEMPAEEGFPAYLPTRLAEFYERAGRVSTLSGSEGSVSIIGAVSPPGGDFSEPVTQHTKRFIRCFWALDRELANARHYPAISWTDSYSEYAEEVRPWWERVNAIWAVVRSQCLDLLKSDQKLTEIVRLIGPDALPDEQKLVLVTSDIIKDGYLQQNSFDEIDMYCVPAKQIRLLELIMEFHERARTCIKLGAPLTKISVMGLKEGLSRLKSTIKNENLGEFDTFAAKMRSQLEELERSYRTREVL

SEQ ID NO: 8691 - DNA, 363 bp, Unknown
  Obtained from environmental sample
  misc_feature (1)..(363): n is a, c, g, or t
atgtgcggnctcttttataaggaagatgaaagcgacaatacggtggttcagccggatataaccgttatttgcgatgcgaaaaaacgagggccggaaggctgccgcggcgcgcccgatttagttgtagaaattctgtcgccctcaaatacggcgattgaaatgcagcggaaattcgacctttaccataccgccggcgtgcgcgaatattgggtattgaacaacgaacataatacccttactgtttatatttttgacggcgaaaagattatcagccgcacatatggcgaaaaagacacggttcctgtcagcgtgctcaacggactttcaatagatcttgcgccggtgtttacaagtgaacagtga

SEQ ID NO: 8692 - protein, 120 aa, Unknown
  Obtained from environmental sample
  DOMAIN (2)...(83): Protein of unknown function (DUF820)
  misc_feature (1)..(120): Xaa is any amino acid
MCGLFYKEDESDNTVVQPDITVICDAKKRGPEGCRGAPDLVVEILSPSNTAIEMQRKFDLYHTAGVREYWVLNNEHNTLTVYIFDGEKIISRTYGEKDTVPVSVLNGLSIDLAPVFTSEQ

SEQ ID NO: 8693 - DNA, 318 bp, Unknown
  Obtained from environmental sample
  misc_feature (1)..(318): n is a, c, g, or t
atggtaattaaaagcgcttctttttatcctcggcccaatgtggattcccaggctgttcttctggatctgcgcgatggcgcggaggattgtcagcttccgtcatgtttccactccctgcttcgcggcctgttttcaagcaggaggaagacaattaaaaacaaccttgccgcctttcttgcggcgagagggaaatactcagaacctatgttagccgcaatattaactgaaagcgacttgggaggcggtaagcgggcggagaccctcgcttttgaggacttcgtgaggcttgcggaaattattaataatatgggattatga

SEQ ID NO: 8694 - protein, 105 aa, Unknown
  Obtained from environmental sample
  misc_feature (1)..(105): Xaa is any amino acid
MVIKSASFYPRPNVDSQAVLLDLRDGAEDCQLPSCFHSLLRGLFSSRRKTIKNNLAAFLAARGKYSEPMLAAILTESDLGGGKRAETLAFEDFVRLAEIINNMGL

SEQ ID NO: 8695 - DNA, 681 bp, Unknown
  Obtained from environmental sample
  misc_feature (1)..(681): n is a, c, g, or t
atgggatttactattcttcgcaaccgcattcctttccgcgagcggctggaaggcgataccgaccctggcaataacgacggttttgtaacaagaaaaaatgataatacctacgattacacggtaaatccggacggtacaaaaacttttaatttaaattgggacagctgggacatttcaggtacaagacatcttatccggcaaataaaagcccttggcgaaaagggaccggaaaaattaacaataatgagcaccccctggacagtgccaaataatcgcataacacggtggaaggaagatattaccggcgttaacgcaaggactaattacacaatggactggtcattgccggacagatggggaagattacgccgcgacaaatacgccgattacgcggatcttcttgccgactatgtaaaaaactttgaatcaaaaatgggcgctccgctttccattctttccgtacaaaatgaacctaactggaatgccagttgggaaacaacttactgggatggttcaggcttacgtgactttattgtaacaatatccaaacgcttccccatgaagggcattattgcgggtaacggcggcattaacattatgatgccggaatttgaaaactttaatatcagttttaatgacatgataaaaccgtcgttggataatcccgaatccgaaaaataa

SEQ ID NO: 8696 - protein, 226 aa, Unknown
  Obtained from environmental sample
  misc_feature (1)..(226): Xaa is any amino acid
MGFTILRNRIPFRERLEGDTDPGNNDGFVTRKNDNTYDYTVNPDGTKTFNLNWDSWDISGTRHLIRQIKALGEKGPEKLTIMSTPWTVPNNRITRWKEDITGVNARTNYTMDWSLPDRWGRLRRDKYADYADLLADYVKNFESKMGAPLSILSVQNEPNWNASWETTYWDGSGLRDFIVTISKRFPMKGIIAGNGGINIMMPEFENFNISFNDMIKPSLDNPESEK

SEQ ID NO: 8697 - DNA, 642 bp, Unknown
  Obtained from environmental sample
  misc_feature (1)..(642): n is a, c, g, or t
atgagtttcatcaggcagccttttaaatatcagtcattcggcgcggtatactggcttatcggaataaatgttcttgtttacgcggcagggcagtttttaggtagaaatgtctggatttatctgatggaaacgttttcgatgattccctatagaattatcaaagacaaatggttttggacctttgtttcatatatgttcatgcacggtaatttcaggcacattctttttaacatgctgggtctttttcttttcgggctccatgtcgaaaggcagatgggcagcaaggaatttctgctttactactttgtcacggggactttggcgggagttttttcttttgcggcttattactatacccacaattactatatagcgctaataggcgcgtccggcgcgctctttgccgtggaacttgcctatgcggtaattttccccgactcgattatttatatttggggcataattccccttcgcgccccggtgatggttctgggttataccgcgctggaattgattttttcaataaccaggtacaataacggagtagcccatttgacacaccttgccggtttcggtttcggctggatttacttcctgctgcgcttcgggataaatccctggcgtcggcttttcaggcgttag

SEQ ID NO: 8698 - protein, 213 aa, Unknown
  Obtained from environmental sample
  SIGNAL (1)...(28)
  DOMAIN (52)...(206): Rhomboid family
  misc_feature (1)..(213): Xaa is any amino acid
MSFIRQPFKYQSFGAVYWLIGINVLVYAAGQFLGRNVWIYLMETFSMIPYRIIKDKWFWTFVSYMFMHGNFRHILFNMLGLFLFGLHVERQMGSKEFLLYYFVTGTLAGVFSFAAYYYTHNYYIALIGASGALFAVELAYAVIFPDSIIYIWGIIPLRAPVMVLGYTALELIFSITRYNNGVAHLTHLAGFGFGWIYFLLRFGINPWRRLFRR

SEQ ID NO: 8699 - DNA, 738 bp, Unknown
  Obtained from environmental sample
  misc_feature (1)..(738): n is a, c, g, or t
atgcttttcccaaaacaaccggaaaggcaagccatcaatgtcaggcgggctggcagggggcctattttggatcgtaatggccggcttttggcccttgagaccaggctgggaaacattacgctctggcgtcctgatatggaaaaccccgaagaactatgccgggatcttgcccccttattggaattgtcgccggaagagcttatgggcagaattaacaattctcaaagcgattttatctatctgaaaaaacaggttaatgaaaatattgtcgcccttattcaggccacaatttcagacggccgtttacgcggcgtaggcatagagccggttgtagggcggatttatccggaaagaaccctggcctcccaaatcgtcggctttgtcggggacgatggctttggccttgccggaatagaatacgcctttgaaaacgagctaaaagcagagcaggggatatttggcataaacggggcaagccaggtttttctgaccctggatatgaacgttcagtacattcttgaaagcatcgcgacacaggcaatggacgagaacaaagccgaagcggttatgtttatggctatggatccaagaaccggggaaatacttggaagtgcttccatgcccaactacgatcccaacaactggagaaactcggatgaaatttcccgcatggatcggccagcgatatggtcctacgagccgggatcggtcttcaaggttttttcccttcggcactaa

SEQ ID NO: 8700 - protein, 245 aa, Unknown
  Obtained from environmental sample
  DOMAIN (14)...(156): Penicillin-binding Protein dimerisation domain
  misc_feature (1)..(245): Xaa is any amino acid
MLFPKQPERQAINVRRAGRGPILDRNGRLLALETRLGNITLWRPDMENPEELCRDLAPLLELSPEELMGRINNSQSDFIYLKKQVNENIVALIQATISDGRLRGVGIEPVVGRIYPERTLASQIVGFVGDDGFGLAGIEYAFENELKAEQGIFGINGASQVFLTLDMNVQYILESIATQAMDENKAEAVMFMAMDPRTGEILGSASMPNYDPNNWRNSDEISRMDRPAIWSYEPGSVFKVFSLRH

SEQ ID NO: 8701 - DNA, 957 bp, Unknown
  Obtained from environmental sample
  misc_feature (1)..(957): n is a, c, g, or t
ttgcattatatcgaggggcggttgcctaatccaaccaatactgttgatacggaattctacgctaaagtcaagaaaatgaaattgaaggctaagatagcggcttttggttcaacaaagcgtcccggtaacaaagtcaatgaagatccttttatgcaggcgttgataactaccggcgctcaagtcgctaccatcttcggtaagtcttgggaccttcacgtcaaaaaagtcatcaacacgacgctcgatgagaatctcacgatgatcaacgactccgtccgtttcctaaagaaacattttgacgaagtcgtctacgacgccgagcatttttttgacggcttcaaggcgaatccggaatacgctataaagacgctcctcgccgccaaagacgccggggcggattgtctcgtcctctgcgatactaacggaggattattaccggacgaggcggtggagattttccgtgtcgtcaaatcaaaaattaatgacgcgaaactcggcgtgcacatgcacaacgactccggctgcgccgaggcgtcgtcgtgcctctgcgtgatagagggggcttctcacgttcaggggacgatgaacgggctgggggagaggtgcggcaacgccaatctctgcacgataattcccaacttgcagctcaagcgcggatttaacttagtaaccccggagcagctgaaaatgctgacgtccgcctctctctacgtcgcggagctggccaacacggcgccgaacatccgccacccgtacgtcggcgaggcggcgttctcccacaaggccggcgcccacgccgacggagtgcgcaaagtgcgccaatcgtttgaacacaccgatcccgagacggtagggaacagccgtcaattcgtggtcagcgatcaggccggggcgagcacgatattggaaaagctgtcaaagatcagaccggggcttgacaagaaggatcccatgtaa

SEQ ID NO: 8702 - protein, 318 aa, Unknown
  Obtained from environmental sample
  DOMAIN (1)...(244): HMGL-like
  misc_feature (1)..(318): Xaa is any amino acid
MHYIEGRLPNPTNTVDTEFYAKVKKMKLKAKIAAFGSTKRPGNKVNEDPFMQALITTGAQVATIFGKSWDLHVKKVINTTLDENLTMINDSVRFLKKHFDEVVYDAEHFFDGFKANPEYAIKTLLAAKDAGADCLVLCDTNGGLLPDEAVEIFRVVKSKINDAKLGVHMHNDSGCAEASSCLCVIEGASHVQGTMNGLGERCGNANLCTIIPNLQLKRGFNLVTPEQLKMLTSASLYVAELANTAPNIRHPYVGEAAFSHKAGAHADGVRKVRQSFEHTDPETVGNSRQFVVSDQAGASTILEKLSKIRPGLDKKDPM

SEQ ID NO: 8703 - DNA, 597 bp, Unknown
  Obtained from environmental sample
  misc_feature (1)..(597): n is a, c, g, or t
ttggacgctgcggcttttagcggcaaaatgcgtcgaactgcggtacagcgacaccatgtcccacatgaccataagcacccttttaaaaaaacgcaacttaagcctcacctgaaaacgtgctggtgtatccccccggagcataacggcgcgtttgtggcggcgatggaagatgttttggccgtttacgcgcgtccgtatgacgaaaaccgacctgtcgtatgcatggacgagaaaccgtatcaattcgtaagcctgagccgcaatcccatacccatgaaacacggttcgccgcaacgggaagactatgaatatatacggctcggcacctgcagcattttcatattcactgaaccgctttcaggctggcgtcacgcgcaagcgtctttgcagcggacgaaaaaggattgggcgctccaaatccaatggctgcttaacgtacaataccctaaagctgtaaaaatagtattgataatggaccaccctcatacccatgtcatttcatcgctgtatgaaaccttctcgccggaaagaagcctccggcctcgcgcaacggctttgaaacccattataccgccccggcctggaaagcctggctga

SEQ ID NO: 8704 - protein, 198 aa, Unknown
  Obtained from environmental sample
  misc_feature (1)..(198): Xaa is any amino acid
MDAAAFSGKMRRTAVQRHHVPHDHKHPFKKTQLKPHLKTCWCIPPEHNGAFVAAMEDVLAVYARPYDENRPVVCMDEKPYQFVSLSRNPIPMKHGSPQREDYEYIRLGTCSIFIFTEPLSGWRHAQASLQRTKKDWALQIQWLLNVQYPKAVKIVLIMDHPHTHVISSLYETFSPERSLRPRATALKPIIPPRPGKPG

SEQ ID NO: 8705 - DNA, 537 bp, Unknown
  Obtained from environmental sample
  misc_feature (1)..(537): n is a, c, g, or t
atgatgggggtcgttttcgagaccgccaagtccggggtagacgatgaaaacgcgtatatagacgcaaacgacttggacgcttcgctctgccggcttgccgccgctaaagcacgggaggcgtcggcacgccgccatgaggcgctggtgttgggggcggatacggtcgtcgttgcggacgatagaattttaggtaaagccgcggacaaggacgacgcacggcaaatgttgcgacttctttcgggtaggcgtcacacggtagttacggccgtagcgctcctatgccaagatgaaggtttcagcgagtcgacggcggtccgcacagaggtgtttttcagggcgcttgaggaggaagagatcgagtattacctctctttcccggagtatgaggataaggccggcgcatacgctgttcagggcggggccatgacttttatagatagaatagagggctgctattacaacgtgatgggtcttcccgtcacggcgacgcttggcctattcaaaaagtttgtcagaaagggtgattcaaatggctga

SEQ ID NO: 8706 - protein, 178 aa, Unknown
  Obtained from environmental sample
  DOMAIN (1)...(172): Maf-like protein
  misc_feature (1)..(178): Xaa is any amino acid
MMGVVFETAKSGVDDENAYIDANDLDASLCRLAAAKAREASARRHEALVLGADTVVVADDRILGKAADKDDARQMLRLLSGRRHTVVTAVALLCQDEGFSESTAVRTEVFFRALEEEEIEYYLSFPEYEDKAGAYAVQGGAMTFIDRIEGCYYNVMGLPVTATLGLFKKFVRKGDSNG

SEQ ID NO: 8707 - DNA, 414 bp, Unknown
  Obtained from environmental sample
  misc_feature (1)..(414): n is a, c, g, or t
ttggcctattcaaaaagtttgtcagaaagggtgattcaaatggctgaaaagaatagcgaaagcaaggggtcgacgaatactgcggcgccggttaaggacacggttaaagacgcgggtaaagacccggttaaagatgcggtcaaggataaggtgggcgacattctgcggaaagagcgcctcacacgccgcatcactattgagaccatcgccaaggatctgaagctcaacgtgggctacgtaaaggcgttggaagccagcgactacgactctctcccgcccgacccctacatcagggtctacataaggtcgctcaccaagtacctctccttagactcggatagcatactgaaggagttctacaaagagcgcggactgatcgccgacgacccccccaaatcaggcaagcaagattga

SEQ ID NO: 8708 - protein, 137 aa, Unknown
  Obtained from environmental sample
  misc_feature (1)..(137): Xaa is any amino acid
MAYSKSLSERVIQMAEKNSESKGSTNTAAPVKDTVKDAGKDPVKDAVKDKVGDILRKERLTRRITIETIAKDLKLNVGYVKALEASDYDSLPPDPYIRVYIRSLTKYLSLDSDSILKEFYKERGLIADDPPKSGKQD

SEQ ID NO: 8709 - DNA, 393 bp, Unknown
  Obtained from environmental sample
  misc_feature (1)..(393): n is a, c, g, or t
gtgatagacgatcccgacaaaaaaaggcccctgcctgacccgtcatttgccgtcagccccgactcgctgtccctgtatgcccggcaaaaagaccttacttttggagataacatttaccgccttgaataccataccggcgctgacatcattcttttttcacaggaaaaccttagctccatgaatttgggtattataccggcgataggcaaaaacaaattccgcactgttatggcgataattgacgcgggagactcgcttttgatttactcggcggcaatggcgaaaaccgcctccgtccccggcatgggggatcgcataggctcctcttttactaatcgcgtaaaagccatactaaagtggtttgtggggcgtgcggataaagtattggggtaa

SEQ ID NO: 8710 - protein, 130 aa, Unknown
  Obtained from environmental sample
  misc_feature (1)..(130): Xaa is any amino acid
MIDDPDKKRPLPDPSFAVSPDSLSLYARQKDLTFGDNIYRLEYHTGADIILFSQENLSSMNLGIIPAIGKNKFRTVMAIIDAGDSLLIYSAAMAKTASVPGMGDRIGSSFTNRVKAILKWFVGRADKVLG

SEQ ID NO: 8711 - DNA, 852 bp, Unknown
  Obtained from environmental sample
  misc_feature (1)..(852): n is a, c, g, or t
ttgttcagaatcggccgagagcgcagaagccgaagtcaacgcgccgcgtataatatctcaagggcaaaagattattttctttcccccgaagacccgtcccttgcgttaatcgacggcagcaaaaaattccgcagcatatacgccgaatatgaaaaaaggcttatccataccgggaatgtggatttcggcgacctgataaaaaagcccgtggagattctgcgaaaggagccggatgtctccagccgtttcagggagcgattttccgtaataatggtggacgaataccaggacgcgaatgtcgcccagtttgagatgctgaaagagttggccggccccaacacatacgtctgcgttgtgggggacgacgaccagtcgatctaccgcttccgtggcgcggaggtaaaaaacatccttgagtttccggaaaaattttcagatgccgacattatccgcctggaaagcaactaccgctccaccgcgcctattttgaaagccgcctcctcggttgtgaatcacaacaagggccgtttgggaaaaaccctccggtcggaacgcggcgacgggaagctgcccgtgcttgcctttctgccgaatcaggaagaagaagccaatttttgcgcctctcttatcgaaaattcggtaaaaggctgcagcgcanaaagcggctcanatagtgatgcaattagtaatacagacagtaatacaaacagtaatacaaaaagcggcggcggcgttaaaacgccgaaaaaaacgccgggcgcatggtcggattgggcgattttgtatcggactaacgcgcaatcctttggttttgaaactgaattcctgcgccgaaaaatccctancangtag

SEQ ID NO: 8712 - protein, 283 aa, Unknown
  Obtained from environmental sample
  DOMAIN (3)...(282): UvrD/REP helicase
  misc_feature (1)..(283): Xaa is any amino acid
MFRIGRERRSRSQRAAYNISRAKDYFLSPEDPSLALIDGSKKFRSIYAEYEKRLIHTGNVDFGDLIKKPVEILRKEPDVSSRFRERFSVIMVDEYQDANVAQFEMLKELAGPNTYVCVVGDDDQSIYRFRGAEVKNILEFPEKFSDADIIRLESNYRSTAPILKAASSVVNHNKGRLGKTLRSERGDGKLPVLAFLPNQEEEANFCASLIENSVKGCSAXSGSXSDAISNTDSNTNSNTKSGGGVKTPKKTPGAWSDWAILYRTNAQSFGFETEFLRRKIPXX

SEQ ID NO: 8713 - DNA, 729 bp, Unknown
  Obtained from environmental sample
  misc_feature (1)..(729): n is a, c, g, or t
ttggctcttgccggtttggatagcgccgataatgattttagacaacggttccctttggaaaagttttttccggcggagcaaaaagagagtattaattcaagcctgcggcgtatgaacataccgaatttcagctttggcggagtaaggaaagttccggctcttgtttggagtatttgcgccgcggcgttggttttggttgttgcgctcccgttaattattcttaaaaaccagcatcaaacggaattcggcgacagaattaaaggcgcgtctacggaaaatagctctatagaactaaacgtgtacattaaagaaaaatcttccggcgaaggcgtaaaattgacaaatcaggctaatgttcgggaaggaaatacggtacaattaacctaccaggtatcaggcggcgcatacgctgaaaagtacggagttattttttcgatagacggaagatcgtccgttacaatgcattttccttatgcgccgtggcagagtactttgttggtaagcggaaaacctgtccctctggacgaggcctacacattggatgatgcgccgaattacgaaatattcttttttgttacgggggaaaaacctttggatgccggcaaagtaatggatacggcaaaacaacttgccttacggatagagaaaaatcccgattcagcggagagttacggaatcgccgcgtttagtaaaaatgaaataacaatgtttacgttaattaaggaataa

SEQ ID NO: 8714 - protein, 242 aa, Unknown
  Obtained from environmental sample
  misc_feature (1)..(242): Xaa is any amino acid
MALAGLDSADNDFRQRFPLEKFFPAEQKESINSSLRRMNIPNFSFGGVRKVPALVWSICAAALVLVVALPLIILKNQHQTEFGDRIKGASTENSSIELNVYIKEKSSGEGVKLTNQANVREGNTVQLTYQVSGGAYAEKYGVIFSIDGRSSVTMHFPYAPWQSTLLVSGKPVPLDEAYTLDDAPNYEIFFFVTGEKPLDAGKVMDTAKQLALRIEKNPDSAESYGIAAFSKNEITMFTLIKE

SEQ ID NO: 8715 - DNA, 375 bp, Unknown
  Obtained from environmental sample
  misc_feature (1)..(375): n is a, c, g, or t
gtgcctgtccctttcagcgaaggctcgctctccctgggggcgaccaagttccagacaatactccatgtggttctgcctcctgccctgcccggcatccttaccgcagctatcctggctgtaggccgggtagtcggtgaatccgccccggttctccttactgtagggcttgcccgcaatcttcctaaaacaatttttgagcctggccgcactctgacaatacacctttattaccttaccaaagaagctattgaagctgacgattttgcccaggcgtttaccgctgccgcagtgctgattgttgtggtattatgtatcaataccatagtcaagctcataggcaggagctttggtaagagcagagccgtagaggaatga

SEQ ID NO: 8716 - protein, 124 aa, Unknown
  Obtained from environmental sample
  misc_feature (1)..(124): Xaa is any amino acid
MPVPFSEGSLSLGATKFQTILHVVLPPALPGILTAAILAVGRVVGESAPVLLTVGLARNLPKTIFEPGRTLTIHLYYLTKEAIEADDFAQAFTAAAVLIVVVLCINTIVKLIGRSFGKSRAVEE

SEQ ID NO: 8717 - DNA, 351 bp, Unknown
  Obtained from environmental sample
  misc_feature (1)..(351): n is a, c, g, or t
atgaacggagaaaaactgctggtacgcaatttagacctcttttacggcgattttcaggcgcttaaaaatattaatttcgatttaggcaataacgaagccgcagcccttatcggcccgtcaggatgcgggaaatcgacctttatccgtgttattaacaggatgaacgatcttatcccttcatgccggattactggagaagtgctcatagagggcgagaatatttacggcgatatggacgtgagcgcgttgagaacgcggatagggatggtgttccaaaaaccgaatccctttaacatgagcgtctttgacaacgtggcttacgggctggaaaatgcagggcatgaaagataa

SEQ ID NO: 8718 - protein, 116 aa, Unknown
  Obtained from environmental sample
  misc_feature (1)..(116): Xaa is any amino acid
MNGEKLLVRNLDLFYGDFQALKNINFDLGNNEAAALIGPSGCGKSTFIRVINRMNDLIPSCRITGEVLIEGENIYGDMDVSALRTRIGMVFQKPNPFNMSVFDNVAYGLENAGHER

SEQ ID NO: 8719 - DNA, 765 bp, Unknown
  Obtained from environmental sample
  misc_feature (1)..(765): n is a, c, g, or t
ttgttaagtttttattttttcttttttttcatgcacaaaaaattatcccaatcggcgcaaaagcaaaaagaaaatcaggacgcgcagcttataaccgtaacaaacaaagccatgttacccgaaaatatatccgctaaccttattaaagccgcaaatgaaaatccctcttttgtttccgatattgccgccattttacagacagacccgtatttatggaaactggtagacaaaaagaacagtctcggcgaatcctacgctcccgacgatcttgtcgagttaaaaagcggcgcgtatcttgtaaacaggacagggctgtttctgcgcaagagcgccgcttcttcgctggaagaaatggccgccgccgcgaaaaaagacggcgtaacccttacggcgtcgtccgcctaccgttcatattcgtatcaggtgcaagtttacgagcgcaacgtaaaagaactaggaagggaagctgcggacagggaatccgcccgccccggctacagccagcaccaattaggccttgtcatagacttcggctcaataaccgacgcctttaccggcaccaaagaagaggtatggctgactaaaaacgcgtggcgctacggctggtccatctccttccccaaagacatggaggaggtgacaggttacagatgggaaagctggcactaccgctacgtgggaaaggaactggctaaatttattaacgactattttgacggagtgcaacagtacgccctgcaattcttaaaagagtggaatgaatag

SEQ ID NO: 8720 - protein, 254 aa, Unknown
  Obtained from environmental sample
  DOMAIN (104)...(228): D-alanyl-D-alanine carboxypeptidase
  misc_feature (1)..(254): Xaa is any amino acid
MLSFYFFFFFMHKKLSQSAQKQKENQDAQLITVTNKAMLPENISANLIKAANENPSFVSDIAAILQTDPYLWKLVDKKNSLGESYAPDDLVELKSGAYLVNRTGLFLRKSAASSLEEMAAAAKKDGVTLTASSAYRSYSYQVQVYERNVKELGREAADRESARPGYSQHQLGLVIDFGSITDAFTGTKEEVWLTKNAWRYGWSISFPKDMEEVTGYRWESWHYRYVGKELAKFINDYFDGVQQYALQFLKEWNE

SEQ ID NO: 8721 - DNA, 795 bp, Unknown
  Obtained from environmental sample
  misc_feature (1)..(795): n is a, c, g, or t
ttgggagatccggatgtgacgggcgacaaggacgccttctttgtgacgaagttctcgatggaggggcatcttggggcgaagggcgatcaggcgacatttgtcatctggccgtacgagaatttgccggcaaaggagtacgtgataaaggtgttaataaagggcaccggtaaagacggtacggttaataccgaggtaagagccgtcttcacagtagaagacgtacccgcgtgctgcaacgtaacgtggtcatggatcaccggcattcccgcaaacgacaaatcggaaacggtggataagaacaccagagtgtcagttccgacgcttgacgacctcgacgctccgtccagagcggactacacgtttgcaggctggtacagcgacgagcttaagacgcagcaggtgacggcaaaaacggttaccataacgcgtgacacgacgttctacgctaagtggacgtccaagacgggcgtttatgctgtatacttcgaccccaacggcgggactccctcgtcgatcaggaagatatcgaccgacgagaggggcaggctgacgacgatgccggaggatcagtatgatccgcctacgcggctcggctacaagttgagcggctggtacacgacgcctaaagtcggcggcgagaaggtaaatcgcggcaggatattcaccgacgacgcgatggtctacgcccgctgggacttgatgacgtacaatataacgtacgatctcaagggcggaacggttacgggcaatcccacctcctatacagtgggagaccgagcccccgattataattaa

SEQ ID NO: 8722 - protein, 264 aa, Unknown
  Obtained from environmental sample
  misc_feature (1)..(264): Xaa is any amino acid
MGDPDVTGDKDAFFVTKFSMEGHLGAKGDQATFVIWPYENLPAKEYVIKVLIKGTGKDGTVNTEVRAVFTVEDVPACCNVTWSWITGIPANDKSETVDKNTRVSVPTLDDLDAPSRADYTFAGWYSDELKTQQVTAKTVTITRDTTFYAKWTSKTGVYAVYFDPNGGTPSSIRKISTDERGRLTTMPEDQYDPPTRLGYKLSGWYTTPKVGGEKVNRGRIFTDDAMVYARWDLMTYNITYDLKGGTVTGNPTSYTVGDRAPDYN

SEQ ID NO: 8723 - DNA, 783 bp, Unknown
  Obtained from environmental sample
  misc_feature (1)..(783): n is a, c, g, or t
atgaatatgggaacaatagtcggcgttttcggcgcaatggctatgatcattttatctatcatattgagcggcaacgttatgtcgtcctttattgatatcccatcgttagcgctcgttcttatcggttcatatttttctcttatgatcgccttttccttatctgacagtttaggagtctttgccgctatcggccttaccttcaaacaacaggtatttaataaccagaccattattcaaaaaatgatcgctttctccgaaaaagcccgccgcgaaggtttgcttgctctggaagacgaacttgaagaccttgatgatgagttcatgaaaaaaggactgcgtcttgttgtagacggaacagatgcgacagtcgtcagagacctaatggaactggagttaagccaaatgcaagggcggcattcattcaagattaagcttataaatatgtgggctactcttgttcccggtcttggaatgttaggtacggttatggggcttgtaggtatgttgcggaaccttgatgataaagcgtctatcggtcctaacatggcgcttgctcttattaccacattctacggttcattattctccaacgtatacttcattccatgggcaaacaagcttatggtatttgacaatgatgaagccgctatgaaagaaatgatcatagaaggggttctttcgattcaatccggcgataatacgcgtattcttacattaaaacttcttgcgtatcttgatcctgctacgcgcaggggcatggaaaaagaattattgaaggactag

SEQ ID NO: 8724 - protein, 260 aa, Unknown
  Obtained from environmental sample
  SIGNAL (1)...(28)
  DOMAIN (90)...(223): MotA/TolQ/ExbB proton channel family
  misc_feature (1)..(260): Xaa is any amino acid
MNMGTIVGVFGAMAMIILSIILSGNVMSSFIDIPSLALVLIGSYFSLMIAFSLSDSLGVFAAIGLTFKQQVFNNQTIIQKMIAFSEKARREGLLALEDELEDLDDEFMKKGLRLVVDGTDATVVRDLMELELSQMQGRHSFKIKLINMWATLVPGLGMLGTVMGLVGMLRNLDDKASIGPNMALALITTFYGSLFSNVYFIPWANKLMVFDNDEAAMKEMIIEGVLSIQSGDNTRILTLKLLAYLDPATRRGMEKELLKD

SEQ ID NO: 8725 - DNA, 336 bp, Unknown
  Obtained from environmental sample
  misc_feature (1)..(336): n is a, c, g, or t
atgaagataaaagaggccgccgaggcgctcggcgcggaaatatgccaaagtgagtttgacgacgtagacgtttcaggcgtgtacacttcagaccttctctctgacgttatggccaacgcgaaggacggcggcgctcttgtaacaatacaggcgcacaaaaacactgtcgccgtagccgctcttgtgaacatctccgttatcatcatctgcaactcccgccccctgcccgaagacatgcttgaggccgcgaaggacgagggtatagcggttatccgcaccaaagaaaaccagtacaccgtctccggcaagttatgggaaatgttccgcaagaactga

SEQ ID NO: 8726 - protein, 111 aa, Unknown
  Obtained from environmental sample
  misc_feature (1)..(111): Xaa is any amino acid
MKIKEAAEALGAEICQSEFDDVDVSGVYTSDLLSDVMANAKDGGALVTIQAHKNTVAVAALVNISVIIICNSRPLPEDMLEAAKDEGIAVIRTKENQYTVSGKLWEMFRKN

SEQ ID NO: 8727 - DNA, 411 bp, Unknown
  Obtained from environmental sample
  misc_feature (1)..(411): n is a, c, g, or t
ttgaaaaataaaaaaatcatttttctattgcttatattctttattttttcatgccagtccgaacctaaatctaaatcgactaatattgagacagataatgttgagtcaactaatcttgaaacaacaaaacctgaaataactaagattgaacccgaaaaaaacacaaaacaagtatattacaccgttaattttatcgcggcgggagataatttatttcatgagtcgcttcttaattcgcatttaaaaaacggagtttatgatttttctccgatttacactgaaataaaaagtataatccaaagcgccgatcttgcgtttataaatcaggaaacgccgatggcgggcgaaaaattcggctactccggataccccgcctttaattctccgcaatcgcttgcaaaaacacattag

SEQ ID NO: 8728 - protein, 136 aa, Unknown
  Obtained from environmental sample
  SIGNAL (1)...(20)
  misc_feature (1)..(136): Xaa is any amino acid
MKNKKIIFLLLIFFIFSCQSEPKSKSTNIETDNVESTNLETTKPEITKIEPEKNTKQVYYTVNFIAAGDNLFHESLLNSHLKNGVYDFSPIYTEIKSIIQSADLAFINQETPMAGEKFGYSGYPAFNSPQSLAKTH

SEQ ID NO: 8729 - DNA, 516 bp, Unknown
  Obtained from environmental sample
  misc_feature (1)..(516): n is a, c, g, or t
atgccaacgtatagaccttgntacaggaagcggggcggtagcaatctcctaaaaaacgaaatacccttgtgcgaaattacagcgacagatatttcatctaacgcgcttaaaatagcggtacagaacgccgaaaaacttctcggcggcaatcacattgattttttccaaggtgatttatactccgcccttccctctccattgcccgcgcccttctcgctaatcgtttcaaacccgccgtatatttcttccgatgaaatacaaaccctatccgcggaagtgcagaatgaaccgcgtctagcgctagacggcggagtttccggactggaaataataacgcaaataataaagaaagcccccgattatttaaaacaaaacggatatttgctattggaagccgatcctcggcaaatggatcagataaaaattttgcttgaaaaaaacaaatttaataatattcaattatataaagacctaggcggctcaaacagagttataggaggcagatttgaaaaataa

SEQ ID NO: 8730 - protein, 171 aa, Unknown
  Obtained from environmental sample
  DOMAIN (7)...(153): Methyltransferase small domain
  misc_feature (1)..(171): Xaa is any amino acid
MPTYRPXYRKRGGSNLLKNEIPLCEITATDISSNALKIAVQNAEKLLGGNHIDFFQGDLYSALPSPLPAPFSLIVSNPPYISSDEIQTLSAEVQNEPRLALDGGVSGLEIITQIIKKAPDYLKQNGYLLLEADPRQMDQIKILLEKNKFNNIQLYKDLGGSNRVIGGRFEK

SEQ ID NO: 8731 - DNA, 762 bp, Unknown
  Obtained from environmental sample
  misc_feature (1)..(762): n is a, c, g, or t
atgacagattcggccgagaaagcgggcttacagtcaatatatataatggtcgcgggcggcggtccgttaagcatcaagacggcggatttttttgattcgctgggtttcaatatcgttcagggctacggcatgagcgagaacagcccgcttatcaccgtaaacaccccgcgccacaaacgtaatgaatcggtaggcctacccgtaagctacaccgatgtgaaaatagtagacgaggggccggacggcatcggcgaaatcgcctgcaagtcgccgtctgttatgcttggttattttgagaatgaggaagcgacaaaagaagtcattacgccggacggctatttattaacaggcgatcttggctgtaaagacgagcttggttttgtttacatcaaagggcgcaaaaaaaaccttatcgtaggctccggcggcaaaaacatctacccggaagaagtcgaagcgcatttttccaattccccggttgtcggcgaagtccttgtaatcggtaaaaaagaacattccaacagcaacgagcaggtctttgccgtaatagtccccaattatgaatatatcaaagctaattacccggacaaagaaaacgatgatatttttattgaagcgttattaagaaaagaggttgaggtagttaaccgtactttgtcaatttataaaaaaatcatcgactttacggtacgcaaagaaccttttgagaagaacgcgcagcagaagatacggcgcttcctgtatacatccatgtattcataa

SEQ ID NO: 8732 - protein, 253 aa, Unknown
  Obtained from environmental sample
  misc_feature (1)..(253): Xaa is any amino acid
MTDSAEKAGLQSIYIMVAGGGPLSIKTADFFDSLGFNIVQGYGMSENSPLITVNTPRHKRNESVGLPVSYTDVKIVDEGPDGIGEIACKSPSVMLGYFENEEATKEVITPDGYLLTGDLGCKDELGFVYIKGRKKNLIVGSGGKNIYPEEVEAHFSNSPVVGEVLVIGKKEHSNSNEQVFAVIVPNYEYIKANYPDKENDDIFIEALLRKEVEVVNRTLSIYKKIIDFTVRKEPFEKNAQQKIRRFLYTSMYS

SEQ ID NO: 8733 - DNA, 777 bp, Unknown
  Obtained from environmental sample
  misc_feature (1)..(777): n is a, c, g, or t
ttgctgaatgggatacttattcccggccacagatttgttccctttgccaatcctgttgtcttgcagaaccgttatgagatttattggaaaggcgcccttgtccccatgaccacgaccgaagcgccgcctcaggatttgtatccgtattattgtattttcggcgaggagtttgcccctcaatatatagcgagggaaaatccgaaaaatgaggaagcgtttaatgccgatccttatgaggacccgcctgaagtttcgattcatacccttgatatgcgcgcaatataccgcgaaagttcttttgtgcccggcgaccgttttttagtgcgcataacggactggtgccaatgccgttttgagcttgaaaaaatcggtaaagacgaatggtcccgcgctgatttgcacaaatgggcggaaaccgcggaaagcggctttgaaaaaagttttgccttgcttggccccggaatgggtacggaagaacagatttcattcgcctattggtacggcggaaaaagaatgagggaagtccccgcttattcgctggaagaatttatttatgaaaaaaccgacattatagaaacagtaccttacggcatagaaacccgcttttggtatgcaggcaaagatattccggattttaagaatcttcaaaattataccgttcccccggacagaacttttattgaagagatgttgttccaaaaaaatattcccatttccgaatatgttattctctcatacataaaggacgcgtttttccgcaatgaaaaaacaanttga

SEQ ID NO: 8734 - protein, 258 aa, Unknown
  Obtained from environmental sample
  misc_feature (1)..(258): Xaa is any amino acid
MLNGILIPGHRFVPFANPVVLQNRYEIYWKGALVPMTTTEAPPQDLYPYYCIFGEEFAPQYIARENPKNEEAFNADPYEDPPEVSIHTLDMRAIYRESSFVPGDRFLVRITDWCQCRFELEKIGKDEWSRADLHKWAETAESGFEKSFALLGPGMGTEEQISFAYWYGGKRMREVPAYSLEEFIYEKTDIIETVPYGIETRFWYAGKDIPDFKNLQNYTVPPDRTFIEEMLFQKNIPISEYVILSYIKDAFFRNEKTX

SEQ ID NO: 8735 - DNA, 312 bp, Unknown
  Obtained from environmental sample
  misc_feature (1)..(312): n is a, c, g, or t
atgggcaaaagaaaaaggtatactgccgaggaaaaagtaaagattctcagagaagtgcttgaggacggaaaacaaataagccaagtggcggagaagcacgggctttctccgaacaacatcttcaaatggcggaaacagcttcttgaggaaggcatccagaccttccagatcaaaagggcggacatctcaggcaaagccgaagaacggaaaataacggcgcttgaagacaggataaaacagaaagacgaaataatagccgagcttgccgaagagctgttagcgttaaaaaaaaagaactgtggcctgaggtag

SEQ ID NO: 8736 - protein, 103 aa, Unknown
  Obtained from environmental sample
  DOMAIN (4)...(95): Transposase
  misc_feature (1)..(103): Xaa is any amino acid
MGKRKRYTAEEKVKILREVLEDGKQISQVAEKHGLSPNNIFKWRKQLLEEGIQTFQIKRADISGKAEERKITALEDRIKQKDEIIAELAEELLALKKKNCGLR

SEQ ID NO: 8737 - DNA, 522 bp, Unknown
  Obtained from environmental sample
  misc_feature (1)..(522): n is a, c, g, or t
gtgcgtttttatctggagctgaagcagtatgataaagccatagccgattataccgagacgatacggctggatccgcaaaatcctgagagatatacctaccgcgcggatttatatcgggatttgaaacaaaacgacaaagccctggctgatcttaccgccgcgatacggttggctccgcacaatccgagtatgtatggcagccgcgcgtatttttaccgggagttggagcagtatgacaaagccatagccgattataccgaggcaatacgattggatccgaaaaatcccggaaggtatagctggcgcgcggatttgtaccgggatatggagcaatacgacaaggcgatagccgattgtgaaagcgcgcttcttatagacccctattatgcggaggcgcagcggttactggaagagcttcgcgccgcgcagcgtttgccggaagaattccatgacgctgaggacgctgaatacgttaaagacgctgaaagcgctgaatacgttgaaagcgctgaatacgagtaa

SEQ ID NO: 8738 - protein, 173 aa, Unknown
  Obtained from environmental sample
  DOMAIN (96)...(129): Tetratricopeptide repeat
  misc_feature (1)..(173): Xaa is any amino acid
MRFYLELKQYDKAIADYTETIRLDPQNPERYTYRADLYRDLKQNDKALADLTAAIRLAPHNPSMYGSRAYFYRELEQYDKAIADYTEAIRLDPKNPGRYSWRADLYRDMEQYDKAIADCESALLIDPYYAEAQRLLEELRAAQRLPEEFHDAEDAEYVKDAESAEYVESAEYE

SEQ ID NO: 8739 - DNA, 480 bp, Unknown
  Obtained from environmental sample
  misc_feature (1)..(480): n is a, c, g, or t
atggaaaggtcacgcaattcatatttgaatttgcagctttatatggaacgattgtacggaaatttgcaacatacgccttctgttatgccaactgagggttttttaagttcgccttttggattccgtactcatcccgtaacaggtgaaacagaaaaaatgcacttgggaatagatttatctgcatctagatggacacccattcgcgcaaccgcaaatggtcgcgttgaaagagttgcagacagcgaaactttgggcaggcacgtaatcgtggaccacggcaatggtattgaaacgcgctatggacacatggaaaaaccctttgtgaaagaagggcaaatggtatctagatttgatgttataggctatatggggaatacaggccgcacaaccggaaaccatcttcactacgaagtgtgggtgaacggcgtggctgtgaatcctatttattatatactaccagaccagtactcggtagaataa

SEQ ID NO: 8740 - protein, 159 aa, Unknown
  Obtained from environmental sample
  DOMAIN (52)...(147): Peptidase family M23
  misc_feature (1)..(159): Xaa is any amino acid
MERSRNSYLNLQLYMERLYGNLQHTPSVMPTEGFLSSPFGFRTHPVTGETEKMHLGIDLSASRWTPIRATANGRVERVADSETLGRHVIVDHGNGIETRYGHMEKPFVKEGQMVSRFDVIGYMGNTGRTTGNHLHYEVWVNGVAVNPIYYILPDQYSVE

SEQ ID NO: 8741 - DNA, 816 bp, Unknown
  Obtained from environmental sample
  misc_feature (1)..(816): n is a, c, g, or t
gtgctgaacctgaccgaagacggaaaagtcgcccatgtccagattatcgatcattaccgaaccggaaaaaccatcttcctatgcgctgtttttatcggtgtcaccgtactaatcatgggatggatggggataaaaatacttatcacctttgtcttttccgctgctgctcttgttcgcatactctatccaatgatcctccgcggctgggatcctattttcggcgcattgattatcacgatggtgataaccgcaattatcatgtttctggtagcgggactttcccggcgagctcttgtcgcctttttaggtgcggctggcggcgttatttttacttcaatactggcttttgtttttacaggtttgttcagaattcacggcgcggtacgtccttttacggaaagcctgcttttttccggttacggccatctcaacctggcgcatctgtttatcgctggaatttttattgccgcttccggcgcgatgatggacctggcaatggacgttgccgccgccatggacgaaatcaaaaaacagcagcccgcgcttaaccatataggcttgatgcgctccggttttaccgtggcacgtcaagccgccggaaccatgtccaccactttgttgcttgcctattccgccgaatataccgccatgattatgacttttatcgctcagggcgttcccctggaaaacgtgatcaacatggtttgggtttcctccgaagtagtgcataccttagtcggctgtttcggcttgatgcttgtcgcgccgcttacggtctttgctggcgggatactgctggtaaagcgctctgggtaa

SEQ ID NO: 8742 - protein, 271 aa, Unknown
  Obtained from environmental sample
  DOMAIN (22)...(265): YibE/F-like protein
  misc_feature (1)..(271): Xaa is any amino acid
MLNLTEDGKVAHVQIIDHYRTGKTIFLCAVFIGVTVLIMGWMGIKILITFVFSAAALVRILYPMILRGWDPIFGALIITMVITAIIMFLVAGLSRRALVAFLGAAGGVIFTSILAFVFTGLFRIHGAVRPFTESLLFSGYGHLNLAHLFIAGIFIAASGAMMDLAMDVAAAMDEIKKQQPALNHIGLMRSGFTVARQAAGTMSTTLLLAYSAEYTAMIMTFIAQGVPLENVINMVWVSSEVVHTLVGCFGLMLVAPLTVFAGGILLVKRSG

SEQ ID NO: 8743 - DNA, 507 bp, Unknown
  Obtained from environmental sample
  misc_feature (1)..(507): n is a, c, g, or t
gtgattgcggcggatttgcgccgggaccgccttgatcttgcccttaaattgggggcggactacggctttacgccggatgacggcgattttgtcacacgggtcaaaacagtatccggcggcggcgtcaaggcggccgttgaagttaccggtaattcactcgccatgaaacaggttttggaatgttgcgcgcctatggccagggtagcccttttaggatgtaccagagtctcggattgcgccgttgatttttaccagctggttcaccggccgggggtttcgcttatcggggcgcataccagcgcccggccaagggaggaatcttatccccatcattggagtcaccgcgacgactgcgaagccctgctgcgtatgttgggcgccgggcggctggacgtcggttccgtcatttctgaaattcgccgccccgaagaagcgccggaactgtaccgccgcctggcggaagacagggctttccctttgggcgttgtctttgactggactatttaa

SEQ ID NO: 8744 - protein, 168 aa, Unknown
  Obtained from environmental sample
  misc_feature (1)..(168): Xaa is any amino acid
MIAADLRRDRLDLALKLGADYGFTPDDGDFVTRVKTVSGGGVKAAVEVTGNSLAMKQVLECCAPMARVALLGCTRVSDCAVDFYQLVHRPGVSLIGAHTSARPREESYPHHWSHRDDCEALLRMLGAGRLDVGSVISEIRRPEEAPELYRRLAEDRAFPLGVVFDWTI

SEQ ID NO: 8745 - DNA, 840 bp, Unknown
  Obtained from environmental sample
  misc_feature (1)..(840): n is a, c, g, or t
gtgttcaaccctttcaggccgattttttcctcgctgcaaaacaaccgcgaccaccgcaagataatctctattgacggtaaagtggcgtttacaggaggtcttaacctcgccgatgaatatataaacaccgtccatcgttttggccgctggaaggacgccgccatcatgctggaaggcgaaggagcgtggtcgctgactctgatttttctgcagatgtggaacatccaaccgggcatcaatgacagttatgagtcattttacccgtggaaggaaatcccctgcgatataaagtctgacgggtttgtgcagccctacgcggacagccccattcacaaggataatgtcggcgaacacgtatatatccagatcatcaacaaggcgaaaaaatatgtgtatatcaacactccctatttggttctggacgacggccttctttccgctctgacgcttgccgcaaaaagcggcgtggacgtgaggattatcaccccccaccgctgggacaaatggtttgtggcggtagtttcgcgttcctatttccggcagcttatttccgccggggtaaaaatttatgaatacagttccggttttaaccacggcaagacttttgtctgcgatgacgtcattgccacggtcggcaccacaaaccttgacttccgcagcctgtacctgcactttgaaaccggtgtccttatttaccggggcgatactgtccagtcggtaaaagaagactttctgcgcaccattctcagttcgcaggagataacgctgaatgaatgtacccacaacgctttccaactggttgtcgcggatgtgctgaggatttttgcgccgttgatgtga

SEQ ID NO: 8746 - protein, 279 aa, Unknown
  Obtained from environmental sample
  DOMAIN (193)...(220): Phospholipase D Active site motif
  misc_feature (1)..(279): Xaa is any amino acid
MFNPFRPIFSSLQNNRDHRKIISIDGKVAFTGGLNLADEYINTVHRFGRWKDAAIMLEGEGAWSLTLIFLQMWNIQPGINDSYESFYPWKEIPCDIKSDGFVQPYADSPIHKDNVGEHVYIQIINKAKKYVYINTPYLVLDDGLLSALTLAAKSGVDVRIITPHRWDKWFVAVVSRSYFRQLISAGVKIYEYSSGFNHGKTFVCDDVIATVGTTNLDFRSLYLHFETGVLIYRGDTVQSVKEDFLRTILSSQEITLNECTHNAFQLVVADVLRIFAPLM

SEQ ID NO: 8747 - DNA, 654 bp, Unknown
  Obtained from environmental sample
  misc_feature (1)..(654): n is a, c, g, or t
gtggaatccggtgaatcgttttcgtttgtagaaaaccttcgtaattatgtaaatataagccaggcaggatcctttgtggtacaggcccgcgtttaccctgaactgttccgtttcggatcagacccggctcctgtccagcccgtggcgcttgaatcaaagcggctgagcctcaatatctggccgccgcttgctaccactgccgaaggcatcccccttgaaatggatgtcgcgaccggcgccgtgctggttcgggaacggctcgctccggatcaggtggtcgattacatgatcaacgccaggcagaggtcacaatgggaaaaattcttcctgtatctcgatctggaatcaatgttggcccaggacgggccgcgccagcgccaatggctcagggagagcgaagaaggcagaaaacgaatggttgaccagttccggcaggaattgaaaaacccctcaaccgacgggatttcagtcatccctaccgactatgtaatagagcagacacaatacaataatttcgaggggactgtcaccgtgttgcaaaaattcaagaactccttctttaccgaggtgaaacgctacacttatgatgtgcgcttcaaggacaatgtctgggtcataaccggttactcggtcataaatctggggacggaatga

SEQ ID NO: 8748 - protein, 217 aa, Unknown
  Obtained from environmental sample
  misc_feature (1)..(217): Xaa is any amino acid
MESGESFSFVENLRNYVNISQAGSFVVQARVYPELFRFGSDPAPVQPVALESKRLSLNIWPPLATTAEGIPLEMDVATGAVLVRERLAPDQVVDYMINARQRSQWEKFFLYLDLESMLAQDGPRQRQWLRESEEGRKRMVDQFRQELKNPSTDGISVIPTDYVIEQTQYNNFEGTVTVLQKFKNSFFTEVKRYTYDVRFKDNVWVITGYSVINLGTE

SEQ ID NO: 8749 - DNA, 765 bp, Unknown
  Obtained from environmental sample
  misc_feature (1)..(765): n is a, c, g, or t
atgaaccaacaagaaacgctgactctgctgacccaaatccgcgacggcgccgtctcaccggaagacgccatgcttaggttgcgtaccgcgccgtttgaggacttggggtacgccaagcccgaccaccaccgggggttgcggcgaggtgttcctgaagttatctacggggcgggcaagagtccaaaccagatagtcggcatcgcctccgcaatgcgcagcggcgggcaggggactattattataacgcggatctcaaaggaatccgccgaatcggtcaacaaggacctcccaataacctactacgccgaagcgaggataggtatagtcggcgaaatgccggcgcccgacgggataggcaagatcgtggtcgccaccggcgggacaagcgacatgcccgtggccgaagaagcggcggtcaccgcagaggccttgggcaacgaggcggtccgtctttacgatgtaggcgtggccggactgcataggcttatggcgcacctcgacgatatcatggacgctcaggtaatcatatcaatcgctgggatggaaggggcgctgaccagcgtaatcggcggactggcggactgtccggtcataggcgttccaacaagcgtcggctacggcgcctcgttcggcggggttagcgcgttgctctcaatgctcaactcgtgcgcatcgggcgtaagtgtggtgaacatcgataacgggttcggggcgggatacttggcgagcctgataaaccatcggagacaggataggaaatcgtag

SEQ ID NO: 8750 - protein, 254 aa, Unknown
  Obtained from environmental sample
  DOMAIN (119)...(254): AIR carboxylase
  misc_feature (1)..(254): Xaa is any amino acid
MNQQETLTLLTQIRDGAVSPEDAMLRLRTAPFEDLGYAKPDHHRGLRRGVPEVIYGAGKSPNQIVGIASAMRSGGQGTIIITRISKESAESVNKDLPITYYAEARIGIVGEMPAPDGIGKIVVATGGTSDMPVAEEAAVTAEALGNEAVRLYDVGVAGLHRLMAHLDDIMDAQVIISIAGMEGALTSVIGGLADCPVIGVPTSVGYGASFGGVSALLSMLNSCASGVSVVNIDNGFGAGYLASLINHRRQDRKS

SEQ ID NO: 8751 - DNA, 522 bp, Unknown
  Obtained from environmental sample
  misc_feature (1)..(522): n is a, c, g, or t
atggcccgaaatatccgagtacaaaatatgtatgcggattttagctacacaaggtcgggacgcaataccgccggtaattattcatatataggcatttacggatgggcaagaaatccaaatgccgagaaagaggaagacaaactggtagagtattacattgtggaagattggtttggcaatcaatggcaagaagacagctctccacttaccactaatacaacaagcggagccgtattgggcagttttacgatagatggctcagtttacaatgttatcaggaatgtgagaatccaaaagccttcgatagacggaaccaaaacatttgcccaatatttcagcatacgccaaacgccgcgacagagcgggacaatttccattaccgagcatttcaagcaatgggagagcatgggtttacagcttggcaatatgtacgaggcaaagtttcttgtcgaagccggcggcggtacaggatggctggaattttcatacctgaaattaacgatagaagacagcttgaggtaa

SEQ ID NO: 8752 - protein, 173 aa, Unknown
  Obtained from environmental sample
  DOMAIN (1)...(163): Glycosyl hydrolases family 11
  misc_feature (1)..(173): Xaa is any amino acid
MARNIRVQNMYADFSYTRSGRNTAGNYSYIGIYGWARNPNAEKEEDKLVEYYIVEDWFGNQWQEDSSPLTTNTTSGAVLGSFTIDGSVYNVIRNVRIQKPSIDGTKTFAQYFSIRQTPRQSGTISITEHFKQWESMGLQLGNMYEAKFLVEAGGGTGWLEFSYLKLTIEDSLR

SEQ ID NO: 8753 - DNA, 384 bp, Unknown
  Obtained from environmental sample
  misc_feature (1)..(384): n is a, c, g, or t
ttgaatttttgggaaatttttttaattggggtcggcttatcgatggacgcgtttgcggtgtcaattaccctgggcttaactgtaaagaaaccaaaactcatagaaattttaatccccggattttattttggtttttttcaggcccttatgcccttcatagggttttttgcgggaacctattttgcaaaatacgttcaatccctggaacattgggtggcgtttgtacttcttggtattatcggcgggaaaatgatgaaagacagtttttccaaagacgaagagaaaagggacgaaaaccctcttatgtttatgaaaatgctactactggcaatcgcgacaagcatagacgcatttggcggtggggtcacattttgctttctttaa

SEQ ID NO: 8754 - protein, 127 aa, Unknown
  Obtained from environmental sample
  SIGNAL (1)...(19)
  DOMAIN (6)...(82): Domain of unknown function DUF
  misc_feature (1)..(127): Xaa is any amino acid
MNFWEIFLIGVGLSMDAFAVSITLGLTVKKPKLIEILIPGFYFGFFQALMPFIGFFAGTYFAKYVQSLEHWVAFVLLGIIGGKMMKDSFSKDEEKRDENPLMFMKMLLLAIATSIDAFGGGVTFCFL

SEQ ID NO: 8755 - DNA, 618 bp, Unknown
  Obtained from environmental sample
  misc_feature (1)..(618): n is a, c, g, or t
gtgtttgttactgccccggatccaacatccgatgttggtgtggcgggcgcgcaacagtacatccttgagcagaccccccagtggataaaccagtacggcaagaacgcggttttcttctgcacaaacgatgcccatacagaacccctgctcaagcagcttttcgcttacggcggaatgtttgttgaagctgaccttcccagccccctcatgggctatcccggcgctttgggtatcgacctttccgccgaggcgggagacttccccgcgattctaaagaaagttgaagacgcagttaaggccaaaggcggcgcgggcaagttcggtacctgggctttctcctacggattcaccgcttccgctggtcttggtgaattcgcaaaacgtatactggacggcaaagccaagttagaaaacaccgcggatctttacgcggcccttggcgaattcacccccggcgcaaaatggaacggcggtttttatattgatgccgcgaccggtgtacgcgccaggaatcagttgcttatttacatggatacctacatcatggggcagggcttccttcctaccacagcgcanactgttcctgacaagtattaccagatcaaattccagcgctaa

SEQ ID NO: 8756 - protein, 205 aa, Unknown
  Obtained from environmental sample
  misc_feature (1)..(205): Xaa is any amino acid
MFVTAPDPTSDVGVAGAQQYILEQTPQWINQYGKNAVFFCTNDAHTEPLLKQLFAYGGMFVEADLPSPLMGYPGALGIDLSAEAGDFPAILKKVEDAVKAKGGAGKFGTWAFSYGFTASAGLGEFAKRILDGKAKLENTADLYAALGEFTPGAKWNGGFYIDAATGVRARNQLLIYMDTYIMGQGFLPTTAXTVPDKYYQIKFQR

SEQ ID NO: 8757 - DNA, 600 bp, Unknown
  Obtained from environmental sample
  misc_feature (1)..(600): n is a, c, g, or t
atggaaggaacaatgcaaataatatttggatttttaaccgtgtttttgggaatatactctctgttgataattatcaggattattcttacatggttttcgggcggacagttcggcaggcctgtggaaattttggcccgtattacggatccatatcttgactggtggcgccggaggctcaatctgagggcgggctatctggatctttcccctgtcgtcgctatggcggccctctctgtagcgcagacaatctgctcagcaattgccgaaacgggaaggttcagccttgggcttttgcttgccgtatgtctttcagcgctgtgggcggcaatttcctttttactgggcttttgcatcgtcgtgcttatcctccgcctgattgcctatcttgtcaacgccgatatgttcggcatattctggcgggtcatagattccatatcacggcccctcctgtaccgggtcagccggatcatttttggcaggcgcatagtacgttttacaacaagtatcataaccaccattcttgttctgacagcgctttggattggcggaaaagtcgtcatacagtttgtttcccgtattctgttcaggcttccgttgtag

SEQ ID NO: 8758 - protein, 199 aa, Unknown
  Obtained from environmental sample
  DOMAIN (5)...(87): YGGT family
  misc_feature (1)..(199): Xaa is any amino acid
MEGTMQIIFGFLTVFLGIYSLLIIIRIILTWFSGGQFGRPVEILARITDPYLDWWRRRLNLRAGYLDLSPVVAMAALSVAQTICSAIAETGRFSLGLLLAVCLSALWAAISFLLGFCIVVLILRLIAYLVNADMFGIFWRVIDSISRPLLYRVSRIIFGRRIVRFTTSIITTILVLTALWIGGKVVIQFVSRILFRLPL

SEQ ID NO: 8759 - DNA, 786 bp, Unknown
  Obtained from environmental sample
  misc_feature (1)..(786): n is a, c, g, or t
atggacgctctcgccgatattaccggcgtttgtatgctgatagaagaacttgcgcccgatataattcttgcttccccggttaataccggaagcggacacgtccgctgttctcacggcattttaccagtaccggctcccgcaaccgcctatattttgcagaacatacccatgtacagcgatcaaacacagagcgaactttgtacccccacaggcgcagccctgcttaaacactttgtaaaagaatttcgcgcaatgccggtaatatacgttaataaaataggatacggcatgggcaaaaaagattttgaaaaagcgaattgcgtaagggcatatattggcagtatggcggataatgcagaagaagttattgaactagtgtgcaatttagacgatatgacgccggaagcaatagcatttacccaacagcttctatttgatgaaggcgcgcttgacgtatacaccactcctattggcatgaaaaaggggcgcatgggtttaagttttacctgtatgtgcaataatgaattaaaagacaagatgatttcgcttattttcaaacatacaagcacacttggaataagagagaacacaagccgccgttacacgctgcaacgggagcaaaaagaaattcaaaccaaatacggtacggtcaggataaaaaccgcttacggatacggcgtacaaaaatcgaaacccgaatatgaagatatagcaaaaatcgcaaaggaaaggggaatagcaatacaggaaatattaaaagagattggcttaccagtattttcctaa

SEQ ID NO: 8760 - protein, 261 aa, Unknown
  Obtained from environmental sample
  DOMAIN (1)...(259): Protein of unknown function DUF111
  misc_feature (1)..(261): Xaa is any amino acid
MDALADITGVCMLIEELAPDIILASPVNTGSGHVRCSHGILPVPAPATAYILQNIPMYSDQTQSELCTPTGAALLKHFVKEFRAMPVIYVNKIGYGMGKKDFEKANCVRAYIGSMADNAEEVIELVCNLDDMTPEAIAFTQQLLFDEGALDVYTTPIGMKKGRMGLSFTCMCNNELKDKMISLIFKHTSTLGIRENTSRRYTLQREQKEIQTKYGTVRIKTAYGYGVQKSKPEYEDIAKIAKERGIAIQEILKEIGLPVFS

SEQ ID NO: 8761 - DNA, 411 bp, Unknown
  Obtained from environmental sample
  misc_feature (1)..(411): n is a, c, g, or t
gtgttctctcttattccaagtgtgcttgtatgtttgaaaataagcgaaatcatcttgtcttttaattcattattgcacatacaggtaaaacttaaacccatgcgcccctttttcatgccaataggagtggtgtatacgtcaagcgcgccttcatcaaatagaagctgttgggtaaatgctattgcttccggcgtcatatcgtctaaattgcacactagttcaataacttcttctgcattatccgccatactgccaatatatgcccttacgcaattcgctttttcaaaatcttttttgcccatgccgtatcctattttattaacgtatattaccggcattgcgcgaaattcttttacaaagtgtttaagcagggctgcgcctgtgggggtacaaagttcgctctgtgtttga

SEQ ID NO: 8762 - protein, 136 aa, Unknown
  Obtained from environmental sample
  misc_feature (1)..(136): Xaa is any amino acid
MFSLIPSVLVCLKISEIILSFNSLLHIQVKLKPMRPFFMPIGVVYTSSAPSSNRSCWVNAIASGVISSKLHTSSITSSALSAILPIYALTQFAFSKSFLPMPYPILLTYITGIARNSFTKCLSRAAPVGVQSSLCV

SEQ ID NO: 8763 - DNA, 747 bp, Unknown
  Obtained from environmental sample
  misc_feature (1)..(747): n is a, c, g, or t
gtgcttgtctctaccgatgtattgagcgaaggacagaatttgcaggactgccatattgtggtaaactacgacctcccttgggcaattatccggctaatccaaagggcgggccgcattgaccgcatagggcagaaaagcgaaaaaatatggtgctactcgtttctgccggaagaggggctcgaaacaatccttgacctgcgcgggcggctgcaaaagcgcatcagggaaaacgccgagaccgtcggctctgatgaaatattttttgacggcgatcctgtgaacatcaaagatctgtacaatgaaaaagcggggattcttgacgacgaagacgatatggaagttgaccttgcctcctattgctaccagctttggaaaaacggcgttgacgcgcatcccgaattaaaaacaaaaatcccggagcttcccgatgttgtgtacgcggccaagaaagcggaaattcccaacgcttcaccgttcggcgagcttgccgccggctttggcgaattgccgccgcanaaagcagactcaggggtgattgtatacgcaaaaacgaccgatgatagcgattgccttacatgggtagacgaaaaaggcgggatagtaacccaatcccattttgaaattctncaagcggtaaaatgcgaaatggacgagtcttcccttcaaagaaacgaatcgcaacatgaacttggtaaaaaagcggtggactacataagcgacacttcgaccagggtggccggccaataa

SEQ ID NO: 8764 - protein, 248 aa, Unknown
  Obtained from environmental sample
  misc_feature (1)..(248): Xaa is any amino acid
MLVSTDVLSEGQNLQDCHIVVNYDLPWAIIRLIQRAGRIDRIGQKSEKIWCYSFLPEEGLETILDLRGRLQKRIRENAETVGSDEIFFDGDPVNIKDLYNEKAGILDDEDDMEVDLASYCYQLWKNGVDAHPELKTKIPELPDVVYAAKKAEIPNASPFGELAAGFGELPPXKADSGVIVYAKTTDDSDCLTWVDEKGGIVTQSHFEILQAVKCEMDESSLQRNESQHELGKKAVDYISDTSTRVAGQ

SEQ ID NO: 8765 - DNA, 627 bp, Unknown
  Obtained from environmental sample
  misc_feature (1)..(627): n is a, c, g, or t
atggcatcttgccgatgttttatcgtgggcaggggcggaggctctatcgaagaccttttgcccttctccgacgaagaagttgtccgagccgtggcaaaatcaaaaattccaacggtcagcgcggttgggcatgaaattgactgggcgttatgtgattattccgccgatctccgcgcgcctactccttccgcagccgcggaactggtaagcgaaaattattttgccgtgcaggatttcattcaaagtacggcggaagattttatgtccgttatgcgcacacggctggaaagagcaaaactcctcttaaaaccgtttgatccgcaggatatggaataccgtttccgttcgattttacagccgcgcttaatccgccttgacgacgcaaaggaagcgttaatcgcttcaatttccgacaagtgcgccgtgataagaaaaaaaatcgaactgtcctcggctgttcttgaaaccgcaagccctcttgccgttatggagcgcggattttcggttgtaacaaattcaagcggcaaaataattaaaagttcagataacgtaaaatcgggcgataaaatttttatcagaccgttaaaaggaaaaatagacgcgattgttgaaagcgcggcaaaataa

SEQ ID NO: 8766 - protein, 208 aa, Unknown
  Obtained from environmental sample
  DOMAIN (4)...(151): Exonuclease VII, large subunit
  misc_feature (1)..(208): Xaa is any amino acid
MASCRCFIVGRGGGSIEDLLPFSDEEVVRAVAKSKIPTVSAVGHEIDWALCDYSADLRAPTPSAAAELVSENYFAVQDFIQSTAEDFMSVMRTRLERAKLLLKPFDPQDMEYRFRSILQPRLIRLDDAKEALIASISDKCAVIRKKIELSSAVLETASPLAVMERGFSVVTNSSGKIIKSSDNVKSGDKIFIRPLKGKIDAIVESAAK

SEQ ID NO: 8767 - DNA, 312 bp, Unknown
  Obtained from environmental sample
  misc_feature (1)..(312): n is a, c, g, or t
atggctttgcaacttgaagaaaaggatttgaagatagcgaagaaattgctgaaaatggaattggaaggcacaaattctaaagtatatgtttttggttctagggcagaaggtacagcacaaaagttttcagatttagatttggcaatagattttaatggacaaaaaattccagaggaaattaaatttgaattggaaaatttctttgaagcgagcaatataagcatgagagtggacattgtagatttaaatgccgtcagtaaaaacttcaaaaaaattataagccctggcttgcaggagttttttattgcctaa

SEQ ID NO: 8768 - protein, 103 aa, Unknown
  Obtained from environmental sample
  DOMAIN (5)...(100): Nucleotidyltransferase domain
  misc_feature (1)..(103): Xaa is any amino acid
MALQLEEKDLKIAKKLLKMELEGTNSKVYVFGSRAEGTAQKFSDLDLAIDFNGQKIPEEIKFELENFFEASNISMRVDIVDLNAVSKNFKKIISPGLQEFFIA

SEQ ID NO: 8769 - DNA, 495 bp, Unknown
  Obtained from environmental sample
  misc_feature (1)..(495): n is a, c, g, or t
ttgagttggaaccgtgagtttactatattaatggctgtgaatgcacaaaatgccaaaaccttagacttaactgactacgcaaatgctgtaactagtttggagaaatccattacatcttattccgtagaaaaagatggcgaatacaaggatgttttacgagattcctctatccagcgatttgaatatgtttttgaattttcgcataaaatccttcggaggtatttgtcttggcatgtgcctatgccgcaggtaaaagtttctgaaatttcctttgctgaactagttagaatagcgaatgaacacaggctttttaccgagccttatgaaatttggaataaataccgcagaatgagaaacataacgtcacatacatacaacgagggtgcagcgcagcaagttttggaaataattccagcttttttagaagaggtaaaaaaatttttggcaaaaatgcaagaaaacctagcggcggcaaaagatggctttgcaacttga

SEQ ID NO: 8770 - protein, 164 aa, Unknown
  Obtained from environmental sample
  misc_feature (1)..(164): Xaa is any amino acid
MSWNREFTILMAVNAQNAKTLDLTDYANAVTSLEKSITSYSVEKDGEYKDVLRDSSIQRFEYVFEFSHKILRRYLSWHVPMPQVKVSEISFAELVRIANEHRLFTEPYEIWNKYRRMRNITSHTYNEGAAQQVLEIIPAFLEEVKKFLAKMQENLAAAKDGFAT

SEQ ID NO: 8771 - DNA, 540 bp, Unknown
  Obtained from environmental sample
  misc_feature (1)..(540): n is a, c, g, or t
gtgtttaaaaacataatcaataaacggaggctgttaattatgaaaaagtatataaagtatctactgttacccattatcgcaaccctactcgtcctcgccgcagtcggttgcggcaagaacaacaagcccgccgacgccgctatcggcggcggcaaggtcaatatcgtaacgaccatcttccccgcctacgacttcgcccgcgccgtcgccggtgacaaggcggagatcataatgctgctcccgcccgcctcggaagcgcactctttcgagccgcgcccgcaggacatcgtcaaaatccaaaagagcggcgtgttcattcacgtaggcggcgagtccgactcctgggtgagggaaatactcaagtcgatagacaatccaaagatgaagatcgtcaccttgatggactgcgtggaaaccgtcgaggaggagaccgtcgagggtatgcaaaatgaagtgggagaggataagaaggacggcgaagacgaagagggaccggaatacgacgagcatgtctggacgtcgccgcgcacgctaaattga

SEQ ID NO: 8772 - protein, 179 aa, Unknown
  Obtained from environmental sample
  misc_feature (1)..(179): Xaa is any amino acid
MFKNIINKRRLLIMKKYIKYLLLPIIATLLVLAAVGCGKNNKPADAAIGGGKVNIVTTIFPAYDFARAVAGDKAEIIMLLPPASEAHSFEPRPQDIVKIQKSGVFIHVGGESDSWVREILKSIDNPKMKIVTLMDCVETVEEETVEGMQNEVGEDKKDGEDEEGPEYDEHVWTSPRTLN

SEQ ID NO: 8773 - DNA, 660 bp, Unknown
  Obtained from environmental sample
  misc_feature (1)..(660): n is a, c, g, or t
atgcacaccgcgccgcttgccgtatcgatccccattgtggtgctgacggcgtttttgcttctgcgcataagcgagaacagcaaaatcaagggcgatgccgccatcgcgcttatatccacaagctcgctcgcngtaggcgtattggtcgtgtcgctcacgacgggaatgaacaccgacgtttgcaactatatgttcggcaacattctggtaatgagccatagcgacgtaacgctctccgtaatcttagccgccgttgtgttgacgatgtttgtcctcttctacaacaagatattcgccgtgacgttcgacgagaatttcgccaaagccaccggcgtaaaagccggcgtatacaatatgatgatcgcttttctcacggcgatcaccattgtgctgggaatgaggatgatgggagcgctcctgatttccagcctgatcatctttccggcgcttacctctatgcggctctgcaaaaaattcaagagcgtgacgatatgttcggcgatagtgtctgtgatatgctttctcacgggagtgataatatcgtacgtcaaagcgacgccgacgggggcgagcgttgttattgtaaacatcatggcgtttttgatattttggttggcgagcgtggttaggaggacggttcttaaatggagggctcaatga

SEQ ID NO: 8774 - protein, 219 aa, Unknown
  Obtained from environmental sample
  DOMAIN (1)...(206): ABC 3 transport family
  misc_feature (1)..(219): Xaa is any amino acid
MHTAPLAVSIPIVVLTAFLLLRISENSKIKGDAAIALISTSSLAVGVLVVSLTTGMNTDVCNYMFGNILVMSHSDVTLSVILAAVVLTMFVLFYNKIFAVTFDENFAKATGVKAGVYNMMIAFLTAITIVLGMRMMGALLISSLIIFPALTSMRLCKKFKSVTICSAIVSVICFLTGVIISYVKATPTGASVVIVNIMAFLIFWLASVVRRTVLKWRAQ

SEQ ID NO: 8775 - DNA, 408 bp, Unknown
  Obtained from environmental sample
  misc_feature (1)..(408): n is a, c, g, or t
atgaatgggaaatgggcccgttcgtctggcttccggcatataaaaaagccgcgacggaaaacagccatggatagttgtattcgcgtttccggggattttttgtttcttgacattaaagcggctcctggcgcttccaaatccgcttttggggaaatcagggaagggcggcttanagtacgaatagccgccgctccggaagacggtaaagcgaatgaggaacttcgttccttttttgccagagttcttgggctcccgaaaaaagagcttgttctggaagcgggagaaaaatcccgtataaaactttgcgcgttccgtttcagcgaaagaaaacttgagagcttacttcttaccgcgctcataaaattaaggcatttcgtttttgtgtcggccttaaaattcacatcgtaa

SEQ ID NO: 8776 - protein, 135 aa, Unknown
  Obtained from environmental sample
  DOMAIN (30)...(106): Uncharacterised ACR, YggU family COG1872
  misc_feature (1)..(135): Xaa is any amino acid
MNGKWARSSGFRHIKKPRRKTAMDSCIRVSGDFLFLDIKAAPGASKSAFGEIREGRLXVRIAAAPEDGKANEELRSFFARVLGLPKKELVLEAGEKSRIKLCAFRFSERKLESLLLTALIKLRHFVFVSALKFTS

SEQ ID NO: 8777 - DNA, 906 bp, Unknown
  Obtained from environmental sample
  misc_feature (1)..(906): n is a, c, g, or t
atgacagattggccgagtggaggacgccgtgacaagaatcaatacatggagggttatatgataattaatcacaacatgagtgcgatgtacgccaaccgccagcttgacgtaacacaagtcgatactaacaagagccttgagaagctcagttccggcctgcggatcaaccgcgccggcgacgacgcttccgggcttgcggtttccgaaaagctgagggcgcagatccgaggtcttaaccaggcggagcgcaatacccttaacggggtatctttcatacagaccgctgagggttaccttcaggaaacccaggatgttctgcacaggatccgcgagctggcggttcagtcagccaacggcatctacaccgaagaggacagaacttacatccagatcgaagtttccgctctggtagccgaagtcgacaggatcgcgagtcatgcgcagtttaacggcatgaacatgcttaccggggcttatgccaacggcgggccaaaaaccatgcagttccagattggcgccaacatggaccagaacacgaaggtctatatcggcgaaatgactgcctcagcgctcggagtgctgaacaaccagggaacgaccgggcctatttccatgacggatcctgatgccgcgaacaaggctattgcggctttggacagcgcgttaacgcaggttaacaagcagagggcggatctcggcgcataccagaaccgctttgaaacagcggctcagggcatcgccattgcagcggagaatatgcaagcctccgaatcccgcatcagggatgtgaacatggcaaacgaagtggtgaaattcaccagggatgccattctgaaccagtcggggacggcgatgctggcccaggcgaatgtgcggacccagtccgtgctgcagcttctcggttaa

SEQ ID NO: 8778 - protein, 301 aa, Unknown
  Obtained from environmental sample
  DOMAIN (208)...(279): Bacterial flagellin C-terminus
  misc_feature (1)..(301): Xaa is any amino acid
MTDWPSGGRRDKNQYMEGYMIINHNMSAMYANRQLDVTQVDTNKSLEKLSSGLRINRAGDDASGLAVSEKLRAQIRGLNQAERNTLNGVSFIQTAEGYLQETQDVLHRIRELAVQSANGIYTEEDRTYIQIEVSALVAEVDRIASHAQFNGMNMLTGAYANGGPKTMQFQIGANMDQNTKVYIGEMTASALGVLNNQGTTGPISMTDPDAANKAIAALDSALTQVNKQRADLGAYQNRFETAAQGIAIAAENMQASESRIRDVNMANEVVKFTRDAILNQSGTAMLAQANVRTQSVLQLLG

SEQ ID NO: 8779 - DNA, 657 bp, Unknown
  Obtained from environmental sample
  misc_feature (1)..(657): n is a, c, g, or t
ttgagtacggaaaaaatacttattatcgaggatgatcctgagatacaggagatgctgaagttcgcttttgcccgcgaagggtggaaactgttccaggcttcaaccggagaggaaggactcaaagtcctccgcgacaagggagcggactgcattattttagatattatgcttcccggcatggacggccttaaaaccctcaaaaaaatcagggaagataaacgatcccaaaccctgccggtgatcatgtgtactgcccgcggcgaggaagccgacataatcgccggactggaactgggagctgacgattatgtggttaaaccgtacagcccgcgggtattggccgcccggatacgcgcgggactcaggcggaaagaagcggctgccgcggaagacgaaagctctccaaaaaaaatctttcagcacggaaaactcagcatagacatcgagcggcatacggtctttctggacaaaacgcccctggatctttttcccacggaatttgccctccttacccagtttatgagccaccccgacatagttttttcccgccagaggctcatcaccgcaatccggggaaacgattatccggtgacggatcgttccatagacgtacaaattatgggcctcagaaaaaaactgggggatgccggcagctga

SEQ ID NO: 8780 - protein, 218 aa, Unknown
  Obtained from environmental sample
  DOMAIN (157)...(217): Transcriptional regulatory protein, C terminal
  misc_feature (1)..(218): Xaa is any amino acid
MSTEKILIIEDDPEIQEMLKFAFAREGWKLFQASTGEEGLKVLRDKGADCIILDIMLPGMDGLKTLKKIREDKRSQTLPVIMCTARGEEADIIAGLELGADDYVVKPYSPRVLAARIRAGLRRKEAAAAEDESSPKKIFQHGKLSIDIERHTVFLDKTPLDLFPTEFALLTQFMSHPDIVFSRQRLITAIRGNDYPVTDRSIDVQIMGLRKKLGDAGS

SEQ ID NO: 8781 - DNA, 435 bp, Unknown
  Obtained from environmental sample
  misc_feature (1)..(435): n is a, c, g, or t
atgattctgccggtcattatcagaaccaccgaagaggccctgaagaccgtccccgtttctttccgcgaaggctcgttttcgctgggagcgaccaaatttcaaacaatagtccatgtagttctgccgccggccctgccgggaatccttaccgcggccattctcgccgcgggccgggtggtgggcgaatccgccccggtactgctgaccgtagggcttgcccgcaatcttcccaaaaccatttttgagccgggcagaacattaaccatacagctatattatcttaccaaagaagcgattgaagccgatgattttgcccatgcctttgccgccgccgcggtattgattgttgtagtattattaatcaatacgctggtaaagatcataggcaggagctttggaggctccgcttccacagacggcggaaacgatgattaa

SEQ ID NO: 8782 - protein, 144 aa, Unknown
  Obtained from environmental sample
  misc_feature (1)..(144): Xaa is any amino acid
MILPVIIRTTEEALKTVPVSFREGSFSLGATKFQTIVHVVLPPALPGILTAAILAAGRVVGESAPVLLTVGLARNLPKTIFEPGRTLTIQLYYLTKEAIEADDFAHAFAAAAVLIVVVLLINTLVKIIGRSFGGSASTDGGNDD

SEQ ID NO: 8783 - DNA, 885 bp, Unknown
  Obtained from environmental sample
  misc_feature (1)..(885): n is a, c, g, or t
atggcttttatgaaagtacttattacggccaaagaagtagaagtccgggaacaggttgacgttctggttgtcggcggagggccggcgggcatcggggcagcggtttccgctgccagaaccggcggcagggtgctactgcttgaaaaaagggcttttctggggggaaacattacttccgcctatgtggaaacctgtaactggtttttgaataattccctgttttctgtccgcggcctgtatagggaaatagaagacggctataaggccgagtacgggtgcgggcacgaaattcgggaatacgcgccattccggttcaacggggaatacctcaaaattttcctggatgagttaatggtcagggaaaacgtcaaagtgcttttttactcgtttgtaaatgatgtggtcattgaaaacaaccgcatcaaagcggttattatccagaccaagagcgggcctgtggcggtatgcgcccaggtggttattgacgccaccggggacggggatgtggctttcgcggccggccttcccttcaagcaggggcgggacaaggacggctactgtcagccgggcacgctgaacctgcggcttgccggggtggatgcgaaatttttcgcccaagggcctgcggaaaaagacaaactcaaagccatagataaaaaattccaacaggattacgacgcggggaaaattcaccttgactgcaaacggcgcgaattcattatggggcggctgacctcaggcggcgttatcggcagttttaattatccctngtcgtatatgattgatcctacgagttctgttgatctaaccaaggcgaaatggaatgtcgtcagtacatcaaacaggtcccttcactggatgcgggtgaacctggggcggntttga

SEQ ID NO: 8784 - protein, 294 aa, Unknown
  Obtained from environmental sample
  DOMAIN (6)...(208): Thi4 family
  misc_feature (1)..(294): Xaa is any amino acid
MAFMKVLITAKEVEVREQVDVLVVGGGPAGIGAAVSAARTGGRVLLLEKRAFLGGNITSAYVETCNWFLNNSLFSVRGLYREIEDGYKAEYGCGHEIREYAPFRFNGEYLKIFLDELMVRENVKVLFYSFVNDVVIENNRIKAVIIQTKSGPVAVCAQVVIDATGDGDVAFAAGLPFKQGRDKDGYCQPGTLNLRLAGVDAKFFAQGPAEKDKLKAIDKKFQQDYDAGKIHLDCKRREFIMGRLTSGGVIGSFNYPXSYMIDPTSSVDLTKAKWNVVSTSNRSLHWMRVNLGRX

SEQ ID NO: 8785 - DNA, 891 bp, Unknown
  Obtained from environmental sample
  misc_feature (1)..(891): n is a, c, g, or t
ttgatggccgagggcacctatgcgggagcgtgggtaaatggcactccaagcgcaaaaggtctcaaaacttattttgcttgggaagatattttggaagaacaaggaaaaaaaatggcagatttgccgcgaatagttcatagagaagtgcgaaacagggattattttttcacgcctgcatttttgttttttgccataatggcggctgtggcttgcggtgcaggtattcaaagaatggattccgaaaaggggaaaaaaattgtcgcttatgggcttgcatttgcgtggcttgtgccttttgtgagcaatttcagttcgcataaccgctcccaagattttatcgcaagggattttgccattaacgttttaaacagcatcccgcaaaacggtattcttataacctatggcgataacgatacattcccactgtggtatatgcaaatggcagaaaaacatcgaacagacgtagtggttataaacgaaagcctttcttatagcgactggtatagggagcaggttttaaagaattatcctgatttgaatgtagttgagagtggagagttgagagtggagagtgaggggaattttatacgcaaaataatagaagataattggcccgagagaagcgttaattttgtgattggggtaaatccgagcgagtatgaggaattttccgaggacatgcccctaattgggcttgttaggaatttgggcatggatagtcaaaaagcagattcgttgctaattgcaaaccttgcagaaaattaccaatattcggaacttaacgaaagagggcaagaagcaaatgagcaaacaataaccatttaccgctatttggcaaaaaaggcattgcttgcaaagaaacaagcgaagaacaagagcagcgttgactaa

SEQ ID NO: 8786 - protein, 296 aa, Unknown
  Obtained from environmental sample
  misc_feature (1)..(296): Xaa is any amino acid
MMAEGTYAGAWVNGTPSAKGLKTYFAWEDILEEQGKKMADLPRIVHREVRNRDYFFTPAFLFFAIMAAVACGAGIQRMDSEKGKKIVAYGLAFAWLVPFVSNFSSHNRSQDFIARDFAINVLNSIPQNGILITYGDNDTFPLWYMQMAEKHRTDVVVINESLSYSDWYREQVLKNYPDLNVVESGELRVESEGNFIRKIIEDNWPERSVNFVIGVNPSEYEEFSEDMPLIGLVRNLGMDSQKADSLLIANLAENYQYSELNERGQEANEQTITIYRYLAKKALLAKKQAKNKSSVD

SEQ ID NO: 8787 - DNA, 399 bp, Unknown
  Obtained from environmental sample
  misc_feature (1)..(399): n is a, c, g, or t
atgaaagaagcggctctggtttaccacggcggcctaaaggaaaatatccgttccgcgcttgttgatcgttttcaaaacgatccagcttcaaggatttttcttgtaagtctgaaagctgggggccttggtctaaacctgacagctgcaagccgtgttatccactatgacctatggtataacccagcagtggaaaaccaggccacagacagggcattccgcatcggtcaaaagcacaacgtctttgtccaccgctttatcacaaaaaacagtttcgaggaaaaaattgatgcaatgatttccggcaaaaaggagctggcggaaatgaccgttgcctcaggcgaatcctggctggcacggatgagtcacgaggagctgaaggatttgtttgataaagggtag

SEQ ID NO: 8788 - protein, 132 aa, Unknown
  Obtained from environmental sample
  DOMAIN (1)...(75): Helicase conserved C-terminal domain
  misc_feature (1)..(132): Xaa is any amino acid
MKEAALVYHGGLKENIRSALVDRFQNDPASRIFLVSLKAGGLGLNLTAASRVIHYDLWYNPAVENQATDRAFRIGQKHNVFVHRFITKNSFEEKIDAMISGKKELAEMTVASGESWLARMSHEELKDLFDKG

SEQ ID NO: 8789 - DNA, 354 bp, Unknown
  Obtained from environmental sample
  misc_feature (1)..(354): n is a, c, g, or t
atggtaaaacagggcgatattatttggttggattttgatccgcagacaggtcatgaacagacaagcctccgaggtagcagcaggcaacctgctctggtaataagcaatgaaacttttaacaatttttcaagcttggctattgtatgtccgataacaaatacaaacaagaagtatcctttttatgtaaaattggataaaagaacaaaaacaacgggagttgttttgtctgaccaatcaagaacattggatattaaagcgcgtaactatgaatttatcgaaaaaatgcccgatgacattttatttgaagttatagatattattagtggtttaattgaaagagaatcccatgcctga

SEQ ID NO: 8790 - protein, 117 aa, Unknown
  Obtained from environmental sample
  DOMAIN (3)...(112): PemK-like protein
  misc_feature (1)..(117): Xaa is any amino acid
MVKQGDIIWLDFDPQTGHEQTSLRGSSRQPALVISNETFNNFSSLAIVCPITNTNKKYPFYVKLDKRTKTTGVVLSDQSRTLDIKARNYEFIEKMPDDILFEVIDIISGLIERESHA

SEQ ID NO: 8791 - DNA, 609 bp, Unknown
  Obtained from environmental sample
  misc_feature (1)..(609): n is a, c, g, or t
gtggagcgccgcgccgctgcgctcgatgtcggaagcggagctcaggcggcgggccgacgggtctatcgccatcatatacggcggcaactcgcggggggtcgtagtcccctacccgccctcggaagaagcgctcggaggcctaagccgctacgccgcgctcgtctcgcgtttgcgcaaaaactaccctgtgaactttaccgtggacgcgggcaaccttatatccgccgacaaggacgcgctgaggatagagttcgcggcgaactactacgacgccgcccggttcgacgtattggcgccgggcataggcgaggtatctatgggcgcggcgaaactcgcggcggccctcaaacgcaaaacgcctataatagtaaccaacctgaacgacaacgacgcggcggcgaccggtatcaggagcagcgttctgctgacgaacggcggttacagcgtatacctcctgaacataatccaaaccgttccagaaaacgacggcgatacccgcctcgatctctcctacgacccggcggcgataaaatcgcagctcgcgtcggggcaggccgccgccgccgatctgcgggcagcggtcgtccacggcaccctcgaagaggttaa

SEQ ID NO: 8792 - protein, 202 aa, Unknown
  Obtained from environmental sample
  misc_feature (1)..(202): Xaa is any amino acid
MERRAAALDVGSGAQAAGRRVYRHHIRRQLAGGRSPLPALGRSARRPKPLRRARLAFAQKLPCELYRGRGQPYIRRQGRAEDRVRGELLRRRPVRRIGAGHRRGIYGRGETRGGPQTQNAYNSNQPERQRRGGDRYQEQRSADERRLQRIPPEHNPNRSRKRRRYPPRSLLRPGGDKIAARVGAGRRRRSAGSGRPRHPRRG

SEQ ID NO: 8793 - DNA, 315 bp, Unknown
  Obtained from environmental sample
  misc_feature (1)..(315): n is a, c, g, or t
ttggaattctcccacacgtttacatccgcgaaccacccgcagagcaacggcaagctggaacggttccatcgcaccttgaaaactgaacacgtaaggagggcatcgtatttagaataccaagacgcctgcgtaaggctggcagaatggatcgtgtattacaacagtgagaggctccacagcgcgatctggtatctaacgcctaacgacattttttacggtcgggcggcgggacggcttgcagagcgcaaagaaaaattgcatactgcatttatcaagagacaggaatactggcagacacgaaccgccgtttcctga

SEQ ID NO: 8794 - protein, 104 aa, Unknown
  Obtained from environmental sample
  misc_feature (1)..(104): Xaa is any amino acid
MEFSHTFTSANHPQSNGKLERFHRTLKTEHVRRASYLEYQDACVRLAEWIVYYNSERLHSAIWYLTPNDIFYGRAAGRLAERKEKLHTAFIKRQEYWQTRTAVS

SEQ ID NO: 8795 - DNA, 381 bp, Unknown
  Obtained from environmental sample
  misc_feature (1)..(381): n is a, c, g, or t
ttggtgggcatttataatcatagccaaacattaccaaaaatagacacagcctttgatatagagcatatcttcccaaagaaccgacagaaaattgaaaaaactttagctgatgaaaagagccttgaggcacttggaaataaatcattgcttgaaaaacgcatcaatatacgtgtgactgattataggttttctgataaggtgaagtattataaaggggaaatcatcagcaaaagaaagacgaaagagaaaacacaaatcagtgaattgattgagcttgcagcaaatcacaccgattttactgaaacagatattaagaaacgtaacaaggaaattattgaaggctttttatcgtttattagtatgaataatttaattaaataa

SEQ ID NO: 8796 - protein, 126 aa, Unknown
  Obtained from environmental sample
  misc_feature (1)..(126): Xaa is any amino acid
MVGIYNHSQTLPKIDTAFDIEHIFPKNRQKIEKTLADEKSLEALGNKSLLEKRINIRVTDYRFSDKVKYYKGEIISKRKTKEKTQISELIELAANHTDFTETDIKKRNKEIIEGFLSFISMNNLIK

SEQ ID NO: 8797 - DNA, 846 bp, Unknown
  Obtained from environmental sample
  misc_feature (1)..(846): n is a, c, g, or t
ttgataaaacaaactaccgcgcttgtacacagcgagtcgggaatttaccctttcatagctgtagatcatgaaggaggcactgtaaaccgtttcaggcagggtacagccgacttgccgggcgcgtcctcttattgggaattatcgcttacacagggcagacaggcggctcttgaaaaaattgaaaatgacagcttaaaggcgggcgttgatttgtttgatttgggtatacacatgaatttcgcccctgtggcggaatatctaaacgacgataaccgcattttcttaaataaacgttcttacggacccgacccgtttttcacggccgacgcggcagaggcttttatccgtggaatgatgcgcgcgggattaatgtgcgtaatcaagcattttcccggaagcgcgggaaacgatcctcactactccgcttcttttattaacggagacaaagccgcactggacaaactggttttcccttttaagtcgctgattgataatggttacggaagcgcaataatggtttcgcataccgtcgtcccggcttttgacagtaaaatagccagcctgtcgccggttgttatgaaagactggctaagaggcgagcttggcttttccgggttattgattgccgatgactttagcatggcggcggcgggagggcaaagacccgaagaagcggcggttttatcaattgccgccggagcggacatggtacttgtctggcctaaagatttaaagcgcacgcgcgacgcggttatttcagccatcaaagacggacggctttcacgggaaaaaatgcgtgaagcggttgggcggattatctatgaaaaatatttactgtgggattaa

SEQ ID NO: 8798 - protein, 281 aa, Unknown
  Obtained from environmental sample
  DOMAIN (9)...(239): Glycosyl hydrolase family 3 N terminal domain
  misc_feature (1)..(281): Xaa is any amino acid
MIKQTTALVHSESGIYPFIAVDHEGGTVNRFRQGTADLPGASSYWELSLTQGRQAALEKIENDSLKAGVDLFDLGIHMNFAPVAEYLNDDNRIFLNKRSYGPDPFFTADAAEAFIRGMMRAGLMCVIKHFPGSAGNDPHYSASFINGDKAALDKLVFPFKSLIDNGYGSAIMVSHTVVPAFDSKIASLSPVVMKDWLRGELGFSGLLIADDFSMAAAGGQRPEEAAVLSIAAGADMVLVWPKDLKRTRDAVISAIKDGRLSREKMREAVGRIIYEKYLLWD

SEQ ID NO: 8799 - DNA, 645 bp, Unknown
  Obtained from environmental sample
  misc_feature (1)..(645): n is a, c, g, or t
gtgttacggcaagaaaccgtggtaccggaaatattagagttaattaaggaattgcagagcaatcctttatttaatgatttttatttggttggcggcacggcccttgcgttacagataggccacagaacatcaacagatattgatttattttcttatgcacataaagtgttttttgatttaagcatgtatttcaaaaaaaaccctgaaaaatatataattaataaaaatcaagagggatttataagagtatatataaacggaattaaagttgaatttatttatgatgacgtcggaaaattaataatgcagccggtaaacatagacggaattatctgtctggataaaagagaaatagcgccaatgaagttaagcgccgccacagcaaggaataaaatgcgtgatttgatagatattgcgtatttattaagggaaatgtcccttgaagaaatgtttattttatataaaaaaaagtatggcaatgttaatcttaacatcttaaaaaaagaattattatctaaaattagatcaatgaaagaagacgacagtttggacggcattaagatattaaaagatgatattaaattacaggatattccggaaataattaaacacgcaatagatgaatacaatttaaaaacgggatag

SEQ ID NO: 8800 - protein, 214 aa, Unknown
  Obtained from environmental sample
  misc_feature (1)..(214): Xaa is any amino acid
MLRQETVVPEILELIKELQSNPLFNDFYLVGGTALALQIGHRTSTDIDLFSYAHKVFFDLSMYFKKNPEKYIINKNQEGFIRVYINGIKVEFIYDDVGKLIMQPVNIDGIICLDKREIAPMKLSAATARNKMRDLIDIAYLLREMSLEEMFILYKKKYGNVNLNILKKELLSKIRSMKEDDSLDGIKILKDDIKLQDIPEIIKHAIDEYNLKTG

SEQ ID NO: 8801 - DNA, 426 bp, Unknown
  Obtained from environmental sample
  misc_feature (1)..(426): n is a, c, g, or t
atggtaaattatttctccctttcaatatggaacgaggaaaaaaacaagcaaaccttttataacagctggataaccaataaaacgataaccagcgatacggtttcgcaccttgcctcatgcgcccgctcgcgctggaagatagaaaacgagtacaacaacgtcctgaaaaaccacggctacaatttggagcataattttgggcacggcaaagcccatgccagcgaaatgtactgcttgctgcatctgctggcttttcagatgcattcgttgctggatatcagcgatgaagattaccggaaagcaagggcgtatgcccgaaggagggatgaattctttaatgagctgcgtgtcctcatgcgccgctctctctttgggagttggcaggaactcattgttttcatgtattccggccctgatacggggtaa

SEQ ID NO: 8802 - protein, 141 aa, Unknown
  Obtained from environmental sample
  misc_feature (1)..(141): Xaa is any amino acid
MVNYFSLSIWNEEKNKQTFYNSWITNKTITSDTVSHLASCARSRWKIENEYNNVLKNHGYNLEHNFGHGKAHASEMYCLLHLLAFQMHSLLDISDEDYRKARAYARRRDEFFNELRVLMRRSLFGSWQELIVFMYSGPDTG

SEQ ID NO: 8803 - DNA, 792 bp, Unknown
  Obtained from environmental sample
  misc_feature (1)..(792): n is a, c, g, or t
gtgacagaaggtgagtttctcgcggtaatgggtgaaaacggagcgggaaaaaccacattttgcaaactgcttaacggtattattccccacatttccggcggacatttatcgggaacggttacggttgacggcgcggatactgtaaaatcctccgtaccacagttggcgcttaaagtgggaatgactcttgacgatcctgacgcgcagatttttacctcgtcagtccgttatgaggcggcttttggactgcaaaatatccttttacaaccggaagaaattgaaaaaagggtaagcttcgcccttcaagcggttggccttgcaggttttgaggataggactccatcaacactgtccggcggcgaaaagcaacgtctttccattgcggcggtccttgcgatgaaagggaaaatactggttcttgacgaacccctgagccgcctagatacgcggggagcgcaagaagtaatgtccgttttaaacgatttgcgtaaaaatgaaaaaataacaattattatggtaatgcacgaaagcgcgaaagcggttgaatttgcggacagggtttgtattcttaaaaacggaaagattgccgcgcttgataccgtaaaaaatattttttctgacatatcgttattggaaaaaaacggcatacagcccgttatcggtaatcttaagaattttttgccccaaaaagtttcttatgataatcccgtgatcgacataaaaaatctttcatttttatattcaaatggttcggggaataaaaaatatcaacctgtcaatcgcggaaaatga

SEQ ID NO: 8804 - protein, 263 aa, Unknown
  Obtained from environmental sample
  DOMAIN (4)...(193): ABC transporter
  misc_feature (1)..(263): Xaa is any amino acid
MTEGEFLAVMGENGAGKTTFCKLLNGIIPHISGGHLSGTVTVDGADTVKSSVPQLALKVGMTLDDPDAQIFTSSVRYEAAFGLQNILLQPEEIEKRVSFALQAVGLAGFEDRTPSTLSGGEKQRLSIAAVLAMKGKILVLDEPLSRLDTRGAQEVMSVLNDLRKNEKITIIMVMHESAKAVEFADRVCILKNGKIAALDTVKNIFSDISLLEKNGIQPVIGNLKNFLPQKVSYDNPVIDIKNLSFLYSNGSGNKKYQPVNRGK

SEQ ID NO: 8805 - DNA, 345 bp, Unknown
  Obtained from environmental sample
  misc_feature (1)..(345): n is a, c, g, or t
atgccgtttttttccaataacgatatgtcagaaaaaatattttttacggtatcaagcgcggcaatctttccgtttttaagaatacaaaccctgtccgcaaattcaaccgctttcgcgctttcgtgcattaccataataattgttattttttcatttttacgcaaatcgtttaaaacggacattacttcttgcgctccccgcgtatctaggcggctcaggggttcgtcaagaaccagtattttccctttcatcgcaaggaccgccgcaatggaaagacgttgcttttcgccgccggacagtgttgatggagtcctatcctcaaaacctgcaaggccaaccgcttga

SEQ ID NO: 8806 - protein, 114 aa, Unknown
  Obtained from environmental sample
  DOMAIN (74)...(112): Protein of unknown function (DUF1602)
  misc_feature (1)..(114): Xaa is any amino acid
MPFFSNNDMSEKIFFTVSSAAIFPFLRIQTLSANSTAFALSCITIIIVIFSFLRKSFKTDITSCAPRVSRRLRGSSRTSIFPFIARTAAMERRCFSPPDSVDGVLSSKPARPTA

SEQ ID NO: 8807 - DNA, 699 bp, Unknown
  Obtained from environmental sample
  misc_feature (1)..(699): n is a, c, g, or t
gtgctaaaaccctatatttgcgacactgtttcttatttatacgatgctttaaaagccaaaaaacagataatttttgagggtgcacagggaactatnttagatgttgaccacggaacctatccctttgtcacgtcttcaaacacggtagctggttccgcaagctgtggctctggagttggaccaaccgccatagaccaggttatcggagttgtgaaagcctataccacaagagttggaaacgggcctttcccaaccgaactctcaaacgaaatcggcgaagagcttcgcaaaataggtggcgaatttggagccacaactggcaggccacgccgttgcggctggtttgacgcccctgttgttcgcaaggcagcagccgtaaatggcttaacccatcttgcaataaccaagctagatgtactggatacctttaaagaaataaaagtttgcacaaactataaaatgggaggcaaggaattgcaaagttttccaaatggtttgtcgcaggttggcctttgcgagcctgtttatgaagttttaccgggatggcagtgccaaacttccaaatgccgctcctgggacgaattgcccaaaaacgctcagaaatatttaaccagaatctccgaacttgctggtgttaaaataggaatgatttcaattggcgcgaagagagatgaatctattgttttggatattagttga

SEQ ID NO: 8808 - protein, 232 aa, Unknown
  Obtained from environmental sample
  DOMAIN (1)...(228): Adenylosuccinate synthetase
  misc_feature (1)..(232): Xaa is any amino acid
MLKPYICDTVSYLYDALKAKKQIIFEGAQGTXLDVDHGTYPFVTSSNTVAGSASCGSGVGPTAIDQVIGVVKAYTTRVGNGPFPTELSNEIGEELRKIGGEFGATTGRPRRCGWFDAPVVRKAAAVNGLTHLAITKLDVLDTFKEIKVCTNYKMGGKELQSFPNGLSQVGLCEPVYEVLPGWQCQTSKCRSWDELPKNAQKYLTRISELAGVKIGMISIGAKRDESIVLDIS

SEQ ID NO: 8809 - DNA, 636 bp, Unknown
  Obtained from environmental sample
  misc_feature (1)..(636): n is a, c, g, or t
ttggaaaagcatcgtttagattcggaaaagatatgggaagccgaggggaaaaagctcctttcggttttaacttcatcttcttccatgctgccctgcgcggaagatctgggcgccgtccccccctgtgtgccaaaggtactgacacagctcaatatcctcggccttagggtagttcgttggcaccgtgactggggcaaagaaggccagccctatatcccattcgaggactaccctgagctttcggtgtgtactccggcggtacacgacagttcgtgtctaagggaatggtgggacagggaagcggatcaacagcgattcgccggtttaatcggcgttccttctttgccaagggtttataaccccggcacagcccgcgtcatacttagcaaaatagcatcggcggcttccaggttcaggattttccaaatacaggatctattgcacatttctaatctttggtacgccgccgatgccgctgcagagcggataaacgtgcccggcaccgacaacacctttaactggacataccgcctgcccgcgcccataagcgaacttgcaaaagacgaaggccttatcaggtctgtgtctgaactggcggcagtaaagccggcgacaaagaaaaaggcaaagacgtag

SEQ ID NO: 8810 - protein, 211 aa, Unknown
  Obtained from environmental sample
  misc_feature (1)..(211): Xaa is any amino acid
MEKHRLDSEKIWEAEGKKLLSVLTSSSSMLPCAEDLGAVPPCVPKVLTQLNILGLRVVRWHRDWGKEGQPYIPFEDYPELSVCTPAVHDSSCLREWWDREADQQRFAGLIGVPSLPRVYNPGTARVILSKIASAASRFRIFQIQDLLHISNLWYAADAAAERINVPGTDNTFNWTYRLPAPISELAKDEGLIRSVSELAAVKPATKKKAKT

SEQ ID NO: 8811 - DNA, 300 bp, Unknown
  Obtained from environmental sample
  misc_feature (1)..(300): n is a, c, g, or t
gtgtggtggtcttttgtcggcataggcaacgatttttacgagaaagacattccccggtatatgggtatgtgcgacttgactatcgcaagccagtggaacagtcatgttctgcgggtttacggaaggtctaatttcaactataaaaatattaatgcagctttgcggatcgattacagttaccccatagccgcgacagggttatatttttacctgcaatattttttgggctatggcgaaagccttattgattatgaccggccggtaaacaaaattggaacaggaatcgccttaagcagataa

SEQ ID NO: 8812 - protein, 99 aa, Unknown
  Obtained from environmental sample
  misc_feature (1)..(99): Xaa is any amino acid
MWWSFVGIGNDFYEKDIPRYMGMCDLTIASQWNSHVLRVYGRSNFNYKNINAALRIDYSYPIAATGLYFYLQYFLGYGESLIDYDRPVNKIGTGIALSR

SEQ ID NO: 8813 - DNA, 843 bp, Unknown
  Obtained from environmental sample
  misc_feature (1)..(843): n is a, c, g, or t
ttggtttacaaaaagcaagttgaaaatcaagctcttgtgtgggacagcccctgggggcgaggttacccgggctggcatattgaatgttccgcaatgagcatgaaatatttgggtgaaaatttcgatattcacgcaggcggaatcgatcatattccaattcaccacacaaatgaaatcgctcagagtgaagccgccacgggaaaaaaaccttgggtaaactactggctccacaatgaatttcttgttcttaaggacggaaaaatgtctaaatcaaagggcggttttcttactttgcaaactctcgtagatcagggctatgatccgctggattaccgctatttcctgattggcggacactaccgcagtcagcttcagttttccatggaaagccttgaaggcgcaaaaaacgccagaaaatcgctgctcgacaaggttcgctctttggcggcaaaatgcggcgcaaacgcctctgcggatacggaaaaaacagcgaagtatatagaagattttaacaaatctattgaagacgacttaaatacaccccgtgcattggctgaattgtggggtttattgaaagaaggggcggctgaacccgaaacgcttgcggctgtctatgatatggacagaattttaggacttggactgcaagacgctgtaaaaaactcagacagcaagggcgaagacggcgcttttacacgggaaattgaggaacttatcgcaaaaagagcggaagcgaaaaaggcaaaagattttgccgcggctgataatataagacaaaaccttaaaaatcagggtataattcttgaagacggaccggcaggtacaacatggcgtgtccagtaa

SEQ ID NO: 8814 - protein, 280 aa, Unknown
  Obtained from environmental sample
  DOMAIN (3)...(136): tRNA synthetases class I (C) catalytic domain
  misc_feature (1)..(280): Xaa is any amino acid
MVYKKQVENQALVWDSPWGRGYPGWHIECSAMSMKYLGENFDIHAGGIDHIPIHHTNEIAQSEAATGKKPWVNYWLHNEFLVLKDGKMSKSKGGFLTLQTLVDQGYDPLDYRYFLIGGHYRSQLQFSMESLEGAKNARKSLLDKVRSLAAKCGANASADTEKTAKYIEDFNKSIEDDLNTPRALAELWGLLKEGAAEPETLAAVYDMDRILGLGLQDAVKNSDSKGEDGAFTREIEELIAKRAEAKKAKDFAAADNIRQNLKNQGIILEDGPAGTTWRVQ

SEQ ID NO: 8815 - DNA, 807 bp, Unknown
  Obtained from environmental sample
  misc_feature (1)..(807): n is a, c, g, or t
atgcgccgagcggttgaaagcggctttagtcaaactgaacacagcgagcttcaggcggacaatcgaacttccggtgcaatctccggcatcgaaccttcggttcgcgaacgcagagcctttcgggttccacgggccattcgcgagaggtggaagtcgggaacgccggtcaggggtttgtggttttcactcgcgtccgattcctcgcttgatgaaaaccaatttaataaaatgagcttgcttgaagaagaagaactgaaccgtgagcgcgttcgcctgcttttggatcgctggggaatcctgacaaggccattattggaacgggaagcgcctgccttgtcctgggcgcggcttcttccgacaatacggcggatggagcttgccggggagcttgttaccgggcgcttcttcgccggcatcgcctcgctgcaattcacctcgccaagaatagcctcggaactggaagaagcggaagcggagcgcggcatctactggatgaacgcggcagaccccgcaagcccggcagggttggcggtcgagggcattattcgcagcacaggaggcgacgcaccagcgatccgccgaattgcgtcttccaggctttgttttcgtggcgcggaattgcttgccgtttcaaacagaagctgccaggagctggaaatttttattccaccggatgacggagatatagcagaagcgctcgaatttgtaaaagtctcacggacaagaaaagtacacaaagaaaataaaatcaccatgaaaaaatcaacggcgcttccgcggctcaagcgcaactctccgccgccataa

SEQ ID NO: 8816 - protein, 268 aa, Unknown
  Obtained from environmental sample
  misc_feature (1)..(268): Xaa is any amino acid
MRRAVESGFSQTEHSELQADNRTSGAISGIEPSVRERRAFRVPRAIRERWKSGTPVRGLWFSLASDSSLDENQFNKMSLLEEEELNRERVRLLLDRWGILTRPLLEREAPALSWARLLPTIRRMELAGELVTGRFFAGIASLQFTSPRIASELEEAEAERGIYWMNAADPASPAGLAVEGIIRSTGGDAPAIRRIASSRLCFRGAELLAVSNRSCQELEIFIPPDDGDIAEALEFVKVSRTRKVHKENKITMKKSTALPRLKRNSPPP

SEQ ID NO: 8817 - DNA, 558 bp, Unknown
  Obtained from environmental sample
  misc_feature (1)..(558): n is a, c, g, or t
atggaaaaaataccttatgtcctgcgtcctgaaaatataagcggcgattctcccggcataggagaaaaaatttataaaacagaaaatgaaaaaatagccgttattgttcttttggggcagaacggttttaacaggcttcacgcaaacaacccgtttaccgccctgccccctctgcttgatcggttaaaaaaacaaactccttatataattgttgattttcacgcgcaggcaacagcggaaaaaaagaccctcttctatgccgccgacggaaattgttcggcagtcataggttcgcacacaaaagttcaaaccgccgatgaaacaattctgccaaacggaacggcggtaatcaccgacgccggcaggacgggaagcgttcaatccgtcggcggcagtgatataaattcccgcataaaagaatacataacaggcatccccgactggacaaaagaagcctgggatcagccggaactgcaaggcgtatatctggacatcggcaaagacggcaaggcgctctcgatagaaagagttcgcatacccgttcaagcgcctgattaa

SEQ ID NO: 8818 - protein, 185 aa, Unknown
  Obtained from environmental sample
  misc_feature (1)..(185): Xaa is any amino acid
MEKIPYVLRPENISGDSPGIGEKIYKTENEKIAVIVLLGQNGFNRLHANNPFTALPPLLDRLKKQTPYIIVDFHAQATAEKKTLFYAADGNCSAVIGSHTKVQTADETILPNGTAVITDAGRTGSVQSVGGSDINSRIKEYITGIPDWTKEAWDQPELQGVYLDIGKDGKALSIERVRIPVQAPD

SEQ ID NO: 8819 - DNA, 612 bp, Unknown
  Obtained from environmental sample
  misc_feature (1)..(612): n is a, c, g, or t
gtgcttttacccgttaaggaaaaactggaaaagaaaggcattgtttttgcggaagacagggataactttgactatctgtattatcgaagcgatttggcggaacttgccggaaagaaatatcacaaaaaaaagaaccatgttaataattttttatccacctaccctgatcatgaactgcgccaaatgaacgcggaacatattccggcggccattgaaattttagacaggtggcataaagacaaaaatgaagacggcgattacagagcgccaagggaagctctggatttatttgatatacttccgttgaagggcgcgattttttttatcggcggacaacccgccgcctattgtcttggagaaagcattgcaagaggaaaaatgtttgccgttcattttgaaaaagcgattgaggagtacaaaggcatttaccagtatgtgaatcaggcgttcgctgcgtccttaccgcgtttttttctctctcataaaaccgcgaacaaagacccttgggaacgtaaggtattaagggcggggaaaagaatgactttaccgcccgctgggggtttttggggccaaaaattttccaggaaaaaaacatcatggagggttttttaa

SEQ ID NO: 8820 - protein, 203 aa, Unknown
  Obtained from environmental sample
  misc_feature (1)..(203): Xaa is any amino acid
MLLPVKEKLEKKGIVFAEDRDNFDYLYYRSDLAELAGKKYHKKKNHVNNFLSTYPDHELRQMNAEHIPAAIEILDRWHKDKNEDGDYRAPREALDLFDILPLKGAIFFIGGQPAAYCLGESIARGKMFAVHFEKAIEEYKGIYQYVNQAFAASLPRFFLSHKTANKDPWERKVLRAGKRMTLPPAGGFWGQKFSRKKTSWRVF

SEQ ID NO: 8821 - DNA, 555 bp, Unknown
  Obtained from environmental sample
  misc_feature (1)..(555): n is a, c, g, or t
atgcttaccgacgctcattgccacccatttgatcttgccaatgttttcccgaaagcggaacaggaaaggcggcggcttggggtttttacggcagctagtgcgtgtgatttggatgaatttaaatataatgagaaattaacgaaaaaagccattgcggaaaattccgcgccgcttttgccttgctttgcgattcatcctcaactgcctgctgtaaaaaaagagggaggcgagccatttacagacactgaaataagcgactgtcttgaaaccttgcgcaaactcgctgcggcgggcaggctttcggcggttggcgaatgcgggtttgatctttacaacacagcgtttaaggaaactgaaaaaacacaggatactctgtttgcggcgcatttggaaattgccgttaatttcggtctgcctgttattcttcatgtgcgccgcgctatgcacaaaatttttgccgtcgagaaaattctatcaaaatgcaaagctgtcgtctttcattcatggtcgggtactcttgaagaagcgccattcgcttcttcgccggggagttaa

SEQ ID NO: 8822 - protein, 184 aa, Unknown
  Obtained from environmental sample
  DOMAIN (1)...(183): TatD related DNase
  misc_feature (1)..(184): Xaa is any amino acid
MLTDAHCHPFDLANVFPKAEQERRRLGVFTAASACDLDEFKYNEKLTKKAIAENSAPLLPCFAIHPQLPAVKKEGGEPFTDTEISDCLETLRKLAAAGRLSAVGECGFDLYNTAFKETEKTQDTLFAAHLEIAVNFGLPVILHVRRAMHKIFAVEKILSKCKAVVFHSWSGTLEEAPFASSPGS

SEQ ID NO: 8823 - DNA, 720 bp, Unknown
  Obtained from environmental sample
  misc_feature (1)..(720): n is a, c, g, or t
ttgctcttcccggcgaaaatgccggtagtgctggttatgggggccgagggaatcgccgtcggaatgtcaacaaaaatacttccgcataacgccgtggaagtgctggaagcggagatcgcctgcctgtcaggaaaaaaattcgagctgtacccggattttcccaccggcggccttatggacgtatcagagtaccgcgacggcaacggcaaggtgctggtcagggctaaacttgacacttcggatccaaagcgcatactgatcaccgaattgcccttcggatcaaccacggaaagcctgataaacagcgtggaagcggcggcgaaatccggaaggcttaaaatccaggggatcaatgacttcaccacggacaaagtcgaaatcgaggtgaaactcgcccgcggcgtttacgcacaggaaaccatcgacgcccttttcgcctttaccgaatgtcagcagtccatttccgttaatcttcttgtcataaaaaacggcctgcccgccattatgaccgttaccggggttatacagcaccacgccaaacagcttgttaaaatacttacaaaagaactggaactggaaaaaaaggagcttggcgacaagctgcacctgcgaacccttgaaaggatattcatagaggagcgcatatacaaaggcattgagaaaatgaaaaccgccaaaggcgtacaggaggcggttatatcaggttttaagcctttatga

SEQ ID NO: 8824 - protein, 239 aa, Unknown
  Obtained from environmental sample
  DOMAIN (1)...(237): DNA gyrase/topoisomerase IV, subunit A
  misc_feature (1)..(239): Xaa is any amino acid
MLFPAKMPVVLVMGAEGIAVGMSTKILPHNAVEVLEAEIACLSGKKFELYPDFPTGGLMDVSEYRDGNGKVLVRAKLDTSDPKRILITELPFGSTTESLINSVEAAAKSGRLKIQGINDFTTDKVEIEVKLARGVYAQETIDALFAFTECQQSISVNLLVIKNGLPAIMTVTGVIQHHAKQLVKILTKELELEKKELGDKLHLRTLERIFIEERIYKGIEKMKTAKGVQEAVISGFKPL

SEQ ID NO: 8825 - DNA, 681 bp, Unknown
  Obtained from environmental sample
  misc_feature (1)..(681): n is a, c, g, or t
ttgggaaatttcgttgtctgtcgaaattcccttttcgtcagcgactggattcccaaaatggaaataaatgaattacgcacggaaaatttaggctacaggacggaatttatagaattcaaggtaaaatcagccggggatttggacaagttacagctttacataatgtggcccgcgaaagaaccgtatgtttttaatttccccaatgtttatgtaaaatcaggcgaatatgtaacgcttcattttcgtactctggaaaataacgccgttaatgaattgggggatgacctgtctgaatcctcaggaactgactccagcccgacagcgcgtgatttatgggttcccggcaattcaaagtggctgcataaaacagacattgtgtatttgcaggacgcaaacggcggtattatggacgcggtaattttgaatgaaacgcccgatgaagcttggaaaaaagggcaagcgcatttcgccggaatagcggaaaatttgcacggcaagggagcatggaaatccgcggacggcaaactgccttcgccttttgacgctgttgatacgtcaacagtaaaaactgccgcaactaagagcattagcaggtacgaagggaaagaggacagcaatacggcaaatgactggtatgtaacgaatacgggaggagcgtcgccgggacagccgaataagtag

SEQ ID NO: 8826 - protein, 226 aa, Unknown
  Obtained from environmental sample
  misc_feature (1)..(226): Xaa is any amino acid
MGNFVVCRNSLFVSDWIPKMEINELRTENLGYRTEFIEFKVKSAGDLDKLQLYIMWPAKEPYVFNFPNVYVKSGEYVTLHFRTLENNAVNELGDDLSESSGTDSSPTARDLWVPGNSKWLHKTDIVYLQDANGGIMDAVILNETPDEAWKKGQAHFAGIAENLHGKGAWKSADGKLPSPFDAVDTSTVKTAATKSISRYEGKEDSNTANDWYVTNTGGASPGQPNK

SEQ ID NO: 8827 - DNA, 318 bp, Unknown
  Obtained from environmental sample
  misc_feature (1)..(318): n is a, c, g, or t
ttggtttcttcgacttcttcgctttcttcagtttcttcgatttcattggtttcttcgagttcttcgacttcttcgatttcattggtttcttcgctttcttcagtttcttcgatttcattggtttcttcgagttcttcgacttcttcgctttcttcggcttcttcgattttattggtttctttgtattttgcgatttcatcgatttcttcaatttcatcgacttcttcagtttcatcaatttcctcagtttcttcgatttcgctttcttcgattttattgataatgacagctgcccgccgtataaccttatcctggtaa

SEQ ID NO: 8828 - protein, 105 aa, Unknown
  Obtained from environmental sample
  SIGNAL (1)...(24)
  misc_feature (1)..(105): Xaa is any amino acid
MVSSTSSLSSVSSISLVSSSSSTSSISLVSSLSSVSSISLVSSSSSTSSLSSASSILLVSLYFAISSISSISSTSSVSSISSVSSISLSSILLIMTAARRITLSW

SEQ ID NO: 8829 - DNA, 489 bp, Unknown
  Obtained from environmental sample
  misc_feature (1)..(489): n is a, c, g, or t
atgaaagcaggaattgatttcggaacgtcaacatcggaaatagcttatgttgacgataacggcaaaattatcattgttcccaatcatttgggagaaatgataacgccgtcggtcgtatacatagccgaggacggtagtcccgttgtcgggcttgaggctaaagaaaaagcgcttcttgaaccggaaaacacctttcttgaggtaaagcggctttttggccaaaacacggaacttcaggcgcgggacaaggtttattcgcccgtggacgctgcggcaatgattatacgttatttaacagactgcgcgcaaaaacactcaggccagacggtcgatgccgcggtgattaccgttcccgcctatttcaccgattcacagcgcanagacgttatggccgcaggaaaggcggcggggcttgaggtcgagcgcattatcaatgagccgacggcggccagcctggactacggaatcgaacacatgcggggactgtaa

SEQ ID NO: 8830 - protein, 162 aa, Unknown
  Obtained from environmental sample
  misc_feature (1)..(162): Xaa is any amino acid
MKAGIDFGTSTSEIAYVDDNGKIIIVPNHLGEMITPSVVYIAEDGSPVVGLEAKEKALLEPENTFLEVKRLFGQNTELQARDKVYSPVDAAAMIIRYLTDCAQKHSGQTVDAAVITVPAYFTDSQRXDVMAAGKAAGLEVERIINEPTAASLDYGIEHMRGL

SEQ ID NO: 8831 - DNA, 852 bp, Unknown
  Obtained from environmental sample
  misc_feature (1)..(852): n is a, c, g, or t
gtgaacctcatcattaagacccttacagacccggtaaccggggtaataaacgacatgggcgttataaaagcagtcggccacaggacagttcacggcggtaacaagtttaccaagagcgtgattgtagacgacgcggcaatggccgcttttaacgaaatgaccgacatgagcccgcttcacaaccccgccaatattctgggcataaaggcagcccaaaaagtcctgccgaacgtaccccattgcgcgatcatggacaccgcctggcatcaaaccatgcccaaagaatccttcctttacgcggtaccctacgaatggtacgaaaaatactcagtccgccgttacggttttcacggcactagcttcctttatacagccaagcgcgccgcggtgttgctgggcaaagaccctttcaagaccaaccttatcatcgcccatctgggcaacggttcttcgattaatgcggtaaaagacggctgttctttcgacacgagcatgggcattaccccgcttgaagggcttgtaatgggaacccgctccggcgacattgaccctgccctgcccttctacgttatgagaaaagcgggaatgaacgatgcagagattgagaacgcgctgaacaagaagtccggccttgcaggcatctcaggtgggcttaccgacaggcgggacattcagaaggcggctttggaaaataacaagatggcaattctggcgcangacatggaagcccacagggtaaagaagtacatcggcgcttaccaggccattcttggccgtgtggacgctctggtctttacgccggcgttgggagttcgcgtggtggatgcgcaagaagatcctccaaggncttga

SEQ ID NO: 8832 - protein, 283 aa, Unknown
  Obtained from environmental sample
  DOMAIN (1)...(282): Acetokinase family
  misc_feature (1)..(283): Xaa is any amino acid
MNLIIKTLTDPVTGVINDMGVIKAVGHRTVHGGNKFTKSVIVDDAAMAAFNEMTDMSPLHNPANILGIKAAQKVLPNVPHCAIMDTAWHQTMPKESFLYAVPYEWYEKYSVRRYGFHGTSFLYTAKRAAVLLGKDPFKTNLIIAHLGNGSSINAVKDGCSFDTSMGITPLEGLVMGTRSGDIDPALPFYVMRKAGMNDAEIENALNKKSGLAGISGGLTDRRDIQKAALENNKMAILAXDMEAHRVKKYIGAYQAILGRVDALVFTPALGVRVVDAQEDPPRX

SEQ ID NO: 8833 - DNA, 408 bp, Unknown
  Obtained from environmental sample
  misc_feature (1)..(408): n is a, c, g, or t
ttgaaaaagggagtcccccaaaaaccggggcttatgtatttgctcgaccgccttcgcgccgcaaatatcccattgggggtagcgacttctacccgaagcatcagggccgttgacctgctggaaaaagcgggaatatttgatcgttttaaggcaattacatgcggcgaggaaataacaaacgggaaaccggcgccggatatattccttctcgcggcaaagaaattagggcagctaccatgtaactgcgtaggctttgaagattccaccgccggccttaggggactgcacgccgcggggatacgctcagtttttataaaggatgttctaagcccgcctgaggatgtccttgccgctgtctggcgcagatgcaatgatctgtccgaggcggcggcgttattcggcttgtaa

SEQ ID NO: 8834 - protein, 135 aa, Unknown
  Obtained from environmental sample
  misc_feature (1)..(135): Xaa is any amino acid
MKKGVPQKPGLMYLLDRLRAANIPLGVATSTRSIRAVDLLEKAGIFDRFKAITCGEEITNGKPAPDIFLLAAKKLGQLPCNCVGFEDSTAGLRGLHAAGIRSVFIKDVLSPPEDVLAAVWRRCNDLSEAAALFGL

SEQ ID NO: 8835 - DNA, 441 bp, Unknown
  Obtained from environmental sample
  misc_feature (1)..(441): n is a, c, g, or t
atgccgggaggtttctccgacagaaacgggaaaagaaacaagaaccgctggtgtcattttgcctntgatacctgggacgctcccgaagctttgcaccggctttctgtggcagcgggaattcccaaggagcgagccgcgctcagttttcttttatgcggtccccgcgaagatccaaaaagaaccgccaattcttccagatacggcaaaatgaaaaaaaataatgccgatgccaaaatgcggataatttcggattgtttccctttgccccaaaatattttcggcaggtacggctgttccgaatcaggtcttgtccttttaatcggcgacaggcgcggaattggaaacgccgcttgcggttcgattattgacataaaatataaaaacggactccgcgacaagaaaagcggcgcgctgctcgccgcgctttgcgagtcccgctaa

SEQ ID NO: 8836 - protein, 146 aa, Unknown
  Obtained from environmental sample
  misc_feature (1)..(146): Xaa is any amino acid
MPGGFSDRNGKRNKNRWCHFAXDTWDAPEALHRLSVAAGIPKERAALSFLLCGPREDPKRTANSSRYGKMKKNNADAKMRIISDCFPLPQNIFGRYGCSESGLVLLIGDRRGIGNAACGSIIDIKYKNGLRDKKSGALLAALCESR

SEQ ID NO: 8837 - DNA, 819 bp, Unknown
  Obtained from environmental sample
  misc_feature (1)..(819): n is a, c, g, or t
gtgcgcgtaacggctgggcaattggtagatattcctttccgagggaccaactggtcgtatttggaagatatagcttcccgccgcggtattgtctataattcgcgccggattgattctgaaggaatgatttttacctttagagccgaagaagagggaatttacgctttaagattttacagacgtgattatataagggataatattttttatgattatgttcaggttattgtagaagaatcgccggataaaagcggaaaagcgggaacttatccgcccaatgaccgcggcaaggtaacggcagaacctcgctggccttccgcgcttgaagaagcggaaatgctcaggggcggcgcaagaccttcttccgcatcatcatcgccgtctgcgacggctgaaagaagttccgccgccgttcagccgcaaagaacggcgccgcagatatcgtcaactgacagggacttggctcangcgcaaggagcgggaacagcgccgccgtccgctgtgcctcaggttgtaacgcccacgaccccatccgggatttactccccaaacagtaacccccctcggcgaatgccttcggggaaaggccattgggggaaaatcccccgggttggccctttaaaaaaaaacccctcccccccaaaaaaaaaaaaaaaaaaaactttccccccccgggaaaaaaaatatttttttaaaaaaaaggggcgccccgggggggttttttttttttttaaggggggggaggaaaaaaaacgcccccccccccccccccccaaaatattttggggggtttttccctcccgcccccccaaaaaataa

SEQ ID NO: 8838 - protein, 272 aa, Unknown
  Obtained from environmental sample
  misc_feature (1)..(272): Xaa is any amino acid
MRVTAGQLVDIPFRGTNWSYLEDIASRRGIVYNSRRIDSEGMIFTFRAEEEGIYALRFYRRDYIRDNIFYDYVQVIVEESPDKSGKAGTYPPNDRGKVTAEPRWPSALEEAEMLRGGARPSSASSSPSATAERSSAAVQPQRTAPQISSTDRDLAXAQGAGTAPPSAVPQVVTPTTPSGIYSPNSNPPRRMPSGKGHWGKIPRVGPLKKNPSPPKKKKKKTFPPREKKYFFKKKGRPGGVFFFFKGGEEKKRPPPPPPKIFWGVFPSRPPKK

SEQ ID NO: 8839 - DNA, 675 bp, Unknown
  Obtained from environmental sample
  misc_feature (1)..(675): n is a, c, g, or t
gtgcccgtaacaagccgaaaatttccgtacgccggattcaagagcgatcgtgagatcgggaacaatgtcctgagagcggaaaaattaaattacacttttgagggaacctccttgttaaaggatttttcgttgattgtaaacaagggcgaaaaaatcgcttttgtggggcttgagcactcatccaaatcggcattttttgacatcatcacaggagaaaaaaaagccgaatcgggggattgttattgggggcagacaacttctttttcctattttccaaaagagaactccacctattttagttcaaatctttcaataacagactggctaaggcaatattctccggatcaagacgaaacttatgttcgaagctttctgggccggatgcttttttcaggagacgaggcgttaaagccggtaaacgtgctttcaggcggcgaaaaagtccgctgtttactttcaaaaatgatgctctccggcgcaaacgtgcttattcttgacgaacctacaaaccaccttgatttggaagcgattaccgccctgaacgacggccttgccgctttttccggagtaatactttttaactctcacgatcatgaattcatcatttcaattgcaaaacgtattatcgagattctcctcaagaagaaaaccccggcgggcttatccacagattga

SEQ ID NO: 8840 - protein, 224 aa, Unknown
  Obtained from environmental sample
  DOMAIN (49)...(214): ABC transporter
  misc_feature (1)..(224): Xaa is any amino acid
MPVTSRKFPYAGFKSDREIGNNVLRAEKLNYTFEGTSLLKDFSLIVNKGEKIAFVGLEHSSKSAFFDIITGEKKAESGDCYWGQTTSFSYFPKENSTYFSSNLSITDWLRQYSPDQDETYVRSFLGRMLFSGDEALKPVNVLSGGEKVRCLLSKMMLSGANVLILDEPTNHLDLEAITALNDGLAAFSGVILFNSHDHEFIISIAKRIIEILLKKKTPAGLSTD

SEQ ID NO: 8841 - DNA, 939 bp, Unknown
  Obtained from environmental sample
  misc_feature (1)..(939): n is a, c, g, or t
gtgattataggcggagacgattcaaacacaaacgctgctgttttggcagaatattttgccgacaaaaaggtttcctgttccgttataggctgcccaaaaaccatagacggcgatttgaaaaacgaatatatagaagtctcctttggctttgacaccgccgttaaaacctattcagaactgataggcaacattgagcgcgatgccaattccgcccaaaaatactggcacttcatcaaactgatggggcgttctgccagccatataggcttggaagcggctcttcaaacccacccaaatatttgcctgatttcggaagaaattaaggaacaaaaaatgacacttgaacaggttgtaaattcaataactgacgtcattgttgctcgtgccgcaaataaaaagaattttggcgtagcacttataccagaaggtcttattgaatttattcccgaatttaaaattctgatttccgaattgaacgatgctcttgcgcattacgaagcagagataaaagaactaatccaaaaagatatagaaagccgtgctcttgcgcatggcgaggcggaaattaaagaggctggcaaagcggcagatatggtagaagtagcttgcaggcatatttccgaagcctccgcaaatttacttaaaagcctgcccgaagacatacagttgcagttgatgatggagcgcgacccgcacggaaatgttcaggtatctctagttgaaacagaaaagcttttaattgaaatggtaaccaaagaactgaagctcagaaatttcaaaggcaaacttggcactcaaaaccatttctttggttatgagggtcgttgcgcagcaccctccaactttgatgcggattactgctatagccttggttatgcggcttctgttttggtgctacataagaaaaacggctatatgagttcctcgtgccgaatctga

SEQ ID NO: 8842 - protein, 312 aa, Unknown
  Obtained from environmental sample
  misc_feature (1)..(312): Xaa is any amino acid
MIIGGDDSNTNAAVLAEYFADKKVSCSVIGCPKTIDGDLKNEYIEVSFGFDTAVKTYSELIGNIERDANSAQKYWHFIKLMGRSASHIGLEAALQTHPNICLISEEIKEQKMTLEQVVNSITDVIVARAANKKNFGVALIPEGLIEFIPEFKILISELNDALAHYEAEIKELIQKDIESRALAHGEAEIKEAGKAADMVEVACRHISEASANLLKSLPEDIQLQLMMERDPHGNVQVSLVETEKLLIEMVTKELKLRNFKGKLGTQNHFFGYEGRCAAPSNFDADYCYSLGYAASVLVLHKKNGYMSSSCRI

SEQ ID NO: 8843 - DNA, 447 bp, Unknown
  Obtained from environmental sample
  misc_feature (1)..(447): n is a, c, g, or t
gtgtttatttcatatgcatctgaagacaaagaaacttttgttgatgatctggtaaaagaattaaaaaataatggtgtcaaggtatggtatgatgatattaatatcgcttggggcgatactttaagaacaaaaattgatttagggcttgcaaaatcaaagtatgggatcgttgttttatcaagagattatataaaaaagtactggacacaacaagaattggagggcttattccagcgagaaacaaccgataaaaaggtaattctacctatatggcataatattacaaaagacgaagtcaatgcttttagtccaattcttgcatcacgaaaggccttaagttcggctctatttagtattaaagaaatcgctaatgaatttagtaaattattacctaatataaaacaaaatgatttagaagaaaccaaggaggccgcctcaaatgactaa

SEQ ID NO: 8844 - protein, 148 aa, Unknown
  Obtained from environmental sample
  DOMAIN (1)...(118): TIR domain
  misc_feature (1)..(148): Xaa is any amino acid
MFISYASEDKETFVDDLVKELKNNGVKVWYDDINIAWGDTLRTKIDLGLAKSKYGIVVLSRDYIKKYWTQQELEGLFQRETTDKKVILPIWHNITKDEVNAFSPILASRKALSSALFSIKEIANEFSKLLPNIKQNDLEETKEAASND

SEQ ID NO: 8845 - DNA, 306 bp, Unknown
  Obtained from environmental sample
  misc_feature (1)..(306): n is a, c, g, or t
atgactaagctccctctccatacccccgacctaaccaacaaaaactacgccgctttagctgccatgttccccaacgccgtcactgaaaccattgacgaaaacggcgcagtcgtccgtgccatagacgccgatgtattaacacaagaaataaacaatcatgtcgtttcaggcaaagaagaacgctaccaattcacttggcctgacaaaaagaaggctgcgctactggcaaactcgccaatttccgcgacattacgcccatgtcgtgaaagaagtgtaaatttcgataaaaccgaaacctctacatag

SEQ ID NO: 8846 - protein, 101 aa, Unknown
  Obtained from environmental sample
  misc_feature (1)..(101): Xaa is any amino acid
MTKLPLHTPDLTNKNYAALAAMFPNAVTETIDENGAVVRAIDADVLTQEINNHVVSGKEERYQFTWPDKKKAALLANSPISATLRPCRERSVNFDKTETST

SEQ ID NO: 8847 - DNA, 888 bp, Unknown
  Obtained from environmental sample
  misc_feature (1)..(888): n is a, c, g, or t
gtgagagcattaagcattgatgccattgaaaaggcaaattcggggcatccgggccttccattgggaacggctgagttaggcgcaatgctctacggggagcttctgcggcacgatccttccgatccggagtgggcggatagggatcgatttgttctttcggcggggcatggctccatgtttatctattcgctcttgcacctttcaggctataaggatatgacgctggatgaaataaaaaatttccgtcagctcggttcacgcgccgcgggacaccccgaatacggcatcggcattgaggcgaccagcggtcccctggggcagggcctcgcgatggcggccggtatggccgttgcggaaaccatgctcgccgcgcggttcaacacccctgggtgcaaaatcgtcgaccattacacctatgccctctgcggcgacggttgtctaatggaaggcgtcgcgtcggaggcgagctcgtttgccgggcacaacggcctgggcaagctcatcgtgttttatgattcaaacaaaatcaccattgacggcaacacggatattgcctttaccgaagatgtcgccaaacgttatgaggcctacggatggcaggtactgcgaggttcaatgtacaattttgaggaaatcgccaggcttaccgaacaggcaaaaacggaaacaaaaaagccgagcataattatacttacgtcgataatcggaaaaggcgcacccaacaagcagaacaaggcggatatacacggagccccgctgggcgccgacgaggtaaaagccgcccgcgccaatctgggaatcccgggcgatttttatgtcgcccctgaagcgcgggcttattttagcgcgaagcaggcagagtggaaaaaaaacatgcggactggctga

SEQ ID NO: 8848 - protein, 295 aa, Unknown
  Obtained from environmental sample
  DOMAIN (88)...(231): Thiamine pyrophosphate enzyme, C-terminal TPP binding domain
  misc_feature (1)..(295): Xaa is any amino acid
MRALSIDAIEKANSGHPGLPLGTAELGAMLYGELLRHDPSDPEWADRDRFVLSAGHGSMFIYSLLHLSGYKDMTLDEIKNFRQLGSRAAGHPEYGIGIEATSGPLGQGLAMAAGMAVAETMLAARFNTPGCKIVDHYTYALCGDGCLMEGVASEASSFAGHNGLGKLIVFYDSNKITIDGNTDIAFTEDVAKRYEAYGWQVLRGSMYNFEEIARLTEQAKTETKKPSIIILTSIIGKGAPNKQNKADIHGAPLGADEVKAARANLGIPGDFYVAPEARAYFSAKQAEWKKNMRTG

SEQ ID NO: 8849 - DNA, 537 bp, Unknown
  Obtained from environmental sample
  misc_feature (1)..(537): n is a, c, g, or t
atgctgcaggtgattccgtccggcagggatctggcgcaactggagcacgagctttccgacctcgaccacctgcactatctccgcaaggcgctgacgccgttgattgaacggtacgactacatcctgatagacacgccgccctcccttggtatgttgacgctgagcgtcctgactgccgcggacgaggtgattgtgcccatgcactgcgagtttctggccatggacggtctggccgaattgaacgagaccgtcaggcgcatccagtccggccccaaccccggccttggcatggggggcattctgctgaccatggccgaggagcgcaccaacctcggcgcggccgtggccatggaagtccgccaggccttccatggcaaggtgttccagaccaccatcccccgcaacatccgcctggcggaggcgcccagccacggcaagccggtggccttctacgacctgaagtcgaagggcgcgcaggcctacctgaacctagccagggagtggctggggctcgaattctccaaggacacggcatga

SEQ ID NO: 8850 - protein, 178 aa, Unknown
  Obtained from environmental sample
  DOMAIN (8)...(140): CobQ/CobB/MinD/ParA nucleotide binding domain
  misc_feature (1)..(178): Xaa is any amino acid
MLQVIPSGRDLAQLEHELSDLDHLHYLRKALTPLIERYDYILIDTPPSLGMLTLSVLTAADEVIVPMHCEFLAMDGLAELNETVRRIQSGPNPGLGMGGILLTMAEERTNLGAAVAMEVRQAFHGKVFQTTIPRNIRLAEAPSHGKPVAFYDLKSKGAQAYLNLAREWLGLEFSKDTA

SEQ ID NO: 8851 - DNA, 960 bp, Unknown
  Obtained from environmental sample
  misc_feature (1)..(960): n is a, c, g, or t
atgttggaagacgatttttttcttgagacccctattatctgcccgccaaatattaaaggagatgtgggaaggttacgttcacaaataccagcttcgttcaaggtaatgtcattcggagaggtgcagaacaaattaaaagacgaacgccgctatcgccttgtggtaatagatgaaagccataacctgcgtaaccgtgaaggccgccgctaccgcgcggtagctgaatacctggcattaaacgattcaaaagtgatactgctaaccgcgacgccttacaataagagctaccttgacttgtcaaaccaattgcgcttattcgtaaacgaagagcagaacctcggccttgcgcctgagcggtatattagagagctgggcggcaaagtggagtttgaagcaaggcatcaggtaaaagagtcctgccttgccgcctttgaaaaaagcggctattcggatgattgggcggagcttatgcggctgtttctggtgcgccgtacccgcagctttatcaaagcaaattacgccaggacggacaaggcaaccggcaggaagtatattgaattttcacccaatgcggatggggttgtcgaaaagagctttttccccgatcgcatacccgctaaagtggaataccattttgataagtcagacagcgatgaccagtatgcccgcctgtattcaggcgatgtggtttcaataattaacaaactgctcttgccccgctacggattggggcaggaagcttatgagaataaagcaacaattaaggatataaagccggaagagaaaattattaaaagcaatcttgccaaagcgggaaaacagcttaggggctttgccaggacaaatttattcaagcggctggaaagctcaggctattcatttttgttgtccattagccgccatattctgcgtaactatttattcatttacgctatcgaagaaaacctgaattcccgatag

SEQ ID NO: 8852 - protein, 319 aa, Unknown
  Obtained from environmental sample
  misc_feature (1)..(319): Xaa is any amino acid
MLEDDFFLETPIICPPNIKGDVGRLRSQIPASFKVMSFGEVQNKLKDERRYRLVVIDESHNLRNREGRRYRAVAEYLALNDSKVILLTATPYNKSYLDLSNQLRLFVNEEQNLGLAPERYIRELGGKVEFEARHQVKESCLAAFEKSGYSDDWAELMRLFLVRRTRSFIKANYARTDKATGRKYIEFSPNADGVVEKSFFPDRIPAKVEYHFDKSDSDDQYARLYSGDVVSIINKLLLPRYGLGQEAYENKATIKDIKPEEKIIKSNLAKAGKQLRGFARTNLFKRLESSGYSFLLSISRHILRNYLFIYAIEENLNSR

SEQ ID NO: 8853 - DNA, 486 bp, Unknown
  Obtained from environmental sample
  misc_feature (1)..(486): n is a, c, g, or t
atgacaattaactttattttaaacggcgaagatgtcgtttttaacgctgaggctggagtaagattgatcgatatcctgcgcggaaatttcggtttattcggatcaaaaccaggctgtctttcggggcagtgcggagcttgtacgattatttacaacggacaggtaagcccctcctgtttgattccggcttttaaaatacagggttccgaaataataactattgaagggttttctcaaacaattgagtatcaggaaattatgaacgcgtttgcgcaggaacaccttggaaattgcggttattgcgaggcgggaaaagttttatgcaccgaagctcttcttgaacatataccgaaccccacaaaagaagaaattttaatgggattttcggggattaaatgcagatgcaccaacgcggaaagacttgtaaaggttgtaaataatatcgccgcgtcacggcaaaagaggttgtatgaaagcgccacttaa

SEQ ID NO: 8854 - protein, 161 aa, Unknown
  Obtained from environmental sample
  DOMAIN (5)...(65): 2Fe-2S iron-sulfur cluster binding domain
  misc_feature (1)..(161): Xaa is any amino acid
MTINFILNGEDVVFNAEAGVRLIDILRGNFGLFGSKPGCLSGQCGACTIIYNGQVSPSCLIPAFKIQGSEIITIEGFSQTIEYQEIMNAFAQEHLGNCGYCEAGKVLCTEALLEHIPNPTKEEILMGFSGIKCRCTNAERLVKVVNNIAASRQKRLYESAT

SEQ ID NO: 8855 - DNA, 546 bp, Unknown
  Obtained from environmental sample
  misc_feature (1)..(546): n is a, c, g, or t
atgggccggcccaagggccctcgggtgattattcggcgcccatgcgattccttccggcgccggggcgggacgaccagctgggacatatgggcgcgtcgcgccggcgcgaagttcatccacgggaccgagcccgcggccgtcgcatacaagccggtcgaaggcgcaccacgcgacggcgcgcccgcaatcctcgataccgcccgacggctgcacaaccgcgacgatctgatgcaagagctggcgaaaatagcccgcgtagtcaaaaaggccgattccgccgcgccgtccgaaacgtggcttgtgctagacgcggcgttcggtcaaaacgcgttggcccaaatcgaatacttcgacaaggccgcgccgcttacgggactgattataaccaaaatggacggcactagcaaaggcggatttttaatcagctatgccgctgcccgcaagaatccgctgccggtccgctatgtcggatacggcgagaaaatcgaagacttaaagcccttcgccgccgccgaatatgtggacaagttattgggtttggattag

SEQ ID NO: 8856 - protein, 181 aa, Unknown
  Obtained from environmental sample
  DOMAIN (6)...(179): SRP54-type protein, GTPase domain
  misc_feature (1)..(181): Xaa is any amino acid
MGRPKGPRVIIRRPCDSFRRRGGTTSWDIWARRAGAKFIHGTEPAAVAYKPVEGAPRDGAPAILDTARRLHNRDDLMQELAKIARVVKKADSAAPSETWLVLDAAFGQNALAQIEYFDKAAPLTGLIITKMDGTSKGGFLISYAAARKNPLPVRYVGYGEKIEDLKPFAAAEYVDKLLGLD

SEQ ID NO: 8857 - DNA, 918 bp, Unknown
  Obtained from environmental sample
  misc_feature (1)..(918): n is a, c, g, or t
ttggtattgagccagaaccctgataattccggcaaagcaagcggcgccaaaccaccggccgagaatttcttttcccagaaaaacgcctgccctgactgcggcgtttcgattccggaattgcagccgcgtctcttttcgtttaacaacccctttggagcatgcccaagctgttccggcctcggttccaagctggagtttgatcccgatctggttatccctaacccgtcgctttcctttaatgaaggcggcattgttccttataacccggacagcgcctggcaccacagccgttttgaaagcctcgcgaagcattataaattcagcctggatacgccgcttaagaccctgcctaaaaaaaccatggacgcgattctgtggggcagcagggatgaaattaaagtccgttacaacaaccgggaaggaacaggccattttgaataccagtcaagattccccggagtgctggaagacctgaaacgccgctacctggagacccagtcgccgggtgtaaaggaatggcttgagaaatttatgagccagaagcactgcgaggactgcgaaggcaagaggctgaaaccggaggtgcttggcgtgactgtcgccggcaagaacatctgggagctttccagcctttccgtaaccgattcgctgaaattttttgaagcggtcaaatttaacaagaacgaaaaaaagatcgcctaccagatattaaaggaaattacagcgcggctgggctttatgcgcaatgtcggacttgattacctcagccttgagcgcaaggcgtctacactttcaggcggcgaggctcaaaggataaggctggcaacgcagatcggatcaagccttgtaggagtgctgtacattcttgacgagccgtccatcggcctgcatcagcggggaaaaccggcggctaattga

SEQ ID NO: 8858 - protein, 305 aa, Unknown
  Obtained from environmental sample
  misc_feature (1)..(305): Xaa is any amino acid
MVLSQNPDNSGKASGAKPPAENFFSQKNACPDCGVSIPELQPRLFSFNNPFGACPSCSGLGSKLEFDPDLVIPNPSLSFNEGGIVPYNPDSAWHHSRFESLAKHYKFSLDTPLKTLPKKTMDAILWGSRDEIKVRYNNREGTGHFEYQSRFPGVLEDLKRRYLETQSPGVKEWLEKFMSQKHCEDCEGKRLKPEVLGVTVAGKNIWELSSLSVTDSLKFFEAVKFNKNEKKIAYQILKEITARLGFMRNVGLDYLSLERKASTLSGGEAQRIRLATQIGSSLVGVLYILDEPSIGLHQRGKPAAN

SEQ ID NO: 8859 - DNA, 516 bp, Unknown
  Obtained from environmental sample
  misc_feature (1)..(516): n is a, c, g, or t
gtgagggtgataaagtttcgtcttgaagggggagaggaggagacgctcataaccgacataaaggagaagaagcaagggatgaaggcgttcaaatcgctgtatttcaaacgttggccgatagagacaaaatacaatcaaataaagaaccggcttgagatagagaacttttcagggaggctggcggacaacatacgccaggatttctacgcggccatggtattaacgaatttggtgggggattttgcggtggaagcgcaggtaatagttgaaaaggaacataaggggaaagacaataaataccaatataaagtaaacatgaaccatgccatagggatattaaaggaccggcttataataaccttatgtgaagaggacagaaaaaagcgcagagagatgtttgatgaaataaccgacatgctgaagaaaagaataatcccgatacggcccaatcgttctctccccagaaacataccccgtagtgtaaagtttcatcataatcaaaaatcaaactgttga

SEQ ID NO: 8860 - protein, 171 aa, Unknown
  Obtained from environmental sample
  misc_feature (1)..(171): Xaa is any amino acid
MRVIKFRLEGGEEETLITDIKEKKQGMKAFKSLYFKRWPIETKYNQIKNRLEIENFSGRLADNIRQDFYAAMVLTNLVGDFAVEAQVIVEKEHKGKDNKYQYKVNMNHAIGILKDRLIITLCEEDRKKRREMFDEITDMLKKRIIPIRPNRSLPRNIPRSVKFHHNQKSNC

SEQ ID NO: 8861 - DNA, 561 bp, Unknown
  Obtained from environmental sample
  misc_feature (1)..(561): n is a, c, g, or t
ttgtggctcaatccctgttttgactcgcctttcaaagacgcgggttacgatgtgcgggattacaaaaaggttgcgccccgctatggcagtaacgaggatctgtttcaactttttgacgaggctcacaagcgggatatgcgtgtgctattggatcttgttccgggccacacttccgaagaacacccgtggtttctcgaaagcaaaaaagcctcgccgtgcgcagaattaaaaaaccgctatatctggaccaatagctggttcttctgggggcttgaaggcctgaagtttatcgccggcgaggcggagagggatggctgttacattatcaactttttcaaatcacagcccgccctcaattacggtttcctcgaacgccgtgaaaaatggcagttgccgccagagcatccggactgtgttgccacgcgggaggccctcaaggacgttatgcgattctggctacggggcgataaaggccgtggctgcgacgggttccgtgtagacatggccgattcacttgtgaagtttgatagccccgaaaaaagctccactagtactctgtaa

SEQ ID NO: 8862 - protein, 186 aa, Unknown
  Obtained from environmental sample
  misc_feature (1)..(186): Xaa is any amino acid
MWLNPCFDSPFKDAGYDVRDYKKVAPRYGSNEDLFQLFDEAHKRDMRVLLDLVPGHTSEEHPWFLESKKASPCAELKNRYIWTNSWFFWGLEGLKFIAGEAERDGCYIINFFKSQPALNYGFLERREKWQLPPEHPDCVATREALKDVMRFWLRGDKGRGCDGFRVDMADSLVKFDSPEKSSTSTL

SEQ ID NO: 8863 - DNA, 309 bp, Unknown
  Obtained from environmental sample
  misc_feature (1)..(309): n is a, c, g, or t
ttgaacacgcatacaatttcttcgctgtatgaagccttcccgcctgagaaagcgttccgtcttgcaggacggcttgaaattcattttacaccgaaacatggaagctggcttaacatagcggaaattgagctgtcctcaatggccgcgcaatgcttgggccaaaggcgcattcctggaattaattccttgaatgaggaactcgctgcctggcatgctaagcgcaaccaaaaccagaagggtgttgactggcattttacaaccgatgaagcgcgaatcaaactaaagaggctctatcccataattgtgtaa

SEQ ID NO: 8864 - protein, 102 aa, Unknown
  Obtained from environmental sample
  misc_feature (1)..(102): Xaa is any amino acid
MNTHTISSLYEAFPPEKAFRLAGRLEIHFTPKHGSWLNIAEIELSSMAAQCLGQRRIPGINSLNEELAAWHAKRNQNQKGVDWHFTTDEARIKLKRLYPIIV

SEQ ID NO: 8865 - DNA, 387 bp, Unknown
  Obtained from environmental sample
  misc_feature (1)..(387): n is a, c, g, or t
atgaaaaaatcaatttttattacgttatttgtaattacgtttgcttttcaaccgttgtttgctaatgggatacaacagggtgcgcaaaacaccggtcttgttcagggtaagggacaggcaaaatatgtgtttctgtttattggtgacggtatgtcaatgtcgcagatcagcgcggcggaagtattttcaactgcgcgttcttccagtgatatagcgattacaaaacttggatttacccaattcccggtatcgggactggcgaccacttatgacgcgggaacgtttattactgactcagcgtcggcggggactgctatcgctacaggcaataaaacattaagcggcgttatcaatatggacgcngggaaaactaaaaaattaagctaa

SEQ ID NO: 8866 - protein, 128 aa, Unknown
  Obtained from environmental sample
  SIGNAL (1)...(21)
  misc_feature (1)..(128): Xaa is any amino acid
MKKSIFITLFVITFAFQPLFANGIQQGAQNTGLVQGKGQAKYVFLFIGDGMSMSQISAAEVFSTARSSSDIAITKLGFTQFPVSGLATTYDAGTFITDSASAGTAIATGNKTLSGVINMDAGKTKKLS

SEQ ID NO: 8867 - DNA, 477 bp, Unknown
  Obtained from environmental sample
  misc_feature (1)..(477): n is a, c, g, or t
atgtaccggagaagaataaataataaattgaaaataaaaaataaaaaattaaatgatttattaacgcgattttccttcctgggcaattataaggagtctgggaaggataccgtttttattgtcgtggcaagttttttaacaattattgccttgttgatacctaccggttttgaagggagcggagtttactcaaacgctatacgcgcaaaagtaaaggtcgtcgaagtaaataatgaaaggcttaaaataatcggtccagtcaggcagggggaacaacagattgaagtggaaatactttcaaagcgtttcaggggacagattcactatacgtcaaataacatgatcggtaaaatggagcttgataaggcttttgtcaaaggcaatatagcttttgcggtaattaatttgactgaaaatggtgaaattgcaagcgttcaaatcatcgatcattaccgcactgacaagactatattctga

SEQ ID NO: 8868 - protein, 158 aa, Unknown
  Obtained from environmental sample
  misc_feature (1)..(158): Xaa is any amino acid
MYRRRINNKLKIKNKKLNDLLTRFSFLGNYKESGKDTVFIVVASFLTIIALLIPTGFEGSGVYSNAIRAKVKVVEVNNERLKIIGPVRQGEQQIEVEILSKRFRGQIHYTSNNMIGKMELDKAFVKGNIAFAVINLTENGEIASVQIIDHYRTDKTIF

SEQ ID NO: 8869 - DNA, 321 bp, Unknown
  Obtained from environmental sample
  misc_feature (1)..(321): n is a, c, g, or t
ttgtgtatgcctggggtagaatcgggattgaaagccgccccaggtaaaaaaaacataaggagtttaggaatggatgttcaaaaagcgttgtcagtggaagaagcggcgatttttataggattttctaaagcgtatctctataagcttgttcacctgaagaagattccgcattacaaacccaatggcggcaaggttttcttcaaacaatgtgatcttgaggcgttcgtattcagggggcggtgcgccgtagactacgaactatcggaaaaagctgaagctatgttaaacggagaggcagcatttaaaaaaaccaagcggtaa

SEQ ID NO: 8870 - protein, 106 aa, Unknown
  Obtained from environmental sample
  misc_feature (1)..(106): Xaa is any amino acid
MCMPGVESGLKAAPGKKNIRSLGMDVQKALSVEEAAIFIGFSKAYLYKLVHLKKIPHYKPNGGKVFFKQCDLEAFVFRGRCAVDYELSEKAEAMLNGEAAFKKTKR

SEQ ID NO: 8871 - DNA, 447 bp, Unknown
  Obtained from environmental sample
  misc_feature (1)..(447): n is a, c, g, or t
atgccacagcgccgaaggcggtcaaagacccggccaagccagaccaaaccgccgcgcccaagcaaaccaaggccccggcgcaggcagcccaggcagccgcgtcgaagcccgcacagaccgcggcgccgagcccaacccagaagcccacccaggcggacaaatccgccacccccaagagccagggccccaaaccagcgcaaaagcccgacaaagacaaagcgcaggccaccgagggcgcaccaaaaaaagccgcgaagcagcctgtccagaagccactgccgaagcccgcgcaaaaaccagcgccaaaaaccacgcacaagccagcgccaaagcacgcgcgcgtgccagcgcacttggcgcagctgcccgctttcctcgaaaacccggatgtcacagacttcatcggccgcatggtggttacgcacggtttcagcgcggactccctaa

SEQ ID NO: 8872 - protein, 148 aa, Unknown
  Obtained from environmental sample
  misc_feature (1)..(148): Xaa is any amino acid
MPQRRRRSKTRPSQTKPPRPSKPRPRRRQPRQPRRSPHRPRRRAQPRSPPRRTNPPPPRARAPNQRKSPTKTKRRPPRAHQKKPRSSLSRSHCRSPRKNQRQKPRTSQRQSTRACQRTWRSCPLSSKTRMSQTSSAAWWLRTVSARTP

SEQ ID NO: 8873 - DNA, 954 bp, Unknown
  Obtained from environmental sample
  misc_feature (1)..(954): n is a, c, g, or t
ttgggcggaagtcaaattattcgtcatgtcatccaccgtctgtccgacgttccggagacgccctttacggcgagttcgaagtcgtcggggttggaggcgctctgtttggccacgtctaacgagatcagttcgtcttggtacatctgcaagagcgactggtcgaaagactgcgagccgtactgcgtgtggccgtcgcttatggctgggaggatcatgtggctcttctccgggttcagtatgtactcggccacggcggcgtggtttatcaggatttcgcaggccggtatgcggcctttgccgtccattctggggagaaggcgcagcgatatgatggccactaggacgtttgagaggactaagcgtatttggtcgtgctggtgcggggggaagaacgagattatgcgggtgatggtctccgtggcgttcattgtgtgcagggtgctcatgaccaagtggccggtgtcggcggcgctcatggcggtctcgatggtttcgcagtcgcgcatctcgcctatgaggatgatgtccgggtcttggcggaaacaggcgcgcagggcgttgttgaaagagggcgcgtcggagcctatctcccgttgggcgataatgctgcgtttgtcgcggtgcaggaactctatggggtcttctatggtaactatattgacggacgtgctggagttgatgtggtctatcatggaggccaagagcgtcgacttgccgcttccggtggtgcccgtgacaaggatcatgccgcgttttttcatggcgatgtccatgatgacgctcggcagggcgagttcggcgaagttgggcacctcgaccttgatggagcggacggccatggctggggttccgcgctggcggaaggcgtttatcctgaagcgtccgacgccggtcagtttggcgggcgagtctatctcggagtcgcgctggacttgttgtactgttccggcgtaa

SEQ ID NO: 8874 - protein, 317 aa, Unknown
  Obtained from environmental sample
  misc_feature (1)..(317): Xaa is any amino acid
MGGSQIIRHVIHRLSDVPETPFTASSKSSGLEALCLATSNEISSSWYICKSDWSKDCEPYCVWPSLMAGRIMWLFSGFSMYSATAAWFIRISQAGMRPLPSILGRRRSDMMATRTFERTKRIWSCWCGGKNEIMRVMVSVAFIVCRVLMTKWPVSAALMAVSMVSQSRISPMRMMSGSWRKQARRALLKEGASEPISRWAIMLRLSRCRNSMGSSMVTILTDVLELMWSIMEAKSVDLPLPVVPVTRIMPRFFMAMSMMTLGRASSAKLGTSTLMERTAMAGVPRWRKAFILKRPTPVSLAGESISESRWTCCTVPA

SEQ ID NO: 8875 - DNA, 816 bp, Unknown
  Obtained from environmental sample
  misc_feature (1)..(816): n is a, c, g, or t
atggccgtccgctccatcaaggtcgaggtgcccaacttcgccgaactcgccctgccgagcgtcatcatggacatcgccatgaaaaaacgcggcatgatccttgtcacgggcaccaccggaagcggcaagtcgacgctcttggcctccatgatagaccacatcaactccagcacgtccgtcaatatagttaccatagaagaccccatagagttcctgcaccgcgacaaacgcagcattatcgcccaacgggagataggctccgacgcgccctctttcaacaacgccctgcgcgcctgtttccgccaagacccggacatcatcctcataggcgagatgcgcgactgcgaaaccatcgagaccgccatgagcgccgccgacaccggccacttggtcatgagcaccctgcacacaatgaacgccacggagaccatcacccgcataatctcgttcttccccccgcaccagcacgaccaaatacgcttagtcctctcaaacgtcctagtggccatcatatcgctgcgccttctccccagaatggacggcaaaggccgcataccggcctgcgaaatcctgataaaccacgccgccgtggccgagtacatactgaacccggagaagagccacatgatcctcccagccataagcgacggccacacgcagtacggctcgcagtctttcgaccagtcgctcttgcagatgtaccaagacgaactgatctcgttagacgtggccaaacagagcgcctccaaccccgacgacttcgaactcgccgtaaagggcgtctccggaacgtcggacagacggtggatgacatga

SEQ ID NO: 8876 - protein, 271 aa, Unknown
  Obtained from environmental sample
  DOMAIN (2)...(179): Type II/IV secretion system protein
  misc_feature (1)..(271): Xaa is any amino acid
MAVRSIKVEVPNFAELALPSVIMDIAMKKRGMILVTGTTGSGKSTLLASMIDHINSSTSVNIVTIEDPIEFLHRDKRSIIAQREIGSDAPSFNNALRACFRQDPDIILIGEMRDCETIETAMSAADTGHLVMSTLHTMNATETITRIISFFPPHQHDQIRLVLSNVLVAIISLRLLPRMDGKGRIPACEILINHAAVAEYILNPEKSHMILPAISDGHTQYGSQSFDQSLLQMYQDELISLDVAKQSASNPDDFELAVKGVSGTSDRRWMT

SEQ ID NO: 8877 - DNA, 903 bp, Unknown
  Obtained from environmental sample
  misc_feature (1)..(903): n is a, c, g, or t
atgcgtgttgaacctgctcaattggacgagttgcttcacccgatttgcgaccctaaaacggaagcaacggcgaaattgctttgcaagggtttgccggcaggtccgggcgcagcagtgggcaaagcggtattttccgcagaaaccgctgtagaatggacacgtcgtggtgaaaaagtgttgttggttcgcaaagaaacgaaccctgaagatgtggacggtatgcgtgtttccgatggtattctcaccgctttgggcggaatgacctcgcacgcggctcttgtggctcgcggttggggaaaatgctgcatcgtgggcgctggtacgttggatgtgcacgaagataaaaaattggcctacgtgaaaggtacggatatcgtgattaaagaaggcgatattttgacgttgaatggaacgaaaggccatgcttacgagggcgcattgaaattgatggaatcatctgaaaatccgcgtttccaagccttcatgaaaatggtggacaaataccgcacaatgggcgttcgcaccaatgccgaaacggccgaagatgctgctttggcacgcagtttcggcgcagagggcatcggtctgttccgcactgaacacatgttctacggaaaaggcgcagaccagccgttgttcatcttgcgtaaaatgattttgagcaccagcgatgccgaacgtcaaaaagccatcaacgaactcgaaccgttcgtgaaaaaagatatgaaagacacgatggtggcgatggacggactgccccgtaccttccgcttgcttgacccgccgttgcacgagttcgctccgcaaactccccgacaacaggaagaaatcgccaaagtattgggtattccccccgcagaagtggccaaacgcgtagatgctttgcacgaaaccacccgatga

SEQ ID NO: 8878 - protein, 300 aa, Unknown
  Obtained from environmental sample
  DOMAIN (152)...(300): PEP-utilising enzyme, TIM barrel domain
  misc_feature (1)..(300): Xaa is any amino acid
MRVEPAQLDELLHPICDPKTEATAKLLCKGLPAGPGAAVGKAVFSAETAVEWTRRGEKVLLVRKETNPEDVDGMRVSDGILTALGGMTSHAALVARGWGKCCIVGAGTLDVHEDKKLAYVKGTDIVIKEGDILTLNGTKGHAYEGALKLMESSENPRFQAFMKMVDKYRTMGVRTNAETAEDAALARSFGAEGIGLFRTEHMFYGKGADQPLFILRKMILSTSDAERQKAINELEPFVKKDMKDTMVAMDGLPRTFRLLDPPLHEFAPQTPRQQEEIAKVLGIPPAEVAKRVDALHETTR

SEQ ID NO: 8879 - DNA, 843 bp, Unknown
  Obtained from environmental sample
  misc_feature (1)..(843): n is a, c, g, or t
atgggcgatattattacgttaagaggacgtaacttcggcgcggcgcgggatggagcctatgtaagtatagccggtatcatgccgactaactcatcgtattatacgtggcaggacgatcttattctttttaggataccagaacatggtgaatcgggacttgtttttgtgtatgtaaaagggaaaaaaagcaacggcgttcttttttccaattcggctgccgtaccaaggaagattgaaggcgaagattttggtatggaaccaaaaatcgccgttgtaagccctcagacaggcgcgccgggaacattaataacaattacaggcaataactttggcgcgtcaagggaaaacgcgggcgtttttttcccatgggattatgaatcgctctctattaatccctatgttgtaacagagccggaatttatagaagtatccgagacagaacttggttatgaagcatggaacgcgcacgaaatccgtattcgtcttccagacggagctgttagcggcggtcttaaaataaaaacacctaacggtgaatcacggtctgttttctttgatgttacgggcaaacccggttataaaaattttaaggacaaacgaagttacactataagttattccgtagatgtaaaaattaacgaagccacaaggccaaatgccctgtacctctggattcctctgcctgtaatatccgcttcacagagaaatgtaaaacttgtctctcgcagtatttctccatttgtagaanattacagaggggtcagtctttttaaattggataaccttgcgattggctcagccacacgatcaacctttcttttaatggtgaagtatacgcggtag

SEQ ID NO: 8880 - protein, 280 aa, Unknown
  Obtained from environmental sample
  misc_feature (1)..(280): Xaa is any amino acid
MGDIITLRGRNFGAARDGAYVSIAGIMPTNSSYYTWQDDLILFRIPEHGESGLVFVYVKGKKSNGVLFSNSAAVPRKIEGEDFGMEPKIAVVSPQTGAPGTLITITGNNFGASRENAGVFFPWDYESLSINPYVVTEPEFIEVSETELGYEAWNAHEIRIRLPDGAVSGGLKIKTPNGESRSVFFDVTGKPGYKNFKDKRSYTISYSVDVKINEATRPNALYLWIPLPVISASQRNVKLVSRSISPFVEXYRGVSLFKLDNLAIGSATRSTFLLMVKYTR

SEQ ID NO: 8881 - DNA, 939 bp, Unknown
  Obtained from environmental sample
  misc_feature (1)..(939): n is a, c, g, or t
gtgctcaattatacggaagactttacccgccgcgttatagaaccttttatcgaaagttatgaaaacggagaaacccccaacccctgtattgaatgcaaccgttatctgaaattttcgcttctgcttcgccgtgcgctggaactggaagcggaaaaacttgttaccggtcattatgcccggatagaaaaatcaggcgatcgctggttgttgaaaaagggggtagacgcgcataaagaccaaagttatgtgctttacatgatgagccaaaagacgctttcgcatacgcttttccctcttggagaattgacaaaggagaaggcgcgagagattgccgcggcaaaaggtctttccaacgcggataaagaagaaagtcaggatatatgctttgtcgataacggggattatgccggttttatcgaaaactatacgggaaagacataccccgaaggagacataaccgatgccgaaggaaatgtccttggccgacaccacggtcttattcgctacacattaggccagcggcgcggcacgggagtagcccgcaattatcctgtttatgttgcggcaaaaaacaccgccgcaaatacgctggtgttaggcgataattcgtctctgtattcgtcaagtttcactgtgcggcaaataaacctaatcgcctgcgaaaatctttttcagccgcgccgccttgcagttaaaatccgttatttgcaaaaagaacagcaggcgatggtagagcagaccgcccccgataccatccacgttgagtttgaagagcctcagcgggcaattacccccggacaagccgcggtattttatgacggggacgttgtggtangcggggcgcacattgaggggtatactaataatcaccgtaccggaaacccatttccggaaagatattttcaattttcaagattttgcggagcgcgatcattttag

SEQ ID NO: 8882 - protein, 312 aa, Unknown
  Obtained from environmental sample
  DOMAIN (1)...(283): tRNA methyl transferase
  misc_feature (1)..(312): Xaa is any amino acid
MLNYTEDFTRRVIEPFIESYENGETPNPCIECNRYLKFSLLLRRALELEAEKLVTGHYARIEKSGDRWLLKKGVDAHKDQSYVLYMMSQKTLSHTLFPLGELTKEKAREIAAAKGLSNADKEESQDICFVDNGDYAGFIENYTGKTYPEGDITDAEGNVLGRHHGLIRYTLGQRRGTGVARNYPVYVAAKNTAANTLVLGDNSSLYSSSFTVRQINLIACENLFQPRRLAVKIRYLQKEQQAMVEQTAPDTIHVEFEEPQRAITPGQAAVFYDGDVVVXGAHIEGYTNNHRTGNPFPERYFQFSRFCGARSF

SEQ ID NO: 8883 - DNA, 387 bp, Unknown
  Obtained from environmental sample
  misc_feature (1)..(387): n is a, c, g, or t
atgactgttttatattctttcgccgcaatgttgaacggtcgagtcgccaatacttgtaactttagcgaagactacgttgggtacgccaccaagttcggcgacggcgcaggagatttcagcccgctgtctcacctgaccgtttccgaagttaaggccatcgccagggttttaggggtgccggaaaagtttatcgaaaaaactccggaagacgggctctgcggtaagagcgacgaagaaaatttaggctttacttacgccgtactggacaaatacattcgagagggcgtttgcgaagatagctctatcgagaataaaattaaggcgatgcgcaagaataaccttcataaactccagccgcttccatcgtttccctatgaacctgtttag

SEQ ID NO: 8884 - protein, 128 aa, Unknown
  Obtained from environmental sample
  DOMAIN (1)...(121): NAD synthase
  misc_feature (1)..(128): Xaa is any amino acid
MTVLYSFAAMLNGRVANTCNFSEDYVGYATKFGDGAGDFSPLSHLTVSEVKAIARVLGVPEKFIEKTPEDGLCGKSDEENLGFTYAVLDKYIREGVCEDSSIENKIKAMRKNNLHKLQPLPSFPYEPV

SEQ ID NO: 8885 - DNA, 531 bp, Unknown
  Obtained from environmental sample
  misc_feature (1)..(531): n is a, c, g, or t
gtgctggaaccgttgggaatgagagaaacctgttttaatccgcctgagtctcttattgaacgtattgcgcccaccgaggagtgtcccattcgcggcaggcttatccgcggcgaagtgcatgatgagaacgcgtggatcatgggcggggtaagcggcaacgcgggcattttttcctgcgtcccggatatgacccgaatcggcgctgccatgctcgcctctctggaaaacggcgcctttcttcataaggcaaccgccaaattgatgacctttaaccatacgcctggcatgggcgagaaccgcggtttgtgctgggtgattgcgggtccgggttattcatgcggggatctcttttctcctgccagcttcggccatacaggctttacgggaaccagcctctggatagatcccgaaagaaaactttacggcctgcttctttccaaccgtatacatcccaagagggacaacacaagactattcagaacacggaacattttttataacctcacggttctggactatgatcatggttga

SEQ ID NO: 8886 - protein, 176 aa, Unknown
  Obtained from environmental sample
  misc_feature (1)..(176): Xaa is any amino acid
MLEPLGMRETCFNPPESLIERIAPTEECPIRGRLIRGEVHDENAWIMGGVSGNAGIFSCVPDMTRIGAAMLASLENGAFLHKATAKLMTFNHTPGMGENRGLCWVIAGPGYSCGDLFSPASFGHTGFTGTSLWIDPERKLYGLLLSNRIHPKRDNTRLFRTRNIFYNLTVLDYDHG

SEQ ID NO: 8887 - DNA, 381 bp, Unknown
  Obtained from environmental sample
  misc_feature (1)..(381): n is a, c, g, or t
atgatcatggttgaaaatttacaaaactcttcatcgaataccatttccgctgaaacccttgcccaattcaccaccgagcagcggaacgaagcgtctttggacattgactccaaaagcgctttggaaattgtttctataattaacaacgaagataaaaaagtccctgctgccgtaacacagatactgagcgaaatcgcggccctggtggatgatattgttgccgctttcaaaaaaggcggcaggctcatttatatcggcgctggaacttcangacgtttgggcgtactggacgcctcggaatgtccccccacctacggggtggagccggacatggtcattgggctgattgcgggcggacaggaagccctacaaagtccatga

SEQ ID NO: 8888 - protein, 126 aa, Unknown
  Obtained from environmental sample
  misc_feature (1)..(126): Xaa is any amino acid
MIMVENLQNSSSNTISAETLAQFTTEQRNEASLDIDSKSALEIVSIINNEDKKVPAAVTQILSEIAALVDDIVAAFKKGGRLIYIGAGTSXRLGVLDASECPPTYGVEPDMVIGLIAGGQEALQSP

SEQ ID NO: 8889 - DNA, 804 bp, Unknown
  Obtained from environmental sample
  misc_feature (1)..(804): n is a, c, g, or t
ttgttccattttcgcgcgggtttaatttttctaaatggtttgaatcgcgtacttttnaaggatattgattttaaaaagttcggcgaacaggattttattgatgtaaaaagtttgggtgccgatgttatccgtcttcccgtcgcttttcataattttattcttggcgaaaaagatcatactcttgaacctgaattgttaaaataccttgatgctgttgccgattgggctgaaaaacatcaaatttaccttattattgacaatcattcgtttcatccagttaatcctacggacgacaatattgataagatactcattccggtatgggaacagattgccggacattttaaagatcgcggtaaatatatgttatacgaaatattaaacgagcctcatggcattgccgatgagcgttggggtgaaatccaatggaaagcggtagaagcgatacgaaagtttgataaagagcgaaatattattgtgggcggtacaaattacaactcaatcgagaaattatttcaaattcccgtatatgccgataaatatttattttatacttttcatttttacgatcctcatctttttacccatcaaggggcgacatggaataaaccgtctcttgatccgctatctaatcttccgtttcccgcgcctttaaattttattccacaagtccatgaaacatttaaaggcacatgggtggaagagtccttaaaaagatatgaacaggattcaaagttgactaaattaagcgaaacgctgaaagggcggttcttttccaaagacaggcaagctcggccgatctga

SEQ ID NO: 8890 - protein, 267 aa, Unknown
  Obtained from environmental sample
  DOMAIN (16)...(264): Cellulase (glycosyl hydrolase family 5)
  misc_feature (1)..(267): Xaa is any amino acid
MFHFRAGLIFLNGLNRVLXKDIDFKKFGEQDFIDVKSLGADVIRLPVAFHNFILGEKDHTLEPELLKYLDAVADWAEKHQIYLIIDNHSFHPVNPTDDNIDKILIPVWEQIAGHFKDRGKYMLYEILNEPHGIADERWGEIQWKAVEAIRKFDKERNIIVGGTNYNSIEKLFQIPVYADKYLFYTFHFYDPHLFTHQGATWNKPSLDPLSNLPFPAPLNFIPQVHETFKGTWVEESLKRYEQDSKLTKLSETLKGRFFSKDRQARPI

SEQ ID NO: 8891 - DNA, 666 bp, Unknown
  Obtained from environmental sample
  misc_feature (1)..(666): n is a, c, g, or t
atgatcagatcggccgagcacccagattttaaacctgccgaattcgacaggattaaaagtcaatcaggtttgaatagttatcgtatcagcgtaaaagagtggtgtgaaaaaactaacgctattggcattcaatctcgtgccggacgctatggcggaacttttgctcataaggacatcgcctttgaatttggcatgtggatttcccccgaatttaagatttatctcataaaggaatttcaaaggcttaaagaacaggagtataaacagcttggctgggatattcgccgtaatttgacaaaactaaactatcgaattcatacagacgcgataaaattgaacctaattcctaaaactattaccaaagaacaggcaagcttcaaatatgcggaagaagcggacatattgaatgtcgccttgtttggaatgacagcctccgattggcgaaaacaaaacccaaaactggacggaaacatacgcgattatgcggatatttcccaactggtctgccttgcaaaccttgaatccctgaacgcacacctcatcaacgatggagtcccacaagaaaagcgaattatagcgttaaacaaaacagccatttcccaaatgaaaattcttaccgccgaatatggcgtaaggaaactggaaagcaagcccataaaaaagtaa

SEQ ID NO: 8892 - protein, 221 aa, Unknown
  Obtained from environmental sample
  misc_feature (1)..(221): Xaa is any amino acid
MIRSAEHPDFKPAEFDRIKSQSGLNSYRISVKEWCEKTNAIGIQSRAGRYGGTFAHKDIAFEFGMWISPEFKIYLIKEFQRLKEQEYKQLGWDIRRNLTKLNYRIHTDAIKLNLIPKTITKEQASFKYAEEADILNVALFGMTASDWRKQNPKLDGNIRDYADISQLVCLANLESLNAHLINDGVPQEKRIIALNKTAISQMKILTAEYGVRKLESKPIKK

SEQ ID NO: 8893 - DNA, 801 bp, Unknown
  Obtained from environmental sample
  misc_feature (1)..(801): n is a, c, g, or t
gtgaaccgcaagcgtgtggaaaaatacccttacagctttgtctggttcggagagcgcatacgctggggcaaactcagttacgttgtacgtccggcctacatgatgtcattggtagacaaatttacgcgaaagtccgaaaattttaacctgcgcaatattgcgttcagaaacatgggagcaaaactttcgggcgactatcacgaaaaaaggcttgtaagccgtgaagcttcaatgaaaatgcggcagaaaaaactaaatgaattatcgggtaagggaaccggcattatgctggatttaggttatgtgtacgccgcgccctgggccgattttattaccgacataactcttgatgaccaaaatttcggaatcactgatgtttcggtgcccttttaccagattgttcttcacggacttgtgccgtatacgggaccggcgataaaccttgccgaggattacacaaagaatttattgaaaacaatagaaagcggagccggactgttctttagttttatgaaagaagatacaaccgaactgcaggaaacaaagttcaggcaattttacgccaacgaatatgaaaaatggtcgccggacgccaatgctctgtataaaaaatttacaattgattttaacggactgtatgatcaagctattaccaatcatatcattatatcccccggatttacgattaccgaatatgaagacggaaggcgtgtcatagtgaataatacggacaacgccgctgattataacggcattgttttcgatgcgcgcagttacgctgtgctacggagggataattaa

SEQ ID NO: 8894 - protein, 266 aa, Unknown
  Obtained from environmental sample
  misc_feature (1)..(266): Xaa is any amino acid
MNRKRVEKYPYSFVWFGERIRWGKLSYVVRPAYMMSLVDKFTRKSENFNLRNIAFRNMGAKLSGDYHEKRLVSREASMKMRQKKLNELSGKGTGIMLDLGYVYAAPWADFITDITLDDQNFGITDVSVPFYQIVLHGLVPYTGPAINLAEDYTKNLLKTIESGAGLFFSFMKEDTTELQETKFRQFYANEYEKWSPDANALYKKFTIDFNGLYDQAITNHIIISPGFTITEYEDGRRVIVNNTDNAADYNGIVFDARSYAVLRRDN

SEQ ID NO: 8895 - DNA, 900 bp, Unknown
  Obtained from environmental sample
  misc_feature (1)..(900): n is a, c, g, or t
ttggtgaataaaacagttcacaataaagctgtttttgtatataattataaaatgaacggcttattactcttgttgatttccgtaattacgcttttatttgcatatttgctttacggcagatttcttgccaaaaaatggggaattgacccctcccgaaaaaccccggcttgtgaaatggaagacggacaggaatatgttcccacatccggggcggtgctatttggacatcaattttcgtctattgccggggcagggccgataaacggacctattatcgccgcaatgttcggatgggttccagcgctgttatggcttctttttggaagcgtcttcttcggcgcggtgcatgatttcgcggcgctttacacatcggttaaaaacaaaggtaaatcaatcggatatgtaattgagttatatgtggggaaaacaggcaaacgtcttttcctgatttttgtatggcttttttcgatacttatcgcgtcagcttttgcggacatagtagcgggcacatttgacggatttaacgaggttagaacgcgtaacggaataagcgcctctgtagcgtccagttcaagcttttttataatcgcggcgataattcttggtttatttatccgcaggcgcaaggcttccggtttggcaagcggcatcatcgcaatcgatcttcttattatctgcattgtccttgggattttttttcctatttatatggaaaaatcaatctggctctacctcatctttgcctatatcttcatagcttcaattcttcccgtgtggtcattaggccagccccgtaattatcttaattcttttttattgatatctatgatgctggcggcttttattggagtatttttaccgcgcccccatttcaatccccgcgttcacggcttaatataa

SEQ ID NO: 8896 - protein, 299 aa, Unknown
  Obtained from environmental sample
  DOMAIN (18)...(299): Carbon starvation protein CstA
  misc_feature (1)..(299): Xaa is any amino acid
MVNKTVHNKAVFVYNYKMNGLLLLLISVITLLFAYLLYGRFLAKKWGIDPSRKTPACEMEDGQEYVPTSGAVLFGHQFSSIAGAGPINGPIIAAMFGWVPALLWLLFGSVFFGAVHDFAALYTSVKNKGKSIGYVIELYVGKTGKRLFLIFVWLFSILIASAFADIVAGTFDGFNEVRTRNGISASVASSSSFFIIAAIILGLFIRRRKASGLASGIIAIDLLIICIVLGIFFPIYMEKSIWLYLIFAYIFIASILPVWSLGQPRNYLNSFLLISMMLAAFIGVFLPRPHFNPRVHGLI

SEQ ID NO: 8897 - DNA, 330 bp, Unknown
  Obtained from environmental sample
  misc_feature (1)..(330): n is a, c, g, or t
atggatcttttaaacgccatggaaaacgatcttggagtaaaactaaaagaattaaaagttgacggcggcgcgagcagggataaattccttatgcagtttcaggcggatatgtgccgcgcgcggattatacgccctattgtccgcgaaacaacggctctcggcgcggcgtgccttgccggaattaccgttggtttttggaaagacttgaacgaaatcaaaaaatgctggcgggaagacactgttttttcccccgaaatggacaatgaaaaacgcgataaattaatagccggctggcataaagcggtggaaagaagccgcggctgggcttga

SEQ ID NO: 8898 - protein, 109 aa, Unknown
  Obtained from environmental sample
  misc_feature (1)..(109): Xaa is any amino acid
MDLLNAMENDLGVKLKELKVDGGASRDKFLMQFQADMCRARIIRPIVRETTALGAACLAGITVGFWKDLNEIKKCWREDTVFSPEMDNEKRDKLIAGWHKAVERSRGWA

SEQ ID NO: 8899 - DNA, 558 bp, Unknown
  Obtained from environmental sample
  misc_feature (1)..(558): n is a, c, g, or t
atgaaatacttcaatcctgcgaatttagccattattgcctgtcccggcggggatatatttgcaaatgaagtaatccagcaccttcgccatagataccgtttaagccgcaaacaaacagtagaagagctttccaaacgttacaatatagatgctgagaggattggtcttcaaatagacctgataaacaagattgtcacgcggggaacattatcccaaagcggttctgaaagaaataacggacctgttaaggttcccgtcaaatttacattatttccaaacggcgaaataaaatccgaaattcaggaatctatccggggaaaagacgtttatatttttcaggatgttgaaaatcattatcctgtgaatttcgcgggcgagattgtaaataatttaaccacaaacgatcaccttatgacaatttttgttacggttgacgcggcgcggcaagcgggagcggagcggattacgcttgtaataccgaattatccctattcgcgccagcacaaggcaaagggaagggaagggcttaccgcgagcagaatagaaaaaatattttga

SEQ ID NO: 8900 - protein, 185 aa, Unknown
  Obtained from environmental sample
  misc_feature (1)..(185): Xaa is any amino acid
MKYFNPANLAIIACPGGDIFANEVIQHLRHRYRLSRKQTVEELSKRYNIDAERIGLQIDLINKIVTRGTLSQSGSERNNGPVKVPVKFTLFPNGEIKSEIQESIRGKDVYIFQDVENHYPVNFAGEIVNNLTTNDHLMTIFVTVDAARQAGAERITLVIPNYPYSRQHKAKGREGLTASRIEKIF

SEQ ID NO: 8901 - DNA, 765 bp, Unknown
  Obtained from environmental sample
  misc_feature (1)..(765): n is a, c, g, or t
atgtttgttttttataagttagatgcaagacaaaaattgattttgtttttgctgtttacctttctggtttttcttgtgnacactttttcatctattgtctttttgttagtatcaattgttattatcagaattgcttcgggaataccttttaaggggattaaatatttaaaaaacctttcattgttagcgatatttattatttttatgcaaacgctctttggtaaaggcgaaaaatatatcgtaaacccgctttttcccgcctcgtttcccatatttggcggtactggttctcttaaatgggaaggattgttatttggcattgtaattatctgccgccttgccgcgttaatgcttattttaccggtattaactcaaacaacgcctcctaataaaataacaaggggattatgcgctcttggcgttaattatcgcgccgcgtttatcataacatcggcgttaaacttcattcctgtttttaacgcggaagctcaggtgattatggacgcgcaaaggctgcgcggactgcgtaaattcgggataaaatcctatataaacctgcttactcccctcatgttaggcgcaatgcagaaagcccaaatttcctcagtcgcgatggattccagagcgttcggcgtttataaaacaataacatggcttgaacagcccaaaatgaaaaaacaggatttcctttttcttttaggcagtattatttttttcacggttataatctttattaattcgggattaatcaatatatttaattaa

SEQ ID NO: 8902 - protein, 254 aa, Unknown
  Obtained from environmental sample
  DOMAIN (2)...(213): Cobalt transport protein
  misc_feature (1)..(254): Xaa is any amino acid
MFVFYKLDARQKLILFLLFTFLVFLVXTFSSIVFLLVSIVIIRIASGIPFKGIKYLKNLSLLAIFIIFMQTLFGKGEKYIVNPLFPASFPIFGGTGSLKWEGLLFGIVIICRLAALMLILPVLTQTTPPNKITRGLCALGVNYRAAFIITSALNFIPVFNAEAQVIMDAQRLRGLRKFGIKSYINLLTPLMLGAMQKAQISSVAMDSRAFGVYKTITWLEQPKMKKQDFLFLLGSIIFFTVIIFINSGLINIFN

SEQ ID NO: 8903 - DNA, 366 bp, Unknown
  Obtained from environmental sample
  misc_feature (1)..(366): n is a, c, g, or t
atgctggtgacgggtattgtaattatgcacaatatgaagaacactggggtaagcgtcggcgacggatttctgacggtaaaatctttgttttacgggaggaagatacctctcggcgaaattaatctcaatgaggttaagtctttgaatttaaaggaggaacgcgataaagattatcggataacgctcagaaccaacggtatcgggctgccgggatatttagtaggatggatgagattgcacaatggccataaggcgttggtttatataacagataaaacaaaagttgcttatatcccaacgacgaaatttgatgttttggtaagtacggacgatttcgagggcctgcgaaacgcgttgagcaaataa

SEQ ID NO: 8904 - protein, 121 aa, Unknown
  Obtained from environmental sample
  misc_feature (1)..(121): Xaa is any amino acid
MLVTGIVIMHNMKNTGVSVGDGFLTVKSLFYGRKIPLGEINLNEVKSLNLKEERDKDYRITLRTNGIGLPGYLVGWMRLHNGHKALVYITDKTKVAYIPTTKFDVLVSTDDFEGLRNALSK

SEQ ID NO: 8905 - DNA, 573 bp, Unknown
  Obtained from environmental sample
  misc_feature (1)..(573): n is a, c, g, or t
ttgccgccaaatccgaccgccggagagaagagtttttatatcaggctgcccgattctgccccgacgttaccggcgcaaaaagttcattacgatcccgcatataccgtaattggctatcccaacggagatgttgcgccggataagggggtttgtacggatgttgttatcagggcgtataggaaactcggcatagatctgcaaaaagaagttcatgaagatatgaagaccaattttgacaagtaccncaagaaatggggtctgaaaagaccggacacaaatattgaccatagaagagtaccaaatctcatgacgttttttgcgaagtatggaacggtaaaggaaaaaacgtataaaccggatgactacctgcccggcgacatcgtttgctgggacttgggcggaggaattacgcatataggaatcgtatcagggaaaaagtcttccgatgggcggagatatttaatcgttcacaacatcggcggcggacaggtgcttgaggattgtcttttcagattcgaaataatagggcattatcaatacgaaaagaagagcggcgctccatctaagccataa

SEQ ID NO: 8906 - protein, 190 aa, Unknown
  Obtained from environmental sample
  DOMAIN (4)...(180): Protein of unknown function (DUF1287)
  misc_feature (1)..(190): Xaa is any amino acid
MPPNPTAGEKSFYIRLPDSAPTLPAQKVHYDPAYTVIGYPNGDVAPDKGVCTDVVIRAYRKLGIDLQKEVHEDMKTNFDKYXKKWGLKRPDTNIDHRRVPNLMTFFAKYGTVKEKTYKPDDYLPGDIVCWDLGGGITHIGIVSGKKSSDGRRYLIVHNIGGGQVLEDCLFRFEIIGHYQYEKKSGAPSKP

SEQ ID NO: 8907 - DNA, 783 bp, Unknown
  Obtained from environmental sample
  misc_feature (1)..(783): n is a, c, g, or t
atggcggaattgaccaaagcccaggaagccatggaaaggatacaccttgaactggttcagtccgaaacggaaataaaaaacattctggataattttcgggaaacccactcccgcgatcttatggaatttgaggagaggacttttacaataaccgcgacaacaggcgaactaagggaaaaccttgccaggggcaggcaggccctgaaagacctgggggcggtgaacctggcggccccggaggaattcgcggaaacgaaggaacgcttcgattttctttccagccagcttgccgaccttaccgccgccagggcagaccttgaaaagcttacaacagagctcagaacagaatcgtccgctttattcatggcagcctacgacaaaataaaaaagaatttccacaatatatttcgcaggctttttggcggcggcagggcggaattgcgccttttggatctgaaccacgttctggaatccggaattgaaatctttgcccagccgcctgggaaaaagcttgaaaacatcaaccttctttcaggcggcgaaagatccatgaccgcggtagccctgctctttgccacctacctggtcaagccctcgcctttttgcctgctggacgaaatagacgccgctcttgacgaagaaaacgtaagccgttttacccagctccttcgggaattcggcagaaagagccagttcgtcgtcattacccacaacaaaagaacgatttcctgcgccaacacgcttttgggagtaaccatggaagagtctggcgttaccaaatga

SEQ ID NO: 8908 - protein, 260 aa, Unknown
  Obtained from environmental sample
  DOMAIN (48)...(254): ABC transporter
  misc_feature (1)..(260): Xaa is any amino acid
MAELTKAQEAMERIHLELVQSETEIKNILDNFRETHSRDLMEFEERTFTITATTGELRENLARGRQALKDLGAVNLAAPEEFAETKERFDFLSSQLADLTAARADLEKLTTELRTESSALFMAAYDKIKKNFHNIFRRLFGGGRAELRLLDLNHVLESGIEIFAQPPGKKLENINLLSGGERSMTAVALLFATYLVKPSPFCLLDEIDAALDEENVSRFTQLLREFGRKSQFVVITHNKRTISCANTLLGVTMEESGVTK

SEQ ID NO: 8909 - DNA, 816 bp, Unknown
  Obtained from environmental sample
  misc_feature (1)..(816): n is a, c, g, or t
ttgggagccgcggcgcaattcggcgtattcggcaccatgttctttgtcagcctcgccaacttcctgccccatgtggcctttaacctcagagaagcttgcgccgtttcaattatcggcggcgcggacggccccaccacgatatacatagccgcgaaacttgctccccatctattggctacagtagctgtggcggcctattcatacatggccctggttccaatcatacagccgcccattatgaaagcccttacaacaaaagaagagcggcttatcaggatgaaacaattaaggcccgtctcgcaaaaagaaaaagtcattttcccccttgtggtatttgtactctccgtacttctcatcccggcggcggcgcccctcatcggctgtttgatgttcggaaacttcctgcgtgaatgcggggttgtggaacggctttccaaaacagcgcaaaacgaacttctgaacattgtttcgctgttcctttcccttggcgtgggcagccagatgacccctgaaaaattccttaacccctcttcccttataatcgtggtgatgggcttggtcgccttctgcatcgccaccgcagccggcgtccttgtggccaagttcatgaatcttttccttaaagagaagatcaaccccctcatcggttcagccggcgtatccgcggttccgatggcggcgcgcgtttcanacaaggtgggcctggaatacgatccttcgaacttcctgctcatgcacgcgatgggccccaatgtggcgggcgttatcggaaacggcgatgccgcgggcgttatgattgcagtttatgcaaattag

SEQ ID NO: 8910 - protein, 271 aa, Unknown
  Obtained from environmental sample
  DOMAIN (1)...(270): Na+-transporting methylmalonyl-CoA/oxaloacetate decarboxylase, beta subunit
  misc_feature (1)..(271): Xaa is any amino acid
MGAAAQFGVFGTMFFVSLANFLPHVAFNLREACAVSIIGGADGPTTIYIAAKLAPHLLATVAVAAYSYMALVPIIQPPIMKALTTKEERLIRMKQLRPVSQKEKVIFPLVVFVLSVLLIPAAAPLIGCLMFGNFLRECGVVERLSKTAQNELLNIVSLFLSLGVGSQMTPEKFLNPSSLIIVVMGLVAFCIATAAGVLVAKFMNLFLKEKINPLIGSAGVSAVPMAARVSXKVGLEYDPSNFLLMHAMGPNVAGVIGNGDAAGVMIAVYAN

SEQ ID NO: 8911 - DNA, 642 bp, Unknown
  Obtained from environmental sample
  misc_feature (1)..(642): n is a, c, g, or t
atgcttgagtattacacaatgacggcgaattatatggattctctcgcgctgacagaggagatgttttcacacttagcaaaagattccgccattaccgttggcaactttgaacgcattaccgtagcggacgcgtttgcaaaatgggcagggtttgaccttttcgcggcggcaaaagaaggttcctccgccatggaaatacaagcgcgcaaacagggacttgaaccaatgcccggcatgaccgtccatcaactttacgatttgatttttatccacgccgtagaaccgcaattaaaagcagaaaaaccaatcgcgctccttgactaccccgcttttgtcccatgcctcgcaaaaaaatcgcctaacggacaaactgtagaacgctgggagttgtactacaacggcatagaactcgcaaattgctattcggaagaaaatgatccgcaagccgtaaaagaattttttataaacgaagaagcggaaaaaaacaaaaccgccattgtaaaacacaacgttgataatgattactggaaaatatttaaaaatttcccaccctgctccggcgtagcgatgggactcgacagattgattatggcgcttacaggaaaaacaaacattgacagggtactgccgtttattgtttag

SEQ ID NO: 8912 - protein, 213 aa, Unknown
  Obtained from environmental sample
  DOMAIN (1)...(212): tRNA synthetases class II (D, K and N)
  misc_feature (1)..(213): Xaa is any amino acid
MLEYYTMTANYMDSLALTEEMFSHLAKDSAITVGNFERITVADAFAKWAGFDLFAAAKEGSSAMEIQARKQGLEPMPGMTVHQLYDLIFIHAVEPQLKAEKPIALLDYPAFVPCLAKKSPNGQTVERWELYYNGIELANCYSEENDPQAVKEFFINEEAEKNKTAIVKHNVDNDYWKIFKNFPPCSGVAMGLDRLIMALTGKTNIDRVLPFIV

SEQ ID NO: 8913 - DNA, 669 bp, Unknown
  Obtained from environmental sample
  misc_feature (1)..(669): n is a, c, g, or t
gtgttcagcctggaactcgccctgcccgtcccgggcagacatcaggctttgaacgccgcagcggctatagcccttgccataaccctgctaaaaaaagaatccgcgggaagccctcaaagtcgaggagcccagagtcgaagcgatcttacgcagtttgcgataaaaaaagctctggaagaattcaaaggctcaaaacgcaggtcggaaattttaggatcagtaagcggcatccttttcatggatgattacggccaccacccgaccgcaattaaaacaactcttaatggcctaagggatttttatcacaccaggcggcttgtagtcagcttcatgtcccatacttataccaggaccgccgcgctgctggatgagttcgccgcttctcttgccgaagccgatatactgttcctccataagatttacgcgtcagcgcgcgagaaattcgacgggcatatcaacggcaaatccattatggaaaaaatcaaaagcctgcctgccaggaaagccgagttatattataccgatgagccgctggacgcgtttgttcaattaacaaacatcctaaagccaggggatctctttctcaccctgggcgcgggcagcaactggcctttgggagtaaagctctttgaatacttcagcggaatttcccatggggctcccaaatga

SEQ ID NO: 8914 - protein, 222 aa, Unknown
  Obtained from environmental sample
  DOMAIN (64)...(152): Mur ligase family, glutamate ligase domain
  misc_feature (1)..(222): Xaa is any amino acid
MFSLELALPVPGRHQALNAAAAIALAITLLKKESAGSPQSRGAQSRSDLTQFAIKKALEEFKGSKRRSEILGSVSGILFMDDYGHHPTAIKTTLNGLRDFYHTRRLVVSFMSHTYTRTAALLDEFAASLAEADILFLHKIYASAREKFDGHINGKSIMEKIKSLPARKAELYYTDEPLDAFVQLTNILKPGDLFLTLGAGSNWPLGVKLFEYFSGISHGAPK

SEQ ID NO: 8915 - DNA, 426 bp, Unknown
  Obtained from environmental sample
  misc_feature (1)..(426): n is a, c, g, or t
atgaaaacattggtattattttattcattttcagggaatacaaggaagctggcctctaaaaaaacggcggaaacaggagcggacattgaagaagtaagagaaacgaaaaaaatgtttgttttaaaagcgtatacagtaggcgcatacagggcaatgaaacgtggaaagacggagatacagccgataaaatcccagcttaacagttatgaaaagataattcttatggctcctgtttgggcaggtaatcctgcgcctgcgtttaacagcataattgagcagcttccggcaggcaaaaaagttgaacttgttatggtttccgccggaagcgggaccaagaatagcgccgaagggactaaaaaccttattactgcgcgcggatgtgaagttactgattatattgatataagaactatggcgaaaaaataa

SEQ ID NO: 8916 - protein, 141 aa, Unknown
  Obtained from environmental sample
  misc_feature (1)..(141): Xaa is any amino acid
MKTLVLFYSFSGNTRKLASKKTAETGADIEEVRETKKMFVLKAYTVGAYRAMKRGKTEIQPIKSQLNSYEKIILMAPVWAGNPAPAFNSIIEQLPAGKKVELVMVSAGSGTKNSAEGTKNLITARGCEVTDYIDIRTMAKK

SEQ ID NO: 8917 - DNA, 399 bp, Unknown
  Obtained from environmental sample
  misc_feature (1)..(399): n is a, c, g, or t
atggcgcggcgcggctattccggctacgaggtgcctgtgaactcgtcgacttccgacccgtggttgcgtttagacggtaaagcgctcttcaggttcgcgacggagagtttctcggctatggttcgggagctcatcataaagagcaagtggacacctgaagaggtgcgctgggtcgtcccccaccaagccaacgggcggatcatcagggcggcggcgcagaagagcggggtgccgttcgagcgcttctacctgaacatagaccgggtgggcaacacgtcgagcgcgagcattcccgtggcgctgtcggagatacagaacggcatgcagaagaaggacaaggtcatattctgcacggtgggcgcggggatcacggcggcgggattgtcgcttgagtggtaa

SEQ ID NO: 8918 - protein, 132 aa, Unknown
  Obtained from environmental sample
  DOMAIN (45)...(132): 3-Oxoacyl-[acyl-carrier-protein (ACP)] synthase III C terminal
  misc_feature (1)..(132): Xaa is any amino acid
MARRGYSGYEVPVNSSTSDPWLRLDGKALFRFATESFSAMVRELIIKSKWTPEEVRWVVPHQANGRIIRAAAQKSGVPFERFYLNIDRVGNTSSASIPVALSEIQNGMQKKDKVIFCTVGAGITAAGLSLEW

SEQ ID NO: 8919 - DNA, 378 bp, Unknown
  Obtained from environmental sample
  misc_feature (1)..(378): n is a, c, g, or t
ttgcttgtattccgccagaaacgggcacttaaataccctaaacttttgctcaatgccggcgctcaagtgaatctcatgncagaggacaggggttctaacgctctttttgacagcgctctnggagggaaaaaagaaattgtaaaagcccttattgatgccggggcggatatgaacattcaaagcaaggacggacagaccgctctggttgttgttgtcggcgccggagatgaggatattgttgaattattagccatggccggggctgatcctgacattaaagacgctctcggcgtcagcgcaagaaagtatgccgccattttcggcaacaaaagaatgctcagcatttttgacagcggtgcgatggacaaagcgtcttaa

SEQ ID NO: 8920 - protein, 125 aa, Unknown
  Obtained from environmental sample
  DOMAIN (30)...(62): Ankyrin repeat
  misc_feature (1)..(125): Xaa is any amino acid
MLVFRQKRALKYPKLLLNAGAQVNLMXEDRGSNALFDSALGGKKEIVKALIDAGADMNIQSKDGQTALVVVVGAGDEDIVELLAMAGADPDIKDALGVSARKYAAIFGNKRMLSIFDSGAMDKAS

SEQ ID NO: 8921 - DNA, 915 bp, Unknown
  Obtained from environmental sample
  misc_feature (1)..(915): n is a, c, g, or t
ttgatggccgagtgggaaccacggcgagaggcccagtacctaagcgatttcgagagccgcgccaaagcgtccgacctcatatccgagattgattggggcgagtggggcggcgtcagttctatcgcatgcctgacctacctaacctcaaaacgcgacgggcggcagccgagtttggtgaattcgctgacggctaagttaatcaccgtcgcggactcgctagtcgccaacacgctgtcgcacggttacggccgcatattcggaacaggcagatactattggggcggtcacggaacgctcaccgcttcatcgtacatattgaatatggcacacaccgtcacaggcgacaagaaataccgcgatgccggtcacgagattctcggctacatcttcggcaggaactactacgcccgttcgttcgtgaccggtgtgggccgcaacccgccggtaaaccctcacgaccgccgctctcaggcgacgaagaaaccgtggcccgggtatatcataggcggcccgcacaaaagtaaaggcagcggcggcatgttcggcccgccgccggaattgaccaactgcgccacagacgcagtatgctggcgcgacgacgcccgcgactattggacaaacgaaatcgccataaactggaacgcctcggcagtctacgccctagccgcctacctgcccggttccgaacacccgacggccatagcgcaaacacgcagagtccaagccaccccctcttcccaaaaaataaaaacaacgcgcatagttgtaaaaaacggcagaacctcaacaaccattcccatgggagcgaaagtctacagcctagacggcaaattaatcgcccataaaaacagtgctgatatcaataagccgcttgttaatagaaatggcgtatttttgatgagggtcagtgagtaa

SEQ ID NO: 8922 - protein, 304 aa, Unknown
  Obtained from environmental sample
  DOMAIN (2)...(224): Glycosyl hydrolase family 9
  misc_feature (1)..(304): Xaa is any amino acid
MMAEWEPRREAQYLSDFESRAKASDLISEIDWGEWGGVSSIACLTYLTSKRDGRQPSLVNSLTAKLITVADSLVANTLSHGYGRIFGTGRYYWGGHGTLTASSYILNMAHTVTGDKKYRDAGHEILGYIFGRNYYARSFVTGVGRNPPVNPHDRRSQATKKPWPGYIIGGPHKSKGSGGMFGPPPELTNCATDAVCWRDDARDYWTNEIAINWNASAVYALAAYLPGSEHPTAIAQTRRVQATPSSQKIKTTRIVVKNGRTSTTIPMGAKVYSLDGKLIAHKNSADINKPLVNRNGVFLMRVSE

SEQ ID NO: 8923 - DNA, 645 bp, Unknown
  Obtained from environmental sample
  misc_feature (1)..(645): n is a, c, g, or t
atggagccgcccatcgccaattacaaaaaagccgaaggatacggttatgccccgcctgaaatggagtatcgtatgggcgccgcgtattaccagcgcgaggactggagaaacgcccttgaatatctgtttaaagcttcaaaggaactgcccctgaacaggcggcttctctttgccatggggaacgctgcctatcagcgcggcgactactntgcgtctcaaggctattacaaccgtttgcttgacctcctggaaacccagcgcacaagactacccgtcttattgccgaatgacaatatccaattcctggaaacgggagaacgcctgatgatggcgcggaataacgccggagttgtaaatgaagctctcgctaaccagacaggcaaccgcgaatatctcgccagagcaatggtcttatacgccgaatcctcccgcgcctgggacgcaataacccgtaaccccgaaacaatggtaagaagcaaactaacagacagttcaggctctccaagcatcaaccttggctacctgaacgcaaataacgctcttcgccctgtcagcaatttcaagccgcaaatctttgtccgcatcgataaagacgcgcttgagccttcccattgggaagaattggttccatttggcggtttatag

SEQ ID NO: 8924 - protein, 214 aa, Unknown
  Obtained from environmental sample
  misc_feature (1)..(214): Xaa is any amino acid
MEPPIANYKKAEGYGYAPPEMEYRMGAAYYQREDWRNALEYLFKASKELPLNRRLLFAMGNAAYQRGDYXASQGYYNRLLDLLETQRTRLPVLLPNDNIQFLETGERLMMARNNAGVVNEALANQTGNREYLARAMVLYAESSRAWDAITRNPETMVRSKLTDSSGSPSINLGYLNANNALRPVSNFKPQIFVRIDKDALEPSHWEELVPFGGL

SEQ ID NO: 8925 - DNA, 504 bp, Unknown
  Obtained from environmental sample
  misc_feature (1)..(504): n is a, c, g, or t
gtgcgtttttctgcaatccatgttccctacggctcggacacagcctccaaaaacagggcgaaagaggcggctgacaaactggtcagggaaattggctccgatccttcaaaattcgacgaagcagttattaaaggccaggcgcccaattccagctatgaggccggagacgcgggatacactccgcgcaacgcgcaagcccaacagtattacggagtaaatttatttaatgccatattttcattaaggcaaggagaagtatcaaggctaattgaaggccttaatggctacatgataatcaagattaccgagagcctgccaatgaagactctggaactggatgaaattatgtctccgggaacccgcataacggtaaggcagtacatagctgcaggtttgctggagcaaagacagcaggaaattctggaaagagctaccagagagcttacaacagaactcagggccgggaatccgtttcgaataatggaaaacaacctaaactggtaa

SEQ ID NO: 8926 - protein, 167 aa, Unknown
  Obtained from environmental sample
  misc_feature (1)..(167): Xaa is any amino acid
MRFSAIHVPYGSDTASKNRAKEAADKLVREIGSDPSKFDEAVIKGQAPNSSYEAGDAGYTPRNAQAQQYYGVNLFNAIFSLRQGEVSRLIEGLNGYMIIKITESLPMKTLELDEIMSPGTRITVRQYIAAGLLEQRQQEILERATRELTTELRAGNPFRIMENNLNW

SEQ ID NO: 8927 - DNA, 870 bp, Unknown
  Obtained from environmental sample
  misc_feature (1)..(870): n is a, c, g, or t
gtgtttatggtaagcgtctttctggcggctgttcagtactttgtgctggatacgccgataaaaaacgcgatttccatagctgtctgtatagcggcggctattttgggactgtcttttttccttgaagggctttttttgggaattatgccccttggcgagcaatgcggaatgaggctgccctcaaaaatcggcgcggcgggagttaccgttttttcaattattgtaggtataaccgcgacgttggcggaacccgctgtagccgtgcttcaacagcagggcagtgtaatcccggcgtggaacgcgccgcttttgtaccttcttctgaaccggggaacgtcgtggctggtagccgccatcgccataggggtgggaatttctgtagtgctgggcgtgtatcgctttatgttcggctgggcttttaaaccgccggtattcatcattattccaattatcgttgccgtaagctgtatattcgacgaaaatcctattctgcgccctctggtaaatctcgcgtgggatacaggaggcgcggctacaggcgcggttacagtgccgattattctcgctcttggtctgggcgtggcgaaaatcggcggcaagaattcagacacatccgggcttgggcttgtaacgcttgcctcagccctgcctgtggcaagcgtccttcttcttgccgccgtgttgggtcccaaagtaccgtccccatgtgacgctgcggctttcttttccgctaatcctgatcaacgagcaaaggcggtttatgtcgcgggaggaagaaacgaactttataatatggcccgaaaaggccgtcttctcgggcgatctttcagtcgaagaattcgcgtatttgttttccggaggaagaaatag

SEQ ID NO: 8928 - protein, 289 aa, Unknown
  Obtained from environmental sample
  DOMAIN (6)...(229): Protein of unknown function (DUF1538)
  misc_feature (1)..(289): Xaa is any amino acid
MFMVSVFLAAVQYFVLDTPIKNAISIAVCIAAAILGLSFFLEGLFLGIMPLGEQCGMRLPSKIGAAGVTVFSIIVGITATLAEPAVAVLQQQGSVIPAWNAPLLYLLLNRGTSWLVAAIAIGVGISVVLGVYRFMFGWAFKPPVFIIIPIIVAVSCIFDENPILRPLVNLAWDTGGAATGAVTVPIILALGLGVAKIGGKNSDTSGLGLVTLASALPVASVLLLAAVLGPKVPSPCDAAAFFSANPDQRAKAVYVAGGRNELYNMARKGRLLGRSFSRRIRVFVFRRKK

SEQ ID NO: 8929 - DNA, 396 bp, Unknown
  Obtained from environmental sample
  misc_feature (1)..(396): n is a, c, g, or t
ttgaatatgcgtaaaatggatgaggaagaatatgaatctcattttaaaataggcttaactagctgtccagaaaaaattcacgaaaaagcctacgaaatagccaatgataaccgcaaagttgagattgataattactggaaaagggcaaattacttttggctatttcaagcatctgtttatgctggatatttctattccattacggtggaaaatagcgaatatttttgcaaaaatccagaaatcatagttggaataacttgtttaggatttttgaccgctcttgcgtggtatttgtcaaacaaaggaagcaagcaatggttggaaagttgggaaaatcatatatacgaacttgagaaagacataactggaccattgtataaaactacaagcaaatga

SEQ ID NO: 8930 - protein, 131 aa, Unknown
  Obtained from environmental sample
  misc_feature (1)..(131): Xaa is any amino acid
MNMRKMDEEEYESHFKIGLTSCPEKIHEKAYEIANDNRKVEIDNYWKRANYFWLFQASVYAGYFYSITVENSEYFCKNPEIIVGITCLGFLTALAWYLSNKGSKQWLESWENHIYELEKDITGPLYKTTSK

SEQ ID NO: 8931 - DNA, 735 bp, Unknown
  Obtained from environmental sample
  misc_feature (1)..(735): n is a, c, g, or t
ttgcaaaacccttgcggacttcctgttcacgacgagaaggcccttgccagaatcgacatgagcgagtacggcgagaaacattccgtcagccgcctgatcggcgcgccgcccggttatgtgggctacgagcagggaggccagcttaccgaagtagtgcgccgccgtccctacagcgtggttctttttgacgaaatagaaaaagcccatcccgaagtgtttaatgtttttttacagattctcgacgacgggcgccttacggacggacagggcagaattgtggatttcaaaaatgttataatcattatgacaagcaatatcggctctgatttgattcttgaggaggaaaactccgggacaataagggcttcacttatggaattgcttaaacgtaatttcaggcctgagtttctcaaccgcattgacgagacggttattttcaacaggctgggcaaaaacgaaattggcagaatcgttgacattcagcttgcttatctggcgcggcggctggctgaacgcaagattacacttaacacatcgcgcgcggcaaaggaattcctcgccgaacggggctatgatcaaatgtacggggcgcgtccccttaaaagagccatacaggcggaactggaaaaccctctggcaaaactcgtcatctccggaaagatccgcgaaggcgacattgtcaccgcggacagaaaaggcgaggggctggaattcaaaataataaataataagtaa

SEQ ID NO: 8932 - protein, 244 aa, Unknown
  Obtained from environmental sample
  DOMAIN (3)...(143): ATPase family associated with various cellular activities (AAA)
  misc_feature (1)..(244): Xaa is any amino acid
MQNPCGLPVHDEKALARIDMSEYGEKHSVSRLIGAPPGYVGYEQGGQLTEVVRRRPYSVVLFDEIEKAHPEVFNVFLQILDDGRLTDGQGRIVDFKNVIIIMTSNIGSDLILEEENSGTIRASLMELLKRNFRPEFLNRIDETVIFNRLGKNEIGRIVDIQLAYLARRLAERKITLNTSRAAKEFLAERGYDQMYGARPLKRAIQAELENPLAKLVISGKIREGDIVTADRKGEGLEFKIINNK

SEQ ID NO: 8933 - DNA, 597 bp, Unknown
  Obtained from environmental sample
  misc_feature (1)..(597): n is a, c, g, or t
ttgtattatgtcagcatggcaaaacatacaccgggtgaacgtatagtcgaaatacgtaaaacttattcaatcagcagggaagtcctggctgaacggagcggcgtttccgttgacttaatctctaacatcgaagacaacgggcatattcctgatcttgcccctcttattaaaatatccagagggcttggggtaaggcttggcaccctgcttgatgatcatgaacagcttggtcctgttatttgcagagcgggagacgcggcttccgccagccgttttaaaacagggcttcctgaaggcatatctgcaggtgatcatcacggtatgagttttaatgcgcttgcgtccgataaaaacggcaggcacatggagccgtttattgtaacaatcgaaagcgatgcanaacaggataaatcaactcacgaaggcgaggaatttatctatgttctggaaggaaaacttgcgctggaatacggtatggataaaaatacattaaatacaggtgattccgtatattatgattccattgtaccgcaccgtgtattttcagcggacagtaatcctgtaaaaatactcgccgtaatttatactccggtttag

SEQ ID NO: 8934 - protein, 198 aa, Unknown
  Obtained from environmental sample
  DOMAIN (15)...(69): Helix-turn-helix
  misc_feature (1)..(198): Xaa is any amino acid
MYYVSMAKHTPGERIVEIRKTYSISREVLAERSGVSVDLISNIEDNGHIPDLAPLIKISRGLGVRLGTLLDDHEQLGPVICRAGDAASASRFKTGLPEGISAGDHHGMSFNALASDKNGRHMEPFIVTIESDAXQDKSTHEGEEFIYVLEGKLALEYGMDKNTLNTGDSVYYDSIVPHRVFSADSNPVKILAVIYTPV

SEQ ID NO: 8935 - DNA, 852 bp, Unknown
  Obtained from environmental sample
  misc_feature (1)..(852): n is a, c, g, or t
atgagagtgataaaatcgatagcgaagatgagggagtactcttccgcgctccggaaagagggcaagagcatcgggttgatcccgactatgggcgctctgcacgagggccacatatcgcttttgccggtcgccgacgaggtntgcgacgtgtcggtgatgagcgtctttgtcaaccctacgcagttcggcccctcggaggatttcgaaaagtacccgcgcgacctcgacaacgactgcgcgctggccgagtccgccgggtgcaactgcctattcgcgccctccgtcgccgagatgtacccggcggggtacagcgttcacgtgaacgtgggcccggtgggcgaagtgctctgcggcgcggcccgccccgggcacttcaacggcgtggccacggtggtccttaaactgttcaacatagtagccccccacgccgcggtcttcggcgccaaagacgcccagcaggtggtggtcgtcaaacgcctggtgaccgacatgaacctccctgtccgcatactgaccggcccgaccctgcgcaccccggacggactagccatgagttcgcgcaacgcctacctgaccccgtcggagagaaagtacgccgcaaatatcagcaaaggcttgttcgaagcgaaaaaaatgttcgaggagggtgaacggtcggtagagcatattaaggagcgggtagtgtcgataatcaacatgtgcgtaggtatgatacaggtggagtatgcggagatagtaaacccggtatctctgcacccgcttataagaatagaacaaaatgcgctggtggtcgtggcttgtaggactagggatagtaagactaggttgattgataatattgttttggggtga

SEQ ID NO: 8936 - protein, 283 aa, Unknown
  Obtained from environmental sample
  DOMAIN (1)...(282): Pantoate-beta-alanine ligase
  misc_feature (1)..(283): Xaa is any amino acid
MRVIKSIAKMREYSSALRKEGKSIGLIPTMGALHEGHISLLPVADEVCDVSVMSVFVNPTQFGPSEDFEKYPRDLDNDCALAESAGCNCLFAPSVAEMYPAGYSVHVNVGPVGEVLCGAARPGHFNGVATVVLKLFNIVAPHAAVFGAKDAQQVVVVKRLVTDMNLPVRILTGPTLRTPDGLAMSSRNAYLTPSERKYAANISKGLFEAKKMFEEGERSVEHIKERVVSIINMCVGMIQVEYAEIVNPVSLHPLIRIEQNALVVVACRTRDSKTRLIDNIVLG

SEQ ID NO: 8937 - DNA, 819 bp, Unknown
  Obtained from environmental sample
  misc_feature (1)..(819): n is a, c, g, or t
gtgtatacgctaagatggccagcggctatctcggctctggaaaaaagagtgcacgttcttcttcctgaacctccgtataacatttttagttttcttggcggtcttgaatggcatccgacaagagacaaggtatttggcatctttccgatgattgccggaactttgctcgcgagttttggcgcgatcttgcttggagtgccaatcgctctgttatgcgctctttttatggcggaatttctaaaaccaaaaccggcctccatcatacgcgcgggggttgaattgcttgcgggaattccatccgtagtgtacggatttttcggtcttatggtaatagtcccgtttgtgcggaataccttccatgtgccgtcgggtaacacgctcctttccgccataatcgtgcttgcgctgatgatactgcctactattatcacaatcgcggaaacatcccttcgcgccgtaccgctctccgtaaaagaggcgagtctttcgctgggggcgagtaaaatgcagaccgcgtggagagtggttctgccccacgcgaattcgggagtaatcgcgggagttatactgggtatttcgcgtgcggtgggagaaactatggcggttatcttagtggcgggaaattcgccgcagttaacattaaatccccttgcgagcataagaactttaacgtctaccatagccatggagatggggtatgcgtcgggcaggcatagcgaaatgctgttttcaatcggcgttacgctgtttcccataaaactgaatcttaaacgtttgatttttttggattcccagaaaggagggaaccggaatttttga

SEQ ID NO: 8938 - protein, 272 aa, Unknown
  Obtained from environmental sample
  DOMAIN (51)...(261): Binding-protein-dependent transport system inner membrane component
  misc_feature (1)..(272): Xaa is any amino acid
MYTLRWPAAISALEKRVHVLLPEPPYNIFSFLGGLEWHPTRDKVFGIFPMIAGTLLASFGAILLGVPIALLCALFMAEFLKPKPASIIRAGVELLAGIPSVVYGFFGLMVIVPFVRNTFHVPSGNTLLSAIIVLALMILPTIITIAETSLRAVPLSVKEASLSLGASKMQTAWRVVLPHANSGVIAGVILGISRAVGETMAVILVAGNSPQLTLNPLASIRTLTSTIAMEMGYASGRHSEMLFSIGVTLFPIKLNLKRLIFLDSQKGGNRNF

SEQ ID NO: 8939 - DNA, 702 bp, Unknown
  Obtained from environmental sample
  misc_feature (1)..(702): n is a, c, g, or t
atgccgcaattccactcagcgcgggatattcacgatgtatatagcatagcagacccgtcttccaaagacggaatcgcgcatgcaaaagccattgacgagccttggctttccaacgttgccgccgcccatgaaaacggcgggaagacaggcagccgcggctggaactacggctttgaccgcgactttacgcggcgtctgatccttcgttctcagggaactgtgctttccgcaaagaatcttcctacagcaaaagtacccggtaaatacttcggcattgtgcgctgtttccgctacgaccgcgtagacgccacccacctgccggacttttaccaaaccgagggcattgtgttaggtgaaaatgtcaaccttcgcacccttttgggaatgttggaaatgtttgcccgcgaagttgccggtgcgaaagaggtaaaatatgttcccggctattttccttttaccgaaccttctgtagaagtgcatatcaaacatccggtgctcggctggttcgagcttggcggctccggcattttccgccctgaagtaacagacagccttggcgtgaacgtgcctgtcgccgcgtggggtatcggaatcgacaggatggcgttaatggctttgggcttaaacgatctccgcgaattattcagccacgacattgaanatgtaaggttaagacgggctaaaattcaggagcataaatga

SEQ ID NO: 8940 - protein, 233 aa, Unknown
  Obtained from environmental sample
  DOMAIN (1)...(225): tRNA synthetases class II core domain (F)
  misc_feature (1)..(233): Xaa is any amino acid
MPQFHSARDIHDVYSIADPSSKDGIAHAKAIDEPWLSNVAAAHENGGKTGSRGWNYGFDRDFTRRLILRSQGTVLSAKNLPTAKVPGKYFGIVRCFRYDRVDATHLPDFYQTEGIVLGENVNLRTLLGMLEMFAREVAGAKEVKYVPGYFPFTEPSVEVHIKHPVLGWFELGGSGIFRPEVTDSLGVNVPVAAWGIGIDRMALMALGLNDLRELFSHDIEXVRLRRAKIQEHK

SEQ ID NO: 8941 - DNA, 456 bp, Unknown
  Obtained from environmental sample
  misc_feature (1)..(456): n is a, c, g, or t
atgcaaaacgcaacttatgctaaaccgggtcttggacaatatcgccaagcatccgttgaaacagccgaccgcgggcagttgatcattatgatctacgaccattgcataaaatggtgcggcatagccaaggaagccttggaagctggccagcttgcccgcaaggcagaagcctgccacaaggtagaagccggcataagcgagcttatgacttctttggatatggaaaaaggcggtgatatagcaaagaatctttggagactatacgatttttacagccatcatattcacgaaggcaatatgaagaacattgccaaaaacttcacggaagttgcagaaatgatgggacaactcagagaatcttggcaaaaagcccttgggcaggttcgccaagacagaacgctctcaaacaacttggcggcaggaactccacgcagttatgttagcatggtagggtaa

SEQ ID NO: 8942 - protein, 151 aa, Unknown
  Obtained from environmental sample
  DOMAIN (6)...(128): Flagellar protein FliS
  misc_feature (1)..(151): Xaa is any amino acid
MQNATYAKPGLGQYRQASVETADRGQLIIMIYDHCIKWCGIAKEALEAGQLARKAEACHKVEAGISELMTSLDMEKGGDIAKNLWRLYDFYSHHIHEGNMKNIAKNFTEVAEMMGQLRESWQKALGQVRQDRTLSNNLAAGTPRSYVSMVG

SEQ ID NO: 8943 - DNA, 468 bp, Unknown
  Obtained from environmental sample
  misc_feature (1)..(468): n is a, c, g, or t
ttgccgtatcgaccgttaatagcggactattgttattttaggcttggagacaggcgcgtatggcagtgtcaaatactgcctgattgcaagcggttctccaaaagaatcaagattgtaagttatgttgaaaaaccatttggaacggagggaaattatatggaaacaaatacagttaatccgcttgtttcggatgccttatctaacgcggtgatgaagattaccgtggaactgggagccgcctttaaaacagtaaaggaagtctacgggattggcgaggggacagttgtagaacttgacaaacttgccggagaacctttagacgtaaaggcaaacgggatcatcattgccaaaggggaagtggtgatcattgacgagaacttcggggtaaggattaccgagattaccggaacccggccagttcaatgcaatcggcagcagcctgagccggcagccggagaatcaacatga

SEQ ID NO: 8944 - protein, 155 aa, Unknown
  Obtained from environmental sample
  DOMAIN (62)...(138): Surface presentation of antigens (SPOA) protein
  misc_feature (1)..(155): Xaa is any amino acid
MPYRPLIADYCYFRLGDRRVWQCQILPDCKRFSKRIKIVSYVEKPFGTEGNYMETNTVNPLVSDALSNAVMKITVELGAAFKTVKEVYGIGEGTVVELDKLAGEPLDVKANGIIIAKGEVVIIDENFGVRITEITGTRPVQCNRQQPEPAAGEST

SEQ ID NO: 8945 - DNA, 438 bp, Unknown
  Obtained from environmental sample
  misc_feature (1)..(438): n is a, c, g, or t
atgacaccaattgttatgggaatatccttcatcgttatatggcttgtaacaacattctttattttacgttacgttaaaagactaaaggatgatttatccggcaggttttctaacaaagaaaaactaaaagaggagaagaacgaatatgatgaaaatattgcaaatcaaaggttgaaaaagccatttgaatttatcaaacatttaaacgcaaacaacttattatttttcattgaacaggaacatccgcaagttatcgcgcttgttctggcgtatctggaaccggataaggcttcggttatcttgcagaatctcccttacgaactgcgaaatgatgtattccggcgtatagctgccatagatcgggttagtcctgaaatatatgtgaatagagcgagtgctggagaagaactgtcttcatatctactagcgtttacatag

SEQ ID NO: 8946 - protein, 145 aa, Unknown
  Obtained from environmental sample
  misc_feature (1)..(145): Xaa is any amino acid
MTPIVMGISFIVIWLVTTFFILRYVKRLKDDLSGRFSNKEKLKEEKNEYDENIANQRLKKPFEFIKHLNANNLLFFIEQEHPQVIALVLAYLEPDKASVILQNLPYELRNDVFRRIAAIDRVSPEIYVNRASAGEELSSYLLAFT

SEQ ID NO: 8947 - DNA, 837 bp, Unknown
  Obtained from environmental sample
  misc_feature (1)..(837): n is a, c, g, or t
atgacaacttccccggctgtcctttcgctccccgttgccagaaagcccagagtgtctgtacgcagaattttcctccccaaaaagaaattaacggcgcgaaagttcactgctattttccgtctgcaggagactgtaatgcctgaaaccaccctactttcaatccgtaacctctcatgcgcatatatcagcaaaaagttcggtctttttgggaaaaaagaaataaagcccgtccttaaaaatataaatcttgaacttcgctcaggagaaatttttggtcttacgggcaaatccggttgtggcaagacgactttggcgcgttgtattttaaaacttattgattatgagggagaaattctgcttgatgggcaaagacaggaaaaaccgcccccgattcagatggtttttcaagagaccggcgcgtcgttaaacccatgcaaaaacatcggctggcttatggaagagccgttaataattcacagaataggaaacaaagaagaacgcaggcataagatcgacagaatgttactgcgcgtaggacttgatccgtcctataaaacgcgtcacgttcacgaactgagcggcggtcaaaaacagcgcgtctgcatcgcccgcgccttgattctatccccgcgccttttaatcgccgatgaagcgatcagttcccttgacgtatctgccggtgcgcagatactgaacctgttcagggaattgcacaaaagcgcggagctgacgattcttttcatttcgcataacagggatgcggtggagtatatttgtgacaggatggcggttatggatggcgggggattatttgagaagaattcacacgaagaatga

SEQ ID NO: 8948 - protein, 278 aa, Unknown
  Obtained from environmental sample
  DOMAIN (88)...(268): ABC transporter
  misc_feature (1)..(278): Xaa is any amino acid
MTTSPAVLSLPVARKPRVSVRRIFLPKKKLTARKFTAIFRLQETVMPETTLLSIRNLSCAYISKKFGLFGKKEIKPVLKNINLELRSGEIFGLTGKSGCGKTTLARCILKLIDYEGEILLDGQRQEKPPPIQMVFQETGASLNPCKNIGWLMEEPLIIHRIGNKEERRHKIDRMLLRVGLDPSYKTRHVHELSGGQKQRVCIARALILSPRLLIADEAISSLDVSAGAQILNLFRELHKSAELTILFISHNRDAVEYICDRMAVMDGGGLFEKNSHEE

SEQ ID NO: 8949 - DNA, 894 bp, Unknown
  Obtained from environmental sample
  misc_feature (1)..(894): n is a, c, g, or t
ttggccgagcatccgatacaggatcaggtttattggaaagatggggaagacccgtttgtgcttattaaagccgaaattgaaaagcgaaacatcaaaattaacagggttgccatcgagccccagatcccggcattttttttactgcccctgagcaaaacttttccatcttcagcttttgaacttggttcttcccttattgatccgttacgccaatacaaggatgaaagtgagctggaccttatccgcaaggcgtgcagggaatcggatcgcgctttgggtgtaataatcgaaaagggcggctactggatcggtaaaacagaatctgaattttttaccgggctgtcgggagaaataagccgtaacggtatatacgatttcggcgcgtccgtgcaggcaggcccgaacgccgcgataccccattacgccacgggcagggcagtcatcgaaaaggggaaatgccttctttgcgatttttgggggcgttacgcggggtactataccgactgcacaaggacttttcactttggcaagcctggagcggaatttgaaaaaatttacaatattgttctggaagcccaccttgcggcggaagccaaagcccggcccggaaacctgcttgaggatgttgacatagccgcccgccgaattatcgcaaagcacggctacggggactactttacacaccgtaccgggcatggcctgggcattgatgtccatgagggcgattccgtcaataccggggtcaaggctccaataaaaccgggtatggtgttttccattgagccgggcatttacatccctggccgctttggcgtgcgtattgaaaaccttgtagcgatcggtgaacacggccccgaagtcctgcatagctacccccgcgagttaaaaatatag

SEQ ID NO: 8950 - protein, 297 aa, Unknown
  Obtained from environmental sample
  DOMAIN (79)...(290): metallopeptidase family M24
  misc_feature (1)..(297): Xaa is any amino acid
MAEHPIQDQVYWKDGEDPFVLIKAEIEKRNIKINRVAIEPQIPAFFLLPLSKTFPSSAFELGSSLIDPLRQYKDESELDLIRKACRESDRALGVIIEKGGYWIGKTESEFFTGLSGEISRNGIYDFGASVQAGPNAAIPHYATGRAVIEKGKCLLCDFWGRYAGYYTDCTRTFHFGKPGAEFEKIYNIVLEAHLAAEAKARPGNLLEDVDIAARRIIAKHGYGDYFTHRTGHGLGIDVHEGDSVNTGVKAPIKPGMVFSIEPGIYIPGRFGVRIENLVAIGEHGPEVLHSYPRELKI

SEQ ID NO: 8951 - DNA, 789 bp, Unknown
  Obtained from environmental sample
  misc_feature (1)..(789): n is a, c, g, or t
atgaggcagatcgctgattcagtcggggcggtgttcatggtcgatatggcgcactttgcgggccttgttgccggcaaggtttttaccgacgaatttgacccggtgccccacgcccacgttgttactactaccacccacaaaaccttgcgggggcccagagccggcctgatactttccaccaaggaatttgccgaagccctggacaagggatgccccttaactatgggcggccccctgcctcatgtgatagccgcaaaggaagtggctttaagggaagcctcaaaacccgaatttcgggattacgcaaaaaggatcgttgataactgccaagcccttgcagccgcgtgcatcaagaacggcttaacggtactgacaggcggcacagacaaccatttgttcctggtcaatgtgcatgtgctgggtttaaccggacgccagtcagaaagcgccctccacgaatgtgcggttacgctgaaccgcaacagcatcccctttgatcccaacggcccctggtacacgtccggcttgaggataggcaccgccgcagtttcgactctgggcatgggaaaagcggagatggacgagctgggaagcatcatcgcgctggtgcttaaaaacacaagccaggcgccggatgccaaggacgcttcgaaaaagagcaaggccaaatacatcattgacgaaaaggcaaaggccgaagccctggatcgcgttaaaaaacttcaagatcgtttcccggtgtacccggagcttgacctaaagttgcttaaagaagcgtttgtggaataa

SEQ ID NO: 8952 - protein, 262 aa, Unknown
  Obtained from environmental sample
  DOMAIN (1)...(200): Serine hydroxymethyltransferase
  misc_feature (1)..(262): Xaa is any amino acid
MRQIADSVGAVFMVDMAHFAGLVAGKVFTDEFDPVPHAHVVTTTTHKTLRGPRAGLILSTKEFAEALDKGCPLTMGGPLPHVIAAKEVALREASKPEFRDYAKRIVDNCQALAAACIKNGLTVLTGGTDNHLFLVNVHVLGLTGRQSESALHECAVTLNRNSIPFDPNGPWYTSGLRIGTAAVSTLGMGKAEMDELGSIIALVLKNTSQAPDAKDASKKSKAKYIIDEKAKAEALDRVKKLQDRFPVYPELDLKLLKEAFVE

SEQ ID NO: 8953 - DNA, 741 bp, Unknown
  Obtained from environmental sample
  misc_feature (1)..(741): n is a, c, g, or t
gtgaaccgcctggatttgggcaaaacggtggaagaggaaattcagtcttcgctggaagacaaggcgaggggcaaagcccgcacgctcgcaggtgttatgatgttgnaaggcgacaacgccctgaaaaagatacaggtgctctccggcggtgaacgcagccgcgttttgttagcgaaaattcttggcaagccgtgcaacctgcttttgctagacgaaccaacaaaccatttggacatggattccgttgacagcctcattgaagcccttgacgaattcagcggtgctgcgattttagttagccacgatgaagaaattattcacgcattcgcaaaacgcttggtaatctttgacggcggcaaagccaaattttttgacggcacatatcaagactttttagaaagagtaggttgggtagcggaaaaatcagaaaaatcgggagaatcctcaaatcgggagaaccgaggttcagacaaaagggacaaaagagaacgcgccgagcaaattctccaaaggtcacgcgccattcgcccgttggagcaaaaaataaagcagatagaaagcgatattcagcaaaaagaaaactttgtggcggaatgtgaaaaaaatataataaccgccgcagaaaatggcgagggcttaaaaatagcggaaatttccaaagaaatggagcttgctaaagggcaggttttggacttgtatgcagagtgggagagggtacatggggagttggaggctgtataa

SEQ ID NO: 8954 - protein, 246 aa, Unknown
  Obtained from environmental sample
  DOMAIN (1)...(119): ABC transporter
  misc_feature (1)..(246): Xaa is any amino acid
MNRLDLGKTVEEEIQSSLEDKARGKARTLAGVMMLXGDNALKKIQVLSGGERSRVLLAKILGKPCNLLLLDEPTNHLDMDSVDSLIEALDEFSGAAILVSHDEEIIHAFAKRLVIFDGGKAKFFDGTYQDFLERVGWVAEKSEKSGESSNRENRGSDKRDKRERAEQILQRSRAIRPLEQKIKQIESDIQQKENFVAECEKNIITAAENGEGLKIAEISKEMELAKGQVLDLYAEWERVHGELEAV

SEQ ID NO: 8955 - DNA, 543 bp, Unknown
  Obtained from environmental sample
  misc_feature (1)..(543): n is a, c, g, or t
gtgtctccggacgatctgcgccgcctgaagatggcatctaacccggaagaagcgaaattaaacgccgcgttcaaggccatgggctttaatttggttgaatctgaaattaccgatttgggcccgaagatcgcaagcaacatgatcaacgccttttatcaaactccggcgtcggtcgccccgctcggtctgtataaaatgcttaataatatgatggaaacgcccatcgcccccttcctgggcggtattgtcatcaaccgggttacatggaataaaataagctccgacaaccgggccaagattctgcaggttacgcagaaaacggccggggactttgaagccgtaatgccgcggacggtgactaatgccataacaatgatgcagaaggaagggctcaaggtgaacaaggttagccccgcccaggaacaattatggcagaccgaggtgcagaaggccatgcccggactgcttggcaataatacatttgatcccgaactgtataataaaataaatgagatactgaggaaatccagaagcgggcaatag

SEQ ID NO: 8956 - protein, 180 aa, Unknown
  Obtained from environmental sample
  misc_feature (1)..(180): Xaa is any amino acid
MSPDDLRRLKMASNPEEAKLNAAFKAMGFNLVESEITDLGPKIASNMINAFYQTPASVAPLGLYKMLNNMMETPIAPFLGGIVINRVTWNKISSDNRAKILQVTQKTAGDFEAVMPRTVTNAITMMQKEGLKVNKVSPAQEQLWQTEVQKAMPGLLGNNTFDPELYNKINEILRKSRSGQ

SEQ ID NO: 8957 - DNA, 870 bp, Unknown
  Obtained from environmental sample
  misc_feature (1)..(870): n is a, c, g, or t
ttgctggatctggctgaaaaaacaaaagccgagtcaaaaaaaggcaggatcaggaggcgttttgagggtaaaacccttgcccttctctttgaaaaacgctcaactcggacaaggtgcgcctttgaaacagctttcggcgaggaaggcggccacccggtatttctttctaccgcggatattcaccttggcgggaaggaagcgctcgaagacaccgcccgcgtgtttgggaggatgttcagcgcaatacaattcaggggctacaaacaggaaacagctgaaattctcgcaaaatattcaggtatcccggtttataacggcttaagcgatctgtaccacccgacccaagttctggcggacatcatgacattacgggaaaatttcggcgatgtaaaagggaagaaactgtgttatgtgggcgacggcagaaacaatgtcgcgcgctctttaatgattggatgcgccaaattggggattcatttctcggtgataaccccgcccgagttaacccccgatgacgaactgcagaaaaaatgttcggttttcgcccaaacctccggctctataattatcgttactccaaatataaacggagtagccggagcggacgcgatctacacagacgtgtggatttccatgggtgaggaagataaaagggacgaaagaataaggcttttaagcggctatcaggtaaatcaggcgttaatggacaagacgggcaagaaagaaaccattttcctgcattgtcttcccgccgtanaaggcgaagaagtaaccgccgacgtaatcgacggcccgcaaagccgcgcctgggacgaagccgaanaccgcanacacacgataaaggcggtaatgctcgcgacacttacttaa

SEQ ID NO: 8958 - protein, 289 aa, Unknown
  Obtained from environmental sample
  DOMAIN (1)...(126): Aspartate/ornithine carbamoyltransferase, carbamoyl-P binding domain
  misc_feature (1)..(289): Xaa is any amino acid
MLDLAEKTKAESKKGRIRRRFEGKTLALLFEKRSTRTRCAFETAFGEEGGHPVFLSTADIHLGGKEALEDTARVFGRMFSAIQFRGYKQETAEILAKYSGIPVYNGLSDLYHPTQVLADIMTLRENFGDVKGKKLCYVGDGRNNVARSLMIGCAKLGIHFSVITPPELTPDDELQKKCSVFAQTSGSIIIVTPNINGVAGADAIYTDVWISMGEEDKRDERIRLLSGYQVNQALMDKTGKKETIFLHCLPAVXGEEVTADVIDGPQSRAWDEAEXRXHTIKAVMLATLT

SEQ ID NO: 8959 - DNA, 876 bp, Unknown
  Obtained from environmental sample
  misc_feature (1)..(876): n is a, c, g, or t
ttgcaaagaaaaaaagttggtaaaataatagtaacgccattatttattgaccattccgcttttgacgcttatatgtttattattgaagcagatgacaaacgagtattaaatacaggtgattttcgcggtcatggttttaagagtaaagcgcttgttccaatgcttcaaaaatacgcacaaaacattgattatataatttcagaaggttcaaatattgaacgtcctgatgcggttttgcaaactgaacaggaattacagaaagactttgagaaatcatttatagaaaacaaatataactttgttatggtttcttccactaatattgacagagtatttgcattatatcatgctacaaaaaatgcagggcgttgctttgtttgcgatacttatcaaactaatatattaaagatagtttctgaatcacataaaaaatatactccattttataaaattgattatgatcaaaaaaatccggtaggacgttttatagggttaagacaaatagcgaggaaaccttttgattttcctggcaaattaaagccatatttgaatgaacatggtttttgtatgcttgttaggccaaatgatagttttaatcctcttttaaaagaatattctaaattaaatgaaacaaaaatatattattcaatgtggaaaggttatcttgataagagtaacatggcgcataatcaaaattttatagaatttattgaaccgtataagtatgagtataaacatacaagcggacacgccgatgtaaaaactttaggtatgttttttgatactggtaagccaaaatgtgntataatccctattcatacagaagcgcccgaaatgtttaaagaattattttgtcggcataatatatttggctaa

SEQ ID NO: 8960 - protein, 291 aa, Unknown
  Obtained from environmental sample
  misc_feature (1)..(291): Xaa is any amino acid
MQRKKVGKIIVTPLFIDHSAFDAYMFIIEADDKRVLNTGDFRGHGFKSKALVPMLQKYAQNIDYIISEGSNIERPDAVLQTEQELQKDFEKSFIENKYNFVMVSSTNIDRVFALYHATKNAGRCFVCDTYQTNILKIVSESHKKYTPFYKIDYDQKNPVGRFIGLRQIARKPFDFPGKLKPYLNEHGFCMLVRPNDSFNPLLKEYSKLNETKIYYSMWKGYLDKSNMAHNQNFIEFIEPYKYEYKHTSGHADVKTLGMFFDTGKPKCXIIPIHTEAPEMFKELFCRHNIFG

SEQ ID NO: 8961 - DNA, 396 bp, Unknown
  Obtained from environmental sample
  misc_feature (1)..(396): n is a, c, g, or t
ttggacgacgattcctgccacggcacgccgaatgagtggagcgagagggtggcggcgatgtacaaaaagtggaaagccgacctcgtggtagctgagaaaaactacggcggcgacatggtggggcataccatcagatccgcctacagggacataaacgtaaagctggtaacgtcgtcgaggggcaagattttgagggctgagcccatatccgcgctctatgagagaggggaagtcaagcacagggtgccgtttacagaacttgaggatgaattatgctcgtacacggaggacacgaaagaaagccccaacaggatggacgcggcggtgttcgcgctgactgaattgtcggagattggagaagaatccagcgtcggttcggcgcgtatcgtttactga

SEQ ID NO: 8962 - protein, 131 aa, Unknown
  Obtained from environmental sample
  misc_feature (1)..(131): Xaa is any amino acid
MDDDSCHGTPNEWSERVAAMYKKWKADLVVAEKNYGGDMVGHTIRSAYRDINVKLVTSSRGKILRAEPISALYERGEVKHRVPFTELEDELCSYTEDTKESPNRMDAAVFALTELSEIGEESSVGSARIVY

SEQ ID NO: 8963 - DNA, 435 bp, Unknown
  Obtained from environmental sample
  misc_feature (1)..(435): n is a, c, g, or t
atggatgattacgggcatcaccccacggcgattacaacaactttggaggggcttaagaatttttacccttcccggcggctggtggtaagttttatgtcccatacctataccagaaccgccgcgttacttgatgatttcgcggcatcccttgccgccgccgatgtgctgttcctccacaaaatatacgcttccgcgcgggaacaatttaacggcaaaataagcggagaaagcatttatgaaaaaataaacagtctgcatgacaaaaaagcgggcgcggtatattatgttgatgaaccaatggatgccgttgaaccgctaaaaaaaatccttaaacccggtgatcttttccttactctgggcgcgggaaataactggccgctgggaacggcgctttataaatactaccatgacgcggaaggaactccccatgattag

SEQ ID NO: 8964 - protein, 144 aa, Unknown
  Obtained from environmental sample
  DOMAIN (1)...(73): Mur ligase family, glutamate ligase domain
  misc_feature (1)..(144): Xaa is any amino acid
MDDYGHHPTAITTTLEGLKNFYPSRRLVVSFMSHTYTRTAALLDDFAASLAAADVLFLHKIYASAREQFNGKISGESIYEKINSLHDKKAGAVYYVDEPMDAVEPLKKILKPGDLFLTLGAGNNWPLGTALYKYYHDAEGTPHD

SEQ ID NO: 8965 - DNA, 621 bp, Unknown
  Obtained from environmental sample
  misc_feature (1)..(621): n is a, c, g, or t
gtgatcttttccttactctgggcgcgggaaataactggccgctgggaacggcgctttataaatactaccatgacgcggaaggaactccccatgattagcatgacgggtttcgcctaccagaaatgggcgggagaagacatttccctctcggtagagataaaaggctgcaacaaccgctttctggaattacaggtataccttcccccctggatttcgtacatggaaccgaaggtacgcgatatcatcagcggtatctgcggcaggggaaaagttgaaatcaccatccggataaaagaaacaaacaccccggtgaatgtcacggtaaataccaacgccgcccgcgtttacatggaagccctgtccgttcttgccgccgatctgggcattgacgcgcacctggacataccggtattaaccggaatggaaggagtgctggatattgaaaaaaaatatgacgagcagcggtactggagcgtgatagagccggttttgcnagaggctgtctccgtttttcaggcggaacgcgtcagggaatggaaacacacacaggtagatattcttaacttgcatagcgctattgaatcggcgctgaaaacgagggaatccataccggaaaaatga

SEQ ID NO: 8966 - protein, 206 aa, Unknown
  Obtained from environmental sample
  DOMAIN (31)...(185): YicC-like family, N-terminal region
  misc_feature (1)..(206): Xaa is any amino acid
MIFSLLWAREITGRWERRFINTTMTRKELPMISMTGFAYQKWAGEDISLSVEIKGCNNRFLELQVYLPPWISYMEPKVRDIISGICGRGKVEITIRIKETNTPVNVTVNTNAARVYMEALSVLAADLGIDAHLDIPVLTGMEGVLDIEKKYDEQRYWSVIEPVLXEAVSVFQAERVREWKHTQVDILNLHSAIESALKTRESIPEK

SEQ ID NO: 8967 - DNA, 951 bp, Unknown
  Obtained from environmental sample
  misc_feature (1)..(951): n is a, c, g, or t
atgaaactaatggatttggaacaggaagaagccctatatgaattcctcgaaaatgtaagcgagccgtttactttggacgatattactacctatatacaggcaacggggcaaaaaccaaagaaacagttaacagcggaaataggcgcttatttggacgccagaaaaatcgctttcagacaggacaataaacattgggtatcacgtaaaacctgttttgaacccgccgtttttgttattactccttcacggcttgaattgttaaacgggattttgatccccggtcaccgctgtgttccgtttgccaatccgctgactcttcctcatcgttataattttttttggaagggcgaagctattcccgtatcaaccacagaagcgccgcccgaagatttgtacccttattactgcgtttacggcgaagaattcgctcctcaatatatcgcaagggacaatcccgaaaacgaagaagcttttaacgccgatccttacgaagatccgcccgaagtatcgatacatacgctggatatgagaggcatttaccgtgaatgcgcttttgtgcccggagaccgttttttagtccgcactcttaattggaacgaatgtaaatttgaattggaaaaagtagggaaggatgattggtctcgctccgatttggataaatggcaggaagccgccgaaaacggttttgaaagcagttttgccatacttggtccgggtgcaagcacagaagaacaaatcgcttttgcgtattggtacggcggcaagcgtatgcgggaaatccccgcttattctttggaagaatttttgtatgagaaaacaaaccgtatcgataccgtaccttacggaatagaaacccgcttttggtttgcggcagagaaatcccgacagtacaaatcttcaaaattacacggttccgcccgacagaacatttatagaagacttgctttatga

SEQ ID NO: 8968 - protein, 316 aa, Unknown
  Obtained from environmental sample
  misc_feature (1)..(316): Xaa is any amino acid
MKLMDLEQEEALYEFLENVSEPFTLDDITTYIQATGQKPKKQLTAEIGAYLDARKIAFRQDNKHWVSRKTCFEPAVFVITPSRLELLNGILIPGHRCVPFANPLTLPHRYNFFWKGEAIPVSTTEAPPEDLYPYYCVYGEEFAPQYIARDNPENEEAFNADPYEDPPEVSIHTLDMRGIYRECAFVPGDRFLVRTLNWNECKFELEKVGKDDWSRSDLDKWQEAAENGFESSFAILGPGASTEEQIAFAYWYGGKRMREIPAYSLEEFLYEKTNRIDTVPYGIETRFWFAAEKSRQYKSSKLHGSARQNIYRRLAL

SEQ ID NO: 8969 - DNA, 927 bp, Unknown
  Obtained from environmental sample
  misc_feature (1)..(927): n is a, c, g, or t
atgagggcgaggctttatgatgttgatgtaaggacaataaatgaacatatccagaaaatttatttagataatgagctgtcggaaactccanctatccggaatttccggatagtcaaaaccgagggttcacggcaagtagagcgcgatataaaacactataacctgcaaatgattaccgctgttgctttcaaggtgaataatgaccgcgcggtgcaatttcgcaagtgggctggacagattgtcaaagattacacagttcagggttggactatggatgttgacagactaaaaaaagggcatatgtttacggatgaatattttgaccgccaactgcagtatatccgcgaaatacggttgagcgaacgcaaattttaccaaaaagttacagatatttattcaactgcgtttgactatgacaaggacgcaaaaacaacgcagagttttttcaaattggtacaaaacaagctccattacgcggttcataggcacaccgccgctgagttaatcgtagagcgttccaatgcagagaaagagtatatgggactcacgacttgggaaactgccccatacggaaaaataatcaaagccgatgtttctatcgccaaaaattatttgaacgagcaggagattaattaccttgaacgcattgtttccgtttatttagattttgccgaaatgcaagccgaacgaaaaatccccatgtcaatggaagattgggcgaagcggttggatggctttctggaattcaacggcaatgaaattttaacaggggctggtaaaatatcccatgaacaggcgaaacttcatgcggaaaccgagtttgaaaaataccgcattgtgcaggacaggctgtttaaaagcgattttgacagatttattgaacttgaggctgcaacaaaaaaacaggtagagagaaaagaacaataa

SEQ ID NO: 8970 - protein, 308 aa, Unknown
  Obtained from environmental sample
  misc_feature (1)..(308): Xaa is any amino acid
MRARLYDVDVRTINEHIQKIYLDNELSETPXIRNFRIVKTEGSRQVERDIKHYNLQMITAVAFKVNNDRAVQFRKWAGQIVKDYTVQGWTMDVDRLKKGHMFTDEYFDRQLQYIREIRLSERKFYQKVTDIYSTAFDYDKDAKTTQSFFKLVQNKLHYAVHRHTAAELIVERSNAEKEYMGLTTWETAPYGKIIKADVSIAKNYLNEQEINYLERIVSVYLDFAEMQAERKIPMSMEDWAKRLDGFLEFNGNEILTGAGKISHEQAKLHAETEFEKYRIVQDRLFKSDFDRFIELEAATKKQVERKEQ

SEQ ID NO: 8971 - DNA, 507 bp, Unknown
  Obtained from environmental sample
  misc_feature (1)..(507): n is a, c, g, or t
atgacagatgctcactgtcatccatgggaccttatagaatttgataagctcgccgaaggaaaacgacgggaaacaggaactgcggttgccgcaagcgcatggaacagggaagagtttgagtaccacgaaggcctggcaagaaaagccaaagaagacggcgctccgcctttattccgctgttttgcccttcatccccagctctcaggcgaaaaggatttttccccatccgaaggtctggaactcctcaattcgcttgcggctgaagaaaggctggatgcggtaggggaaacaggttttgatctatacaatgaaaaatacaaagccgctgaaagtattcaggataaaatgtttaataatcacctcgaagtggcatcgcattatggattgccaatgatccttcacttaagaaaagcggatgcacaaaatttttccattcacaaagcaattaaaaaacatccccgctgtagttttcattcaggcccggaaccgagggagctctgtcgataa

SEQ ID NO: 8972 - protein, 168 aa, Unknown
  Obtained from environmental sample
  DOMAIN (1)...(168): TatD related DNase
  misc_feature (1)..(168): Xaa is any amino acid
MTDAHCHPWDLIEFDKLAEGKRRETGTAVAASAWNREEFEYHEGLARKAKEDGAPPLFRCFALHPQLSGEKDFSPSEGLELLNSLAAEERLDAVGETGFDLYNEKYKAAESIQDKMFNNHLEVASHYGLPMILHLRKADAQNFSIHKAIKKHPRCSFHSGPEPRELCR

SEQ ID NO: 8973 - DNA, 696 bp, Unknown
  Obtained from environmental sample
  misc_feature (1)..(696): n is a, c, g, or t
atgacggctgttcttttcggcgtttcttttcaggaagcaaatcccttgtcgtgggattctacggctctggataagtcaatgacgtttataaacaactggaccgatgaaataaataccaatactcaggctgaagatgattttacctttaaatacttttttgaaccgccggaaagattgattcaaaacggacgcatacttttttcgtatgcggaaagcaacgagctttttttactgagcgatgaaagcaaaaaccttcttgattttcgctggataaaagaacaagacaatattacacttacggaaaattcggtttatttgggggttccaaaaaggtttaaatccaaaaaagcggctgaagagtttattatatggtttttcaagattgaaaaccaacgcagaattttggaatattcaagagtcaacaggataagcgagaatatctttggcatctgcggagggttttcagcgttacgccaggttaccgaacaaatctatccgcttttctatcctgagcttgtgggacgaatgcccccgtcggaatattttatgctcccaaactcactgcccgccaactggttaattatcaaagaacgagtgataatgccctatcttcatgaacgcgccagaaaggagcgcccaatcgaggtttacccccttgaacgccgccttgccgactggctaagactgaaccgttag

SEQ ID NO: 8974 - protein, 231 aa, Unknown
  Obtained from environmental sample
  misc_feature (1)..(231): Xaa is any amino acid
MTAVLFGVSFQEANPLSWDSTALDKSMTFINNWTDEINTNTQAEDDFTFKYFFEPPERLIQNGRILFSYAESNELFLLSDESKNLLDFRWIKEQDNITLTENSVYLGVPKRFKSKKAAEEFIIWFFKIENQRRILEYSRVNRISENIFGICGGFSALRQVTEQIYPLFYPELVGRMPPSEYFMLPNSLPANWLIIKERVIMPYLHERARKERPIEVYPLERRLADWLRLNR

SEQ ID NO: 8975 - DNA, 393 bp, Unknown
  Obtained from environmental sample
  misc_feature (1)..(393): n is a, c, g, or t
atgggcgagaaaggggacgaagttcagctcctgggattccttaacgccgtcctggggaaaaccggggaagaccgcttcaccgccgtgaaaatcatcgaaaataaatacctgtcaccggaagtcatcggcaacaagggaagcgtactcgacgtgcgggccgtgctacagggtaaaacaagagtcaatatcgaggtgcaggtccgcaatcagtacaacatggatcggcgcagccttttctactggagcaaggaatacacgggaaacctgaaacaaggacagaattaccggaaactgccggatgtcatagccattaacatcgttaatttcgactttccgccggtacggaattgccacacgcggtttcgtttacgacaggtggctgatctggcttga

SEQ ID NO: 8976 - protein, 130 aa, Unknown
  Obtained from environmental sample
  misc_feature (1)..(130): Xaa is any amino acid
MGEKGDEVQLLGFLNAVLGKTGEDRFTAVKIIENKYLSPEVIGNKGSVLDVRAVLQGKTRVNIEVQVRNQYNMDRRSLFYWSKEYTGNLKQGQNYRKLPDVIAINIVNFDFPPVRNCHTRFRLRQVADLA

SEQ ID NO: 8977 - DNA, 633 bp, Unknown
  Obtained from environmental sample
  misc_feature (1)..(633): n is a, c, g, or t
atgcggcgcggcctcgagcgcgccggggcggcaaaggtgaaaacgctctacgcctccgccaacgggcccaacggcaggcggcacgtgcggtcggcgatagacgccatgcgaaaagcgcagacattcggagtggtcgccattgacataatagaaaaagttctcggcgccgaatccgccgcgaagcacgcaaaaacggccgtcaaagacgaggcggagttccgcagacgggtggaactggagtttgccggttcaacggtgctgggggtaatgaaggaggtctgcggcgacgattgcacggtgattctgacctccggccacggacacgtactttgccgccgcgccagcgagatttacgagacggcgaataaactaggcccgaacctgcgatacttcatcggcgaaaaagcgtcggtcgacgatcgggaggtgtttctttttgcggatttgtcgcatctcagattgccgccgaaagcgcaaggcaaggtatgcctcttggcgcgtgagaatttttatctcgcgctgaacgagagcgcaggcccaccgtcaaacgtctttcagagcggcggcatatcgccggaggagatggtagtgccgctgtacatctgccgtccgctcgcgggtatggcgcgttag

SEQ ID NO: 8978 - protein, 210 aa, Unknown
  Obtained from environmental sample
  misc_feature (1)..(210): Xaa is any amino acid
MRRGLERAGAAKVKTLYASANGPNGRRHVRSAIDAMRKAQTFGVVAIDIIEKVLGAESAAKHAKTAVKDEAEFRRRVELEFAGSTVLGVMKEVCGDDCTVILTSGHGHVLCRRASEIYETANKLGPNLRYFIGEKASVDDREVFLFADLSHLRLPPKAQGKVCLLARENFYLALNESAGPPSNVFQSGGISPEEMVVPLYICRPLAGMAR

SEQ ID NO: 8979 - DNA, 531 bp, Unknown
  Obtained from environmental sample
  misc_feature (1)..(531): n is a, c, g, or t
atgggctttgtcgggcaaaatggcgcaggaaaaaccacgacaatacgtttgatattgaatatgctaaaaagagatagcggggaaatcaaggtttttgggctggataatatttcaaatgaactggaaataaaacaaaatttaggaataatatttgacgaccttttttttattgaaatgtggcaaatcaaagacatagaagatgcgttaaaagcgttttattattcctgggacagcaaattgtacaggcaatatttagacaggtttcatctgcctcttaataaaagaataaaagatttatcaaggggaatgaaagttaaattaatgcttgcggtggctatgtctcataacgcgaaacttcttatacttgacgagccaaccagtgggcttgacccggttgcccgaaatgagcttttggatatttttaaggaatacatagcaagcggagaaaggagcattttattctctacccatatcacatccgatttggtaagagttgctgattatataacactaattagtgtctgtctataa

SEQ ID NO: 8980 - protein, 176 aa, Unknown
  Obtained from environmental sample
  DOMAIN (1)...(172): ABC transporter
  misc_feature (1)..(176): Xaa is any amino acid
MGFVGQNGAGKTTTIRLILNMLKRDSGEIKVFGLDNISNELEIKQNLGIIFDDLFFIEMWQIKDIEDALKAFYYSWDSKLYRQYLDRFHLPLNKRIKDLSRGMKVKLMLAVAMSHNAKLLILDEPTSGLDPVARNELLDIFKEYIASGERSILFSTHITSDLVRVADYITLISVCL

SEQ ID NO: 8981 - DNA, 633 bp, Unknown
  Obtained from environmental sample
  misc_feature (1)..(633): n is a, c, g, or t
atggttgtctgtgccgcccgtcagtatttcaaggccgttcttcatgcaggaagcggccagggcctggctgttttcaacaatgccggccgcatatttctgaaactccggttttctggcttccctgaacgccacggctttggaggcgattacatgcggcagggggccgcccatggtcaggggacagcccttgtccaggcttgcggcaaattcattgacggaaagaaccatgcccgcccttgggcctctcagggtcttgtgggtggtggtggtaaccacatgggcatgggcgaccggatcgtaatccccggtgaaaaccttgcccgccacaaggcccgcgaaatgcgccatgtccaccataaacaccgcgcctaccgaatcggcaatctccctcatacggcggaaattgatcttccgcggatacgccgaatacccggccagcaggatgagcggcctgacctttttcgcctggctttcgatttcatcataatccagaagcccggttttttgggaaaccgtgtagctgtaaatatcaaacattttggaagaaagattgtaccggtagccgtgggtcagatggccgccggaaaaataatccaggcccagaagccgctggtttcccagttctgcctttag

SEQ ID NO: 8982 - protein, 210 aa, Unknown
  Obtained from environmental sample
  misc_feature (1)..(210): Xaa is any amino acid
MVVCAARQYFKAVLHAGSGQGLAVFNNAGRIFLKLRFSGFPERHGFGGDYMRQGAAHGQGTALVQACGKFIDGKNHARPWASQGLVGGGGNHMGMGDRIVIPGENLARHKAREMRHVHHKHRAYRIGNLPHTAEIDLPRIRRIPGQQDERPDLFRLAFDFIIIQKPGFLGNRVAVNIKHFGRKIVPVAVGQMAAGKIIQAQKPLVSQFCL

SEQ ID NO: 8983 - DNA, 678 bp, Unknown
  Obtained from environmental sample
  misc_feature (1)..(678): n is a, c, g, or t
atgtttgatatttacagctacacggtttcccaaaaaaccgggcttctggattatgatgaaatcgaaagccaggcgaaaaaggtcaggccgctcatcctgctggccgggtattcggcgtatccgcggaagatcaatttccgccgtatgagggagattgccgattcggtaggcgcggtgtttatggtggacatggcgcatttcgcgggccttgtggcgggcaaggttttcaccggggattacgatccggtcgcccatgcccatgtggttaccaccaccacccacaagaccctgagaggcccaagggcgggcatggttctttccgtcaatgaatttgccgcaagcctggacaagggctgtcccctgaccatgggcggccccctgccgcatgtaatcgcctccaaagccgtggcgttcagggaagccagaaaaccggagtttcagaaatatgcggccggcattgttgaaaacagccaggccctggccgcttcctgcatgaagaacggccttgaaatactgacgggcggcacagacaaccatctgttccttgccaatgtgcagaccgcgggtcttacgggccggcagggggaaaacgcgtgcgccgaatgcaatatcatccttaacaggaacagccttccctttgatcccacggcccctggtatacgtcgggcttgcgcatag

SEQ ID NO: 8984 - protein, 225 aa, Unknown
  Obtained from environmental sample
  DOMAIN (1)...(224): Serine hydroxymethyltransferase
  misc_feature (1)..(225): Xaa is any amino acid
MFDIYSYTVSQKTGLLDYDEIESQAKKVRPLILLAGYSAYPRKINFRRMREIADSVGAVFMVDMAHFAGLVAGKVFTGDYDPVAHAHVVTTTTHKTLRGPRAGMVLSVNEFAASLDKGCPLTMGGPLPHVIASKAVAFREARKPEFQKYAAGIVENSQALAASCMKNGLEILTGGTDNHLFLANVQTAGLTGRQGENACAECNIILNRNSLPFDPTAPGIRRACA

SEQ ID NO: 8985 - DNA, 393 bp, Unknown
  Obtained from environmental sample
  misc_feature (1)..(393): n is a, c, g, or t
atgataactgaggaccctgcttatcatatccccattccaaaagccatccttaccaactcgccgaaagaacatgccgatttgattctggacaaacttggagttgctgatctctttacccatatttttgacatccgtcaatgcggtttcaagggcaagccgcaaaaagaagtttttgaccacgctctaaataagcttggcctttgcgccgctgaagttctctttatagacgacaaccctcataatgtagaagtttttatcggttttggcggcaatggtcttgtgtttgatgaaaacgacatacacgaaaattgtaccctgccgaggatacatgaactcagtcagattatggattatataaagaatagggaatggggagtagggagtagggagtag

SEQ ID NO: 8986 - protein, 130 aa, Unknown
  Obtained from environmental sample
  misc_feature (1)..(130): Xaa is any amino acid
MITEDPAYHIPIPKAILTNSPKEHADLILDKLGVADLFTHIFDIRQCGFKGKPQKEVFDHALNKLGLCAAEVLFIDDNPHNVEVFIGFGGNGLVFDENDIHENCTLPRIHELSQIMDYIKNREWGVGSRE

SEQ ID NO: 8987 - DNA, 786 bp, Unknown
  Obtained from environmental sample
  misc_feature (1)..(786): n is a, c, g, or t
atgaaaccaaagactaaagaacttgacctgcactttgattttgacaatggaaattattaccgcctggaaaagattatcaaacgcattgccagggtcagggaaacggttataaaaatcaacctcaacggtcagaatgacttgaagattattccatctgtaattggcaaatgtgtgcttcttgaagaacttgatgtgtcaaacacgtccattacaaaaatccccgattatattttttcccttccaaatttccgttccctctcctgcggcagtgataatcttatcctctctccggcttttttccggaatgccgtaaagctggaaaaacttcaactaagaataaacaaaggagaaagtatcagcgaagaaaatttttcattgattggaaccctaaagaacctacaggaacttgagcttgaaatttttcatggcgacagtttggaaagaaaaaccctgtgcctccctgagtcctttgccttccaccccgctttgaaaaggctcaaaatatcctctgttttttctgccagcaagcaacagccttttgatcttgcccaagcagcgcagctccttgcatcctgccccttttttgaatccctgtccctttcaaacctttcggtaggcgaaggccagcggaaccttagcctgcttacgggcctcaaagaactggaactggaagacctttcttttgttggcaatcccttccagtccatagcctccctgcgcaagcttgagaaattagcaatttatgaggacaggcacataacaccaaacgaactgccggacaattga

SEQ ID NO: 8988 - protein, 261 aa, Unknown
  Obtained from environmental sample
  misc_feature (1)..(261): Xaa is any amino acid
MKPKTKELDLHFDFDNGNYYRLEKIIKRIARVRETVIKINLNGQNDLKIIPSVIGKCVLLEELDVSNTSITKIPDYIFSLPNFRSLSCGSDNLILSPAFFRNAVKLEKLQLRINKGESISEENFSLIGTLKNLQELELEIFHGDSLERKTLCLPESFAFHPALKRLKISSVFSASKQQPFDLAQAAQLLASCPFFESLSLSNLSVGEGQRNLSLLTGLKELELEDLSFVGNPFQSIASLRKLEKLAIYEDRHITPNELPDN

SEQ ID NO: 8989 - DNA, 621 bp, Unknown
  Obtained from environmental sample
  misc_feature (1)..(621): n is a, c, g, or t
gtgttggtaaaggaaatatttaccagcgaagaaaccgaatacctggaaaactataccgttcccaaaggcgaagttttccggaaaaaggaactgaacagctatgcgtatgccgaagggttaaaatacctgatggcttttttgaaagaatttcttgagaaggaaattcatgaactgcttgatattctgctcatcaggggccagtggaccaataacgccttttccaaggaaatgtccgaagccctgcaccagcttctggagcttcccgagtcaatttcccgcctggatgaaatgctgtccgaggacggttcggaaggttcccgcctgaaagccgcgctgatacgcattgaccgggaccacacgcaggcccgctacatcaacagcataattgacgggattaacgataccgccctggacctgatcagtaatgccgcgcagcaatttaccatcatcggcaaacatctgaaaaacctggcggaggatatcaagaagaagcacccggaaatgatccttaactggcgcgaattgaattccgtttcaagggaaccgcttccgcaggtgatggcggaagattgcaggatagtcaactgctttatccagttaatgcacctgtgcgagcagtaa

SEQ ID NO: 8990 - protein, 206 aa, Unknown
  Obtained from environmental sample
  misc_feature (1)..(206): Xaa is any amino acid
MLVKEIFTSEETEYLENYTVPKGEVFRKKELNSYAYAEGLKYLMAFLKEFLEKEIHELLDILLIRGQWTNNAFSKEMSEALHQLLELPESISRLDEMLSEDGSEGSRLKAALIRIDRDHTQARYINSIIDGINDTALDLISNAAQQFTIIGKHLKNLAEDIKKKHPEMILNWRELNSVSREPLPQVMAEDCRIVNCFIQLMHLCEQ

SEQ ID NO: 8991 - DNA, 330 bp, Unknown
  Obtained from environmental sample
  misc_feature (1)..(330): n is a, c, g, or t
atgggcgaactgatcgcctgcaacgccgccgcccagtcggcttgggtcgccggcacggcgctgggcgccttgtccggcgcctttcttggcgacacccggcccttcgggcttgattttaccctggcggccatgttcatcgccttgctcacgccaaggtgccgcgagcggccgcagttgctggcggcgatcacatccgcctgcctgtccgtaagcctgaccctgattggggcgaaccgctttgctgtggtcatcgccacagtggtcacggcctgtctcgcgggctggctgaccgggcgcaaggccggaaaaaagccggggaacgcggcatga

SEQ ID NO: 8992 - protein, 109 aa, Unknown
  Obtained from environmental sample
  misc_feature (1)..(109): Xaa is any amino acid
MGELIACNAAAQSAWVAGTALGALSGAFLGDTRPFGLDFTLAAMFIALLTPRCRERPQLLAAITSACLSVSLTLIGANRFAVVIATVVTACLAGWLTGRKAGKKPGNAA

SEQ ID NO: 8993 - DNA, 498 bp, Unknown
  Obtained from environmental sample
  misc_feature (1)..(498): n is a, c, g, or t
gtgccgcgagcggccgcagttgctggcggcgatcacatccgcctgcctgtccgtaagcctgaccctgattggggcgaaccgctttgctgtggtcatcgccacagtggtcacggcctgtctcgcgggctggctgaccgggcgcaaggccggaaaaaagccggggaacgcggcatgaataccgcggattttttgctgtgccttgccggcatgagtctggtcaccgctgtgccgcgcatcctgcccctgaccttgctggccgggcgcgtcctgcctccggctttagcgcgttgcctgtcctttgtgccggcggctgttctgtccgccctgcttgctcccgaacttctggtgcgcggcggcgcgctcagtcttgggccggacaatctttttctgctggcggctgtgccgacctttctgattgcctggcgaagcgcaagcctgttcggaagcatcgccgcgggcatggccgcaatcggcctttgcaggctgtgcggctggtga

SEQ ID NO: 8994 - protein, 165 aa, Unknown
  Obtained from environmental sample
  DOMAIN (63)...(162): Branched-chain amino acid transport protein (AzlD)
  misc_feature (1)..(165): Xaa is any amino acid
MPRAAAVAGGDHIRLPVRKPDPDWGEPLCCGHRHSGHGLSRGLADRAQGRKKAGERGMNTADFLLCLAGMSLVTAVPRILPLTLLAGRVLPPALARCLSFVPAAVLSALLAPELLVRGGALSLGPDNLFLLAAVPTFLIAWRSASLFGSIAAGMAAIGLCRLCGW

SEQ ID NO: 8995 - DNA, 573 bp, Unknown
  Obtained from environmental sample
  misc_feature (1)..(573): n is a, c, g, or t
ttgggnnnnccgaagtacaagattggcacgagctacgntccccacgaccaggtggaagccatgactatggcaagcaagatcgtcgttatgaaggacggaagggtgcagcagattggcacgcccctctatctgtacaacaatccgaacaacaaattcgtagccggattcatcggctccccgccgatgaacttccttaccgtaagggtctcggaagaaggcagctcaatcgtgctggatgagggatcgttcaaggttaaggcggacgcgtctcacgccgcccacctgaaaaaatacgcggggaaagaaatcttcttcggcattcgccctgaggatatgaactacgtggaatccggcggggacaacagctttgccacaaaagtaaccgtggttgagccgctaggcgcggatatacacctctggcttaccaccgggacacaacccctggttgcgcgcaccgagcctcaccatgtgttcaaggtcggcgaaactgccaggttcattcccaaaatggataaagcccgttattttgacaaggaaacagagcttgccatcctgccaggaccacccaaataa

SEQ ID NO: 8996 - protein, 190 aa, Unknown
  Obtained from environmental sample
  DOMAIN (105)...(176): TOBE domain
  misc_feature (1)..(190): Xaa is any amino acid
MGXPKYKIGTSYXPHDQVEAMTMASKIVVMKDGRVQQIGTPLYLYNNPNNKFVAGFIGSPPMNFLTVRVSEEGSSIVLDEGSFKVKADASHAAHLKKYAGKEIFFGIRPEDMNYVESGGDNSFATKVTVVEPLGADIHLWLTTGTQPLVARTEPHHVFKVGETARFIPKMDKARYFDKETELAILPGPPK

SEQ ID NO: 8997 - DNA, 321 bp, Unknown
  Obtained from environmental sample
  misc_feature (1)..(321): n is a, c, g, or t
atggttattgacgaaaatcatcctttctcctcattcgggctttcagaggcggttttaaaggctattgcccgcaaaggctggacagcgcccagttcgatccaaagtatagccctgcccaggctgcttgccgatgaggggcattgtattgtaaaggcccgtaccggcacaggaaaaacagccgcttttgggattccgcttattgaaaggctcacccagggccggtcagtccccgcgcgcgcttatcccttgcccgacccgagaactggcctttcaagtttccaggaaatcgcatctctggttacgggcattatcccagggtaa

SEQ ID NO: 8998 - protein, 106 aa, Unknown
  Obtained from environmental sample
  misc_feature (1)..(106): Xaa is any amino acid
MVIDENHPFSSFGLSEAVLKAIARKGWTAPSSIQSIALPRLLADEGHCIVKARTGTGKTAAFGIPLIERLTQGRSVPARAYPLPDPRTGLSSFQEIASLVTGIIPG

SEQ ID NO: 8999 - DNA, 543 bp, Unknown
  Obtained from environmental sample
  misc_feature (1)..(543): n is a, c, g, or t
atgatcagatcggccgaggactggaccgccgggaaaatgactgaaagggcggcggcgggcaatggcagaagagaagcccgccacatcacttccattaatttgaaccctacggaactggaagcccttaccaaagcccgctttgtccgctacgaaactgtaaaagccaacgaaacccgttatgaggatattggctgcgaaaacgccgaccttgtgctcgtcgcctacggcacttcggcgcgcgtctgcctgggggcgcgcatgctcgccgaaaaagaaggcattaagcttggtatcttcagacccataactgtctggcctttcccgtttaaggctctgtccggattggcggcgaagaaaaaaacttttcttacagtggagatgagcgaggggcagttggtcgaagacgtgaagcttgctgtttatgaagctgtctcgaacggtttgacttcacccggcaaggtgcattttttgggacgttccggcgggataattcccacggaagaagaagtctttgccgaagcgaaaaggattttaggtaaataa

SEQ ID NO: 9000 - protein, 180 aa, Unknown
  Obtained from environmental sample
  misc_feature (1)..(180): Xaa is any amino acid
MIRSAEDWTAGKMTERAAAGNGRREARHITSINLNPTELEALTKARFVRYETVKANETRYEDIGCENADLVLVAYGTSARVCLGARMLAEKEGIKLGIFRPITVWPFPFKALSGLAAKKKTFLTVEMSEGQLVEDVKLAVYEAVSNGLTSPGKVHFLGRSGGIIPTEEEVFAEAKRILGK

SEQ ID NO: 9001 - DNA, 339 bp, Unknown
  Obtained from environmental sample
  misc_feature (1)..(339): n is a, c, g, or t
atgaaacaaatatacggctatcctgacagcttgtacaaaattcccacaaagtattgcggaggctgcggtcacggtgtgatacaccggatcatcgccggcatcattgacgagcttggcgtacgggaaaaagcggtcatcaccaatccggtgggctgcgcgatttgngcggatctgtactttgatttcgattcggtgcagcccccccacgggcggacacccgccgcggccaccggcgtncagcgcatgctgcccgatcacctggttatatgctaccagggcgacggcgacatggccgccataggcaccgcgnaaatgatccacgcggcgaaccgcgggtga

SEQ ID NO: 9002 - protein, 112 aa, Unknown
  Obtained from environmental sample
  misc_feature (1)..(112): Xaa is any amino acid
MKQIYGYPDSLYKIPTKYCGGCGHGVIHRIIAGIIDELGVREKAVITNPVGCAIXADLYFDFDSVQPPHGRTPAAATGVQRMLPDHLVICYQGDGDMAAIGTAXMIHAANRG

SEQ ID NO: 9003 - DNA, 354 bp, Unknown
  Obtained from environmental sample
  misc_feature (1)..(354): n is a, c, g, or t
atgaaagaattactgcccatcgccgaatttgcccgaagaatcagggaaaatatcgaaaccgttttccttggaaaaaccgctgttgtcgatatgctgataacagcttttcttgcccgcgggcacgtactgctggaagatgtacccggcaccggaaagacaattctggcgcgcgcttttgcgtcaagccttaatctcagctttgccagaatccagtgtacgccggacttgctgcccgccgacatactcggtgtttcggtatggcagcaggatgaagagtcagagaagcgtaacgggcgttttgtgtacagaccctggaccgctcnngtgaatcaattcgtgcttgggacgaaataa

SEQ ID NO: 9004 - protein, 117 aa, Unknown
  Obtained from environmental sample
  DOMAIN (41)...(114): ATPase family associated with various cellular activities (AAA)
  misc_feature (1)..(117): Xaa is any amino acid
MKELLPIAEFARRIRENIETVFLGKTAVVDMLITAFLARGHVLLEDVPGTGKTILARAFASSLNLSFARIQCTPDLLPADILGVSVWQQDEESEKRNGRFVYRPWTAXVNQFVLGTK

SEQ ID NO: 9005 - DNA, 567 bp, Unknown
  Obtained from environmental sample
  misc_feature (1)..(567): n is a, c, g, or t
ttgattcattttagtttaaaaaaatataccgctcctgatttttcgagtccggaactggcgaatgcccctgatgcgacgcttgtctcctcgccggcggacggcgtcgctcctgaagactatcatgctacgaccatattcccggagtatttcaaggtggacggtaaatggctgctggcggcggaaagccgcatggactgtctggccgtttacgaaaacggcaggattaaagtacgggaatttcgtcatttaaaaaaaggagaccttgtttttataggccgcagcgaatccggtgtgcagggaatttatgtacacacaaacggttttaatgatgttcaaaaaacaggcggggaaaattttgcttttcgtcaaaatcgcagccgtgaaacagccttttccattaattacgattttttgtatgaacaactgcgctatgaanaagacaatggttatattgtctgggtcgccggtccggcctgcacctttgatgccgacagccgcaatgctttttcggcctggccgcaacggntatgttccgctttactggcaggcatgctcttgcactcatga

SEQ ID NO: 9006 - protein, 188 aa, Unknown
  Obtained from environmental sample
  misc_feature (1)..(188): Xaa is any amino acid
MIHFSLKKYTAPDFSSPELANAPDATLVSSPADGVAPEDYHATTIFPEYFKVDGKWLLAAESRMDCLAVYENGRIKVREFRHLKKGDLVFIGRSESGVQGIYVHTNGFNDVQKTGGENFAFRQNRSRETAFSINYDFLYEQLRYEXDNGYIVWVAGPACTFDADSRNAFSAWPQRXCSALLAGMLLHS

SEQ ID NO: 9007 - DNA, 561 bp, Unknown
  Obtained from environmental sample
  misc_feature (1)..(561): n is a, c, g, or t
ttgcagtattatcatacgctgttgaatatttcggtaacggaaaaatggaatttcagggttattttcgcggcgcaggccggaatatccgctatatttaaacagccgggacgcacggatatggatccaaaagttccgattccgattgaagatacgaataaactttccgtggacggaatgtttatcggaagaggatggaaaaatgaataccgcaacaaagggttattgcttttggataactggcttgaattgcgtatccccattgtaccgggaattttagcgtgggattttttctttgacgcggccggcgttgagacaacgcaaggctattattttggaagggatgaaaacggagattccaattttacctctgataatttgcgctttagcttaggcggaggcttaaggtttaccattccgcagtttcctttccgcctggggctggcaaagcgtttcaggtttatagacggggaattaaactgggaaccgggagaattattcggggattcaaatgatcccagaaaggggctcgatcttgtaatttcgattgtgttatcatattag

SEQ ID NO: 9008 - protein, 186 aa, Unknown
  Obtained from environmental sample
  misc_feature (1)..(186): Xaa is any amino acid
MQYYHTLLNISVTEKWNFRVIFAAQAGISAIFKQPGRTDMDPKVPIPIEDTNKLSVDGMFIGRGWKNEYRNKGLLLLDNWLELRIPIVPGILAWDFFFDAAGVETTQGYYFGRDENGDSNFTSDNLRFSLGGGLRFTIPQFPFRLGLAKRFRFIDGELNWEPGELFGDSNDPRKGLDLVISIVLSY

SEQ ID NO: 9009 - DNA, 930 bp, Unknown
  Obtained from environmental sample
  misc_feature (1)..(930): n is a, c, g, or t
atgaataaccagtataaattcgataaaaagtttgatgatgctggattttcattatataaagaagtcggttttaatgataatcaaaaagcgcacaaagccttttgggataaatatgaacgtccgcctcttgaggaatattgggattatataatcaaccgcagggatttattagttccacaggatataagagaaagaaaagggtctttttttacaccccaacaatgggtagaattatcacaaaattatattgctgatgttttcggtgaagattggcaagatgaatattatatatgggattgcgccgccggtactggcaaccttttggcaggtcttacaaataaatacaatatttgggcttcaacgcttgataaagccgatgttgacgtaatgaaagaccgtataaagaacggtgcaaatttactggaagaccatgtttttcaatttgattttttgaatgatgaatttactaaactgccaaaaggactacatgacattattaaaagtgataaaaaacgaagaaaattaattgtttatattaatcccccttatgccgaagcaacatctacagcaacaagggttggaacaaaagaaaataagacaggtgtttctactggaaataaaattcacgaaaaatataaattgtttttaggtaaagctagaaatgaactttttgctcaatttttaactagattattcaaagaaattcaattttgtaaaattgcgaattttgcaaccttaaaagcgttatgtgcttttaactttgtcgattttagaacaaactttacagcanaattagaaagtttgtttgtagttcctgcggatactttcgacaatngtaaaggtcattttccaataggatttcatatttgggatactgaaaaaaaacgattgtttgaaaagatttcagcagatgttttgataagatggtga

SEQ ID NO: 9010 - protein, 309 aa, Unknown
  Obtained from environmental sample
  misc_feature (1)..(309): Xaa is any amino acid
MNNQYKFDKKFDDAGFSLYKEVGFNDNQKAHKAFWDKYERPPLEEYWDYIINRRDLLVPQDIRERKGSFFTPQQWVELSQNYIADVFGEDWQDEYYIWDCAAGTGNLLAGLTNKYNIWASTLDKADVDVMKDRIKNGANLLEDHVFQFDFLNDEFTKLPKGLHDIIKSDKKRRKLIVYINPPYAEATSTATRVGTKENKTGVSTGNKIHEKYKLFLGKARNELFAQFLTRLFKEIQFCKIANFATLKALCAFNFVDFRTNFTAXLESLFVVPADTFDNXKGHFPIGFHIWDTEKKRLFEKISADVLIRW

SEQ ID NO: 9011 - DNA, 876 bp, Unknown
  Obtained from environmental sample
  misc_feature (1)..(876): n is a, c, g, or t
gtgctgccgctggtgtcatttatggacatttttgtatacaacattgatattttgcaggcggcgaattgtgatcgcccgcccaaaacccgcgccgaatttcttgctgccgcgcgggctgttgcgacaagcagccccgccgtaccggatcaggaaccggtttccccttttgccctgggtttgagcagtgccgatccgctggccctgcgccggtacatttacccctggatttgggcgaatggcggagatatacccgtgattgacactgcggatgagaagccgctttcccaagtgacacttcccagagtaattacggacaccattgcttttttggggcagtttaacagcgaggggttgcttgcgccgggaacctttgaaaaaaccagtacgcagcggctggaagaatttactcaaggaaagatcgccatgatgacagcctcgacgcgggacatcgcctttttacggcgcaatgcccatggtattacgttaggtattacagcgatgccggcagccgcgcaggggaaaaaccggctggggctttcaggcatctacgccggtatcagtagcgattgcaccctgcttgatgaagcctggattttccttgcttttatagcgggaaaaagccatgtgcttgctgaaggggttggcgctgttcccggcagttatcctaatgtcatttccgacgacaacgtcgaanaagaccccttgtactcaaaagcctgggacatttttgaggcggcggacataattgattaccgtcccggtcagccctctgaagaacacattaaccgcattttcagggaaagcttgcggaagcgtttaagtaaagaaataattatgcattancagactgttagtacttctccgctttacggctga

SEQ ID NO: 9012 - protein, 291 aa, Unknown
  Obtained from environmental sample
  misc_feature (1)..(291): Xaa is any amino acid
MLPLVSFMDIFVYNIDILQAANCDRPPKTRAEFLAAARAVATSSPAVPDQEPVSPFALGLSSADPLALRRYIYPWIWANGGDIPVIDTADEKPLSQVTLPRVITDTIAFLGQFNSEGLLAPGTFEKTSTQRLEEFTQGKIAMMTASTRDIAFLRRNAHGITLGITAMPAAAQGKNRLGLSGIYAGISSDCTLLDEAWIFLAFIAGKSHVLAEGVGAVPGSYPNVISDDNVEXDPLYSKAWDIFEAADIIDYRPGQPSEEHINRIFRESLRKRLSKEIIMHXQTVSTSPLYG

SEQ ID NO: 9013 - DNA, 933 bp, Unknown
  Obtained from environmental sample
  misc_feature (1)..(933): n is a, c, g, or t
atgccgttacttatatataggggagaatcttatatattgaaataccgttatctgctttacctgctgcttgtcctgtctggattggggcggattgaagcccagacaggggcgggcgccggtgccgccggcgctgccgcgctttatgagcggggcagggaattcatggcgcaggaggaatggtactccgccgccgaagccctgcttgactgtttgcggcaaaaccccgcccatgccgagggaaccgcagcccttgcggaatgttactacgaactgggcgagtttgacgaagccttaaactgggtgcgcaaagcaagaggtttggcgcggggcaatacctctattgtcaatctggaagccgtcaccctgatcgccctgggcaggctggacgcggccgcggcggttatctcggatctgcttgcccgcgaaccgtataaccgtgaggcgctgtttaccgccggtgaactggatattgcaagaggcagaacctccgaagctctgctccgttaccgggacgcgtcgcgccgttaccctgacgacaagcgtctgctaatatcgcttgccctggtttcgggatcgttaggcgacaatgaaggctccctttcgtttataaaccgggcgcttacccagcatcccgatgattaccgggtgttttattatgccgcttatgtcaacgccaacgcgaataacctgatcccggctatccgctatgcggagatggcccttgtccacaggcccggctacggcccggccagatccctcctcgcgaaactcaggtaccgcaacggccaatacgcggaagcggcgcggctgtctgatgaaacgatcgcggtaaaccgcgaagacctgtcggcctggtatcttaaggtctctcttatgtgcggcttggccggaaagaagattcattaccgtattcggcaacgcgcttgccattga

SEQ ID NO: 9014 - protein, 310 aa, Unknown
  Obtained from environmental sample
  DOMAIN (78)...(103): Tetratricopeptide repeat
  misc_feature (1)..(310): Xaa is any amino acid
MPLLIYRGESYILKYRYLLYLLLVLSGLGRIEAQTGAGAGAAGAAALYERGREFMAQEEWYSAAEALLDCLRQNPAHAEGTAALAECYYELGEFDEALNWVRKARGLARGNTSIVNLEAVTLIALGRLDAAAAVISDLLAREPYNREALFTAGELDIARGRTSEALLRYRDASRRYPDDKRLLISLALVSGSLGDNEGSLSFINRALTQHPDDYRVFYYAAYVNANANNLIPAIRYAEMALVHRPGYGPARSLLAKLRYRNGQYAEAARLSDETIAVNREDLSAWYLKVSLMCGLAGKKIHYRIRQRACH

SEQ ID NO: 9015 - DNA, 789 bp, Unknown
  Obtained from environmental sample
  misc_feature (1)..(789): n is a, c, g, or t
atggtaataggcttttttctcgcctttctcggaatagcccccgtgatatggcttgtcctttcaggttttaaggaccttagggaatttgtgcgggaaacgacaatacttcctaaagccttcaattttaattattacgttactacatggaaccagctgaattttatacggtactatcgcaattcgcttatatccgttgtcgggagcgttgtttgcgcggttttctttaacgggctttttggctacgtcctttcaaaagtaaagccgaagggttcaaacgtagttttagcgatggttatgtggagcctgttgatccccgccaccgtaagtattgttcccctgtttctaaatatttcccggctgcgcattaccggttctttctttcccctctggttaagcataggcgcgaacgctttttttgtcgtgctattcaaaaatttcttcgacgagcttccccattcccttattgaggcggcaagaatagacggcgcaaaggactttaccattttcataaaaatagccgtccctttaagccaggcaataattatggttatcgtcctgtacgcgataaacgccgcgtggtctgattttctgctgccatacctgacgctgagaggtaccagtcttgaaacggttatggtcaggctgtttcagttccggggaagcagggcaaccgacgtggatgtcctgcggggtatcgtattctcgcttgtgccgcccatagtcttgttttttatattccagaaatatattacccagatttcgctgaaagcgggcattagcggaaattga

SEQ ID NO: 9016 - protein, 262 aa, Unknown
  Obtained from environmental sample
  DOMAIN (58)...(256): Binding-protein-dependent transport system inner membrane component
  misc_feature (1)..(262): Xaa is any amino acid
MVIGFFLAFLGIAPVIWLVLSGFKDLREFVRETTILPKAFNFNYYVTTWNQLNFIRYYRNSLISVVGSVVCAVFFNGLFGYVLSKVKPKGSNVVLAMVMWSLLIPATVSIVPLFLNISRLRITGSFFPLWLSIGANAFFVVLFKNFFDELPHSLIEAARIDGAKDFTIFIKIAVPLSQAIIMVIVLYAINAAWSDFLLPYLTLRGTSLETVMVRLFQFRGSRATDVDVLRGIVFSLVPPIVLFFIFQKYITQISLKAGISGN

SEQ ID NO: 9017 - DNA, 903 bp, Unknown
  Obtained from environmental sample
  misc_feature (1)..(903): n is a, c, g, or t
atgttctcgcttaaagactacgtagccgacttcgccccgtcgcgcacattctgcttcctctccgaaatacaaaaactgcgcgaacaaggcctcattaaaggcggcagtttagacagcgcgctggttgttcaagacgttgagctgacagatgagaaagtagagtatatacgcaaactgtttgataactacaaaggcccggtgggtcccggacaaaacggctacctcaacaacacagaactgcgcttttggaacgaaccctgccgccacaaggcgctcgacctcataggcgacctctaccttctcggcaagccgataaacgcgcacattctcgccgcccgcaccggccacgcggccaacatagagaccgcgaaaatgattcgcgaacaggtcaagaaacaagaaaaaaagagggccggagaagcaataaaactcacatacgacgacatcaccaaaattctcccccaccgcttcccgttcctgttaatagataaggtaacgagcatcatcccagacaaagaaatcgtggcgcataaaaacgtctctttcaacgaagattacttcaacggccacttccccggcaatcctgtaatgccgggcgtgttgcaaatagaggccatagcgcaagccgccggaatcatgggcttgtacaaaaattacaacaaggagtccggcgtccccgtagacgccaaagtcctattcatgggaatagacaacgcccgctttagaggcatggtccgccccggcgacgtcttgaggatagaggtaaaaatgctccaattcaaacgcggcataggaaagttcgaggggaaatgctacgttgaggacaaacttgtttgcgaagcggttgggatggcgatgtttgagaaaatgattatattggtaggatttttaaacagattatag

SEQ ID NO: 9018 - protein, 300 aa, Unknown
  Obtained from environmental sample
  DOMAIN (1)...(131): UDP-3-O-acyl N-acetylglycosamine deacetylase
  misc_feature (1)..(300): Xaa is any amino acid
MFSLKDYVADFAPSRTFCFLSEIQKLREQGLIKGGSLDSALVVQDVELTDEKVEYIRKLFDNYKGPVGPGQNGYLNNTELRFWNEPCRHKALDLIGDLYLLGKPINAHILAARTGHAANIETAKMIREQVKKQEKKRAGEAIKLTYDDITKILPHRFPFLLIDKVTSIIPDKEIVAHKNVSFNEDYFNGHFPGNPVMPGVLQIEAIAQAAGIMGLYKNYNKESGVPVDAKVLFMGIDNARFRGMVRPGDVLRIEVKMLQFKRGIGKFEGKCYVEDKLVCEAVGMAMFEKMIILVGFLNRL

SEQ ID NO: 9019 - DNA, 498 bp, Unknown
  Obtained from environmental sample
  misc_feature (1)..(498): n is a, c, g, or t
atggaagactttggcattcttggcacagatatttcttcaaaagttttggcaaaagctatggaaggcaaatacggccctctagaggtagctcgcggattaacacccgaaatgcgcaaaaaatattttttgcaagacggcgaattttatgttataaacaacgagcttcgtcatattgtggaattcaaagcatttaacattcaagatcagttcacgcaaattggttcctttgatgttatcttctgccgcaacattttgatttatttcacagatgatgcaaaacgcagaatccttgcgcagctttaccaaacgcttgcccccaacggttatttgcttttaggttctgcagaaaacatgtacaacctaaacgacgaattcacaactgaaagatatggttcaaccactatttacagaaaaccggctacgaatccggctgcaaatacaagtacatcttttagctcgccccttgacctaccaacaaacaacatatttagaatctaa

SEQ ID NO: 9020 - protein, 165 aa, Unknown
  Obtained from environmental sample
  DOMAIN (1)...(138): CheR methyltransferase, SAM binding domain
  misc_feature (1)..(165): Xaa is any amino acid
MEDFGILGTDISSKVLAKAMEGKYGPLEVARGLTPEMRKKYFLQDGEFYVINNELRHIVEFKAFNIQDQFTQIGSFDVIFCRNILIYFTDDAKRRILAQLYQTLAPNGYLLLGSAENMYNLNDEFTTERYGSTTIYRKPATNPAANTSTSFSSPLDLPTNNIFRI

SEQ ID NO: 9021 - DNA, 399 bp, Unknown
  Obtained from environmental sample
  misc_feature (1)..(399): n is a, c, g, or t
ttgaaagggacaattagctcagttggtttagagcgctgccttcacacggcagaggtcacaagttcaaatcttgtattgtccattgattctactatatattctttgcaaggcattttggaaccttggtttactgtacaatatttgagttcagaaaatatttcaaaagaaacgctaaaaaattccgatgccttgattattcgctcaacaagaaaatacggcgcagaaactttgattggcacaaaggtaaaattcatcggaacagtcacctctggttatgagcatatagataccgagttttgcgagcaaaacggaatttttctctcaaccgcacatggcagcaatgcagagtctgttgcggaatatatatccgcagccctaattgaaatttcaaaaagataa

SEQ ID NO: 9022 - protein, 132 aa, Unknown
  Obtained from environmental sample
  DOMAIN (23)...(130): D-isomer specific 2-hydroxyacid dehydrogenase, catalytic domain
  misc_feature (1)..(132): Xaa is any amino acid
MKGTISSVGLERCLHTAEVTSSNLVLSIDSTIYSLQGILEPWFTVQYLSSENISKETLKNSDALIIRSTRKYGAETLIGTKVKFIGTVTSGYEHIDTEFCEQNGIFLSTAHGSNAESVAEYISAALIEISKR

SEQ ID NO: 9023 - DNA, 777 bp, Unknown
  Obtained from environmental sample
  misc_feature (1)..(777): n is a, c, g, or t
gtggtgacgataccgatacagaaaaggacggaaaagatgacgattaaaacagaagtcagggcgttcgattcacctgcgatcaaaatgttgcgagcggacaccgccgactccaagcagcggtatgtggagggctgcggcgtcgtgtacaataaagaagtcgagctatgggactcgtatttcgagacgattgatcggtcggcgtttgacgactgccttaaatcgaatccagaggtgaaatgcttctttaaccacgacccgaattacgtcttatcgacgaatcggtcgacgcctgctttgacgctgacgcaaagagacgacggcttgtacttctgctcgccgatacctgacacgacttacggacgcgatctctgcgagaatttaagcgttaagaatatcactggtgcgtcttttacgtttatcgtcgacgaggacaaggtatccatagacaagtcgggagcatatcatcgcaccatcacaaaatgcacccttcttgaagtcgggcctgtcgtaaatcccgcgtacacaatgacttcagtaggattaagggataaagactccctcataaaagaggctgagatgcggacgaaggcgtccgtcgagcctgagacggctgttgagacggcctctgttcaacatagggcgccggaagcagaggccgcagaggaggcgtcgaggcagcaggccgtcgccgtgttggaggcggaattacgccgtcgccgtgagaatgcaaatatttctcgtaggaatttgttggctcttttagagatagaaaactaa

SEQ ID NO: 9024 - protein, 258 aa, Unknown
  Obtained from environmental sample
  DOMAIN (24)...(190): Caudovirus prohead protease
  misc_feature (1)..(258): Xaa is any amino acid
MVTIPIQKRTEKMTIKTEVRAFDSPAIKMLRADTADSKQRYVEGCGVVYNKEVELWDSYFETIDRSAFDDCLKSNPEVKCFFNHDPNYVLSTNRSTPALTLTQRDDGLYFCSPIPDTTYGRDLCENLSVKNITGASFTFIVDEDKVSIDKSGAYHRTITKCTLLEVGPVVNPAYTMTSVGLRDKDSLIKEAEMRTKASVEPETAVETASVQHRAPEAEAAEEASRQQAVAVLEAELRRRRENANISRRNLLALLEIEN

SEQ ID NO: 9025 - DNA, 690 bp, Unknown
  Obtained from environmental sample
  misc_feature (1)..(690): n is a, c, g, or t
ttgggtatgacatctgatttaaaactttccggcctctgttcgtttgcggacgggagggttgctgttgttgacttaaatttggacaactacatctccacggagaatatgcttccaaacaaagagggcatcacccgctcggcgggtttcccgactactgcgcaaacacaagcctatcaaatgggggacgtgttggtgtctaacatccgtccgtactttcgcaaaatatggtttaccgaccgtgatggcggctgctcgaacgatgtgcttgtattgagagcaaaggacaactgtaatgctggttttctgtactacctgcttgcggatgacaattttttcaactacgccacagcgacggcaaaaggaacgaagatgccgcgaggcgacagggacgcgatcatgcggtatgccgtccccgaccttcctcttgacacgcagatcgggattgtcaatgtactatccgcccttgacgcaaaaattgccaccaacaagaagataaatcatcatttagcgtcgccaaggtcggctacggataactcgccggacattaggcggggtaagagggtgtcacggagagcggcaagacgggtgttttctgcacaattattagcgatgatttcaagtagttttgagataacgccatcaaattccaccatgatttcactgggcggcagtgtcaatgctatattttga

SEQ ID NO: 9026 - protein, 229 aa, Unknown
  Obtained from environmental sample
  DOMAIN (22)...(157): Type I restriction modification DNA specificity domain
  misc_feature (1)..(229): Xaa is any amino acid
MGMTSDLKLSGLCSFADGRVAVVDLNLDNYISTENMLPNKEGITRSAGFPTTAQTQAYQMGDVLVSNIRPYFRKIWFTDRDGGCSNDVLVLRAKDNCNAGFLYYLLADDNFFNYATATAKGTKMPRGDRDAIMRYAVPDLPLDTQIGIVNVLSALDAKIATNKKINHHLASPRSATDNSPDIRRGKRVSRRAARRVFSAQLLAMISSSFEITPSNSTMISLGGSVNAIF

SEQ ID NO: 9027 - DNA, 369 bp, Unknown
  Obtained from environmental sample
  misc_feature (1)..(369): n is a, c, g, or t
atgcatagttcatccttcgctgacnaatgcgaacttaacagaaaattgtgtcaaacttacaaatgttgtggcgtcacatcagcgtggctttatctatttttatcttcagatgaaggacaagaacaaatttgcaacattacagttggcgctgtacaaccaaagttgccaattaagaatattcaaaatatagcattgacactgccgcccagtgaaatcatggtggaatttgatggcgttatctcaaaactacttgaaatcatcgctaataattgtgcagaaaacacccgtcttgccgctctccgtgacaccctcttaccccgcctaatgtccggcgagttatccgtagccgaccttggcgacgctaaatga

SEQ ID NO: 9028 - protein, 122 aa, Unknown
  Obtained from environmental sample
  misc_feature (1)..(122): Xaa is any amino acid
MHSSSFADXCELNRKLCQTYKCCGVTSAWLYLFLSSDEGQEQICNITVGAVQPKLPIKNIQNIALTLPPSEIMVEFDGVISKLLEIIANNCAENTRLAALRDTLLPRLMSGELSVADLGDAK

SEQ ID NO: 9029 - DNA, 573 bp, Unknown
  Obtained from environmental sample
  misc_feature (1)..(573): n is a, c, g, or t
gtgtatgtgtgcggaaattatgcgtatgggtatttgaaggcggagacggggattcacagattggtgcgaaaatcgcctttcgactcggcgaacagaagacatacttcctttgcctccgtatatgccacgccggaaatcacggacgatattgaactggagatcaacgcatccgatttgcgtatagacacctatcgttcttccggcgccggcgggcagcacgtcaacaagacaagctcggctgtgcgcattacacatttaccgaccgggatagtggttgcctgccagaatgagcgttcacaataccaaaataaagagcaggccatgaatattctcaaatcacggctctatgaacgcatgaaggcggagcggcaggcggatattgactccaaaacgcaggataagtcagacatagcctgggggaatcaaatacgctcttatgttttcgaaccatatacccttatcaaggatcatcgtactaattttgagacaggcaatatccgggcaatcatggatggcgaactcgatgatttcattttcgcctggctgcggaaccagagttcaaggagggagtaa

SEQ ID NO: 9030 - protein, 190 aa, Unknown
  Obtained from environmental sample
  DOMAIN (45)...(158): Peptidyl-tRNA hydrolase domain
  misc_feature (1)..(190): Xaa is any amino acid
MYVCGNYAYGYLKAETGIHRLVRKSPFDSANRRHTSFASVYATPEITDDIELEINASDLRIDTYRSSGAGGQHVNKTSSAVRITHLPTGIVVACQNERSQYQNKEQAMNILKSRLYERMKAERQADIDSKTQDKSDIAWGNQIRSYVFEPYTLIKDHRTNFETGNIRAIMDGELDDFIFAWLRNQSSRRE

SEQ ID NO: 9031 - DNA, 780 bp, Unknown
  Obtained from environmental sample
  misc_feature (1)..(780): n is a, c, g, or t
ttggttgataacaactacgccggaaaaccggagatggtggaagcggcggaaaaagccgtggaacagtacgggcgcagtatccttttaagcgatacggaaataatttttgcggtagatgcttccggaaagacagctatgtctacttccgaggttaaattatcgccttccgaatcaaaggcgctgttacagcttcttgagcatgaaaatcagggactgcaaactgccgtcataaacggagaaaagcgtatttttcaggctttttattttactccctttaactggtatattttaatcagtgaaaaagaacaggtgttttatgaagacgcaaaaatgattgcggtgcaaacctttatttctctcggaatttcagtcgctatagccgtgtttatgcttattatcgttacccgccgtctgacaaatccactgggaaaggttgttacaactatggaatcgataattgagacggcggatctttcatctaaagttgaggttgagtataacgatgaaaccggcattcttgcgcagacattcaataatatgacggaagagttggacagggcgtactcacagataaagcgttacgcattcgacgccgttcttgcgggcaagaaagaagagcgtatccgtcaaattttccaaaagtatgtgcccaataacgtaatcgaaaaatttttcgcgtctcccgaaaaaatgcttgtcggcgacaaccgcaaactttcaatacttttctccgacatacgctccttttactancatttccgaaggcatggctcccgatga

SEQ ID NO: 9032 - protein, 259 aa, Unknown
  Obtained from environmental sample
  DOMAIN (116)...(186): HAMP domain
  misc_feature (1)..(259): Xaa is any amino acid
MVDNNYAGKPEMVEAAEKAVEQYGRSILLSDTEIIFAVDASGKTAMSTSEVKLSPSESKALLQLLEHENQGLQTAVINGEKRIFQAFYFTPFNWYILISEKEQVFYEDAKMIAVQTFISLGISVAIAVFMLIIVTRRLTNPLGKVVTTMESIIETADLSSKVEVEYNDETGILAQTFNNMTEELDRAYSQIKRYAFDAVLAGKKEERIRQIFQKYVPNNVIEKFFASPEKMLVGDNRKLSILFSDIRSFYXHFRRHGSR

SEQ ID NO: 9033 - DNA, 786 bp, Unknown
  Obtained from environmental sample
  misc_feature (1)..(786): n is a, c, g, or t
atgaaaacaaaaacaattaaattttatttaatatttctgattattttttctatatcgcccgtttttgcccaggaacgtattatcgataacgccggccttttaagccccgaggaaaaagcaagccttcaaaaggttattacttccgcagcgtcggcttataattttgatctggtaattgtaactgaaaagaatatcggctcatcatatcccgcggattacgcggatgattttttcgacagaaacggctacggcctggggcagaacagggacggctgcctttttttattagtaacggaagaccgcgactacaggttcagtacatccggcagaggcataaagatattaacttccgccgccgccaataaacttgaaaacaatgtcgtaaaattcctcagggaatccgatttttatgttgcattttacgcttttctggctaactgggatgaattcctcgcccttgacgcaaaaggcagaagctacaatttctttcatgaatggaaccttgttttagtgttaatcgcgtgggttttgtccctggtgataggccttatcgttgtgcgaacctggaaaaaaggaatggataccgtttttccacaaacccaggccgccacttatatggttacgggcagtctcgccttcaacgagaaaaaagacagtttcctttacagcactgttaataaaaccaggatacaaagccagggtcaaaatattgcttcttcaggtaataaaggcattaaaaccggtttatccggcaatcgtcacggcggcagaggcggcaagttttaa

SEQ ID NO: 9034 - protein, 261 aa, Unknown
  Obtained from environmental sample
  SIGNAL (1)...(23)
  DOMAIN (32)...(154): Domain of unknown function (DUF477)
  misc_feature (1)..(261): Xaa is any amino acid
MKTKTIKFYLIFLIIFSISPVFAQERIIDNAGLLSPEEKASLQKVITSAASAYNFDLVIVTEKNIGSSYPADYADDFFDRNGYGLGQNRDGCLFLLVTEDRDYRFSTSGRGIKILTSAAANKLENNVVKFLRESDFYVAFYAFLANWDEFLALDAKGRSYNFFHEWNLVLVLIAWVLSLVIGLIVVRTWKKGMDTVFPQTQAATYMVTGSLAFNEKKDSFLYSTVNKTRIQSQGQNIASSGNKGIKTGLSGNRHGGRGGKF

SEQ ID NO: 9035 - DNA, 858 bp, Unknown
  Obtained from environmental sample
  misc_feature (1)..(858): n is a, c, g, or t
gtgatgctcttctacggtgtcggggagttctttcagtcgatggccgtcgggaggtcaaaggcctccatcacgcgcctcatggacataaggcccgaccatgcttttgtcaagagggacggcggtattgtgaaggtcgcggcgggcgacgtgggcgtaggcgatacgattgtcgtcaagccgggcgaaaagatacccttggacggcacggtcgtggagggcgcctcgacgctcgacgcgtcggccttgaccggggaatcgctgccgaggggggtgggggttagcgacgcggtgctctccggctgcataaacctaaacgggttgcttacgattaccgtcacaaaaacgtacggggagtctacggcgtcaaagatcatcgctttggttgaaagcgccgcgagtaaaaaggctaaggcggagaatttcatcacggcgttcgcgaggtactacacgccggccgttgtggtggcggcgttgttgattgccgttatgccgccgttgttttggggcggcgtgtggatggattggataaaccgcgggctgattttcctcgtcgtctcctgtccgtgcgcgcttgtgctctctatacccatgagttttttcgcaggtgtgggcaagtcggcgagcaggggtattcttgtaaagggcggcggctgtattgaggctttaagccgtcttgataccgtcgtgtttgacaagacggggaccttgactaaaggcgttttccgtgtggcccccgttcgtcccgaaaacggtttttcgcgtgacgacttgctgtcttgccccggcaggcgtttaagctctctccatcaccccattgcgctctccataatgcgggagtacggtaaggaggtctcatag

SEQ ID NO: 9036 - protein, 285 aa, Unknown
  Obtained from environmental sample
  DOMAIN (2)...(221): E1-E2 ATPase
  misc_feature (1)..(285): Xaa is any amino acid
MMLFYGVGEFFQSMAVGRSKASITRLMDIRPDHAFVKRDGGIVKVAAGDVGVGDTIVVKPGEKIPLDGTVVEGASTLDASALTGESLPRGVGVSDAVLSGCINLNGLLTITVTKTYGESTASKIIALVESAASKKAKAENFITAFARYYTPAVVVAALLIAVMPPLFWGGVWMDWINRGLIFLVVSCPCALVLSIPMSFFAGVGKSASRGILVKGGGCIEALSRLDTVVFDKTGTLTKGVFRVAPVRPENGFSRDDLLSCPGRRLSSLHHPIALSIMREYGKEVS

SEQ ID NO: 9037 - DNA, 483 bp, Unknown
  Obtained from environmental sample
  misc_feature (1)..(483): n is a, c, g, or t
ttgatgaagtttcgccttgatattttgcataaccacaatttgaaacttcccgatattcagaaagttatctcgacacttgaaccattaccaggagcgattgagtttaccgcaactcttcgggaaaagacacagttaattatcctttccgatacttttgaacagttcgcgaaaccgttaatgaaaaaactttcctggcctgttcttttttgcaacacgctggaaaccgcagatgacggaactattacagactacaggctcaggcagaaaaacggaaaatatgaagctgtaaaggcgtttaaacaaatgaacttaacagtattcgctgcgggggattcttacaacgacctcgcgatgattaaagaggctgactgcggctgcctgttccgtccgcctgaggcaatcagaaatgaacaagttgaaataaaatgtacggatacttacgaagactttatgacggaaattgacagatttttgtctaattaa

SEQ ID NO: 9038 - protein, 160 aa, Unknown
  Obtained from environmental sample
  misc_feature (1)..(160): Xaa is any amino acid
MMKFRLDILHNHNLKLPDIQKVISTLEPLPGAIEFTATLREKTQLIILSDTFEQFAKPLMKKLSWPVLFCNTLETADDGTITDYRLRQKNGKYEAVKAFKQMNLTVFAAGDSYNDLAMIKEADCGCLFRPPEAIRNEQVEIKCTDTYEDFMTEIDRFLSN

SEQ ID NO: 9039 - DNA, 387 bp, Unknown
  Obtained from environmental sample
  misc_feature (1)..(387): n is a, c, g, or t
ttgtttgaaagagcgccgcagggagacgcccatacgggtgaagagttttacacggatcaggaaacaagttttagaatcgccgagattatagnagagcaggcgattaaccgtntacgtcaggaattgccgcattcgctctatgttgacattgcggacatggagttgacagagactaacctttgggtaagggcgtttattatcgtagagcgggagtcccaaaaaggcatggttgtcggtaagggaggcgagatgattaaaacaatccgccttgcggcgttaaaagagttaaagaagatttttgactggaagattgatcttgacctaagagtgaaaacaggcaaggactggcgtagccgtgaccacatactgaaaaagttgattaattag

SEQ ID NO: 9040 - protein, 128 aa, Unknown
  Obtained from environmental sample
  DOMAIN (64)...(128): KH domain
  misc_feature (1)..(128): Xaa is any amino acid
MFERAPQGDAHTGEEFYTDQETSFRIAEIIXEQAINRXRQELPHSLYVDIADMELTETNLWVRAFIIVERESQKGMVVGKGGEMIKTIRLAALKELKKIFDWKIDLDLRVKTGKDWRSRDHILKKLIN

SEQ ID NO: 9041 - DNA, 327 bp, Unknown
  Obtained from environmental sample
  misc_feature (1)..(327): n is a, c, g, or t
atgacggatactcgttttaccgttttggatttaattgacattgacttaaaagagcataattcgcttaatcttcgctgtattgggggcaggaaggggcttggcagggaaatcagtatccctgacctgaaccgcccgatgggggcgattatgggcttttttgaggattttgccttccaaaggatacatcttttcggcaggggggaagtttcctatctgcgtaagctggaaaacgagggggatttgaagcatattcataaattattcaactatccaatcccttgctgcatttttacccacaataattgcccgcatccaggctttttttga

SEQ ID NO: 9042 - protein, 108 aa, Unknown
  Obtained from environmental sample
  DOMAIN (12)...(104): HPr Serine kinase N terminus
  misc_feature (1)..(108): Xaa is any amino acid
MTDTRFTVLDLIDIDLKEHNSLNLRCIGGRKGLGREISIPDLNRPMGAIMGFFEDFAFQRIHLFGRGEVSYLRKLENEGDLKHIHKLFNYPIPCCIFTHNNCPHPGFF

SEQ ID NO: 9043 - DNA, 792 bp, Unknown
  Obtained from environmental sample
  misc_feature (1)..(792): n is a, c, g, or t
ttggacacttccgatcccaagcggatccttattacggaacttccgttcggctcaaccaccgaaagcatcataaacagcatcgacagcgcggcaagggcgggaagaattaaaattcaaagcattaacgattttaccaccgacaaggttgagattgaaattaaacttgcccgcggcgtatacgcccaggaaacaatagacgcgcttttcgcttttaccgagtgtgaacagtcaatctccgtaaacctgcttgtaattaaagacggcctgcctacagtaatgacggtaaacgaagtaatcaaatatcacgcgaaacagcttgtgaaaattcttactaaagaacttgagcttgaaaaaaaggaactccttgacaaacttcacctgcgcaccctggaaagaatttttatagaagagcgcatttacaaaggcatcgaaaaaatgaagacggcgaagggagtgcaggacgcggttatcgccggttttaagccgtttttgaaagatgtcggcccccgcggcgtttcggacgacgacgtagaacaccttttgcggattccaatacgcagaatttcgttatacgacatcaataaggcaaaagacgagatggagcagatacaggcgcgtattaaggaaattaataaccatcttaaaaatattaccgcctattcggtctcgtggcttaaaggcattatcgccaaaattaaggccaatgaggaaatcggcggcgggaagagaaaaacccttgtgggcgcttttgacaaggtaatcgccaaggaaagttgtcaaacgggatgttga

SEQ ID NO: 9044 - protein, 263 aa, Unknown
  Obtained from environmental sample
  DOMAIN (1)...(233): DNA gyrase/topoisomerase IV, subunit A
  misc_feature (1)..(263): Xaa is any amino acid
MDTSDPKRILITELPFGSTTESIINSIDSAARAGRIKIQSINDFTTDKVEIEIKLARGVYAQETIDALFAFTECEQSISVNLLVIKDGLPTVMTVNEVIKYHAKQLVKILTKELELEKKELLDKLHLRTLERIFIEERIYKGIEKMKTAKGVQDAVIAGFKPFLKDVGPRGVSDDDVEHLLRIPIRRISLYDINKAKDEMEQIQARIKEINNHLKNITAYSVSWLKGIIAKIKANEEIGGGKRKTLVGAFDKVIAKESCQTGC

SEQ ID NO: 9045 - DNA, 978 bp, Unknown
  Obtained from environmental sample
  misc_feature (1)..(978): n is a, c, g, or t
ttgccgaaagcgcctgcggcagccagcgaaggcgaccttctaaccttaaacgacctgggcgattttgacatgcccggagaaccggcggcagtcagtgaaggagaaacgcctgactttggcgattttgaccttcctaaagcgcccgcggcagccgcggcagccgatgatggcggaatgccggaaattggcgagcttgacggccttgacacccccggtgctcctggcgtctttgacgactttgacctgcctgaaacaccctcggaagccggtgaaggtgaaactatgggggccggcgaccaaagcggctttgacctcccgagcgaacccgaagaagtgggcgaacccgaggaagaacatggcgtggagctgggaaatcttgatgagcagctttcagtagatggtttagttgagaccgcttccgatgacgcttttgaaggctttgatcccgcaagcgggctaggccttgaaaaagataccggcgaaactgattcggataatattgataccttagatgatatagatgatttctctttccctgatttggacaatgctcttggcgaatcgccgaaagataaaaaacccgccgcggccggtaaagccgcaaggaaaaagagcaagagaaaaggcgaaatacctgtccccgaaaaagaagatgatatagagcttaacgacagtgagcttcgttatttacaggaaactctggccggatatccgcttaatctccgcatcgcctgcgaggaaataatcgctgaacaggctgttcgtccggaacagatggttaggctgataaggaatcttatccgcggcgctccggcgagagaaaccgccgcgctggccagcgaaatactggaaaggccggttaccgtaccaagaggctttgaaaagagctctgtcgaggcgctggaagccgagaaagcaagttttgcctatatctttatccacaatttccttcccgtattgcggcttattacgttatag

SEQ ID NO: 9046 - protein, 325 aa, Unknown
  Obtained from environmental sample
  misc_feature (1)..(325): Xaa is any amino acid
MPKAPAAASEGDLLTLNDLGDFDMPGEPAAVSEGETPDFGDFDLPKAPAAAAAADDGGMPEIGELDGLDTPGAPGVFDDFDLPETPSEAGEGETMGAGDQSGFDLPSEPEEVGEPEEEHGVELGNLDEQLSVDGLVETASDDAFEGFDPASGLGLEKDTGETDSDNIDTLDDIDDFSFPDLDNALGESPKDKKPAAAGKAARKKSKRKGEIPVPEKEDDIELNDSELRYLQETLAGYPLNLRIACEEIIAEQAVRPEQMVRLIRNLIRGAPARETAALASEILERPVTVPRGFEKSSVEALEAEKASFAYIFIHNFLPVLRLITL

SEQ ID NO: 9047 - DNA, 948 bp, Unknown
  Obtained from environmental sample
  misc_feature (1)..(948): n is a, c, g, or t
ttgtttcagggaatgatacatcaacgcgagggcaggaatagtcagcggaaaagggcttttaggcaggcgtacgaaatttcagatgaatgttatccggcaaggataggcattgcccgcgcgagaaggaacgccggaaatccgcaggaagcgattgctattttatccgaattaattatccgttaccccgacagtacgcaaataaaaaaagaacgcgctatttgttattatgaaagccgtgacttgccgcgggcgttatcctctattgacgagattttgcatacagacccgaaagacggagaaatacttttacttaaagcggctattctgctggaacaggggcagtattcgcaatcaaatgccgcgctggatagttatgcgtcaattaattcaaataacagaacgtatctttttttacgcgcaagaatacaagccgaaggaaaccgcaaccgtgattctgcgttgaattatcttcgctcaattttacgcgttaacgaagatgacgcggaagtccttgtttatgccgccggtttgcttatggagtctcagcgcgcggaagatcaaaccgaaggcagggaaatgctggatcgcctgcggaagacaaacagttcttccgtagaagtgttaagtttgagcgtaaaggacgcaatacagagggaaagatggcaggaagctcaagggtatttgaatcgcatccttgtcatccgtcgcacagcccaagatttaacagacgcgtacaccgttgagcgcggacttggaaacaacgcaagggctcttacctttgcccgcgaattgtatgatcgtgataattccaatcacgaatacgcggcgatttatatttccgctctgattaattccggcagaagggacgaagcctcccgtattctggaaaaccgccattatctccgcggcaagcggtcaagtaaaaagcaaatattattttctgcgtag

SEQ ID NO: 9048 - protein, 315 aa, Unknown
  Obtained from environmental sample
  misc_feature (1)..(315): Xaa is any amino acid
MFQGMIHQREGRNSQRKRAFRQAYEISDECYPARIGIARARRNAGNPQEAIAILSELIIRYPDSTQIKKERAICYYESRDLPRALSSIDEILHTDPKDGEILLLKAAILLEQGQYSQSNAALDSYASINSNNRTYLFLRARIQAEGNRNRDSALNYLRSILRVNEDDAEVLVYAAGLLMESQRAEDQTEGREMLDRLRKTNSSSVEVLSLSVKDAIQRERWQEAQGYLNRILVIRRTAQDLTDAYTVERGLGNNARALTFARELYDRDNSNHEYAAIYISALINSGRRDEASRILENRHYLRGKRSSKKQILFSA

SEQ ID NO: 9049 - DNA, 684 bp, Unknown
  Obtained from environmental sample
  misc_feature (1)..(684): n is a, c, g, or t
atgacattccagtacagggagccgcagattgagaaaatgccccggggcgatcttgaagcgctgcaactacagaaattaaaagacgaggttggttttgccctgcgtacttccttttataaggaacggcttgggaaggcggggatcaaaagcccggacgatattaaaacgttaggtgatctgaggaagataccctttaccacaaagaacgatctccgcgacggctttccttatggttttttaagcataccaaaagaagaagtggtcaggcttcacgcctcaagcggcaccacgggcactcccactacgatttatttcagcagggatgatataaaacgctggtcgggttatatggcgcgctgtattttcggcgccggatgcaccaaatccgacgtgtttcagaatatgattacttacgggctgttcaccggcggcctgggcctgcaccagggcggcgaggaagtggggatgctggtgatcccttccggggcgggcaacacggcccggcagttcaagctgatgcaggatttcgggacaaccgtggtacacgccactcccagcttcctcctccatgttgaaaccaaaatgaaggaagccggccgtcaagcgggaaaaacctgctggctaaaaaagggggttcgccggcgcataagccttactcccaaagacacccggcgcgcgccataa

SEQ ID NO: 9050 - protein, 227 aa, Unknown
  Obtained from environmental sample
  misc_feature (1)..(227): Xaa is any amino acid
MTFQYREPQIEKMPRGDLEALQLQKLKDEVGFALRTSFYKERLGKAGIKSPDDIKTLGDLRKIPFTTKNDLRDGFPYGFLSIPKEEVVRLHASSGTTGTPTTIYFSRDDIKRWSGYMARCIFGAGCTKSDVFQNMITYGLFTGGLGLHQGGEEVGMLVIPSGAGNTARQFKLMQDFGTTVVHATPSFLLHVETKMKEAGRQAGKTCWLKKGVRRRISLTPKDTRRAP

SEQ ID NO: 9051 - DNA, 606 bp, Unknown
  Obtained from environmental sample
  misc_feature (1)..(606): n is a, c, g, or t
ttggggtgtgccgccgctcctgcggtttatgactcattttcgtatagagaaagccgttttaccgaaacaaatgtaacaatttctgaaaaaggattaagcaaggatcaaataaatactattttatcaacaaaattcccgcctcaaaatacggtttcattggcggttatattcttatatagatataatacttatagtcccaataataaagaattgtcttattatatgatgaaccagggaaaaaatattaataaagtggaaaaatttgttcctataccaaggatctttatcccgcaaaaattgacttttgatataatacaggatttgggtattagaagtttatgtgaatatacattaatattttataactattcgaatagaacaatgactttttctcaatggattaccggagaatttaaatttgaatccgatatagaattttctttaatagataatcagacaacggcaataattgcatctgatagattgtattcaagcataataaaaaaaggtcgaagtgataaagatatagaagaagcagaagatgaaatttataatttacaggcaaagttattggcggaaaaattgaatatattgtttaagaattag

SEQ ID NO: 9052 - protein, 201 aa, Unknown
  Obtained from environmental sample
  misc_feature (1)..(201): Xaa is any amino acid
MGCAAAPAVYDSFSYRESRFTETNVTISEKGLSKDQINTILSTKFPPQNTVSLAVIFLYRYNTYSPNNKELSYYMMNQGKNINKVEKFVPIPRIFIPQKLTFDIIQDLGIRSLCEYTLIFYNYSNRTMTFSQWITGEFKFESDIEFSLIDNQTTAIIASDRLYSSIIKKGRSDKDIEEAEDEIYNLQAKLLAEKLNILFKN

SEQ ID NO: 9053 - DNA, 495 bp, Unknown
  Obtained from environmental sample
  misc_feature (1)..(495): n is a, c, g, or t
ttgaccaaaactctggaataccgcctgcgagaaagaaagctaagcgagctattaaagaaaattatggaaaatacgcccgtcgttctgcccgaatccatgattagggcggaaattgaaggacgctggcggaggcttgcccgttactacaacatgaacgccgaaactatcgcccagatgatgagcggtgaagaaaaaagcaaagaatggcgcgacgcggcggaaaaggcgctccattcaagattgataatcgaaactttaatggaagaacaaaaaatcgaggtttcagataatgatgtagaagaagaatttaagtcgattgccgcggcaaacggagccgatattgaagaagttaaaaagcattataacgaggaagcggttttctacctaaaagaagacatcagagaaaagaaaattacagatatgatgtttgcggaaaacaacttaaaacaagggaaaaaggagaattatctggattttatgtcagataatggttaa

SEQ ID NO: 9054 - protein, 164 aa, Unknown
  Obtained from environmental sample
  DOMAIN (1)...(139): Bacterial trigger factor protein (TF) C-terminus
  misc_feature (1)..(164): Xaa is any amino acid
MTKTLEYRLRERKLSELLKKIMENTPVVLPESMIRAEIEGRWRRLARYYNMNAETIAQMMSGEEKSKEWRDAAEKALHSRLIIETLMEEQKIEVSDNDVEEEFKSIAAANGADIEEVKKHYNEEAVFYLKEDIREKKITDMMFAENNLKQGKKENYLDFMSDNG

SEQ ID NO: 9055 - DNA, 705 bp, Unknown
  Obtained from environmental sample
  misc_feature (1)..(705): n is a, c, g, or t
ttgcagactgatatcggcgaggcggtaaaacgaatggccaaacgactattgccggaatctttcggattctattcggtattgaccgacccgataaccggttacgcctacctaacgtcattgcttgtcgattacggcgtccccgtcgtgcagttgcggatgaaaggggcgcccaagccgcttgttatagataccgcgttacaaatgcgaaaaatcaccgaaggcacaaatacgctattgattattaacgacgaccctcatatagcggttgaagtaggcgccgacggcgttcatataggccagggcgatatgccgtatacggacgctcgggcgattgtcggggacgatatgttgataggcgtatctacgcataatctcggtcagacgataagcgcctgtcaactgccggctgattacataggcgtaggcccggtcttcgccacgcccacaaagaaaatccccgatccggttatcggcattgacggaatgagagaaatgctgtcggcctcaaccgttccggcggtggccataggcggcatcaacctagaaaacctgcccgccgtcttaaacgccggcgctaanaacttctgcatggtgcgccaactgacgcggagcgaaaacccgaaatcggtatgggagagatccttagatattagtattcttattactctgatcttttatagaccacccgcccccccagcaaagtaa

SEQ ID NO: 9056 - protein, 234 aa, Unknown
  Obtained from environmental sample
  DOMAIN (30)...(201): Thiamine monophosphate synthase/TENI
  misc_feature (1)..(234): Xaa is any amino acid
MQTDIGEAVKRMAKRLLPESFGFYSVLTDPITGYAYLTSLLVDYGVPVVQLRMKGAPKPLVIDTALQMRKITEGTNTLLIINDDPHIAVEVGADGVHIGQGDMPYTDARAIVGDDMLIGVSTHNLGQTISACQLPADYIGVGPVFATPTKKIPDPVIGIDGMREMLSASTVPAVAIGGINLENLPAVLNAGAXNFCMVRQLTRSENPKSVWERSLDISILITLIFYRPPAPPAK

SEQ ID NO: 9057 - DNA, 969 bp, Unknown
  Obtained from environmental sample
  misc_feature (1)..(969): n is a, c, g, or t
ttgcagcacctgacgatgcgcggcgatttcgacctggccggacaaagctttcaggcccgcgacctcagcggtcggctggacgacacgacatttccgggcaacattcggcatgttcggggcgaagttcacgcctggcaggcagatctgacgatcggcacactcgacttcagccgctatctgccaaaaagccagccaggttccgccccaaagcccccgccctggccggtaaaactgctggatggcctgtcggcgcaaggcacgatccgtctgggcaacctgatcatcgccaaaatcgcccaccgttcggcgcttgtgccctttatgctggaaaacaatgttcttatttgcaaaccgatcgcctttactccatacaggggacggggcgaggcagaactgcatgtgtccgcatcgtccgccggctaccggacgcgcttgcgctatgcggcgaacgatgttgacgccgcgctcctctcgcgcgaggcgggcttcagcgccactctgggaggcgtcacaacgctcaacgccgatgtggcgggtctgctgcgccacgggtcggatattccggcagccctggacggcagttggtccgtggctgccgcgcaaggctatattgccggaaggagacccgacggatccccggccagccccatgccgtttcgcaacatcagcgcctccggccttatgcagcggggagttctgcatacccggaacatccgcctgcaaggcaacagcatctcggccagcggcagcgccagcatcaatctggtggactggacgctcaactgccgtctgaacgtttccacccgaagcgcttccaacgtgccggtcatttattcgggaagtcttgacgcgccggaacgcacgatcaaccctctgcatgccgtggctggagttatcggaagattgggcagcggtctgttcggtctggtgggagacatcctctccacaccgttccgcttgctgcgctga

SEQ ID NO: 9058 - protein, 322 aa, Unknown
  Obtained from environmental sample
  misc_feature (1)..(322): Xaa is any amino acid
MQHLTMRGDFDLAGQSFQARDLSGRLDDTTFPGNIRHVRGEVHAWQADLTIGTLDFSRYLPKSQPGSAPKPPPWPVKLLDGLSAQGTIRLGNLIIAKIAHRSALVPFMLENNVLICKPIAFTPYRGRGEAELHVSASSAGYRTRLRYAANDVDAALLSREAGFSATLGGVTTLNADVAGLLRHGSDIPAALDGSWSVAAAQGYIAGRRPDGSPASPMPFRNISASGLMQRGVLHTRNIRLQGNSISASGSASINLVDWTLNCRLNVSTRSASNVPVIYSGSLDAPERTINPLHAVAGVIGRLGSGLFGLVGDILSTPFRLLR

SEQ ID NO: 9059 - DNA, 306 bp, Unknown
  Obtained from environmental sample
  misc_feature (1)..(306): n is a, c, g, or t
gtggacgacggaaacatgacccgccttgcggaactgataaaagacgacgtaagggccgaaccattcgagatggttttttccatgaccttgcaggaaacaatgagcgatatcctttctcagttatctgaaagagaaatgaaaattatccagctccgctacggtttaaccggagaaaacccgctcacgcttgaagagacaggcaagtacttagggataacccgcgaacgcgtaaggcaaatccaggaaaaagccgtctggaaactccgtactatgcgtgagttaaaggtgttaaaagagaacgcctga

SEQ ID NO: 9060 - protein, 101 aa, Unknown
  Obtained from environmental sample
  DOMAIN (37)...(90): Sigma-70, region 4
  misc_feature (1)..(101): Xaa is any amino acid
MDDGNMTRLAELIKDDVRAEPFEMVFSMTLQETMSDILSQLSEREMKIIQLRYGLTGENPLTLEETGKYLGITRERVRQIQEKAVWKLRTMRELKVLKENA

SEQ ID NO: 9061 - DNA, 345 bp, Unknown
  Obtained from environmental sample
  misc_feature (1)..(345): n is a, c, g, or t
gtgttcctgtctctggntgtaggaagtcagatgaccccggaaaaattccttaactccaagtcaataatcatcgtagtaatgggtcttctcgcattcgcgatagcgaccgccacgggcgttcttgtagcaaagtttatgaatctctttcttaaagaaaagatcaacccgcttatcggctccgccggagtttccgcggttccaatggcagcccgtgtttcaaacaaagttggtcttgaatacgatcccggcaacttcctgttaatgcacgcaatgggcccgaatgttgcaggcgttatagggacagcaatagccgccggcgttatgatagcggtttacgcaagatag

SEQ ID NO: 9062 - protein, 114 aa, Unknown
  Obtained from environmental sample
  DOMAIN (1)...(113): Na+-transporting methylmalonyl-CoA/oxaloacetate decarboxylase, beta subunit
  misc_feature (1)..(114): Xaa is any amino acid
MFLSLXVGSQMTPEKFLNSKSIIIVVMGLLAFAIATATGVLVAKFMNLFLKEKINPLIGSAGVSAVPMAARVSNKVGLEYDPGNFLLMHAMGPNVAGVIGTAIAAGVMIAVYAR

SEQ ID NO: 9063 - DNA, 396 bp, Unknown
  Obtained from environmental sample
  misc_feature (1)..(396): n is a, c, g, or t
atgaattatttggctgatactcatattttattatggtcatttctggaaacgaaaaaattatcagagaaaataaaatcaattttgttggatgaaaataacgtaatctactacagcccgataagtctatgggaaatatccataaaatatggattaaaaaagttgtctctcaaaggcggaacacctgacgatttttttgatgaattaaataatagttactatcattgtaaagcaatagataatatagatttgataacaaattataaattgccaatttatcataaagacccgtttgacagattcttgatatgggaagcaatacggaatgattttattctgatgagcgctgataaaaacatggggttataccagaaagaaggattaaaggtaatatattag

SEQ ID NO: 9064 - protein, 131 aa, Unknown
  Obtained from environmental sample
  DOMAIN (3)...(129): PIN domain
  misc_feature (1)..(131): Xaa is any amino acid
MNYLADTHILLWSFLETKKLSEKIKSILLDENNVIYYSPISLWEISIKYGLKKLSLKGGTPDDFFDELNNSYYHCKAIDNIDLITNYKLPIYHKDPFDRFLIWEAIRNDFILMSADKNMGLYQKEGLKVIY

SEQ ID NO: 9065 - DNA, 1029 bp, Unknown
  Obtained from environmental sample
  misc_feature (1)..(1029): n is a, c, g, or t
ttgatggccgantcagagtatgtgcctaactcgttaatttatacaaagttactacttgcagctacgatcatttcaatgatcttggggtgcctgtctaaacgggtatgggcgaggtttgcgctccttgccgtcggcggggcggcgctcttttcgtggagcgagttgggcataaggggtttttacggagagatggagtccgtttgcgagaaccgccggctgatgactctgactctgcgtatatcaagccctacggcgtcgacgccgacgggtgacaaatttcgcgccaaggtagtaggcgcggacgacgaggaggtcgcggcggcgcttgtcggcaagacattgcagtgcgtgtctaaacagccggcgccgccgttcggggagataacggcacaggggcgctatacggcgccgcgccgcgccgccgggccgttcggatttgatttgcgggagcacttcgccgtcaacaacataagcgggagcttcttgatcggcggaacgaccgggggtggcaacgcgtcaacctacataccttacgccgtaagaagccaagtccgcggcgtcataaatatggccaaaacacaagaggcccgcgggatcttccacgccgcgttcttgggcgaaagggatcaactgccccagacccttaacactctcttccgtaaggccggcatagtccacctattggcgatctccgggttccacgcggcgctgctgtactcggccgtattcgcgctgctcactctgctccgtgtgccgggacgcgtcaaaacgctctcggcgctctcggcgctctggggttacctattctttataggcttcataccgtcgctcttccgcgccacggctatggcaaccctgctttgcgcctccgttatgctcccacggaagaaccacattgtacacacactgggcatcgccggattcttctggctctgtttctcgccgcacagcctcttttcgcccgggttccagctctctttcgccgcgaccgccgggatcgcgatgctgctgccggtacttaccgaataa

SEQ ID NO: 9066 - protein, 342 aa, Unknown
  Obtained from environmental sample
  DOMAIN (203)...(341): Competence protein
  misc_feature (1)..(342): Xaa is any amino acid
MMAXSEYVPNSLIYTKLLLAATIISMILGCLSKRVWARFALLAVGGAALFSWSELGIRGFYGEMESVCENRRLMTLTLRISSPTASTPTGDKFRAKVVGADDEEVAAALVGKTLQCVSKQPAPPFGEITAQGRYTAPRRAAGPFGFDLREHFAVNNISGSFLIGGTTGGGNASTYIPYAVRSQVRGVINMAKTQEARGIFHAAFLGERDQLPQTLNTLFRKAGIVHLLAISGFHAALLYSAVFALLTLLRVPGRVKTLSALSALWGYLFFIGFIPSLFRATAMATLLCASVMLPRKNHIVHTLGIAGFFWLCFSPHSLFSPGFQLSFAATAGIAMLLPVLTE

SEQ ID NO: 9067 - DNA, 651 bp, Unknown
  Obtained from environmental sample
  misc_feature (1)..(651): n is a, c, g, or t
atggacatggagaacctcaaactttccagggaagccgttagggacctgctcagggattacaggaacaatgcggtaatcaaagcttcggcgtcaggtatcgtccttaatctgccggtggaaagggggaagttctttccggaaaacgccttgcttgtatcaatcggcgtaggcctggagtttacggtggaatgttctgtctcccttgataataattttataagcccgggcgatacctgtgaacttagtaattccagccatgtactgagcggtacggtcaggcgtataaaaccggcggttcagggaaaaaccgtaattatcgccgtggcatccgatgaggttgccgaaggcgagacttttgatattacttttgaaaagaacagcgccgcttcttttattctggttccaaacagcgcgatcaatcaggataatgacggatattttctctatgtaatcaaacggcggaaaggcatcatgggcgaggaatactatctggaacggcttaatattttcttgggcgattccgattaccaaaacacggctgttatccggggaattaccttttttgaacccattgttatggcaagcaacaaggccctctccgccggactgacggtatcgttaaaaaatcaggaggatttttttgaaaactag

SEQ ID NO: 9068 - protein, 216 aa, Unknown
  Obtained from environmental sample
  misc_feature (1)..(216): Xaa is any amino acid
MDMENLKLSREAVRDLLRDYRNNAVIKASASGIVLNLPVERGKFFPENALLVSIGVGLEFTVECSVSLDNNFISPGDTCELSNSSHVLSGTVRRIKPAVQGKTVIIAVASDEVAEGETFDITFEKNSAASFILVPNSAINQDNDGYFLYVIKRRKGIMGEEYYLERLNIFLGDSDYQNTAVIRGITFFEPIVMASNKALSAGLTVSLKNQEDFFEN

SEQ ID NO: 9069 - DNA, 648 bp, Unknown
  Obtained from environmental sample
  misc_feature (1)..(648): n is a, c, g, or t
atgaattttacgctggtaatgagggatgtttttccgttgcttatgcggggaatggtgataacggtagaaaccactatcgccgccctcattatcgccctgtttcttggactgtttttctgcctgttgggaatgtcgcattctcccgttctcaggctgctcgccaaaacgtacatctggattattcggggaacacctctgctggtgcagaccttttttgtttactttggcattccccagcttattcagtccctgggttttgatttccgtctttcccccctgaccgccggcattatcaccctttcgatgaacgcgggggcctacattgccgaaattttccggggcggcattcaggccatcgaccacgggcaaatggaagccgcccgcagtctgggcctttcccactaccgcgccatgttcagaattattctgcctcaggcgatgcgtatttccattccctcgctggtcaaccagttcatcatcagtttgaaggatacctcgattgtgtcgatcatcagcctggcggaaattgtctacnaagcanaaatatacataggcaggacaatgcagtcctttgccacctgggaccattgtgggggcggtatacctgctgatcatcacggtgcttttccaaatttcaactcatgttga

SEQ ID NO: 9070 - protein, 215 aa, Unknown
  Obtained from environmental sample
  DOMAIN (14)...(193): Binding-protein-dependent transport system inner membrane component
  misc_feature (1)..(215): Xaa is any amino acid
MNFTLVMRDVFPLLMRGMVITVETTIAALIIALFLGLFFCLLGMSHSPVLRLLAKTYIWIIRGTPLLVQTFFVYFGIPQLIQSLGFDFRLSPLTAGIITLSMNAGAYIAEIFRGGIQAIDHGQMEAARSLGLSHYRAMFRIILPQAMRISIPSLVNQFIISLKDTSIVSIISLAEIVYXAXIYIGRTMQSFATWDHCGGGIPADHHGAFPNFNSC

SEQ ID NO: 9071 - DNA, 1011 bp, Unknown
  Obtained from environmental sample
  misc_feature (1)..(1011): n is a, c, g, or t
atggcgaggtcaggggcccggctcggcgggttactgaccaaggacatcggagaattgaagcgtatttttctttcccccggccccattttcgacccggaagaccgtcaggagaactattggggatataccgaagccttttacgccgtgggtttcaggtcgggcgacgttgtgcagaacaccttcaactaccacctgacgcccgccgggctgatgtttgaggagcctctgcgcaatctgggctgcgcggtcattcccgccggcccctccgatgcgggcagccaactggagatcatgcaaaagctgcgcgtctccggctatgtgggcacgccgagctttctgctgcacctgacccagcgcgccgaggaaaagggactcaacctgcgcaaggacctctttctggaagtggcctttgtcaccggtgagcggctttcggaaaaaatgcgcgcccaactggaaaaaaaatacgacctcatcatgcgccagggctacggcacggcggatgtgggctgcatcggctacgaatgtttccagaagaacgggctgcacatcgccaaccgctgttatgtggaaatctgccacccggacaccagcatccccctgaaggacggcgaagtgggcgaaatcgtggtgacggccttcaataaaacctatccgctgatccgtctcgccacgggcgatctgtcctacatcgaccgcgcgccctgcccctgcggccgcaccagcccgcgtctgggcagcatcgtgggccgcgtggacaccaccgcgcgcatcaagggtatgttcgtctacccgcatcangtggagcaggtcatgagtcgctttgaggaaatcaagcgctggcagattgaagtcaccaatcccggcggcattgacgaaatgacgctcttcgtcgagagcagcaacttcaagcgcgaggacgaactgcttcaccagttccgcgaaaaaatcaagctgcgtcccaactggacattctcgcgcccggcacttgnccgcgcagatacgtcccattga

SEQ ID NO: 9072 - protein, 336 aa, Unknown
  Obtained from environmental sample
  misc_feature (1)..(336): Xaa is any amino acid
MARSGARLGGLLTKDIGELKRIFLSPGPIFDPEDRQENYWGYTEAFYAVGFRSGDVVQNTFNYHLTPAGLMFEEPLRNLGCAVIPAGPSDAGSQLEIMQKLRVSGYVGTPSFLLHLTQRAEEKGLNLRKDLFLEVAFVTGERLSEKMRAQLEKKYDLIMRQGYGTADVGCIGYECFQKNGLHIANRCYVEICHPDTSIPLKDGEVGEIVVTAFNKTYPLIRLATGDLSYIDRAPCPCGRTSPRLGSIVGRVDTTARIKGMFVYPHXVEQVMSRFEEIKRWQIEVTNPGGIDEMTLFVESSNFKREDELLHQFREKIKLRPNWTFSRPALXRADTSH

SEQ ID NO: 9073 - DNA, 960 bp, Unknown
  Obtained from environmental sample
  misc_feature (1)..(960): n is a, c, g, or t
ttgtgcatgcctgcaccggagaggctgcataatgaatatgtggatttggttttgagggagctggaatcaagagcagaagagggacttgcaaattttgaaacggtatatttgggaggcggttcgccttctgttttgagtgcggtaaatttgcgaaaattgcttgcaggtttacaaaaacagggtttgcgaaaaaacgaactaaaagaattttcaatggaatggaatcctgaacaagttagcgaagaaaaaataagtatagccttggagtttggaataaatcgctttagccttggaattcaaagtttgaatgataatttattgaaaatacttgggagaaagcacacagcaaaaacagctttagatgtttttgaaaaattgaattccgcttttggcacaggaaattgcgatttgatgttttgtctgccaaaccaaagcacagaaaactttttgagtgatgttaaaaccttggcaagccttggggcaaaacacataagtttttatgggctcactttagaaaaagggaaaaaatttccagcccagccagaagacctataccccgaaatgtatttaaaagcggtgcaaattttaagcgaggccaagctggatagatacgaagtttcaaactttgccctgcttggtcacgagagcaagcataatatggtttattggaaaaggggttcttatttgggtgcgggtccttcggctcacagttatttaatgggaattcgcagttatgttgatggaaaatatgttccttggaaaaagtgggttatgagcggttgcccgcaaagcggtttaacagaagacattcctggcacagaaggcaaggaaatggaggccgtttggctctctttgagaaacagggaaggattatcgctaaaagactatgagagagaatttggaaaagaaattgaaatggaaaaagcaaaaccttttatagaaaaaaaatggcttgattaa

SEQ ID NO: 9074 - protein, 319 aa, Unknown
  Obtained from environmental sample
  DOMAIN (220)...(318): HemN C-terminal region
  misc_feature (1)..(319): Xaa is any amino acid
MCMPAPERLHNEYVDLVLRELESRAEEGLANFETVYLGGGSPSVLSAVNLRKLLAGLQKQGLRKNELKEFSMEWNPEQVSEEKISIALEFGINRFSLGIQSLNDNLLKILGRKHTAKTALDVFEKLNSAFGTGNCDLMFCLPNQSTENFLSDVKTLASLGAKHISFYGLTLEKGKKFPAQPEDLYPEMYLKAVQILSEAKLDRYEVSNFALLGHESKHNMVYWKRGSYLGAGPSAHSYLMGIRSYVDGKYVPWKKWVMSGCPQSGLTEDIPGTEGKEMEAVWLSLRNREGLSLKDYEREFGKEIEMEKAKPFIEKKWLD

SEQ ID NO: 9075 - DNA, 927 bp, Unknown
  Obtained from environmental sample
  misc_feature (1)..(927): n is a, c, g, or t
atggcgagctgcatgagcgttatgggctattattttccgcccctgcattatgaatcggggaatatcattattgatggcaaggagattaccagccttgacccggacgtgatacgccaaaccgttctgggatcgcaaattgcctatattccccaagctgccatgaacgctctcaaccctacaaggaagattattaattttattgaagacgtacttgaagcccacggtaagggacttaccaaaaaggaagttttcgatctggcgcgtgaacgttttgccgttctcaatttgccggaaaaggtgttgaaccaatacgccgtggagctttccggcggcatgaagcagaggacgatcattgccatttctaccattcttaatcccaaggttcttatcgccgatgagccctcctcagcgcttgatgtctcctcccaaaaaattgttatcaagctcctgtacgatcttatggagaagggttttgtccggtcgatgatttttatcacccatgaactgccgctgctcttcaatgttaccgacgacataatggtaatgtacgccggagaaatcgtggaacgcggaacggcgaaggaaatggtttttgatccaatcatgccctattccaaggggcttatgaattcgatcattgtgccggaagaaggaaccaggggccatgtgctaatggccattcccggcgctccgccgaatttaaagctcagaccgtcaggttgtcgtttcgccgagcgttgccgtttcgcggacgccgagtgttcaagggaaactatcggcgaacagtacggtggcgcagaaggacgatcttaccgctgccgccataaacttgaaaaactctttcagttgtacgaggaaagatctcccccaccttatggatcaagacaacgtaaaaaaacaacggagcaggcaatgaaaaaaaactag

SEQ ID NO: 9076 - protein, 308 aa, Unknown
  Obtained from environmental sample
  DOMAIN (188)...(254): Oligopeptide/dipeptide transporter, C-terminal region
  misc_feature (1)..(308): Xaa is any amino acid
MASCMSVMGYYFPPLHYESGNIIIDGKEITSLDPDVIRQTVLGSQIAYIPQAAMNALNPTRKIINFIEDVLEAHGKGLTKKEVFDLARERFAVLNLPEKVLNQYAVELSGGMKQRTIIAISTILNPKVLIADEPSSALDVSSQKIVIKLLYDLMEKGFVRSMIFITHELPLLFNVTDDIMVMYAGEIVERGTAKEMVFDPIMPYSKGLMNSIIVPEEGTRGHVLMAIPGAPPNLKLRPSGCRFAERCRFADAECSRETIGEQYGGAEGRSYRCRHKLEKLFQLYEERSPPPYGSRQRKKTTEQAMKKN

SEQ ID NO: 9077 - DNA, 465 bp, Unknown
  Obtained from environmental sample
  misc_feature (1)..(465): n is a, c, g, or t
atgattggatcaaaaaccatttccttcgccgttccgcgttccacgatttctccggcgtacattaccattatgtcgtcggtaacattgaagagcagcggcagttcatgggtgataaaaatcatcgaccggacaaaacccttctccataagatcgtacaggagcttgataacaattttttgggaggagacatcaagcgctgaggagggctcatcggcgataagaaccttgggattaagaatggtagaaatggcaatgatcgtcctctgcttcatgccgccggaaagctccacggcgtattggttcaacaccttttccggcaaattgagaacggcaaaacgttcacgcgccagatcgaaaacttcctttttggtaagtcccttaccgtgggcttcaagtacgtcttcaataaaattaataatcttccttgtagggttgagagcgttcatggcagcttggggaatatag

SEQ ID NO: 9078 - protein, 154 aa, Unknown
  Obtained from environmental sample
  DOMAIN (69)...(107): Protein of unknown function (DUF1602)
  misc_feature (1)..(154): Xaa is any amino acid
MIGSKTISFAVPRSTISPAYITIMSSVTLKSSGSSWVIKIIDRTKPFSIRSYRSLITIFWEETSSAEEGSSAIRTLGLRMVEMAMIVLCFMPPESSTAYWFNTFSGKLRTAKRSRARSKTSFLVSPLPWASSTSSIKLIIFLVGLRAFMAAWGI

SEQ ID NO: 9079 - DNA, 417 bp, Unknown
  Obtained from environmental sample
  misc_feature (1)..(417): n is a, c, g, or t
atgaagggatgcctgcaaatccgtcacctgaaatttgaagagctttccaacaagtatctttttgagctttcaggcgggcagatgcagcggcttatgatggcccgtatttttatgctcaaaccaaaactgctgattgccgacgagcctacctcgatgattgacgcctgttcgcgcgcaactattctggaaatgcttttgaaactccgggaagagattaacatgaccatcgtgttcataacccatgatatgggcctggcttactatatttccgatacgatttacatcatggaaaagggaatcattgtagaacaggggacagccgacgaagctatcctcaatccgaaatcggattatacaaaacggcttttgagcgacgttcctaaaatataccagccttgggattttagccaaaagtaa

SEQ ID NO: 9080 - protein, 138 aa, Unknown
  Obtained from environmental sample
  DOMAIN (2)...(99): ABC transporter
  misc_feature (1)..(138): Xaa is any amino acid
MKGCLQIRHLKFEELSNKYLFELSGGQMQRLMMARIFMLKPKLLIADEPTSMIDACSRATILEMLLKLREEINMTIVFITHDMGLAYYISDTIYIMEKGIIVEQGTADEAILNPKSDYTKRLLSDVPKIYQPWDFSQK

SEQ ID NO: 9081 - DNA, 804 bp, Unknown
  Obtained from environmental sample
  misc_feature (1)..(804): n is a, c, g, or t
gtgtccgatttggcggactctaccagcagatgggccgaggccctgcgcgagctttccggccgcatggaagaaatgcccgccgaagaaggtttccccgcctacctgcccacccgccttgccgaattctacgagcgcgccggccgcgtctccaccctttcaggcgccgaaggttccgtctccatcatcggggcggtttccccgccgggcggcgacttttccgagccggtaacacagcacaccaaacgctttatccgctgtttttgggctttagaccgcgatcttgccaacgcccgccattacccggctataagctggacggacagctactccgagtacgccgaagaagtgcggccctggtgggaacacgtgaacgctatttgggcagtagtccgcagccagtgccttgatctgctcaagagcgatcaaaaacttactgaaattgtccgcctcatcggccctgacgctctgcccgacgagcagaaactcgtccttgtcacctcggacattatcaaagacggttatttacagcaaaattcattcgatgaagttgatatgtactgcgtccccgcgaaacagatacggctcctggaactgatcatggaattccacgagcgcgcgagaacctgcatcaaacttggagcgcctctcaccaaaatttccgtattgggattaaaagaaggcctgtccaggcttaaaagcacgatcaaaaacgacaatcttggcgagtttgacaccttcgcggcaaagatgcgttcccagtttgaagaactggaacggagctaccacacgcgggaagtgctgtaa

SEQ ID NO: 9082 - protein, 267 aa, Unknown
  Obtained from environmental sample
  DOMAIN (1)...(110): ATP synthase alpha/beta family, nucleotide-binding domain
  misc_feature (1)..(267): Xaa is any amino acid
MSDLADSTSRWAEALRELSGRMEEMPAEEGFPAYLPTRLAEFYERAGRVSTLSGAEGSVSIIGAVSPPGGDFSEPVTQHTKRFIRCFWALDRDLANARHYPAISWTDSYSEYAEEVRPWWEHVNAIWAVVRSQCLDLLKSDQKLTEIVRLIGPDALPDEQKLVLVTSDIIKDGYLQQNSFDEVDMYCVPAKQIRLLELIMEFHERARTCIKLGAPLTKISVLGLKEGLSRLKSTIKNDNLGEFDTFAAKMRSQFEELERSYHTREVL

SEQ ID NO: 9083 - DNA, 933 bp, Unknown
  Obtained from environmental sample
  misc_feature (1)..(933): n is a, c, g, or t
atgcttgattcgcgttatatcccaaaatatgaaaatatccgtataattcgatatggtaaaacaattcaacatattttatggcaaatgtttattctgcaatggtttctggttacccacagggaatataccgttcttgaattcggcaatacctgtctgcctttcgctccgggcattgtttttctgcatgatatttattgcgaattcttccctgacgattttacgacattcaaggataaaattatccggttatataataaatggcagtaccggctaattgcaaaaaaagcaaaaatgattgcaacagtttcatatttcacaaaaaaccaaattgtaaagtcatattttattaatcctgacaggattatcgttatttacagcagttggaatcatttcagggacatcacggctgactgttctgttttcaatgattatcctgtgctttcaaaatcgttttatttttcgcttggcagtctttcaaaacgtaaaaatatcaaatggataatagaatatgcaaaaaaaaaccctgattcactttttgctatttcaggcgtcagtctgcctgttgtaaaagcggacgagttgaataattcaactcccccaaatattatcctgttgggttatcttgacgattcaaaagttaaagccctgatgacgcaatgcaaggcgttcatactgccttcctattatgaaggtttcggccttaccccgcttgaagcattatcctgcggcgcgcagattatagtcgcaaatgcggcgagtctgcctgaaatctacggaaatacggcgcattatatcgatccgttcaataccgatgttaaacttgacgctctgcttcatgaaccggtggaaaaaccggacgcaattctggctaaatattcctatgacacttcggcagaaaaagtatataatgtaattaagggatttatgaaatga

SEQ ID NO: 9084 - protein, 310 aa, Unknown
  Obtained from environmental sample
  DOMAIN (137)...(296): Glycosyl transferases group 1
  misc_feature (1)..(310): Xaa is any amino acid
MLDSRYIPKYENIRIIRYGKTIQHILWQMFILQWFLVTHREYTVLEFGNTCLPFAPGIVFLHDIYCEFFPDDFTTFKDKIIRLYNKWQYRLIAKKAKMIATVSYFTKNQIVKSYFINPDRIIVIYSSWNHFRDITADCSVFNDYPVLSKSFYFSLGSLSKRKNIKWIIEYAKKNPDSLFAISGVSLPVVKADELNNSTPPNIILLGYLDDSKVKALMTQCKAFILPSYYEGFGLTPLEALSCGAQIIVANAASLPEIYGNTAHYIDPFNTDVKLDALLHEPVEKPDAILAKYSYDTSAEKVYNVIKGFMK

SEQ ID NO: 9085 - DNA, 408 bp, Unknown
  Obtained from environmental sample
  misc_feature (1)..(408): n is a, c, g, or t
gtggcattttgtacagtcaaaaaaactaaactttggctcatcaaagcagttgaccgtcgcacacggcgaactattgcatgggttctcggtggtcgtgatagcgggacgttcagacgacttttcgacaaagtaaaacacataaaaaattgcatttattacactgataattgggatgcttttgcggaagttctgccgccggaacgccacataattggcaaagcacacaccgtcgcggtcgaacgcgacaacagcaatacaagacatcatctcggcagatttacaaggcgtaccaaagttgtgtcaaaaagtccgtttatggtggatttgaccatacgtttatggtgcgctttgactaaaccaaccgtttttaagatctggcaagataaaatgatgtgtatctttaagtga

SEQ ID NO: 9086 - protein, 135 aa, Unknown
  Obtained from environmental sample
  DOMAIN (1)...(115): IS1 transposase
  misc_feature (1)..(135): Xaa is any amino acid
MAFCTVKKTKLWLIKAVDRRTRRTIAWVLGGRDSGTFRRLFDKVKHIKNCIYYTDNWDAFAEVLPPERHIIGKAHTVAVERDNSNTRHHLGRFTRRTKVVSKSPFMVDLTIRLWCALTKPTVFKIWQDKMMCIFK

SEQ ID NO: 9087 - DNA, 354 bp, Unknown
  Obtained from environmental sample
  misc_feature (1)..(354): n is a, c, g, or t
gtgtttaggtacgcgataaggctcggtatgctgacagacaatccttgtgaacgcgtcgttctgccgaatgagcaaaaaccggaaaagaccatctacactctcgacgaggttgagcaaatttttgaaaaactccaatcggaagaaacaaaaccgttgttacgaatgtttgtttatttggcggtttacacaggttttcgcaggggagaattgctcgggttggagtacagggatttggactgggaaaacagcgtcatcagcgttcggaggacttcaaactacaccgtccacaaaggcacttacaccgacacgacaaaaacaagaaatcggcacgctcgtcgcatttacctccgctga

SEQ ID NO: 9088 - protein, 117 aa, Unknown
  Obtained from environmental sample
  misc_feature (1)..(117): Xaa is any amino acid
MFRYAIRLGMLTDNPCERVVLPNEQKPEKTIYTLDEVEQIFEKLQSEETKPLLRMFVYLAVYTGFRRGELLGLEYRDLDWENSVISVRRTSNYTVHKGTYTDTTKTRNRHARRIYLR

SEQ ID NO: 9089 - DNA, 567 bp, Unknown
  Obtained from environmental sample
  misc_feature (1)..(567): n is a, c, g, or t
ttgtcattgtattataagaacctttttgattttgaaagcacattctttacccaatggctaaaagactcaattcactggtatatcggaaccaacggtatctggcgtcctgaaaatgtcggagaagcaatgttcttcggtctggacagcaaactgcgttttgaaattcctgttaagctgggagcggtaaaaaatcttatcccatcggtttcgtatcagtaccttttaagttatctattgggttttggttatggctttgcggacaataaaagaatcccttacagtcccgctcatacaatcggagcttcgcttgaggttccatggggaagcggatctgtaataatcagcgggcattatgaaagtcttcgctatgacgacagagccaatctaacacagttgagaccgcattttctgcttaacgccaatgttaatcaaaaaatagggaaaaaccttacggtattcggggtacttcggaatattcttaacgaatcatatcagtcatttaacgattaccccatgccaggtatcacaatgacggtggggatgaaggctaatttggagataaaatga

SEQ ID NO: 9090 - protein, 188 aa, Unknown
  Obtained from environmental sample
  misc_feature (1)..(188): Xaa is any amino acid
MSLYYKNLFDFESTFFTQWLKDSIHWYIGTNGIWRPENVGEAMFFGLDSKLRFEIPVKLGAVKNLIPSVSYQYLLSYLLGFGYGFADNKRIPYSPAHTIGASLEVPWGSGSVIISGHYESLRYDDRANLTQLRPHFLLNANVNQKIGKNLTVFGVLRNILNESYQSFNDYPMPGITMTVGMKANLEIK

SEQ ID NO: 9091 - DNA, 573 bp, Unknown
  Obtained from environmental sample
  misc_feature (1)..(573): n is a, c, g, or t
atgaacggcgggacaataagtaataataatgcatgggacaatcgcaattatggtggcggtggcgtattagtctatgatgatggcgtatttaccatgaacggaggaactatcagagataattacgcctttttgggcggcggcgtatatgtaaatgatgacggaatatttaccatggatagcggaactatcagcggaaacaccgctggcgagcaaggaggcggtgcgcttatttatggtacatttacgatgacgggcggaatcatcaaaggaaataatactgacagcatcggtggcggcataaatgcagggtggggtagcaaatttttaatgaaaggcggaactatcagcggtaataccgcaaaatttggcggcggcgtgtatgttaaccatagtacatttatcaaaacaggcggtactatttacggttccaacgcttccggtgtattaaaaaacaatgcggataccggagccgccgtatgttatccggaaaaaaatagaaaacgcgactcgacggcggggccggatgataatatggatagcagaataaccaccggcgtcggcggatgggaatga

SEQ ID NO: 9092 - protein, 190 aa, Unknown
  Obtained from environmental sample
  misc_feature (1)..(190): Xaa is any amino acid
MNGGTISNNNAWDNRNYGGGGVLVYDDGVFTMNGGTIRDNYAFLGGGVYVNDDGIFTMDSGTISGNTAGEQGGGALIYGTFTMTGGIIKGNNTDSIGGGINAGWGSKFLMKGGTISGNTAKFGGGVYVNHSTFIKTGGTIYGSNASGVLKNNADTGAAVCYPEKNRKRDSTAGPDDNMDSRITTGVGGWE

SEQ ID NO: 9093 - DNA, 492 bp, Unknown
  Obtained from environmental sample
  misc_feature (1)..(492): n is a, c, g, or t
atggagaatatctactggcttgaacaggcggtaaaagctgattttgccaatccgttatacgcacttgccctaatcgaaaatgaaacccaatgggaaaaataccgttatcttttttcaatgcaccttaacataaaattgatagaacaatatttattattgggcaataaatggaacaaacgaagagcctatttttacaacgccccctggcgggatcaaaacatagaaagtcttgaaacggctgagacctgttaccgaaccgccctttattactgggacgaagctctttcctggtggaagaaagccaacgacaggcgttttagatggattgaccttcctaaggtacaattttggcaggatgaggcgttcaggattgaaaacggcacgttgaattacgcaagaacaattaaccgcgagcttgagtctttgcaaaaagtgcgcgagaaatttaaggctatggaaaaatattatacgatacaggattcgttgcaatag

SEQ ID NO: 9094 - protein, 163 aa, Unknown
  Obtained from environmental sample
  misc_feature (1)..(163): Xaa is any amino acid
MENIYWLEQAVKADFANPLYALALIENETQWEKYRYLFSMHLNIKLIEQYLLLGNKWNKRRAYFYNAPWRDQNIESLETAETCYRTALYYWDEALSWWKKANDRRFRWIDLPKVQFWQDEAFRIENGTLNYARTINRELESLQKVREKFKAMEKYYTIQDSLQ

SEQ ID NO: 9095 - DNA, 795 bp, Unknown
  Obtained from environmental sample
  misc_feature (1)..(795): n is a, c, g, or t
gtgacggcggaaatggcggaagaaggcggtaaaatcgtcaagcgagataaccaggtactcgcggtgacagccccaagcgtggacggtatttttgctttaaccgcaaagttaaaggaaggcggttttaatgatcttcttattgaatttaaaacacattccctagcggaaactttccagacgaattccatcgcccggaaggcggcgcttaaaaacaacgtaaaggctctcggctatgcctcgttgcgctttatcaacaccggcagcggaatggacgacacggtaacggctgtaacggaaatcgacaagtttggcgggattgttgtgcttcccgctttcgacccggcacagcttataacccttcttacattgcgccagaatatttacactgacccgcaaaagccaatccaggttgaacccaagctttacgctataggcgagccaaacaggaaatcgcctgtctttgtgacaaccaacttttcgcttacttactttctggtttccggtgaaattgagaacagcggcatttccgcgtggctggtaattcccgaatgtgaaggcttcagcgtactgaccgcctgggcggcggggaaattctccggagcttccattgctaagtttatcaaggaaatcaacctggaaagccaggtggatacgcgtgaaattgtaatccccggttacgtcgcgcaaatctcaggagagcttgaggaaaacctgccggggttcaaagttctggtaggccccggcgaggcggctgatatggaaagctttatcaaaaacgtactggtgaaaaaatga

SEQ ID NO: 9096 - protein, 264 aa, Unknown
  Obtained from environmental sample
  DOMAIN (1)...(257): CO dehydrogenase/acetyl-CoA synthase delta subunit
  misc_feature (1)..(264): Xaa is any amino acid
MTAEMAEEGGKIVKRDNQVLAVTAPSVDGIFALTAKLKEGGFNDLLIEFKTHSLAETFQTNSIARKAALKNNVKALGYASLRFINTGSGMDDTVTAVTEIDKFGGIVVLPAFDPAQLITLLTLRQNIYTDPQKPIQVEPKLYAIGEPNRKSPVFVTTNFSLTYFLVSGEIENSGISAWLVIPECEGFSVLTAWAAGKFSGASIAKFIKEINLESQVDTREIVIPGYVAQISGELEENLPGFKVLVGPGEAADMESFIKNVLVKK

SEQ ID NO: 9097 - DNA, 834 bp, Unknown
  Obtained from environmental sample
  misc_feature (1)..(834): n is a, c, g, or t
gtgccggacacccagaatatttcaggggatgccatgacaccggaaggtacggtgaaccgcgcggcgctgcccgcgatttttaatccggatgacctttatgccctggaagcggcgctgcaaattaaagacgccaatcaccaaaccaggatcaacgtggtatgtatggggcctccctcggctgccgcggtgttaaaagaatgtctctaccggggcgtcgattttaccgccctggtgtctgaccggggttttgccggcgcggataccctggcgacatcctacgccctcaaatgcgccattagcaaaatcggcgcggatagcggcgggattgacctggtgttctgcgggcgccaggccattgacggggacaccgcgcaggtggggccccagactgcggagaaacttgggatgaatcagattacctgcgtttccaaaatcgaaaaaatcgattcggcaaagaaagagattatcgccattcgttcaatcgaagggggctgggaaaaagtgaaggctagcctgcccgtcctcatcacctttacggaagaaggcgaaactcccaggcccgcctcagccatcaagaccatgacctacaaacggacggttcctgcgaccgacgccgttctcaaggattccggcaagccgaatcccatggccctttgggacatcagcgcaattaacgcggatcctctccaatgcggcctctcaggttcccctaccaaggtgaaacacatcaattccgtggtgctgaccgccgcggacatcanatacatcgatcccggcgaagcgggcatttcagaattgatccatggccttatcgcggatcatacttttggttaa

SEQ ID NO: 9098 - protein, 277 aa, Unknown
  Obtained from environmental sample
  DOMAIN (15)...(214): Electron transfer flavoprotein domain
  misc_feature (1)..(277): Xaa is any amino acid
MPDTQNISGDAMTPEGTVNRAALPAIFNPDDLYALEAALQIKDANHQTRINVVCMGPPSAAAVLKECLYRGVDFTALVSDRGFAGADTLATSYALKCAISKIGADSGGIDLVFCGRQAIDGDTAQVGPQTAEKLGMNQITCVSKIEKIDSAKKEIIAIRSIEGGWEKVKASLPVLITFTEEGETPRPASAIKTMTYKRTVPATDAVLKDSGKPNPMALWDISAINADPLQCGLSGSPTKVKHINSVVLTAADIXYIDPGEAGISELIHGLIADHTFG

SEQ ID NO: 9099 - DNA, 597 bp, Unknown
  Obtained from environmental sample
  misc_feature (1)..(597): n is a, c, g, or t
ttgggcaaggttcccgtcaaaatcggggacatggattcggcttcattcagtgcccataagctgggtggaatgagaggtatagggctattataccttaaaaaaaatttgaaaggcctttatgcgggtggcagccaggaagggggcgtaaggcccgggacggaaaacacgctgggggctttgtctctggctgaaattcttgagcgaagggcaatgcctgaaacagtgaagcaggaaaacgagaatgcaagggaacgctttagttacttgataggtgaattaagaaaaataaagcgatgcgccctaattcccgaggacagggaagacgatgacccccgtttttcgccatggattatccaggtgaggttttgtgatgtgccgggtccagttatggtcagagcactggacaaagaagggatagcggtttctaccggttcagcctgttcctctaactcccctgaaaggcctgtgcttcaggcgatgggcgtggatggaaaggccaggcttgagggaattagggtttcgcaaggctggtctacaaacatggccgatttggatgcccttttggacgggattaaaaaagcgctttcttttctgtaa

SEQ ID NO: 9100 - protein, 198 aa, Unknown
  Obtained from environmental sample
  misc_feature (1)..(198): Xaa is any amino acid
MGKVPVKIGDMDSASFSAHKLGGMRGIGLLYLKKNLKGLYAGGSQEGGVRPGTENTLGALSLAEILERRAMPETVKQENENARERFSYLIGELRKIKRCALIPEDREDDDPRFSPWIIQVRFCDVPGPVMVRALDKEGIAVSTGSACSSNSPERPVLQAMGVDGKARLEGIRVSQGWSTNMADLDALLDGIKKALSFL

SEQ ID NO: 9101 - DNA, 492 bp, Unknown
  Obtained from environmental sample
  misc_feature (1)..(492): n is a, c, g, or t
atggcctccgttgacaagttcggctcgatagacgccgccaaggccaaggagtacggctggaagcagatggacggcggcgcctggatagagcagcccgtgaccatcctggtccccgccgctcaggagaacatggtcaacgccggcaacgccgacaagatcaaggacacggtcaaggtcatagccgagggcgccaacggcccgaccacgcccgaggccgacgccatcatccagaagaagggcatcttcatgatccccgacttcctctgcaacgccggcggcgtgacatgctcctacttcgagcaggtccagaacaacatgaactactactgggaaaaggaagaagtcctgaccaagctggaccagaagatgaccaacgcattcaaggccgtgtccgcaatggccaaggagcgcaaggtttacatgcgcgacgccgcctacatggtctccatcaagcgcgtcaacgacgcatgccgcctcaggggctgggtctga

SEQ ID NO: 9102 - protein, 163 aa, Unknown
  Obtained from environmental sample
  DOMAIN (1)...(161): Glutamate/Leucine/Phenylalanine/Valine dehydrogenase
  misc_feature (1)..(163): Xaa is any amino acid
MASVDKFGSIDAAKAKEYGWKQMDGGAWIEQPVTILVPAAQENMVNAGNADKIKDTVKVIAEGANGPTTPEADAIIQKKGIFMIPDFLCNAGGVTCSYFEQVQNNMNYYWEKEEVLTKLDQKMTNAFKAVSAMAKERKVYMRDAAYMVSIKRVNDACRLRGWV

SEQ ID NO: 9103 - DNA, 531 bp, Unknown
  Obtained from environmental sample
  misc_feature (1)..(531): n is a, c, g, or t
atgcgtaagttattgtttttatttatattgatatttttttcgggcggttttcttttttcccaagcggacgcggacagtgatttttcctctttggacgcttattatcttggacgggcggtagccgcgaatattctgaatgcatataaaatacatgacaagcctgagttaacccaatatttaaaccgtatctgtcaggcgcttgtgattaattctcccaatcaagctgcgtacaaaggttattttgtaatgcttcttgacagcaatgaatttaacgcgtttgcaactccgggagggcatgtatttatcacaaagaaaatggcggaatcggcttcttccgaggatatgctggcggcaataatagcccatgaacttgcgcatatcatgttaaggcatggtataaaaataatcggcaaatccaaaattgaaaatgaactgacagccgttgcggattgggcggcggcaaccgccgcaaaagttgacgcacaggcggcgcgcgccgcgattttcgcgatcaatactcggccgatctga

SEQ ID NO: 9104 - protein, 176 aa, Unknown
  Obtained from environmental sample
  SIGNAL (1)...(22)
  misc_feature (1)..(176): Xaa is any amino acid
MRKLLFLFILIFFSGGFLFSQADADSDFSSLDAYYLGRAVAANILNAYKIHDKPELTQYLNRICQALVINSPNQAAYKGYFVMLLDSNEFNAFATPGGHVFITKKMAESASSEDMLAAIIAHELAHIMLRHGIKIIGKSKIENELTAVADWAAATAAKVDAQAARAAIFAINTRPI

SEQ ID NO: 9105 - DNA, 303 bp, Unknown
  Obtained from environmental sample
  misc_feature (1)..(303): n is a, c, g, or t
atggaatcaaaattttcaggaggggttggagcaattttcctcttttgcatttgggcccctattctttctataattacacttggtttggcaacaccttttattgtatgtacagttataaggtggatttgtaataattctaccattggtggtaaaagttacaaattcaaaggaactgccggcgggttgtttgggcgatggatcttatggtacttcttaacaattatcaccattggtatttacgggttttggtctaccagaaaccagatcagatgggttatagaaaacgtagaaatggttaattaa

SEQ ID NO: 9106 - protein, 100 aa, Unknown
  Obtained from environmental sample
  SIGNAL (1)...(30)
  misc_feature (1)..(100): Xaa is any amino acid
MESKFSGGVGAIFLFCIWAPILSIITLGLATPFIVCTVIRWICNNSTIGGKSYKFKGTAGGLFGRWILWYFLTIITIGIYGFWSTRNQIRWVIENVEMVN

SEQ ID NO: 9107 - DNA, 417 bp, Unknown
  Obtained from environmental sample
  misc_feature (1)..(417): n is a, c, g, or t
atgaaatcaataaccaaggaactgtggtttaacaccaagaaaccgcgtgaattcatcaggatcacaaacgaggtggaagcgctgctcgcggagtcgggcatacaggaggggctgtgcctggtaaacgccatgcacattaccgcaagcgtttttatcaatgatgacgagtccggcctgcaccatgattttgacgtgtggcttgagaaactcgcgccccatgagccggtctcgtcctatcggcataacacaggcgagattaacgccgacgcgcatttgaaaaggaccgtaatgggcagggaggtaacagtcgccgtgacccagggtaaattgcaccttggcccctgggagcagattttctacggggaattcgacggccagcgtcgcaaacgcgtgctgattaaaataataggcgaataa

SEQ ID NO: 9108 - protein, 138 aa, Unknown
  Obtained from environmental sample
  DOMAIN (18)...(136): Uncharacterised protein family UPF0047
  misc_feature (1)..(138): Xaa is any amino acid
MKSITKELWFNTKKPREFIRITNEVEALLAESGIQEGLCLVNAMHITASVFINDDESGLHHDFDVWLEKLAPHEPVSSYRHNTGEINADAHLKRTVMGREVTVAVTQGKLHLGPWEQIFYGEFDGQRRKRVLIKIIGE

SEQ ID NO: 9109 - DNA, 804 bp, Unknown
  Obtained from environmental sample
  misc_feature (1)..(804): n is a, c, g, or t
gtggcagtatataaccattataaaaggctttattctggaaattccaaaaaaattgccagtgatgttgaaatagataaatccaatgttttgttcgttggtcccacaggttctggcaaaacgctactcgctcaaacccttgctcgttttttgcaggttcccttcaccatagcagatgccactgttttaacagaggttggttatgttggcgaagatgtggatagcattttggttaggctttaccaagccgctgaatacaatgttcaggcaacggaaaggggtattgtttttgttgacgaaatagataaaattgcccgcaaatccgcaaacccttcaataacgagagatgtgtctggcgaaggtgttcagcagggtttgcttaaaattttggaaggaaccatcgcagctattccacccaagggtggccgcaagcacccggagcagctcttggttcatataaatacacgcaacattttgtttatatgcggtggagcctttgaaactttggataaggttatttcaaagcgcgtgaattccggcggtggaatgggttttggcgcagaggtggtatctaaaaatgaaagcaaaattggagaaatactcagcaaatgcgaacccgaagatttaataagctatggcttgcttccagaattagttggaaggctgccggttatagttagcctagacgagctagacgaaacagctcttctaagcattttaaccgaaccgcanaactctttggtaaaacaatacaccaaactctttgcaatggacggaatagaactctcttttacaaagatgctctag

SEQ ID NO: 9110 - protein, 267 aa, Unknown
  Obtained from environmental sample
  DOMAIN (28)...(260): ATPase family associated with various cellular activities (AAA)
  misc_feature (1)..(267): Xaa is any amino acid
MAVYNHYKRLYSGNSKKIASDVEIDKSNVLFVGPTGSGKTLLAQTLARFLQVPFTIADATVLTEVGYVGEDVDSILVRLYQAAEYNVQATERGIVFVDEIDKIARKSANPSITRDVSGEGVQQGLLKILEGTIAAIPPKGGRKHPEQLLVHINTRNILFICGGAFETLDKVISKRVNSGGGMGFGAEVVSKNESKIGEILSKCEPEDLISYGLLPELVGRLPVIVSLDELDETALLSILTEPXNSLVKQYTKLFAMDGIELSFTKML

SEQ ID NO: 9111 - DNA, 357 bp, Unknown
  Obtained from environmental sample
  misc_feature (1)..(357): n is a, c, g, or t
atgataatcagatcaaaagccccgctgcggctgggacttgcgggcggcggaaccgacatcgccgactattacaaccgtttcggcggttatgtgctgaacgccacggtggatatgtacgcttattgtacaattgaacctgacgattcaggcaaaataaaatttatcgccgctgatttgggcaaacaggaggaatatgacgctgccgggcggcttccggtctcctccgtcctgcccctccattgcggcatctacaacaggatcgtttccgattttgtncagaagccgctgtcgtttaanatgaccacttattctgacacgcccgccggttccggcctgggttcgtcttccacatggtag

SEQ ID NO: 9112 - protein, 118 aa, Unknown
  Obtained from environmental sample
  misc_feature (1)..(118): Xaa is any amino acid
MIIRSKAPLRLGLAGGGTDIADYYNRFGGYVLNATVDMYAYCTIEPDDSGKIKFIAADLGKQEEYDAAGRLPVSSVLPLHCGIYNRIVSDFVQKPLSFXMTTYSDTPAGSGLGSSSTW

SEQ ID NO: 9113 - DNA, 327 bp, Unknown
  Obtained from environmental sample
  misc_feature (1)..(327): n is a, c, g, or t
atggtaaacaatgaaatactggcaataaaagacagtatcttgaaaactgtgggtgataattgtgaaaaaatcatcctctttggctcctacgcttatggaacgccgagagaaggcagtgattatgatgtctttgttattcttaaagacggaactgaaaagcctattttggttttacaaaatatataccgcagcctggctcagaatccgaattataaggcagttgatgtccttgcaaattataaaagccgttttgaagttagaagcaaattaccgactatagaaaaaacaattgcgcaaaaagggatcgtactctatgaccacgcttga

SEQ ID NO: 9114 - protein, 108 aa, Unknown
  Obtained from environmental sample
  DOMAIN (2)...(104): Nucleotidyltransferase domain
  misc_feature (1)..(108): Xaa is any amino acid
MVNNEILAIKDSILKTVGDNCEKIILFGSYAYGTPREGSDYDVFVILKDGTEKPILVLQNIYRSLAQNPNYKAVDVLANYKSRFEVRSKLPTIEKTIAQKGIVLYDHA

SEQ ID NO: 9115 - DNA, 816 bp, Unknown
  Obtained from environmental sample
  misc_feature (1)..(816): n is a, c, g, or t
gtgctgatggcgtttaacttaaaaactttgtttcacgcgggcgggcttcttcccggcggctttaccgggcttacccttctgctccaggaaatatgcttgcgttacggaaacttccacctgcctttcagcttgacgtattacatttttaacgcggtaccagccgcggtatgttttagattcataggtaggaaattcactctttattctgtgcttgccatttttattacaggcatgcttgccgactggatgccttctatgttcatcgatttaatccagctgcacgataccttgctttcggcgattttcggaggggctctaaacgggctggccatcgctctctgcctttacgccgatgccacttccggcggcactgattttatcgcgattttcatttccgaaagataccacaaggacgcctggaattacatttttacagggaattgtgttattctggcggtggcaggagcccttttcgacctggacaaggctttgtattccattattttccagtttacgaccacggcggctcttggagccctttaccggaattatcagcagatgaccctccttattattaccaacaagccggatttgatttatccggtgataagagaaaaaaccaatcacagcgctacctgttttgaggggtttggcagttatgaaaagaagagccggactctgctttattctgtggtaaccgccagccaggtcaagattcttatacccgcaataaggaaaatagatgaaaaagcgtttatcaatgtattgaaaaccgaccagcttaaagggcaattttatcaaaggccttttgactag

SEQ ID NO: 9116 - protein, 271 aa, Unknown
  Obtained from environmental sample
  DOMAIN (96)...(177): Uncharacterized BCR, YitT family COG1284
  misc_feature (1)..(271): Xaa is any amino acid
MLMAFNLKTLFHAGGLLPGGFTGLTLLLQEICLRYGNFHLPFSLTYYIFNAVPAAVCFRFIGRKFTLYSVLAIFITGMLADWMPSMFIDLIQLHDTLLSAIFGGALNGLAIALCLYADATSGGTDFIAIFISERYHKDAWNYIFTGNCVILAVAGALFDLDKALYSIIFQFTTTAALGALYRNYQQMTLLIITNKPDLIYPVIREKTNHSATCFEGFGSYEKKSRTLLYSVVTASQVKILIPAIRKIDEKAFINVLKTDQLKGQFYQRPFD

SEQ ID NO: 9117 - DNA, 675 bp, Unknown
  Obtained from environmental sample
  misc_feature (1)..(675): n is a, c, g, or t
atgaggaaaggttttgcctgccttttttccggtgcgccgggaaccggaaaaacggagaccgcctaccagatcgcccgcgaaacagggcgcaacataatgatggtggacatagccaacacaaaaagctgctggtttggagagagcgaaaagaaaatcaaggaaatcttcaccacttaccggtacgcggttgacaattcggaaatcgccccgatcctcctgttaaacgaagcggacgctgtaataggaaagcgaaaagaatttgacagttcaagcaaggcggtggatcaaaccgaaaatgctattcagaacatcatcctgcaagaaatggaaaacctgtctggcattttaatagccaccaccaacctgacccaaaacatggacagcgcctttgagcggcggttcttgtacaagattgagtttacaagaccctgtcttgcagcccggcaatccatctggcagagtatgatgtcgtcccttactgaaaccgacgccggggctttggcttcgcggtttgacctatccggcggtcagattgaaaacattgcacgcaaggccgaagtagacacgataataaacggaagccgtccgacaatagacattttggcgcagtattgcagggacgaaaatctgaacaaccttaataacgaaaaaaagattgggtttggaaattcgtga

SEQ ID NO: 9118 - protein, 224 aa, Unknown
  Obtained from environmental sample
  SIGNAL (1)...(16)
  DOMAIN (6)...(191): ATPase family associated with various cellular activities (AAA)
  misc_feature (1)..(224): Xaa is any amino acid
MRKGFACLFSGAPGTGKTETAYQIARETGRNIMMVDIANTKSCWFGESEKKIKEIFTTYRYAVDNSEIAPILLLNEADAVIGKRKEFDSSSKAVDQTENAIQNIILQEMENLSGILIATTNLTQNMDSAFERRFLYKIEFTRPCLAARQSIWQSMMSSLTETDAGALASRFDLSGGQIENIARKAEVDTIINGSRPTIDILAQYCRDENLNNLNNEKKIGFGNS

SEQ ID NO: 9119 - DNA, 678 bp, Unknown
  Obtained from environmental sample
  misc_feature (1)..(678): n is a, c, g, or t
ttgattatcacgaagagctgcaaaaaaagcaagagaagacagtgcgccgcctttatttcgctgtttgcccttcatccccagctttcagttgaaaaaaactatcctttgccgaggggtatcgagcttctttattcatttgctgtagaatccagacttgatgctgtaggagaaacaggctttgatctatatgacaaaaaattcaaagccgctgaaagtatccaggatgaaatgttcacaagccaccttgatgtagcgctgcattgggatctgccggtgatcctccatttaagaagggcaatgcacaaaattttcccgtttgtgcggcaactaaaaaaattgccggcagtggtttttcattcatggcccggaaccagaggtgaggcggaagtaataattaaaaaaggtattaacgcttatttttcatttgggacggcagtgctgaaaaaccacaaagaggcgattgcttcagcaagcatattaccggcagacaggatacttcttgaaaccgacgctccgtaccagccgcttaggggaaaagagttttccacctggcaggatttaggccaaatatgctcatgtatagcggacttgagaaaggaagcaggcagtccttgcgcgaatactaaagaactggaagcgcaaacgacagaaaatttctacagagtctttggcggctaa

SEQ ID NO: 9120 - protein, 225 aa, Unknown
  Obtained from environmental sample
  SIGNAL (1)...(29)
  DOMAIN (1)...(224): TatD related DNase
  misc_feature (1)..(225): Xaa is any amino acid
MIITKSCKKSKRRQCAAFISLFALHPQLSVEKNYPLPRGIELLYSFAVESRLDAVGETGFDLYDKKFKAAESIQDEMFTSHLDVALHWDLPVILHLRRAMHKIFPFVRQLKKLPAVVFHSWPGTRGEAEVIIKKGINAYFSFGTAVLKNHKEAIASASILPADRILLETDAPYQPLRGKEFSTWQDLGQICSCIADLRKEAGSPCANTKELEAQTTENFYRVFGG

SEQ ID NO: 9121 - DNA, 846 bp, Unknown
  Obtained from environmental sample
  misc_feature (1)..(846): n is a, c, g, or t
ttgaacaggggagaatccggtttaactctggctcaatccataggcatagacggtcattttgttatagagcagtctgcacgtagctggggcggcttgtttatgaacttcaacggcaccgcaggcgtttggcgcagaaaagccatagacgaagctgggggctgggaaggcgacaccttaaccgaagatatggatttatcctaccgtagccagctcgctggctggaaaatgaaatttgtttttgatgttattgttcccgcagagcttccggcagatataaacgccttcaagagtcagcaataccgctgggcaaagggttcaatacaaaccgccataaaagatttgccgcgagttttttcttcaaaagagtctttaaaaatcaaaattcagtcttttttgcacacaacgcattatagtattcatcctttgatgttattcaccgccatttccgcattccccttgctcgcttttggacattcaagatttggttatatgcctctatggcttttttcggttttatttgcagttatagcccttgcagctgtggctccttctacgctttattttattgctcaaaaattttcgggttctgttggttggagaaaacgaatggctgcccttcctttgctaatgagccttggagtggggattgctgttaacaatacctgtgctgttatgtctgctgtctttgggagaaaaagctccttcattagaactccaaaacagggcggagcagttggacaatgcggggcagttagcataaaaaaattcaagcaaaaattccctgcaattgccttttttgaatatgttgcggtgtttattgtgtatttggtttgctggaatatatag

SEQ ID NO: 9122 - protein, 281 aa, Unknown
  Obtained from environmental sample
  misc_feature (1)..(281): Xaa is any amino acid
MNRGESGLTLAQSIGIDGHFVIEQSARSWGGLFMNFNGTAGVWRRKAIDEAGGWEGDTLTEDMDLSYRSQLAGWKMKFVFDVIVPAELPADINAFKSQQYRWAKGSIQTAIKDLPRVFSSKESLKIKIQSFLHTTHYSIHPLMLFTAISAFPLLAFGHSRFGYMPLWLFSVLFAVIALAAVAPSTLYFIAQKFSGSVGWRKRMAALPLLMSLGVGIAVNNTCAVMSAVFGRKSSFIRTPKQGGAVGQCGAVSIKKFKQKFPAIAFFEYVAVFIVYLVCWNI

SEQ ID NO: 9123 - DNA, 438 bp, Unknown
  Obtained from environmental sample
  misc_feature (1)..(438): n is a, c, g, or t
atgcgtagcgttccgtttngaaccaaaattgtagctattgttcctttgcctgcatcaaggcggctctctataaccgcacctcttgcgctggcatcggggtttgcctttaattccaaaacctcggattcaagcgcaagggtttccagcaatttctctatgccttctccggttttaacggatattttaacgcagctcacattgccgccccattcgtcaacttgcacccctctttcggagagctgggacattattttgtctgtgttcgcggttggcaaatcgatttttgtaatggcaaccacaatggggactttcgcggtttttgcaagctcaatggattccaccgtttgcggcataaccattgaatctgctgcaaccaccaaaactattacgtcggtgacctgcgaacctctggcgcgcattgcgttaaaggattcgtga

SEQ ID NO: 9124 - protein, 145 aa, Unknown
  Obtained from environmental sample
  misc_feature (1)..(145): Xaa is any amino acid
MRSVPFXTKIVAIVPLPASRRLSITAPLALASGFAFNSKTSDSSARVSSNFSMPSPVLTDILTQLTLPPHSSTCTPLSESWDIILSVFAVGKSIFVMATTMGTFAVFASSMDSTVCGITIESAATTKTITSVTCEPLARIALKDS

SEQ ID NO: 9125 - DNA, 729 bp, Unknown
  Obtained from environmental sample
  misc_feature (1)..(729): n is a, c, g, or t
gtgctgaggtcgggcggacacgtcgtgcagcagaccttcttgtggaacccgaacgaaaaccgctccgtcccaatgcgcacaaaggaggacgccgacgactaccgctacttccccgatcccgatctaacgccgctcgtcgtagaggcggattgggttgacaaaatgagagagacgctgccggagctgccgtcgccgcgccgtcgcaggtttgagggcggctacaagatcaccgcctacgccgccgaagtgctgaccggttcacgtccgctggccgactacttcgagcggtgcgtgagcagttgcgacgacgcaaaatccgccgccaactgggtgatgacggacattatgagaatgatgaacgacgcgaaaatcgaaagcccgtttgaacttaagaccaagccggagcggttaggcgaactgataaaactgataaacaacggcggcgtctccgccaaagccgcgaagaaggttttagacctgatggagagcgaggacaaagaaccgggcgcggtgatccgcgagcagggtttggaacaggtgtcggacacgtcggcgcttgaggcggtggtaaaaagcgtggtcgacgcccaccccgccgaggttcaaaggtacaaggacggcgataagaagctctccggcttcttcatgggccaagtgatgaaggcctccaaaggcgccgccaatccgaaagaggccgtggccattctggacaggttgattttgggatga

SEQ ID NO: 9126 - protein, 242 aa, Unknown
  Obtained from environmental sample
  DOMAIN (22)...(90): PET112 family, C terminal region
  misc_feature (1)..(242): Xaa is any amino acid
MLRSGGHVVQQTFLWNPNENRSVPMRTKEDADDYRYFPDPDLTPLVVEADWVDKMRETLPELPSPRRRRFEGGYKITAYAAEVLTGSRPLADYFERCVSSCDDAKSAANWVMTDIMRMMNDAKIESPFELKTKPERLGELIKLINNGGVSAKAAKKVLDLMESEDKEPGAVIREQGLEQVSDTSALEAVVKSVVDAHPAEVQRYKDGDKKLSGFFMGQVMKASKGAANPKEAVAILDRLILG

SEQ ID NO: 9127 - DNA, 777 bp, Unknown
  Obtained from environmental sample
  misc_feature (1)..(777): n is a, c, g, or t
atggctattttggaagcgtacaatatcgccaaacgttttggttcctctgaagttttgaataacatcagcttttcgcttgaagaaggcgaagttcttgccattatcggatcttcaggcagtggaaagaccacactcttacgctgtttaaattttttggaaaaacccgactttggcagaatcatagtgcgcggagaaacattgatagattgcaaaggtcattcccattgggatgagtccgacataaggcaaaagcggcgacattttggacttgtatttcaagcgtttaatttgtttccccaatacacggcgtttgaaaacattacgcttgcccgtgaattggaagcaaaaaaaagagcggattacaaaaaaaacaagaaaaccataatcgaagaaatacgcaaggagggcattgttcttcttgaacaaatgggattatctgcaaaacgcgatttatatccccaccaattatctggcggacagcagcaacgcgtcgccatcgccacggcattggctttaaaacccgatattttatgttttgacgagccgacctccgcccttgatcctgaattaacaggagaagtgttaaaagtaatccgtagtctggcggagaagaatacaacaatgattatcgttacccacgagatgcaattcgcgcgtcaggttgcggatacggtactttttatggatgagggagttattgttgaatacggtaagcctgagcttcttgataatccttcaagtgagaggctgaaacggtttctggagaggtacagttga

SEQ ID NO: 9128 - protein, 258 aa, Unknown
  Obtained from environmental sample
  DOMAIN (18)...(234): RecF/RecN/SMC N terminal domain
  misc_feature (1)..(258): Xaa is any amino acid
MAILEAYNIAKRFGSSEVLNNISFSLEEGEVLAIIGSSGSGKTTLLRCLNFLEKPDFGRIIVRGETLIDCKGHSHWDESDIRQKRRHFGLVFQAFNLFPQYTAFENITLARELEAKKRADYKKNKKTIIEEIRKEGIVLLEQMGLSAKRDLYPHQLSGGQQQRVAIATALALKPDILCFDEPTSALDPELTGEVLKVIRSLAEKNTTMIIVTHEMQFARQVADTVLFMDEGVIVEYGKPELLDNPSSERLKRFLERYS

SEQ ID NO: 9129 - DNA, 624 bp, Unknown
  Obtained from environmental sample
  misc_feature (1)..(624): n is a, c, g, or t
gtgcagcttggcatggcattgtatacaggaaaaataaacctcgccaatgcctttgttgtctcgttaaactggaaaaaaggaggaaccctactccctattatagttcagtctacagatggccaggtaatgatgaccggttttaccgacaaggaagcgttagctgaaacattcaagcggggtaatgtctgcttccacagccgcaccaggaacagactctggatgaagggtgaaaattcaggcaatgtgttaaaactcatccgattgcgggcagactgcgacagggacgcccttcttgcaatagccgaacccgcgggcccggtctgccacaccggcgcatggtcttgttttgcgactaacagagactatacattgcaatttttgcagggcataatacaggagcgttttcgtaatcccgcgccgggttcgtatacggccacccttgacgatgagcttgtccgtgaaaaaataatggaagaggcgaaagaactctgtgaggcgaaggcccatgacgaaattgtctgggaagccgcggacttgctctactttgcgacagtgttaatgacaagggcgggagtcactgtcgatgaaattcttgacgagcttgaccggaggcataaaaaataa

SEQ ID NO: 9130 - protein, 207 aa, Unknown
  Obtained from environmental sample
  DOMAIN (124)...(206): Phosphoribosyl-ATP pyrophosphohydrolase
  misc_feature (1)..(207): Xaa is any amino acid
MQLGMALYTGKINLANAFVVSLNWKKGGTLLPIIVQSTDGQVMMTGFTDKEALAETFKRGNVCFHSRTRNRLWMKGENSGNVLKLIRLRADCDRDALLAIAEPAGPVCHTGAWSCFATNRDYTLQFLQGIIQERFRNPAPGSYTATLDDELVREKIMEEAKELCEAKAHDEIVWEAADLLYFATVLMTRAGVTVDEILDELDRRHKK

SEQ ID NO: 9131 - DNA, 786 bp, Unknown
  Obtained from environmental sample
  misc_feature (1)..(786): n is a, c, g, or t
ttgccgtttacccgtaacatagtatttaataatattcaattttcctatcccgtttcaaaagaaccggtcttaaagggaattaatttaacaataaaaaaaaatacctctgtcgcttttgcgggatctaccggctgcggaaaaacaactcttgtggatgtgttgttaggcctattggaaccatttgccggttcgataaatgtagatgattctcaggtggtaggtttgactgacggcaaagataacaggccgactcttgctctttggcagcataactttggttatgtaccgcagcatatatatttaagcgataatacagtagcagataacatagcgttcggtatacctgcggaattaatagattctgccgcggtagaaaaagcggctaaagtggctaatctgcatgagtttatcattaatgaactgccgaaagggtataatactattgtcggcgagcgcgggattcgtctttccggcggtcagcgtcagcggattggtattgcgcgggctttgtaccatgatcccaatattctggtgatggacgaggccacaagcgcccttgattctataaccgaaggcgcggtaatggaagcgattcacagcctgatgcatacaaaaactataattataattgcccaccgtctttcgactataaaagagtgtgatgtgatctatatgatggaacatggccgtattattgatcagggaacttatgacgagttgttggaaaacaatcctaaattcagggctatggcgaaagccggaaataaaaagacggcggcgggttag

SEQ ID NO: 9132 - protein, 261 aa, Unknown
  Obtained from environmental sample
  DOMAIN (34)...(229): ABC transporter
  misc_feature (1)..(261): Xaa is any amino acid
MPFTRNIVFNNIQFSYPVSKEPVLKGINLTIKKNTSVAFAGSTGCGKTTLVDVLLGLLEPFAGSINVDDSQVVGLTDGKDNRPTLALWQHNFGYVPQHIYLSDNTVADNIAFGIPAELIDSAAVEKAAKVANLHEFIINELPKGYNTIVGERGIRLSGGQRQRIGIARALYHDPNILVMDEATSALDSITEGAVMEAIHSLMHTKTIIIIAHRLSTIKECDVIYMMEHGRIIDQGTYDELLENNPKFRAMAKAGNKKTAAG

SEQ ID NO: 9133 - DNA, 897 bp, Unknown
  Obtained from environmental sample
  misc_feature (1)..(897): n is a, c, g, or t
atgatgatgagtgcaaaagcgcctaatttgtttccttatatcaaagtaatcgcggataaatcaaaaaagaagggacaattctggctgaccggttcgcagcagtttcatttaatgaaaaatgtttcagagagccttgccggacgcgcggctattctggatttgcagggattctctcaaagtgaaaaagaaaaagacgaaacacgtccagcctttattccggagattccgctgcaaaccaaaaggccggtttggacaacgcaaaaaacgtttgacgtaattgtcagggggtcttttccccaactgtttgacggcaccccttcttcgctgttttattcgtcttatatccgcacctatattgagcgtgatgtgcgtgaaattctgaaaattacaaatgaacacgctttcttgaagtttttaaaaatcacggccggaagaacagggcaagtcctgaattataacaatgtcgcgcgtgacatagaagtcagcgtcaacacggttaaaagctgggtttctgttctggaaacatccgggctgatatatctcctgccgccgtattcccgcaatttgacaaaacgcgcgataaaaacgccgaaactgtattttctggatacgggattgtgctgctatctgacggggattacaaccggaaaaatggctatggatcatcagataagcggggcgttatttgaaacctacgcggtatccgaagttttaaaatcctattggcataacggcgaacgtccgtttgcgtatttttaccgcgacacattgggtaaagaaattgatttaatattggaaacaaacggtaaattatggccgatagaaataaaacaaacggcaagccccaacccaagatggcgcanaactttgatgttctctcagatgaaaatgcggtaa

SEQ ID NO: 9134 - protein, 298 aa, Unknown
  Obtained from environmental sample
  misc_feature (1)..(298): Xaa is any amino acid
MMMSAKAPNLFPYIKVIADKSKKKGQFWLTGSQQFHLMKNVSESLAGRAAILDLQGFSQSEKEKDETRPAFIPEIPLQTKRPVWTTQKTFDVIVRGSFPQLFDGTPSSLFYSSYIRTYIERDVREILKITNEHAFLKFLKITAGRTGQVLNYNNVARDIEVSVNTVKSWVSVLETSGLIYLLPPYSRNLTKRAIKTPKLYFLDTGLCCYLTGITTGKMAMDHQISGALFETYAVSEVLKSYWHNGERPFAYFYRDTLGKEIDLILETNGKLWPIEIKQTASPNPRWRXTLMFSQMKMR

SEQ ID NO: 9135 - DNA, 633 bp, Unknown
  Obtained from environmental sample
  misc_feature (1)..(633): n is a, c, g, or t
gtggggatagattttatcgccggtcctaccgatgtgctcgtaatcgctgacggacagacagatggcaatattgaaaaaacagatgatcttgtcgcggcggatatgctcggtcaggcggaacatgaccctgatgcccgcgcacgggcgctggttcccaacagggaacttgccaaaaaaattcttactgctattgagcggcgtataaaatcattgccaacggaaaaaaccgcccacgcttctttggatgcaggcggtcttattatcgtctatgaaacaccggaagaggcgatccgtatcgctaacgtcatcgcgccggaacatcttgagcttcaaaccgccgatgcggataactggattcctcgactcaaaaattatggctcgctttttatcggcaatctttgcgccgaagttcttggcgattattcggcgggaataaaccacaccctgcccacgtcaacaagcgcccgttttactggcggtctgtctgtccgccactttcttaaaacagttaccaccctgcgctgtgcttcaggcgaaggttttgaaaaagcgcgtaacgcggcggaaatacttgcccgcgccgaagggctggaaggccacgctcagagcgcagcggcgcgagaacaaaagtaa

SEQ ID NO: 9136 - protein, 210 aa, Unknown
  Obtained from environmental sample
  DOMAIN (1)...(209): Histidinol dehydrogenase
  misc_feature (1)..(210): Xaa is any amino acid
MGIDFIAGPTDVLVIADGQTDGNIEKTDDLVAADMLGQAEHDPDARARALVPNRELAKKILTAIERRIKSLPTEKTAHASLDAGGLIIVYETPEEAIRIANVIAPEHLELQTADADNWIPRLKNYGSLFIGNLCAEVLGDYSAGINHTLPTSTSARFTGGLSVRHFLKTVTTLRCASGEGFEKARNAAEILARAEGLEGHAQSAAAREQK

SEQ ID NO: 9137 - DNA, 609 bp, Unknown
  Obtained from environmental sample
  misc_feature (1)..(609): n is a, c, g, or t
atgagcgatttgatagaaaagaaagacggctataccggcgcgcacaccagacgggtaagcgaatatgttactattctgctacatgaattggtacggcgcggtcaccaaataaccgaatctgaaattcaaaggatagcggaatcttccatgttgcatgatatgggcaaaatcgcgatacccgacagtatcctccttaaaaacggacggctgaccgaagacgaattcgaggcgatgaaaaatcacagcacaaccggagcggattcattgcaaaagtcaatgcagttcgcgaaggacaacgattttttacaaaacgcgtttataatggccaaacatcaccacgaaaaatggaacggcaatggctatccggacggcaaaaaagaaacggatatacctttccttgcccgtgtaaccgccattgccgacgtttacgacgcgttgcgttcggaacgcccgtataaaataccgttcacacgtgaaaaagccaaatcaatcatattggaagaaaaaggccgccaatttgatcctgagctggttgacgtatttttggcggtagagccggagtttgacgcattttgtgaatctactaaaacggagactacgaatgtttaa

SEQ ID NO: 9138 - protein, 202 aa, Unknown
  Obtained from environmental sample
  DOMAIN (12)...(146): HD domain
  misc_feature (1)..(202): Xaa is any amino acid
MSDLIEKKDGYTGAHTRRVSEYVTILLHELVRRGHQITESEIQRIAESSMLHDMGKIAIPDSILLKNGRLTEDEFEAMKNHSTTGADSLQKSMQFAKDNDFLQNAFIMAKHHHEKWNGNGYPDGKKETDIPFLARVTAIADVYDALRSERPYKIPFTREKAKSIILEEKGRQFDPELVDVFLAVEPEFDAFCESTKTETTNV

SEQ ID NO: 9139 - DNA, 360 bp, Unknown
  Obtained from environmental sample
  misc_feature (1)..(360): n is a, c, g, or t
ttgacgcattttgtgaatctactaaaacggagactacgaatgtttaatgaagtaatatttgtagattttgaaaacttcgctaatatcgcagacaacattaaaaacgcagacgcgaagataattgtgcttgttggaaaaaatcaaaataaaaaatcttttgattttgcaaatgaattattagatagcgtctcttccgttgaattattaanagtaaaagagacgggaaaaaacgctcttgatttttttatagcatactatctgggtatttataccagcagatataaaaaccataaattttacatttgctncaacgacccgcgttacgatcctttgataaaacacctagcgantatggaataa

SEQ ID NO: 9140 - protein, 119 aa, Unknown
  Obtained from environmental sample
  misc_feature (1)..(119): Xaa is any amino acid
MTHFVNLLKRRLRMFNEVIFVDFENFANIADNIKNADAKIIVLVGKNQNKKSFDFANELLDSVSSVELLXVKETGKNALDFFIAYYLGIYTSRYKNHKFYICXNDPRYDPLIKHLAXME

SEQ ID NO: 9141 - DNA, 417 bp, Unknown
  Obtained from environmental sample
  misc_feature (1)..(417): n is a, c, g, or t
gtgtatctttggagcagttacagcgatgcaattaatttttgttattttgtaaacaatcttccgctgaacatcgaaaataagctttttgccagaataatattacccaacgctgaacattccctggaaaagcatcagccgtttagctttgatgatttagtcaaagttgatgacagaataatacaatggcttttacgcgaattggattcacaaatattggcaattgcgctaatagatgctcaaaaggaagtgaaagatgtttttttcaggaatatgtcaaaacgtgctggagtcatgcttcaagaagctatggaatatttggggtcggtgaatgaatcggatatagaaaacgccaggaaacttattctgaatatcattagtgtccaaaataaatccccctaccatacaaactccagctga

SEQ ID NO: 9142 - protein, 138 aa, Unknown
  Obtained from environmental sample
  DOMAIN (39)...(136): FliG C-terminal domain
  misc_feature (1)..(138): Xaa is any amino acid
MYLWSSYSDAINFCYFVNNLPLNIENKLFARIILPNAEHSLEKHQPFSFDDLVKVDDRIIQWLLRELDSQILAIALIDAQKEVKDVFFRNMSKRAGVMLQEAMEYLGSVNESDIENARKLILNIISVQNKSPYHTNSS

SEQ ID NO: 9143 - DNA, 543 bp, Unknown
  Obtained from environmental sample
  misc_feature (1)..(543): n is a, c, g, or t
ttgcgggaaaaaagcgtatttgcgacccgtttaaagagaaatgcggtatataagccggtcaaaaggaaccctgtcaaaaaaggcgggaatatcatatccgatcatgaaataataatcccgtcaatgtcgaaggaaataaggctgcgtaaaataacggcccgcgatcctgaaacaaaaaagcgggttgtgcttttgacaaataatttaaattggtctgccgcaacggtagccggggtatataaggaacggtggcagatagaattatttttcaaaacaataaaacagaacttgaagataaagcggttttatggcaacacaaagaacgcggtaatgacgcaaatatggatagcgttaatagcgtatcttttattttatctgttgaaggttaaatcaaaaaacttacatctgtcatttacgaattttatttccgtaataaagacaatgttgtttcaacgtgtttctctttttgattttttatgtggtacaagcccgccgccaaaaattaataagttatttgaacgtcagctggagtttgtatggtag

SEQ ID NO: 9144 - protein, 180 aa, Unknown
  Obtained from environmental sample
  misc_feature (1)..(180): Xaa is any amino acid
MREKSVFATRLKRNAVYKPVKRNPVKKGGNIISDHEIIIPSMSKEIRLRKITARDPETKKRVVLLTNNLNWSAATVAGVYKERWQIELFFKTIKQNLKIKRFYGNTKNAVMTQIWIALIAYLLFYLLKVKSKNLHLSFTNFISVIKTMLFQRVSLFDFLCGTSPPPKINKLFERQLEFVW

SEQ ID NO: 9145 - DNA, 894 bp, Unknown
  Obtained from environmental sample
  misc_feature (1)..(894): n is a, c, g, or t
gtgcgggacgagctttccagctaccgccagcttcccctggccctgtaccagattaataccaagttccgcgacgaaatccgcccccgttacggcgttatgcgcggccgggaatttgtaatgaaagacgcctactcgtggcacaaagacgacaacagcctggacgaaacctatcaggcgatgggccgcgcctacaggcggattttcaaacgctgcggcttgacggtgattcctgtaaaagccgactcaggggcgatgggcggctcaggctcggaagaatttatggtagaaagcgaagtcggcgacaacacgttgattctctgcaaacagtgcggctacgccgccaatgtggagaaggcggggtgcgccccggacttcacaaaaaccaccgccgcgaatattccgcccattgaaaaaattgacacccccaatgtaaaaaccattgacgaactgtgcgcctttcttaaaacagaatcaaaaaagttcatcaaaacgctgatctaccgggcggtaaatgtggagcttgatctgtccagcgcgcccggctgcgccaagctggaacggaaagctccctcgcaggatgcggcggcgcaaaaaggcggcgttgccatgtatcccgaggcttttttcgccgtggcgatacgcggcgaccttgacgtaaacgaggcaaaacttgccgcgctgctcaaagccggtgaagtgggccttgcccctgataccgatgtgatccgcctgaccaatgcgccggtgggttttgccggaccggtggggctgaccgcgctgccgcttattgttgaccacaccgtaaccggcatgaacgacgcggttaccggcgctttggcaaagaactgcactaccggcacgccgcctacgggcgggacttttgaagctggatga

SEQ ID NO: 9146 - protein, 297 aa, Unknown
  Obtained from environmental sample
  DOMAIN (130)...(294): YbaK / prolyl-tRNA synthetases associated domain
  misc_feature (1)..(297): Xaa is any amino acid
MRDELSSYRQLPLALYQINTKFRDEIRPRYGVMRGREFVMKDAYSWHKDDNSLDETYQAMGRAYRRIFKRCGLTVIPVKADSGAMGGSGSEEFMVESEVGDNTLILCKQCGYAANVEKAGCAPDFTKTTAANIPPIEKIDTPNVKTIDELCAFLKTESKKFIKTLIYRAVNVELDLSSAPGCAKLERKAPSQDAAAQKGGVAMYPEAFFAVAIRGDLDVNEAKLAALLKAGEVGLAPDTDVIRLTNAPVGFAGPVGLTALPLIVDHTVTGMNDAVTGALAKNCTTGTPPTGGTFEAG

SEQ ID NO: 9147 - DNA, 948 bp, Unknown
  Obtained from environmental sample
  misc_feature (1)..(948): n is a, c, g, or t
atgcacaaccccgctacgaaccgtatgtatcgcaataccacccggtatatagaatggcctgacggaagaaatgtcctaatcgaacacgcagtcgatgtaaccgaattgattaccgcaaaagagcaggctattcaggccaacaaggacaaaagcagcttcctggctaaaatgagccacgagatacgcacgccgatgaacgcgatcctgggcataaccgaaattcagctggaaaacgaaactcttccgcctgatatgcaggaagcttttggcgagatttacaattcaggttatttgctgatgggcatcatcaacgacatacttgacctgtccaaaattgaggccggcaagcttgaactgtcactggctgcctatgatgtcccaagcctgatcaacgacaccgtacatctcaatgctatgagatacgacagtaagccgattgaatttaaactatttgtagatgagaacatcccgtctacgttgtacggcgacgaacttcgcatcaaacaaattttaaataacctgctttccaatgcttttaaatatacggatgaaggcgagatttcgttttcggtcgccgcagaatacgagccgcaggaaaaagctccgcaggcaacactcgtgttccgtgtgagtgacacggggcagggcatgtcggcggaacagctggataaactcttcgatgaatacacgcgttttaatacggaagccaaccgcacaaccataggttcgggcctgggtatgagtattacgaggcatctcgtccgcatgatggacggcgagatttccgtggaaagcgaaccgggcaaaggcactaattttaccgtacacctgcccccaggcgatataggcgaagaggtcctggggcaggtaaatggcgaaaaccttaagcggntcccattgggcaaagcggagcagctgaaaaagctcctcaaatgntcgcgagtatag

SEQ ID NO: 9148 - protein, 315 aa, Unknown
  Obtained from environmental sample
  DOMAIN (49)...(115): His Kinase A (phosphoacceptor) domain
  misc_feature (1)..(315): Xaa is any amino acid
MHNPATNRMYRNTTRYIEWPDGRNVLIEHAVDVTELITAKEQAIQANKDKSSFLAKMSHEIRTPMNAILGITEIQLENETLPPDMQEAFGEIYNSGYLLMGIINDILDLSKIEAGKLELSLAAYDVPSLINDTVHLNAMRYDSKPIEFKLFVDENIPSTLYGDELRIKQILNNLLSNAFKYTDEGEISFSVAAEYEPQEKAPQATLVFRVSDTGQGMSAEQLDKLFDEYTRFNTEANRTTIGSGLGMSITRHLVRMMDGEISVESEPGKGTNFTVHLPPGDIGEEVLGQVNGENLKRXPLGKAEQLKKLLKXSRV

SEQ ID NO: 9149 - DNA, 966 bp, Unknown
  Obtained from environmental sample
  misc_feature (1)..(966): n is a, c, g, or t
ttgttcagcagcgcaaacccatgngtacaggtaagcccggcgtctgattcggcgtacaacgcgcttaatgtgcgtgacctgtatactaccggtgttggcagtcctaccggtaatggccagcataacgcaaataccatctatgcccgtattgataacaacggtgtgaataacacaaccgccgcttccaataacaccatcgtatcaggatacctggtggtacgggtaaatagcgttgattcgattaacaacatgaaccgtaatgccgaggaatacaacaaggaagcaaacggcgtgaacaatgacacccttaccgacgaccgcgccctgtatgtatggaacatgggaactatatctatgttcaagtcgccaacctatgtttaccagccgtttatgagaatggacagaaacggcaaccgcctgttgagttatggtttctattcaagttcctcgaacagcggacggttaaaggtacaaagaaataataccgaatacaacgcgggaggatcattctcgaacagattactcaataccaccatcgcggtcgccaattcaaacgtcgtcaatatcggtaacaacgctacccttgtcggcaatacttcctggtatgcggcaggttccgatataagctcttccagtaatagaggtctccagttagccatgagtaataatgacggtagctcaaatacggtaaatcccgctaccggcgatggagccggagacggtactgtaaattataccaactcttccgcgtttacttcggtctcaggagccaacatgaatcgctttaagataccgcgtatcgccgttctgcctaccaacctatcgggtactgagagaggaacttatgccgacagaatttttatgagcttttatgacgatgaaagccccaacaccaccaacggcaacaattacgatgtaagggttctatacgccaatatcggcagggtactacctcggccaatctga

SEQ ID NO: 9150 - protein, 321 aa, Unknown
  Obtained from environmental sample
  misc_feature (1)..(321): Xaa is any amino acid
MFSSANPXVQVSPASDSAYNALNVRDLYTTGVGSPTGNGQHNANTIYARIDNNGVNNTTAASNNTIVSGYLVVRVNSVDSINNMNRNAEEYNKEANGVNNDTLTDDRALYVWNMGTISMFKSPTYVYQPFMRMDRNGNRLLSYGFYSSSSNSGRLKVQRNNTEYNAGGSFSNRLLNTTIAVANSNVVNIGNNATLVGNTSWYAAGSDISSSSNRGLQLAMSNNDGSSNTVNPATGDGAGDGTVNYTNSSAFTSVSGANMNRFKIPRIAVLPTNLSGTERGTYADRIFMSFYDDESPNTTNGNNYDVRVLYANIGRVLPRPI

SEQ ID NO: 9151 - DNA, 576 bp, Unknown
  Obtained from environmental sample
  misc_feature (1)..(576): n is a, c, g, or t
ttgatcagatcggccgagtctcggataagcgcaatatttgtgttatttgaaaaagaagatacatattattttcctactattgaccatagttcagatattcccaaatccggtgtcaggctgcgttccgaaagtaaaacctttccggatggaacaggaaaaaaagccgtttatgtaacatacaaaacaaaagaggtaagggacggtattgaaataaacgatgagaaggaatttaaagtatactcttcacaaaatagtaccgtcaaggtttttaatgaattccttaaaatgatgggactaaagccgggctattccaagcggaagagaggctgggcgttttccaaagaagagataaacgcggaacttctggaagtagaaaaacttggctggtttttggaaatggaaatagttgtgaatgatcttaatgatccagaatgtaaggacaccataatgattgatgaaaaaagacaactgcttatgaactttctttcagagctgggtatgggaaaagacgcgatagaaagccggtattattcggaaatgttaaaagagacagctggactggctcctagcgtataa

SEQ ID NO: 9152 - protein, 191 aa, Unknown
  Obtained from environmental sample
  DOMAIN (1)...(183): CYTH domain
  misc_feature (1)..(191): Xaa is any amino acid
MIRSAESRISAIFVLFEKEDTYYFPTIDHSSDIPKSGVRLRSESKTFPDGTGKKAVYVTYKTKEVRDGIEINDEKEFKVYSSQNSTVKVFNEFLKMMGLKPGYSKRKRGWAFSKEEINAELLEVEKLGWFLEMEIVVNDLNDPECKDTIMIDEKRQLLMNFLSELGMGKDAIESRYYSEMLKETAGLAPSV

SEQ ID NO: 9153 - DNA, 360 bp, Unknown
  Obtained from environmental sample
  misc_feature (1)..(360): n is a, c, g, or t
gtgaaaccaaatttacacgagtttatatccactttcgcgccagagctgttttcagaaaaaaataccggcactgtaaaaaaaagggttggaaggctatgggcggaactatacgaaaagtacccctgcgctctggtactgacgcgtggaagcgagtcgttatggtacgccgagaaaggggaactttcggaatttgcgtttaaaagcgtagaaccccttaataccacagggtcaggcgatgcgtttaccgccggacttgccaccgcgctggaagatggagcttccctggttgacgccatagccgagggcgtgcgctgcggagcccttaacgctgtcttattgaaacctggcgttatacgctag

SEQ ID NO: 9154 - protein, 119 aa, Unknown
  Obtained from environmental sample
  misc_feature (1)..(119): Xaa is any amino acid
MKPNLHEFISTFAPELFSEKNTGTVKKRVGRLWAELYEKYPCALVLTRGSESLWYAEKGELSEFAFKSVEPLNTTGSGDAFTAGLATALEDGASLVDAIAEGVRCGALNAVLLKPGVIR

SEQ ID NO: 9155 - DNA, 867 bp, Unknown
  Obtained from environmental sample
  misc_feature (1)..(867): n is a, c, g, or t
gtgatgaatttcgccgctgatgtcggtgtcccttcagtcatcgttcctgaaaatatcaatgttattgtcaaaaccggaattactgttactatttttgataaactaaccctttccgtattatggcccggagccgccggttacaatatgcgcgagtcaaaagaagaaaacaacggccatttccagtggcatccttccgtgggaataggtataaactttttaattccgtccggcggtaaaaggcatcctggtgaaaggcgcccatctgacggtgatataacatttgacgccgcgttcaagcccttgtattacgatgtttacgcgacaggcgcgggtgtgacatggtatgtgggttacagagacgatctgccgcccaatatcattgttgattatcccgagattcaatatatttctcccaactatgacggaaatctcgacaatcttttatttcccgtcagaatagtcgatgaccattacgtgatgagctggatcatgacaataaaagattcaaacggcaatatagtccgcacataccaaaacaaggatcgccgatttgaaatgatggacgtgagggatatttatgggcgttactatctggaaaaaaagggggttgatgttccgccgactatgcgatgggacggtgtttttaccacaggcgagattgggccggacggaaaatactatttctccatcagcgctacggacgaaaacggcaatgtcggaaccagcccaaactacgaggtaataataaagaacacgccgccgcaagttaccatagacaacataaaccttaatgaccgtgtttttgatccntttggagggaatagaacatccattactattngttcaccacgtactgtagaagaataa

SEQ ID NO: 9156 - protein, 288 aa, Unknown
  Obtained from environmental sample
  misc_feature (1)..(288): Xaa is any amino acid
MMNFAADVGVPSVIVPENINVIVKTGITVTIFDKLTLSVLWPGAAGYNMRESKEENNGHFQWHPSVGIGINFLIPSGGKRHPGERRPSDGDITFDAAFKPLYYDVYATGAGVTWYVGYRDDLPPNIIVDYPEIQYISPNYDGNLDNLLFPVRIVDDHYVMSWIMTIKDSNGNIVRTYQNKDRRFEMMDVRDIYGRYYLEKKGVDVPPTMRWDGVFTTGEIGPDGKYYFSISATDENGNVGTSPNYEVIIKNTPPQVTIDNINLNDRVFDPFGGNRTSITIXSPRTVEE

SEQ ID NO: 9157 - DNA, 444 bp, Unknown
  Obtained from environmental sample
  misc_feature (1)..(444): n is a, c, g, or t
atgcttgcggcaaaaaaaatgcccggttacagacaaaataaaaaaagaattttagaagaaatacaacttgagggaataaagttactggatcaaacgggacttggcgccaaacgggattcttaccctcatcaactgtccggcggacagcagcagcgcgtcgcaatcgcaagggcattggcgcttaaaccggatattttgtgctttgacgaaccgacttccgcgctcgatcctgaattaacaggcgaagtattaaaagtaatccgcacgctggcggacaaaaaaacaactatgatcattgtaacccacgaaatacagtttgcgcgtcacgccgcagacgcaatccttttcatggacgagggcgctgtggttgaatacgggcctccggcgatactggataacccttccggcgaaaggttaaagcgttttcttgaacggtacagttga

SEQ ID NO: 9158 - protein, 147 aa, Unknown
  Obtained from environmental sample
  DOMAIN (1)...(120): ABC transporter
  misc_feature (1)..(147): Xaa is any amino acid
MLAAKKMPGYRQNKKRILEEIQLEGIKLLDQTGLGAKRDSYPHQLSGGQQQRVAIARALALKPDILCFDEPTSALDPELTGEVLKVIRTLADKKTTMIIVTHEIQFARHAADAILFMDEGAVVEYGPPAILDNPSGERLKRFLERYS

SEQ ID NO: 9159 - DNA, 438 bp, Unknown
  Obtained from environmental sample
  misc_feature (1)..(438): n is a, c, g, or t
atgctgatggcctccgcgtcaaaagagtacggatgggacttagatttaggcgatatcgcgttgctatggcgcggcgggtgcattatcaggagcttttttttggatgatatcaaattggcgtttaaaaaaaatccgtctttgaaaaatctgttgtttgacgataaattcagcaagatgttaattgattgtcaacagtcatggcggtcaacggtcgcggtcgccgcgctgtttggaatcgccgttccggctctttcaagcgcccttagcttctacgacgcgtataggcgcaagcggtcgccggcaaacctcattcaggcgcaaagggactacttcggcgcgcatacgtacgagcgtgtcgataggccgcgcggagagttctttcatactgactggacgggggcgggcggggacgttccttcaggatcatattcggtgtga

SEQ ID NO: 9160 - protein, 145 aa, Unknown
  Obtained from environmental sample
  DOMAIN (1)...(132): 6-phosphogluconate dehydrogenase, C-terminal domain
  misc_feature (1)..(145): Xaa is any amino acid
MLMASASKEYGWDLDLGDIALLWRGGCIIRSFFLDDIKLAFKKNPSLKNLLFDDKFSKMLIDCQQSWRSTVAVAALFGIAVPALSSALSFYDAYRRKRSPANLIQAQRDYFGAHTYERVDRPRGEFFHTDWTGAGGDVPSGSYSV

SEQ ID NO: 9161 - DNA, 699 bp, Unknown
  Obtained from environmental sample
  misc_feature (1)..(699): n is a, c, g, or t
ttgattgtcaacagtcatggcggtcaacggtcgcggtcgccgcgctgtttggaatcgccgttccggctctttcaagcgcccttagcttctacgacgcgtataggcgcaagcggtcgccggcaaacctcattcaggcgcaaagggactacttcggcgcgcatacgtacgagcgtgtcgataggccgcgcggagagttctttcatactgactggacgggggcgggcggggacgttccttcaggatcatattcggtgtgataaaatgaacgccatacggttgatacccattttattaattgcgttgacgttgtttacgtcatgcggtaagaataattcggaaacaacggcatcatcggcgataacgccgttaccggcgaccagaatagtttcattcgccccaagcgccaccgagattctgtatgaattaggtcttggcgacagggtttgcggagtaacgcaattctgcaaatacccgcccgaagccgcccaaaaggagaagatcggcgggcatactgaccgcaactacgaggccgtcgtcagattgaagccggatttagcggtaatccttaaagagcagcgcgatatgatcgccttccttgataaacactctatccggtatgtcgtagcgggcagcgattcggttgacgaaatacttgaatcgatacaatcggtcgctaatgccttgttccgttgcggatag

SEQ ID NO: 9162 - protein, 232 aa, Unknown
  Obtained from environmental sample
  misc_feature (1)..(232): Xaa is any amino acid
MIVNSHGGQRSRSPRCLESPFRLFQAPLASTTRIGASGRRQTSFRRKGTTSARIRTSVSIGRAESSFILTGRGRAGTFLQDHIRCDKMNAIRLIPILLIALTLFTSCGKNNSETTASSAITPLPATRIVSFAPSATEILYELGLGDRVCGVTQFCKYPPEAAQKEKIGGHTDRNYEAVVRLKPDLAVILKEQRDMIAFLDKHSIRYVVAGSDSVDEILESIQSVANALFRCG

SEQ ID NO: 9163 - DNA, 324 bp, Unknown
  Obtained from environmental sample
  misc_feature (1)..(324): n is a, c, g, or t
ttgatgaagcatgtcaatccgagttgttctgataatagcacttgtacaggtgcaggaggcaagttgaaagccaactctcctttgtggaataccaatggcaaaggcacggacgattttggcttttcggctctgcctggcggcgaccgcaattcccatggcagtttcaacagtgtcggcgacctccgctactggtggaactctagcgagggcaatagcagcagcgcctactaccggcatatgtactacaacagcgagtacgcctactacagcaacatccatgagagctacttgcatagtgttcgttgtcttcaagattcgccttga

SEQ ID NO: 9164 - protein, 107 aa, Unknown
  Obtained from environmental sample
  misc_feature (1)..(107): Xaa is any amino acid
MMKHVNPSCSDNSTCTGAGGKLKANSPLWNTNGKGTDDFGFSALPGGDRNSHGSFNSVGDLRYWWNSSEGNSSSAYYRHMYYNSEYAYYSNIHESYLHSVRCLQDSP

SEQ ID NO: 9165 - DNA, 600 bp, Unknown
  Obtained from environmental sample
  misc_feature (1)..(600): n is a, c, g, or t
ttgaacgtggctttagacttaatggtgcaaaacggcgacgcgcgcctgctcatggactcaaaactcaccacgacgaacaacagggaggcctcgctacacatcggcgaggtggttccatacaccatccaatcctacaacctgtcgtcgtccggcggcgtgaaccagcagattgagaaggagaacgtcggcgtgctgctgaagatgacgccgcacatcaacgacaagaaccagatcaccctgacgctggcccccgaagtctcgaacatcaccggatggaaaggcgcgaactccgacattccggtagtgcgcgtgcgccggacaaacacaaccgtacgggttgaagacggccaaacggtaatcctcgccggactgctctccgaagagaaggcgacgacggtaagcaaattcccgatactcggcgacatccccgttttgggtctgctctttcaaaacaagcgcgaagaggtaaagaagacaaacctgataatagaagtagtgccgcgcataatacaaaatccggcggatatatcaaagtacatgtcaataatgggccacggcaaaccgcccgtgggaaaggcaaaaaataatgggaaacaatga

SEQ ID NO: 9166 - protein, 199 aa, Unknown
  Obtained from environmental sample
  DOMAIN (1)...(171): Bacterial type II and III secretion system protein
  misc_feature (1)..(199): Xaa is any amino acid
MNVALDLMVQNGDARLLMDSKLTTTNNREASLHIGEVVPYTIQSYNLSSSGGVNQQIEKENVGVLLKMTPHINDKNQITLTLAPEVSNITGWKGANSDIPVVRVRRTNTTVRVEDGQTVILAGLLSEEKATTVSKFPILGDIPVLGLLFQNKREEVKKTNLIIEVVPRIIQNPADISKYMSIMGHGKPPVGKAKNNGKQ

SEQ ID NO: 9167 - DNA, 735 bp, Unknown
  Obtained from environmental sample
  misc_feature (1)..(735): n is a, c, g, or t
ttgcagcgcgctgtagagcgttgtggattttccgcttccggtcgggccggttattatgacaagtccgtatggcttggcgatctgcgagcggaatatgcgctcgtcgtattgggtgaggccgaggctcgcggtgttcttctcaaacgtcgccttatcgagtatgcgcagcaccgctttctcgccgaagatcgtggggagcacggagacgcggatgtcgacttcgcgctgaccgatcttgatcgtcatccgcccgtcctgaggcagacggcgttcggcgatgttgaggtcggagaggatttttatgcgcgctattatagcgtggtgcgagttttttggcggcgacataactttgcgcatatcgccgtccacgcggtagcgcacgagcagttcgttttccatgggctcgatgtgtatgtcgctcgcgtggtcgcggatggcattggtgatcagtatgtttaccagctttattatgccgagctccgcgccggcggcggcggaggcgtcctcttcgtcgcttgtctccttctccttgcgtttgacgtactccacgtgatcgtccatgttctcggtgaggcgggaggcgtctttgtgcgaggagatgtcgcggtagcagcggtccaaggaggtcgcgatgtcctcttttttgccgaggatcgccgtgatgcgcatatcggtcatgtcgcgcagtgtgtcgagcatattgagatcgagcacgtccgtagtcgccacgactaa

SEQ ID NO: 9168 - protein, 244 aa, Unknown
  Obtained from environmental sample
  misc_feature (1)..(244): Xaa is any amino acid
MQRAVERCGFSASGRAGYYDKSVWLGDLRAEYALVVLGEAEARGVLLKRRLIEYAQHRFLAEDRGEHGDADVDFALTDLDRHPPVLRQTAFGDVEVGEDFYARYYSVVRVFWRRHNFAHIAVHAVAHEQFVFHGLDVYVARVVADGIGDQYVYQLYYAELRAGGGGGVLFVACLLLLAFDVLHVIVHVLGEAGGVFVRGDVAVAAVQGGRDVLFFAEDRRDAHIGHVAQCVEHIEIEHVRSRHD

SEQ ID NO: 9169 - DNA, 726 bp, Unknown
  Obtained from environmental sample
  misc_feature (1)..(726): n is a, c, g, or t
atgcctcgccgaacagctcaaaaccacagtggccgcgccgaagcagtacgccgccatagacctcaacgtcgcggcgctcataccggagcatacggcgcggcgcttcaactgcatcgcgttagagaaacgcggcagcaacgaattagtcgtggcgactacggacgtgctcgatctcaatatgctcgacacactgcgcgacatgaccgatatgcgcatcacggcgatcctcggcaaaaaagaggacatcgcgacctccttggaccgctgctaccgcgacatctcctcgcacaaagacgcctcccgcctcaccgagaacatggacgatcacgtggagtacgtcaaacgcaaggagaaggagacaagcgacgaagaggacgcctccgccgccgccggcgcggagctcggcataataaagctggtaaacatactgatcaccaatgccatccgcgaccacgcgagcgacatacacatcgagcccatggaaaacgaactgctcgtgcgctaccgcgtggacggcgatatgcgcaaagttatgtcgccgccaaaaaactcgcaccacgctataatagcgcgcataaaaatcctctccgacctcaacatcgccgaacgccgtctgcctcaggacgggcggatgacgatcaagatcggtcagcgcgaagtcgacatccgcgtctccgtgctccccacgatcttcggcgagaaagcggtgctgcgcatactcgataa

SEQ ID NO: 9170 - protein, 241 aa, Unknown
  Obtained from environmental sample
  misc_feature (1)..(241): Xaa is any amino acid
MPRRTAQNHSGRAEAVRRHRPQRRGAHTGAYGAALQLHRVRETRQQRISRGDYGRARSQYARHTARHDRYAHHGDPRQKRGHRDLLGPLLPRHLLAQRRLPPHREHGRSRGVRQTQGEGDKRRRGRLRRRRRGARHNKAGKHTDHQCHPRPRERHTHRAHGKRTARALPRGRRYAQSYVAAKKLAPRYNSAHKNPLRPQHRRTPSASGRADDDQDRSARSRHPRLRAPHDLRRESGAAHTR

SEQ ID NO: 9171 - DNA, 792 bp, Unknown
  Obtained from environmental sample
  misc_feature (1)..(792): n is a, c, g, or t
ttgccagtgggatttatgaaaaatcctggcgaggctgtttttgcgttgtattatgagcttaggcaaataacctatctttngagtgaatctgtatattggagtacgcttgggcgttttgataaaatgcgactccctttcaagggtgcgctttctcttcaaatgataaggcttgggagcacagcaaccgcaatagtttttcttttgacttttcttgttggcataactctttcttttcagtctgcggttcagttggaaacttttggagccggagtttatttggttagaggcgtggcggtcactatgtttatggagattggtcctcttataacagcaattattttggcggggcgttctggttcctcaataacagcggaaatagcctctatggttgttcaagaagaggtaaaagctctaagggttatgggcattcaccctgttcagtatcttgtgctgccgcgtttccaagcaatgagcatagcaactcccatgctaactatgcttgccgatattgctggttgttttgcgggttatttaattgcaactctctatattggacttccaacttcgttgtttttatctgagcttagggaggctctttcaataattattctgattaagtctcttttcaaggggctgattttcgggtggctaatatccttaattgccgtttcaaagggtctttctgtgcgtggcggcgcagatgcggttggtgttgcaacaactaagtgcgttgtattctccataacggcaataattttagccgatgccgtgttttctttcgtattttactga

SEQ ID NO: 9172 - protein, 263 aa, Unknown
  Obtained from environmental sample
  DOMAIN (2)...(263): Domain of unknown function DUF140
  misc_feature (1)..(263): Xaa is any amino acid
MPVGFMKNPGEAVFALYYELRQITYLXSESVYWSTLGRFDKMRLPFKGALSLQMIRLGSTATAIVFLLTFLVGITLSFQSAVQLETFGAGVYLVRGVAVTMFMEIGPLITAIILAGRSGSSITAEIASMVVQEEVKALRVMGIHPVQYLVLPRFQAMSIATPMLTMLADIAGCFAGYLIATLYIGLPTSLFLSELREALSIIILIKSLFKGLIFGWLISLIAVSKGLSVRGGADAVGVATTKCVVFSITAIILADAVFSFVFY

SEQ ID NO: 9173 - DNA, 318 bp, Unknown
  Obtained from environmental sample
  misc_feature (1)..(318): n is a, c, g, or t
ttgtcgctgacaatagacgatgccgaaacaataagcgacatcgagaacgccactaaagcgcacgccggacgtatgtttgccgactgcgtaagttttgaactgctatgcgagggccacgtcaacgaaaacagcgaggtatttacaaagggcatgaccgtctgcgcttatgcgccatcggccatgatatttaaggagacgaattttaccgcacgcaatataaaactcataaaaacaaaggagggtaaaaccagcgagcttgaactcgtactccccggatcgtacacgggcgatataccggaggagctgccgtgggaatag

SEQ ID NO: 9174 - protein, 105 aa, Unknown
  Obtained from environmental sample
  misc_feature (1)..(105): Xaa is any amino acid
MSLTIDDAETISDIENATKAHAGRMFADCVSFELLCEGHVNENSEVFTKGMTVCAYAPSAMIFKETNFTARNIKLIKTKEGKTSELELVLPGSYTGDIPEELPWE

SEQ ID NO: 9175 - DNA, 756 bp, Unknown
  Obtained from environmental sample
  misc_feature (1)..(756): n is a, c, g, or t
ttgaggttggttgataatggtgatagtgttgatacgattaataacggcaaaagtattaataccgtcggcgcgattaatgctgttgacaccgccgatttattaacgctaaaaggaaagaacgtacttatatcctccggccccaccgaggagcccattgaccccgtccgcgtcataaccaacaagtcctccggcaagatgggcgcggcgctcgccaaagcggcgctatcaatgggcgccaaggtcaccgtggtcagcggcccggcccccgaaccgctgccggccggcgccgaggtcgtccgcgtcaagactgccgccgaaatgtctgcggcgatgggggagcgcttcgcgtcggcggatatctgcgtcatggccgccgcggtgagcgactaccgcccggtcgcccgatccgactccaaaatacaccgctctgaaaaagagaacatcacgctggaattgaccccgaatccggatatcctcgccgctctcggcgccgccaaaaaatcaaaccaggttctagtgggcttctcgctcgaaagcggcgacggcattgaccgcgccgaggctaagatgcggaaaaaaggctgcgacattatggtcttcaacagagcggacaccgctctcggcggagacgacacatccataacgttgctcttcgccgccggcggccgcgaagcttttttgacaatgagcaaaacggcggcggcggggttgatacttgggagggcggcgggatggaaaagcccccgtttgcaataa

SEQ ID NO: 9176 - protein, 251 aa, Unknown
  Obtained from environmental sample
  DOMAIN (36)...(231): DNA / pantothenate metabolism flavoprotein
  misc_feature (1)..(251): Xaa is any amino acid
MRLVDNGDSVDTINNGKSINTVGAINAVDTADLLTLKGKNVLISSGPTEEPIDPVRVITNKSSGKMGAALAKAALSMGAKVTVVSGPAPEPLPAGAEVVRVKTAAEMSAAMGERFASADICVMAAAVSDYRPVARSDSKIHRSEKENITLELTPNPDILAALGAAKKSNQVLVGFSLESGDGIDRAEAKMRKKGCDIMVFNRADTALGGDDTSITLLFAAGGREAFLTMSKTAAAGLILGRAAGWKSPRLQ

SEQ ID NO: 9177 - DNA, 360 bp, Unknown
  Obtained from environmental sample
  misc_feature (1)..(360): n is a, c, g, or t
atgacaattattgacaaatttcaagggaaagaatcatttacgcgctttatttgtaaattttcagccggaaattacagcgtactcgaggcatatcccgaaacaggaaggattcaccagattagagtacatctggccgcattgggacacccggtagtctgcgacaatttatacggaaaagaaaacccaataaaactttcttccttcaagcgcggctggaaaggcgacccggtggatgaaaaaccgctattatcaagattgggacttcatgcgcttgaattaacgctgcctgacaaacaagtacttaccgcgcaaatgccgcgtgatatgacggctttgataaaacagctcgaaaagatataa

SEQ ID NO: 9178 - protein, 119 aa, Unknown
  Obtained from environmental sample
  misc_feature (1)..(119): Xaa is any amino acid
MTIIDKFQGKESFTRFICKFSAGNYSVLEAYPETGRIHQIRVHLAALGHPVVCDNLYGKENPIKLSSFKRGWKGDPVDEKPLLSRLGLHALELTLPDKQVLTAQMPRDMTALIKQLEKI

SEQ ID NO: 9179 - DNA, 747 bp, Unknown
  Obtained from environmental sample
  misc_feature (1)..(747): n is a, c, g, or t
atgcttaatatcaacaataactcatcgcggctgaagaaggaaatattggtgcgcatcgcccggttgcagtttgaggggaaattggccgacggggttcataatatccccagggagctcgccccgccgagcggcactcctatccgctgctgcatgtaccatgatcgggagatcatcaggcatagggtgatcgccaggcttgggtgcgggctggagaattacgacgacgaaaagcggctctccgagtacgcggaggaggcgctgaatcgggagaaacccgtcgggccggtgttaaccgtgcttgatttggcgtgcaactcctgcgttcgctcccacttcatggtgaccaacgcttgccaggcctgcctcgcccgcccgtgcttggtgaactgcggcaagaaagcgattgagatcaagaacggcagggcgtgcatcgacagcgagaagtgcgtcagttgcggcttgtgcctgcaaaactgcccctatcacgcgataataaaaatccccgtgccgtgcgaggaggcctgtccggtgggggctatctccaaaggcgagaacggcagggagcatattgattacgacaagtgcatctcttgcggcaactgcatgcgcgagtgccctttcggcgcgatgattgacaagagccaacttgtcgacgtcatcaaacacatgatgaataacaaaaaagtggtcgccctgtacgcgcccgccgcggcggcccagttcaggatcgaaccggggcggctttga

SEQ ID NO: 9180 - protein, 248 aa, Unknown
  Obtained from environmental sample
  DOMAIN (142)...(165): 4Fe-4S binding domain
  misc_feature (1)..(248): Xaa is any amino acid
MLNINNNSSRLKKEILVRIARLQFEGKLADGVHNIPRELAPPSGTPIRCCMYHDREIIRHRVIARLGCGLENYDDEKRLSEYAEEALNREKPVGPVLTVLDLACNSCVRSHFMVTNACQACLARPCLVNCGKKAIEIKNGRACIDSEKCVSCGLCLQNCPYHAIIKIPVPCEEACPVGAISKGENGREHIDYDKCISCGNCMRECPFGAMIDKSQLVDVIKHMMNNKKVVALYAPAAAAQFRIEPGRL

SEQ ID NO: 9181 - DNA, 519 bp, Unknown
  Obtained from environmental sample
  misc_feature (1)..(519): n is a, c, g, or t
atgaacgtcttttccggtattgtgcttaacgaggaatatgaaatggtaagcgtcttgcatattcccacggtaattaaaatggcaaaacgcgtaaaaatacccgaatataagaaaatttcggaatcatcggaaaagaacagaaaatcaatccttgttgtcgacgattccttccctacccgtgaaattgaaaaagaaattttgttatctgaaggatatatcgtggattccgcggcggatgggcaagaggcgttaaatgccgcaaaaacgaaacattacgacttaatttgcaccgatttaaatatgcccgttatggacggttttgagcttattaaaaatcttaagagtgaggacggtctttcaaaaatacctattatcgtcatctcgtcaaaagacgacaaagaagaacaaaaacacgcctttaaactcggcgctgataattatattattaaaaattcatttaataaccataatatgcttaaagcagttaattcacttatcggagaggtatactatgactga

SEQ ID NO: 9182 - protein, 172 aa, Unknown
  Obtained from environmental sample
  DOMAIN (48)...(163): Response regulator receiver domain
  misc_feature (1)..(172): Xaa is any amino acid
MNVFSGIVLNEEYEMVSVLHIPTVIKMAKRVKIPEYKKISESSEKNRKSILVVDDSFPTREIEKEILLSEGYIVDSAADGQEALNAAKTKHYDLICTDLNMPVMDGFELIKNLKSEDGLSKIPIIVISSKDDKEEQKHAFKLGADNYIIKNSFNNHNMLKAVNSLIGEVYYD

SEQ ID NO: 9183 - DNA, 888 bp, Unknown
  Obtained from environmental sample
  misc_feature (1)..(888): n is a, c, g, or t
ttggtaattgatgaagacatggatattccgctggaaggcgcaactgtacgcacaaggggcggaagcgaatataaatgcgataaagacggaaaggtaaaaattcaggttcccgacgacaggcaagttttgctttacgcaacatacccgggctatgaaacaagcactatagcaattcccgttacaggcagttcattcacggtatatatgcgtctttcaggcttcttgcagggaagggagcttgtcatcgaagcttcaaaaccgggtacaagcgagtcaaaaacaggcagaagcgtcgccgtaagcgaaaaggaaatagctcaaacagcggaaataggagtaattgaagatgtaatgagcactataaaactccttcccggcgtcggctattcggggctctttaacgccgcccccagtattcgaggcggacaacccggagatatgatggctgttttagacggtttttatataaatagcccgtacttttggggaggcggcttttcaatttttgatccgcgtatggttaaaagcgcgcagttatcccacggtgtattttcttcccgttacgggcatacaatttcaggactgcttgaaataacgtcaaaagaaccatctcctactgaaactgaatttgaacttggtttaaacacaagcgccgccaattttaatctttctgttccgttaaacggaaagggcggcattctttttatgggacgcttaacatattatgatcccgtaatttgggcggcaaaaaaactttcacattctatccatgaattggaagtaattaattatatacgaagagcgccgtatatcagagctgcaacagtcagcggaaattaccgttttacagataatttaattatttcggcaaccggcttttgggaatga

SEQ ID NO: 9184 - protein, 295 aa, Unknown
  Obtained from environmental sample
  DOMAIN (90)...(195): TonB-dependent Receptor Plug Domain
  misc_feature (1)..(295): Xaa is any amino acid
MVIDEDMDIPLEGATVRTRGGSEYKCDKDGKVKIQVPDDRQVLLYATYPGYETSTIAIPVTGSSFTVYMRLSGFLQGRELVIEASKPGTSESKTGRSVAVSEKEIAQTAEIGVIEDVMSTIKLLPGVGYSGLFNAAPSIRGGQPGDMMAVLDGFYINSPYFWGGGFSIFDPRMVKSAQLSHGVFSSRYGHTISGLLEITSKEPSPTETEFELGLNTSAANFNLSVPLNGKGGILFMGRLTYYDPVIWAAKKLSHSIHELEVINYIRRAPYIRAATVSGNYRFTDNLIISATGFWE

SEQ ID NO: 9185 - DNA, 888 bp, Unknown
  Obtained from environmental sample
  misc_feature (1)..(888): n is a, c, g, or t
atgttcgagtcggacatggtggaagggacggaattccagattatgttccgttccttcgatctggaatatatgaagcccaagtttgaattgctctttgacaagctgaacggtagaaagcccgtgttcgccatgtatattgactgcgcggggcgttgcgcggggtatggcggaaacgacctggaagacgctctggtcatgcagcaggttgtagggaatcgtgtccccgtattggggatttatacgggcgtggagatcgcctccctcgccgggcgtccgagggggctggactggaccggcgtattctgtctgttttcgcaagacggcgatgaaactccgcaagacgccgtcatgcccgacgatggggcaaacggcccggcaacgcggcgggaggcgcggggaagcactccccgggaaagtactctcttggatgtcgcccacaggctgtgtgtacagaatgcggcaaaaatacttagtctggatgcccatgccatctcgctccgctacgaactggagttgaaacgccggggattcaggctgatttccgaactggccgtgtctttccgccggacggacgattacgagggcatgttcgcgtatgtggcgcggaacatcaattccgccttgaacatgcaaaagacggtcgtgctgatctccgacggcacgggaatgtttgttccgtcggtattgcagggctttaccatggaggaaaaagaaagattgacaggaatgccctttgcattgccnagggagttgatgggattgaccccgacggttgtcacaggcgcaagtccgcccgatctttttgcgcagttgcggcagaagattggactcccgttctttatcgcctcactgnntctgtggagggcgaaatgccggcggtcatgctga

SEQ ID NO: 9186 - protein, 295 aa, Unknown
  Obtained from environmental sample
  misc_feature (1)..(295): Xaa is any amino acid
MFESDMVEGTEFQIMFRSFDLEYMKPKFELLFDKLNGRKPVFAMYIDCAGRCAGYGGNDLEDALVMQQVVGNRVPVLGIYTGVEIASLAGRPRGLDWTGVFCLFSQDGDETPQDAVMPDDGANGPATRREARGSTPRESTLLDVAHRLCVQNAAKILSLDAHAISLRYELELKRRGFRLISELAVSFRRTDDYEGMFAYVARNINSALNMQKTVVLISDGTGMFVPSVLQGFTMEEKERLTGMPFALPRELMGLTPTVVTGASPPDLFAQLRQKIGLPFFIASLXLWRAKCRRSC

SEQ ID NO: 9187 - DNA, 726 bp, Unknown
  Obtained from environmental sample
  misc_feature (1)..(726): n is a, c, g, or t
gtgggcaatgtatgcaactatgtgagggattgcaggggcgggtatagcggagagaattacggcaatgacacacnatgtggcggctatggtgggagcagttcgtcttccgtcnccccacgcccatcatcgagttctgcggtggtgtcttcgtctagtgtcaattattgcgatataaatgcttacaaaaaagttgaaattggctacaaaacgtggatggcagagaattataactgcgatgtcactggtagcagatgctatgatggcaataccgcccaatgcaacgtatatggtcgtttatacaattgggcaacagcaatgggcatagataaacgctataataaagaagaatgggatggaggcgaagaaaggcgtcaaggtatttgtccaagcgggtggcatattccgagctacgaagactgggatgatttgctatattctgttgactggcccgatggagccagcttgaaagccacaactggttggagttactatgaatacgacgactattacgaattttctgccatgccaggcggctacggttacctcatcggcaattacgatacttacgaagatgtcggctatagtggtcgctggtggagtgctacccaaattagtgaagaatatgcctacgcattgcttataagctacaacaacgaatacgccgaatgggattacgaatatagcaaggactatttattcagcgttcgttgcgtaaaggattattag

SEQ ID NO: 9188 - protein, 241 aa, Unknown
  Obtained from environmental sample
  misc_feature (1)..(241): Xaa is any amino acid
MGNVCNYVRDCRGGYSGENYGNDTXCGGYGGSSSSSVXPRPSSSSAVVSSSSVNYCDINAYKKVEIGYKTWMAENYNCDVTGSRCYDGNTAQCNVYGRLYNWATAMGIDKRYNKEEWDGGEERRQGICPSGWHIPSYEDWDDLLYSVDWPDGASLKATTGWSYYEYDDYYEFSAMPGGYGYLIGNYDTYEDVGYSGRWWSATQISEEYAYALLISYNNEYAEWDYEYSKDYLFSVRCVKDY

SEQ ID NO: 9189 - DNA, 864 bp, Unknown
  Obtained from environmental sample
  misc_feature (1)..(864): n is a, c, g, or t
ttggcggtaaaagaaataatcgcggcggtaagaagcgaaggggacgcggcgattcgccgttttgcttcccgttttgacaagagctctcctgaaaagctggaagttcccatgtctgtggtgcttgatgcgcgagaagaaatgcgcctgagcgatccccaactgtattcggcgatagagctttcggcatcgcacataaaacgctttagccagaaacagagagaacaattttttgattttgaatatgaaatggaaaagggcattgtaacaggccaacgggtaattcccgtccagagggcggcagtttacgttccaggagggcgtttccctttgttttcaactgtgatgatgtgtctcctccctgcgttctgcgccggtgtggaagaagtgttcctggcatcgccgcccttggaagacgggattcccgacagaaagatacttgccactgccgcaattacaacagaaatagccgccggaaagcttcgcgtttttgccatgggcggagcgcaggcaatagccgctttggccctggggacagaatctattcccaaagctgacgttgttgtcggccctggcaacaaatacgttgcggcggccaagcggcttttgttcggcgaggtggggattgattttatcgcggggccgtccgatgtgcttatcgtcagcgacaattccacaacggcagacatttcacaaaacgtgaatttaattgcagctgatatgattgcccaggcagagcacgatcccgacgcacgcgcaagggcgttggttccgtccagggagcttgcggaaaaaattgccgaagcaattgaaaaacagctcgctaagcttccaactgccgaaaccgcccgatcatctctgaaatag

SEQ ID NO: 9190 - protein, 287 aa, Unknown
  Obtained from environmental sample
  DOMAIN (2)...(287): Histidinol dehydrogenase
  misc_feature (1)..(287): Xaa is any amino acid
MAVKEIIAAVRSEGDAAIRRFASRFDKSSPEKLEVPMSVVLDAREEMRLSDPQLYSAIELSASHIKRFSQKQREQFFDFEYEMEKGIVTGQRVIPVQRAAVYVPGGRFPLFSTVMMCLLPAFCAGVEEVFLASPPLEDGIPDRKILATAAITTEIAAGKLRVFAMGGAQAIAALALGTESIPKADVVVGPGNKYVAAAKRLLFGEVGIDFIAGPSDVLIVSDNSTTADISQNVNLIAADMIAQAEHDPDARARALVPSRELAEKIAEAIEKQLAKLPTAETARSSLK

SEQ ID NO: 9191 - DNA, 681 bp, Unknown
  Obtained from environmental sample
  misc_feature (1)..(681): n is a, c, g, or t
atgtatattgaaatgcggcacatctcaaaacggtttgggactgtgctcgcaaatgacaacgcggctctctcggcagaccggggggaagtgcttgccctgttaggtgaaaacggatcgggaaaaagtacgctggtgaatatgctcgccggcatctaccttcccgattcgggttccatatacattgacggcaggcgccgtcatctccggtcgccgcaggaggctattgaggccggaatcggcatggtgcatcagcacttcaagctgatcccggtgatgaacgcctgggaaaacataagcctgggcgaaaagcctaaaggggggcggcccctttcccggtttaatcctttaatcgaaaaacagcgcataaataaaaaaatcgccgcgctggaagagcgtttcggccttaccgtcccgcatgacaagaaaatttacaatatgtcggtcggtgaaaaacagaccgtagaaattatcaaaatgctgtacaggggcgcggtcacgctgatccttgacgaaccgacggcggtgcttgccccccaggaaattgaacggctcttttcaatgctcaggaacatgaaacaggaaggctgcgccgnntatatcantaccccacagctcaatgaagtaatggaaataagcgaccgcataccgttatgcnaaaggggaaggcggttgggacgttaa

SEQ ID NO: 9192 - protein, 226 aa, Unknown
  Obtained from environmental sample
  DOMAIN (28)...(221): ABC transporter
  misc_feature (1)..(226): Xaa is any amino acid
MYIEMRHISKRFGTVLANDNAALSADRGEVLALLGENGSGKSTLVNMLAGIYLPDSGSIYIDGRRRHLRSPQEAIEAGIGMVHQHFKLIPVMNAWENISLGEKPKGGRPLSRFNPLIEKQRINKKIAALEERFGLTVPHDKKIYNMSVGEKQTVEIIKMLYRGAVTLILDEPTAVLAPQEIERLFSMLRNMKQEGCAXYIXTPQLNEVMEISDRIPLCXRGRRLGR

SEQ ID NO: 9193 - DNA, 885 bp, Unknown
  Obtained from environmental sample
  misc_feature (1)..(885): n is a, c, g, or t
gtggtggacgaagcccacgaacgcagcctaaacatcgactttattcttggcttattaaagcgcgttctggaagggcgcagggatttcaaggttatcatttcttcggccaccatcaatgcggaagttttttcggagtactttggacaatgcccgattgtaaagatcgacgcgcaaacatttcctgtaaccctcatctacgatccgccggcagtggagggcatccccggaagccagatagccagcgaggccctgctttcaaaaatcgaagccatcaccgaacgctgcataagtgaaaagctaaacgaaaccaaagggaaagagctggaaggagacatcctgattttcctttcgggagaaaagatgataaaggattgcatgaacacccttgcctattcaccgataggaaagtaccttcaccttttaccgttatacggaaggctcggcaaagaggagcaggaaaaagtttttgatcccgcccctaagggaaagataaaggccgttatctccaccaacatagccgaaacatccgttaccatagacggaataaccgttgttattgattcggggctttcaaaactcaactactacaacccgcggacttttacctcaagcctggtcgaggcgcccatttccaaagcttcggcaaaccagaggaagggccgcgcaggccgcacacgggagggaacttgttaccggctttacgggcgcaaagattttgagaaccgccagctctttaccaccgaggaaatttaccgcaccgacttgtccgaagtggtactccgcatggccgatcttgggatcacgtcttttgaggaattngatttcatctcccctccctcaaaagaagggcttatcgccgcgattgaaaactttggatctgcttga

SEQ ID NO: 9194 - protein, 294 aa, Unknown
  Obtained from environmental sample
  DOMAIN (137)...(226): Helicase conserved C-terminal domain
  misc_feature (1)..(294): Xaa is any amino acid
MVDEAHERSLNIDFILGLLKRVLEGRRDFKVIISSATINAEVFSEYFGQCPIVKIDAQTFPVTLIYDPPAVEGIPGSQIASEALLSKIEAITERCISEKLNETKGKELEGDILIFLSGEKMIKDCMNTLAYSPIGKYLHLLPLYGRLGKEEQEKVFDPAPKGKIKAVISTNIAETSVTIDGITVVIDSGLSKLNYYNPRTFTSSLVEAPISKASANQRKGRAGRTREGTCYRLYGRKDFENRQLFTTEEIYRTDLSEVVLRMADLGITSFEEXDFISPPSKEGLIAAIENFGSA

SEQ ID NO: 9195 - DNA, 390 bp, Unknown
  Obtained from environmental sample
  misc_feature (1)..(390): n is a, c, g, or t
atggctacagatgtcaaaacattaggcgaccagattgttgccctcacacttttagaggccaaggcattggctgattaccttaaagagactcatggtcttgaagctgctgctggtggcgcggttgttatggccgctcctgctggcggtgctgctgcaccggctgccgaggaaaaaacggaatttgatgttgtgctggtggaatgcccagcagacaagaaaatgggcgtgataaaggtattgcgcgttattgacccggcactttccctgcctgcggcaaaaaccaaagcggaaacagctaacaccactgtaaaagaggctgtttccaaggccgaagccgaaaagctgaaaaaagacttggaagatgccggagcaaaggtcacgctgaaataa

SEQ ID NO: 9196 - protein, 129 aa, Unknown
  Obtained from environmental sample
  DOMAIN (60)...(129): Ribosomal protein L7/L12 C-terminal domain
  misc_feature (1)..(129): Xaa is any amino acid
MATDVKTLGDQIVALTLLEAKALADYLKETHGLEAAAGGAVVMAAPAGGAAAPAAEEKTEFDVVLVECPADKKMGVIKVLRVIDPALSLPAAKTKAETANTTVKEAVSKAEAEKLKKDLEDAGAKVTLK

SEQ ID NO: 9197 - DNA, 366 bp, Unknown
  Obtained from environmental sample
  misc_feature (1)..(366): n is a, c, g, or t
ttgtggtgcgcctgcgcgctcacgcaggctgctcgcataaaaattcattgtaaaaaaggcacgcattatttcagcgtgacctttgctccggcatcttccaagtcttttttcagcttttcggcttcggccttggaaacagcctcttttacagtggtgttagctgtttccgctttggtttttgccgcaggcagggaaagtgccgggtcaataacgcgcaatacctttatcacgcccattttcttgtctgctgggcattccaccagcacaacatcaaattccgttttttcctcggcagccggtgcagcagcaccgccagcaggagcggccataacaaccgcgccaccagcagcagcttcaagaccatga

SEQ ID NO: 9198 - protein, 121 aa, Unknown
  Obtained from environmental sample
  misc_feature (1)..(121): Xaa is any amino acid
MWCACALTQAARIKIHCKKGTHYFSVTFAPASSKSFFSFSASALETASFTVVLAVSALVFAAGRESAGSITRNTFITPIFLSAGHSTSTTSNSVFSSAAGAAAPPAGAAITTAPPAAASRP

SEQ ID NO: 9199 - DNA, 363 bp, Unknown
  Obtained from environmental sample
  misc_feature (1)..(363): n is a, c, g, or t
gtgctggataacgaagccggtcttgaaaacctttcacggcgtattgttcaaaaagttgaccttatgatacttatttccgacgcttccaattcgggcttgcaaactntgcttcgcctttttgagcttgctggcgaaatgaaaatgtcttacggcaaacttgcgcttgtaataaataaattgcgaagcggcaaattacctgacagaatgaaagagataagcgaaaaaaccaaagcggatatagtcatcggtcttcccgacgacgatgaagtttcagagtttgcgcaagagaacaagaattttttacagatttcggattcaaatgctgtttataagaaagtaatggaattactggagttgttttaa

SEQ ID NO: 9200 - protein, 120 aa, Unknown
  Obtained from environmental sample
  misc_feature (1)..(120): Xaa is any amino acid
MLDNEAGLENLSRRIVQKVDLMILISDASNSGLQTXLRLFELAGEMKMSYGKLALVINKLRSGKLPDRMKEISEKTKADIVIGLPDDDEVSEFAQENKNFLQISDSNAVYKKVMELLELF

SEQ ID NO: 9201 - DNA, 615 bp, Unknown
  Obtained from environmental sample
  misc_feature (1)..(615): n is a, c, g, or t
atggcaaacaattatcttaaagccggcgcggcgctaaccctgctcattctcggaatcacgctggcgggtattttttttctccccggcgactacaacgccatgaactccgattcaagatttttgccgcccgggaaaaactatcttatgggcacggacaacttcggaagaaatgttttttaccgaattatggcgggcgcgaaatacaccctgctcacagccgttgttaccgtagccggaagcgcggtaatcggctctgcccttgggatgttttccggtttcgccggcgggcttttggatgaggtcatcatccggcttttggatgtccttacatcctttccgggaatactgctggcgcttttaatggtttcgcttttggacaacagtcccggaaccctcgtcgccgctctgctcatactttttattcccggttttacgcggatcatgcggaacggcatgctccgttacaagaaccttgatttcgttcttttcgcccgcgttgccggaatctcatatccccggcttatcttcgcccacatttttccaaccttctgccttctcttctttcaacctcggtactcgggctttcaaacgcgattctcgcggaatccacgatga

SEQ ID NO: 9202 - protein, 204 aa, Unknown
  Obtained from environmental sample
  SIGNAL (1)...(22)
  misc_feature (1)..(204): Xaa is any amino acid
MANNYLKAGAALTLLILGITLAGIFFLPGDYNAMNSDSRFLPPGKNYLMGTDNFGRNVFYRIMAGAKYTLLTAVVTVAGSAVIGSALGMFSGFAGGLLDEVIIRLLDVLTSFPGILLALLMVSLLDNSPGTLVAALLILFIPGFTRIMRNGMLRYKNLDFVLFARVAGISYPRLIFAHIFPTFCLLFFQPRYSGFQTRFSRNPR

SEQ ID NO: 9203 - DNA, 483 bp, Unknown
  Obtained from environmental sample
  misc_feature (1)..(483): n is a, c, g, or t
atgaaaaaaatctatttttatgattacagagttttaaacttaaaaaattccttaagactgggaattgccgaagataacggaaaagtatgctgtgtctgctttggcgcggtaaaaaaacaggacgattatataatagaagaaacatctcttataaaagaaacagcgcagcagcttgagcagtattttagcaaaaaacgaaaagtttttaacctgccggtaaaaccggaaggaacggattttcaggttaaagtctggaattcgcttacggaaataacctacggcgaaacccgcagttacaaagaacttgccgcaatgacaggaaacccaaaagcgtgccgggctgtcggcatggcgaataaccgtaatccggttgcaataatcataccgtgtcacagagtaatcggccatgacggcagtttaacgggttatgcgggcggtcttgaattgaaaaaacagcttcttgaacttgaaaaaacaaattaa

SEQ ID NO: 9204 - protein, 160 aa, Unknown
  Obtained from environmental sample
  DOMAIN (77)...(160): 6-O-methylguanine DNA methyltransferase, DNA binding domain
  misc_feature (1)..(160): Xaa is any amino acid
MKKIYFYDYRVLNLKNSLRLGIAEDNGKVCCVCFGAVKKQDDYIIEETSLIKETAQQLEQYFSKKRKVFNLPVKPEGTDFQVKVWNSLTEITYGETRSYKELAAMTGNPKACRAVGMANNRNPVAIIIPCHRVIGHDGSLTGYAGGLELKKQLLELEKTN

SEQ ID NO: 9205 - DNA, 486 bp, Unknown
  Obtained from environmental sample
  misc_feature (1)..(486): n is a, c, g, or t
atgacaatcaattttatattaaacggggaagacgttgttgtccgtacggaagccggtgtaaggcttattcacatactgcgggaaagtttcggcttattcggcgccaaatccggctgccttagcggccagtgcggagcgtgctctataatttttaacggaaacgtagtccccgcttgcctgataccggcgttcagagtaaggggaagtgaaataataacaatagaagggttttcccagacggacgagtaccatgacatattaacggggtttaaagaagtacatttgggcaattgcggtttttgcgaatcgggaaaaattctttgcacagagactctgcttgaacggttccaaaatcctacaagagaagaaattattatgagttttgcgggtatcaactgccgctgtacgaatattgacaggctggtggaagcggtgaactacatcatcggcatacgccaacggagattgtatggacgttctgcttaa

SEQ ID NO: 9206 - protein, 161 aa, Unknown
  Obtained from environmental sample
  DOMAIN (5)...(65): 2Fe-2S iron-sulfur cluster binding domain
  misc_feature (1)..(161): Xaa is any amino acid
MTINFILNGEDVVVRTEAGVRLIHILRESFGLFGAKSGCLSGQCGACSIIFNGNVVPACLIPAFRVRGSEIITIEGFSQTDEYHDILTGFKEVHLGNCGFCESGKILCTETLLERFQNPTREEIIMSFAGINCRCTNIDRLVEAVNYIIGIRQRRLYGRSA

SEQ ID NO: 9207 - DNA, 570 bp, Unknown
  Obtained from environmental sample
  misc_feature (1)..(570): n is a, c, g, or t
atgttcgcgttaatggattattgcccatataactttgttgtttcagacggttttaaaaaattaaaaaataaaaatattcaccgtactttttttgaaaacgatttaaaatatttttgtaaaggctttaaatatatattcgataaatacggaaatcttgaaaacctgtttctgacatgggataaaaaaacgaacggatcaagtcgggaacaaaaattttcttctttacaatgcgacgtatggaaaggtttttatttatttcgtgaagagatggcgaaggccaacaaaggcgggtactccatacatgtttccaacgcgggaaaggaaaacgaaaatggttccgcgtgcaaaaagctcaatcttgctttgcgttggcttgtgcgcgaaggaccggtagatttaggtttatggaaaaaaataaaacctagcgccctttacatcccgcttgacgttcatgtcgcgcggacagcgagaaaaatggggcttttggaacgcaaatcaaacgataaaaaagcggtagttatactgaccgaaaaattacgcgagtattgtccgcagaccccgttaatatga

SEQ ID NO: 9208 - protein, 189 aa, Unknown
  Obtained from environmental sample
  misc_feature (1)..(189): Xaa is any amino acid
MFALMDYCPYNFVVSDGFKKLKNKNIHRTFFENDLKYFCKGFKYIFDKYGNLENLFLTWDKKTNGSSREQKFSSLQCDVWKGFYLFREEMAKANKGGYSIHVSNAGKENENGSACKKLNLALRWLVREGPVDLGLWKKIKPSALYIPLDVHVARTARKMGLLERKSNDKKAVVILTEKLREYCPQTPLI

SEQ ID NO: 9209 - DNA, 627 bp, Unknown
  Obtained from environmental sample
  misc_feature (1)..(627): n is a, c, g, or t
ttgttcaagttttccttaactgttgacatggggaagcggtggttttgggcgcatggaaaggagtatgaatggctgaacgtgacgttgttgggggatgatttatacagcgatcaacccttttgcgagttggtattggcccaaaagatgagttttctgttcacctgtaagcctgattcacacccatggttgagtgaaacggtggaacagtcgtatttggaagagaaggcggtaaagaagtggaatgggcggactcatcaaatcagtacctatcggtggataaatggggtaccgctgagggacagtaaggatgcacttatggtgaattatccgtctgttgagatttggaacgaaaagacggggaaggtggggtataggaacagctggataacggataaagtggtaacgggggagaatgtagaggtattggcatggtgcgggcgggcacggtggaagatagaaaacgaacacacgaatgtactaaagaaccgaggctacaatctggagcataactttgggcatgggaaggaacacgcgagtgagatattcctgttgttgaacctattggcgttccagtttcacacgatatgttgtgtgatgaggagtatcaaaaagcgcgggcctcagtag

SEQ ID NO: 9210 - protein, 208 aa, Unknown
  Obtained from environmental sample
  misc_feature (1)..(208): Xaa is any amino acid
MFKFSLTVDMGKRWFWAHGKEYEWLNVTLLGDDLYSDQPFCELVLAQKMSFLFTCKPDSHPWLSETVEQSYLEEKAVKKWNGRTHQISTYRWINGVPLRDSKDALMVNYPSVEIWNEKTGKVGYRNSWITDKVVTGENVEVLAWCGRARWKIENEHTNVLKNRGYNLEHNFGHGKEHASEIFLLLNLLAFQFHTICCVMRSIKKRGPQ

SEQ ID NO: 9211 - DNA, 591 bp, Unknown
  Obtained from environmental sample
  misc_feature (1)..(591): n is a, c, g, or t
gtggacaagggtagaatcgaggaagccgcgctggtaaagctggacaacctggagaacccccgcagcgcggcatgggaagcgttagccgcaatcctaccccgttttcctccggggacaattgacggcctctgggttccctgggttgaatttgccgatggctgcgccgaagcgcttgcggcggcgggaaggcgggacataaagctgaccagcatcggcatttccaacgatgtcatacaccagatgctgcgccacccggatatttggctcgcgagcgcggcggttgatccaaaactggcgggcacggttaatatgcgcctcctcgcggccctgcttgcgggagagaccgttacggatactttttcctttaacccccagcttctaaaaacaacggatctgaatataggggtgaatctcggcaatatctccgtgatactgcccggatggggggaaggggaagggctttttgacaattacaagtggatgatcgatctgaaagccgcgggggaaaaatacttaaggatgcctccggttccgctatctcaggcagcgctggcatcacaggtgacgggacgtcacagggtgatgccgtga

SEQ ID NO: 9212 - protein, 196 aa, Unknown
  Obtained from environmental sample
  misc_feature (1)..(196): Xaa is any amino acid
MDKGRIEEAALVKLDNLENPRSAAWEALAAILPRFPPGTIDGLWVPWVEFADGCAEALAAAGRRDIKLTSIGISNDVIHQMLRHPDIWLASAAVDPKLAGTVNMRLLAALLAGETVTDTFSFNPQLLKTTDLNIGVNLGNISVILPGWGEGEGLFDNYKWMIDLKAAGEKYLRMPPVPLSQAALASQVTGRHRVMP

SEQ ID NO: 9213 - DNA, 843 bp, Unknown
  Obtained from environmental sample
  misc_feature (1)..(843): n is a, c, g, or t
ttggcgtcagataccttgccgctcaataccggagcggattctgaagccagcaatggcagccagggcgaactctttagcgggcttgataatcataatgacattgaatatttttccaatattaatgaaacggatatcgcgattgccatggggatgcatacggaaacagggattgacttttctgtccttccgtctgaaatacatggctttttcgaactttcagttgatgcctttggcgcgattgtttatgcctggatgagtgagcttcctgtcacagggcagatgctccggtttggaaaaaagattcttgcgtctcaaaatacgctaaacaatgccatcaactggtctcagcgcggtaaatttgaaaccgcgcagcgtaaagcggcgtggattgcggcaactgaccgcggcgatttcgacgcgcagactgtgcgggaggcggcatataaagtctggcatgaaaccaacaggttaacgggccttctgcgtttttgtcccgatgaaaaaggcgtatacatcgcccattgcgagccggatcattttgtgcttccggctttgggcccgcatttcatggaacgctttggcgaaacgccctgggctataattgataacaagcgccgccttagtcttagctgtgaaactggacagccgggcgcttctggcggaacccttgtgttttcagccagtgccgaaaacgcgctttcttttggaaaagggcagacaggcgaatgggagaatctgtggaagcactaccacaaaaccatcaacaacgaaagcagaaataaccccgatctgcaaaaacgcttcatgcccacgcgctactggaagtacttgaccgagctttaa

SEQ ID NO: 9214 - protein, 280 aa, Unknown
  Obtained from environmental sample
  misc_feature (1)..(280): Xaa is any amino acid
MASDTLPLNTGADSEASNGSQGELFSGLDNHNDIEYFSNINETDIAIAMGMHTETGIDFSVLPSEIHGFFELSVDAFGAIVYAWMSELPVTGQMLRFGKKILASQNTLNNAINWSQRGKFETAQRKAAWIAATDRGDFDAQTVREAAYKVWHETNRLTGLLRFCPDEKGVYIAHCEPDHFVLPALGPHFMERFGETPWAIIDNKRRLSLSCETGQPGASGGTLVFSASAENALSFGKGQTGEWENLWKHYHKTINNESRNNPDLQKRFMPTRYWKYLTEL

SEQ ID NO: 9215 - DNA, 909 bp, Unknown
  Obtained from environmental sample
  misc_feature (1)..(909): n is a, c, g, or t
ttgaataaagcgctgaaaattcttgtttcctatacagaaagagaggttgacgatatactgtcaaacggcttatggccgattgcggacgcggcgggtttggatcggattatagtattccgtatttccaacagagacgccatggtcggcggagaaaaataccgctgggacagaattacaggcggaacggccccgattgacgatgtcctgagagaattacccataaccccggcggtcgcgcgttgggtttcaataatgtccgatgactcctgcataagcctcaaacgcggcgagttcacggaagatgaagcggccttcctgagtccgcgcgatgttaagtcgattttaattgtgccggttttcaccgaaggcgttttttggggcgttgtcactttccatgataataccagggaacgggatttcgacgaggattgtatcgccatgctgcgctccgccgcgcgtatatgcgcaagcacgattatcagggcggaaaagaccaggagcatggaacaggcgatgaaagtaatcaaacgccacgaaacaataaaggacatattaaacaaggtttccgttatctttctgtcacgaaacgaggataaaatcgaaaatacgatggcggcaggcgtgtgtctgattgccgacatggccgaaattgacaggctgattctttgccgcaatcacataacagccgacagtttgtacgcgtccgaagtctaccgctgggacaggggttccgggggcagcaccgaattaaccgccgatctcattaacgtgccttacgcgcggttgataccggattgggaaggaattttgtccgacggacatcacataaacggtccgtcaagactgatgtccgagaagcgcggcccaatactcttaaatcgacacctcggccaatccgagtctgggtaa

SEQ ID NO: 9216 - protein, 302 aa, Unknown
  Obtained from environmental sample
  DOMAIN (15)...(159): GAF domain
  misc_feature (1)..(302): Xaa is any amino acid
MNKALKILVSYTEREVDDILSNGLWPIADAAGLDRIIVFRISNRDAMVGGEKYRWDRITGGTAPIDDVLRELPITPAVARWVSIMSDDSCISLKRGEFTEDEAAFLSPRDVKSILIVPVFTEGVFWGVVTFHDNTRERDFDEDCIAMLRSAARICASTIIRAEKTRSMEQAMKVIKRHETIKDILNKVSVIFLSRNEDKIENTMAAGVCLIADMAEIDRLILCRNHITADSLYASEVYRWDRGSGGSTELTADLINVPYARLIPDWEGILSDGHHINGPSRLMSEKRGPILLNRHLGQSESG

SEQ ID NO: 9217 - DNA, 729 bp, Unknown
  Obtained from environmental sample
  misc_feature (1)..(729): n is a, c, g, or t
atgaaagaaggcgttgaaaatggacctaaaatatctgttatggcagatattggcagggcggatatgagcaaaataaagccgagaaacgaatccccttacgatatggtgcgtgtggcttgctatgctcgtgatattgacaagtgcattgctatggtaaatgaattccacgaccttggctacgaaaccacaataaacattatggcggcaagccgcgacaacgggcctgagctagacgaggctctagaccaagcagaaaaagaagccaacaccgaagttgtttacattgtggatagttttggttatttttaccaagaaaatatagacaagctggcaaaacgctacaagaagtggattaaaaccaagaaactcggttttcacggtcataacaaccagcagctcgccttttcaaacaccattcaagctataataaaccacgtggattatttggactgctcaatttacggtatgggtcgcggagcgggcaactgccccacggaactgttgctcagtttcctcaaaaatcccaagtttgatgtgcgtccagttttggattccattgcaaatgattttatgcccttgcaaaaggagcagaaattggaatggggttatataattccgcaaatgataaccggattcttcaattcccatccggaggctgcgattaaattccgcaaaggtgatgatagagataattaccgtgccttttggatgcaggtcagtggtcagtaa

SEQ ID NO: 9218 - protein, 242 aa, Unknown
  Obtained from environmental sample
  DOMAIN (2)...(196): HMGL-like
  misc_feature (1)..(242): Xaa is any amino acid
MKEGVENGPKISVMADIGRADMSKIKPRNESPYDMVRVACYARDIDKCIAMVNEFHDLGYETTINIMAASRDNGPELDEALDQAEKEANTEVVYIVDSFGYFYQENIDKLAKRYKKWIKTKKLGFHGHNNQQLAFSNTIQAIINHVDYLDCSIYGMGRGAGNCPTELLLSFLKNPKFDVRPVLDSIANDFMPLQKEQKLEWGYIIPQMITGFFNSHPEAAIKFRKGDDRDNYRAFWMQVSGQ

SEQ ID NO: 9219 - DNA, 423 bp, Unknown
  Obtained from environmental sample
  misc_feature (1)..(423): n is a, c, g, or t
ttgcaggaaaaaatgcctgaaattatcgaaaagtttattaaaaatatcgaagatcttttacaagaaaacaagattaaagatatgcttgtaaacacggtttcatcgtcattcggcggaataataggcggacaaaaaaacattgcggaaataattaacataagcgaagatgaaaaaaaagagctggacaattttttatttgacaaaataatgtccgccgctgacgctaatattgaaaacatactttccacggttaacattaaagcccttgtagcggaaagaattgattcattggacatgctgagggtggagcgcattatccttgacgtaatggcggatcaattcaaatggataaacatcttcggcggcatactgggctttttaatcggcgcgtttcaggcggttttttcgtggacaattaaatag

SEQ ID NO: 9220 - protein, 140 aa, Unknown
  Obtained from environmental sample
  misc_feature (1)..(140): Xaa is any amino acid
MQEKMPEIIEKFIKNIEDLLQENKIKDMLVNTVSSSFGGIIGGQKNIAEIINISEDEKKELDNFLFDKIMSAADANIENILSTVNIKALVAERIDSLDMLRVERIILDVMADQFKWINIFGGILGFLIGAFQAVFSWTIK

SEQ ID NO: 9221 - DNA, 720 bp, Unknown
  Obtained from environmental sample
  misc_feature (1)..(720): n is a, c, g, or t
atgaaaacaaagaataatagaagaattttaccacggaggacacggagtttcatggaggaaaatataaatttaaaatcaaaactccgcgtaactccgtgtactccgtggttaatctttttaattttatttatcggctgccaagctgaaaaaggcagggaagtaatcgaccgctccggtaagtcaatcaaaattaaaaaccaaatcaaccgcgttatttccaccgcgccctcgaatacggaaataattgccgacctgggacaggcacacaagcttgtcgctattgaccgccactctgcgaatgtcgcgggcattcccgaaggactgacacaactggattttttctaccccgatgccgaggtgattatcaagcttgaacctgatataattatcgcaagcggacataatcctacaggcacaggagaagacccgttcaaacttttacgcgaaatgggaatttccgttgtgtatattaccatgagcgcgagtattgatgaaatttacaatgatattgcgcttatagcggatattttgcgtgtagaaaaagagggagaaagactgattaattctatgaaggcacaaattgatgaaatatcgcaagaagcggcgcanacagcggcgcaaatgacaactaacaccgggaacaagatatcagtttactttgaaatttccgccgcgccggatatgatgactttcgggaaggcagttacattaacgatatga

SEQ ID NO: 9222 - protein, 239 aa, Unknown
  Obtained from environmental sample
  misc_feature (1)..(239): Xaa is any amino acid
MKTKNNRRILPRRTRSFMEENINLKSKLRVTPCTPWLIFLILFIGCQAEKGREVIDRSGKSIKIKNQINRVISTAPSNTEIIADLGQAHKLVAIDRHSANVAGIPEGLTQLDFFYPDAEVIIKLEPDIIIASGHNPTGTGEDPFKLLREMGISVVYITMSASIDEIYNDIALIADILRVEKEGERLINSMKAQIDEISQEAAXTAAQMTTNTGNKISVYFEISAAPDMMTFGKAVTLTI

SEQ ID NO: 9223 - DNA, 525 bp, Unknown
  Obtained from environmental sample
  misc_feature (1)..(525): n is a, c, g, or t
atgtatatgctgaacatgaataaaatcgtccaacatctctggaaattcattgaatgtcagatggccaaacgaatagtaccgttgtttaaccccaacagcaaagtccgttccacaggcgatatgccgacatggtggactgtaaaacaccgtgaaccattaaaaaaatctcatataagccatattgtttatgacagcacatgggaagccaccgaagcctacaaattggaaaaaaatccccatgtaaccgcttttgccaaaaatgaccatcttggctttgttattcaatatacttttaatggtgtatctcgcagttattaccccgatttccttgtaaaactggacaatggtaaaactttaatacttgaaacaaaaggacaggacaactcgcaagtacaggcaaaaaaagttgcccttgccgaatgggtagaagcagtaaattcgttaaaagagtacggcgaatggtgcagtgatatttctttcaatgtcgccgatgttgacggaattatcggtaagctggtatcatga

SEQ ID NO: 9224 - protein, 174 aa, Unknown
  Obtained from environmental sample
  misc_feature (1)..(174): Xaa is any amino acid
MYMLNMNKIVQHLWKFIECQMAKRIVPLFNPNSKVRSTGDMPTWWTVKHREPLKKSHISHIVYDSTWEATEAYKLEKNPHVTAFAKNDHLGFVIQYTFNGVSRSYYPDFLVKLDNGKTLILETKGQDNSQVQAKKVALAEWVEAVNSLKEYGEWCSDISFNVADVDGIIGKLVS

SEQ ID NO: 9225 - DNA, 657 bp, Unknown
  Obtained from environmental sample
  misc_feature (1)..(657): n is a, c, g, or t
ttgatggccggcgggactgtttcgtgcgaagttgatgaatatgtaacgtatggcgatatatttaaaaaagtcgataacctttggaactttctgcttttcaccggctatctgaaaaaagtcggagcgacgcgcttggagggtgtaaaaaacgttgtggatttgtctattccgaatttagaattacaatacgtttatgaaaccaaaatacaagattggtttaaggaaaaggtcagccggaaagactttaacccgttatatcgggcgcttttagacggagacgccgagacggtgcagaaagtgctgggtgactttctcttggagaccataagttatttggacgctaaggaagatttttatcacggagtattgctcggcgtgctcgccgggatgcgtgattttaccgcgaaatccaaccgcgagaccggttgcggccgatgcgatattgttttgcggcataccagcggtcgcggcaaagccgtcatacttgaacttaaatgtacgcacgatatgcgcgagatcgtaaaattgagcgaagaggccgttaaacagattgcggacggcaagtacgccaaagaactggaaacggagtgttacaccgatattgtcaaatacggtattgcgttttgtaaaaaaagctgcgagataagaaggggataa

SEQ ID NO: 9226 - protein, 218 aa, Unknown
  Obtained from environmental sample
  misc_feature (1)..(218): Xaa is any amino acid
MMAGGTVSCEVDEYVTYGDIFKKVDNLWNFLLFTGYLKKVGATRLEGVKNVVDLSIPNLELQYVYETKIQDWFKEKVSRKDFNPLYRALLDGDAETVQKVLGDFLLETISYLDAKEDFYHGVLLGVLAGMRDFTAKSNRETGCGRCDIVLRHTSGRGKAVILELKCTHDMREIVKLSEEAVKQIADGKYAKELETECYTDIVKYGIAFCKKSCEIRRG

SEQ ID NO: 9227 - DNA, 393 bp, Unknown
  Obtained from environmental sample
  misc_feature (1)..(393): n is a, c, g, or t
atggagccctcaaacatgaacactaccctatttgccactccgcgcgcaaagcccatttcatgggaaacaacaagcattgtcatgccgcctgaggcaagctgtttcatacgggcaagtacttcgccgacaagttcgggatcaagggcggatgtcggttcgtcaaagagcataatacgcggctccatggcaagcgcgcgggcaatcgcgaccctctgttgttggccgcctgaaagctgtgaggggtacgcgttaattttatcttttaaaccaacccgttcaagtatctgctcggattttgcccgcgcctgcgcgaggggcaatttgcggacattatgcggggcaagcattacattttccaaagcggttctatgtgggaaaagattaaagcgttga

SEQ ID NO: 9228 - protein, 130 aa, Unknown
  Obtained from environmental sample
  DOMAIN (52)...(90): Protein of unknown function (DUF1602)
  misc_feature (1)..(130): Xaa is any amino acid
MEPSNMNTTLFATPRAKPISWETTSIVMPPEASCFIRASTSPTSSGSRADVGSSKSIIRGSMASARAIATLCCWPPESCEGYALILSFKPTRSSICSDFARACARGNLRTLCGASITFSKAVLCGKRLKR

SEQ ID NO: 9229 - DNA, 369 bp, Unknown
  Obtained from environmental sample
  misc_feature (1)..(369): n is a, c, g, or t
atgaaaattatgctggataccaatgttatccttgacattgttgaaaaaagagagccgtatttttcttattcctatataattgatatgcttaaagttgtttcctctgtagatacaaaagccgttgatatacaggaagccataagattgaatttttctgattttgaagatgcagttatagcggcaacagcctcacgggaaggggccagttatataattaccagaaacaccagtgattataataaatcccctgttccggcaataacccccgcagatttcttaaaaaagatattacacttgaggcgactgatattgctacaagtatcgcagtttactcatgcaatgcgaaagaagaatttaccacggagttga

SEQ ID NO: 9230 - protein, 122 aa, Unknown
  Obtained from environmental sample
  misc_feature (1)..(122): Xaa is any amino acid
MKIMLDTNVILDIVEKREPYFSYSYIIDMLKVVSSVDTKAVDIQEAIRLNFSDFEDAVIAATASREGASYIITRNTSDYNKSPVPAITPADFLKKILHLRRLILLQVSQFTHAMRKKNLPRS

SEQ ID NO: 9231 - DNA, 816 bp, Unknown
  Obtained from environmental sample
  misc_feature (1)..(816): n is a, c, g, or t
atgcagacaggcagcttgaatctgggcggagaaggtcaaatatattcaggggcctttgtcgcgacaatcaccgctttgccgctggcatttttgggtttttcaggcggccttataagtatacttgccggggcgtttttcgcaggagcgttagcggcgctgtccggcttttgcaaggcgcggtggaacacaaacgagcttatcacttcttttcttttatcaaacgccatgatacttattgttaattaccttgttaccggccccttccatgatcctgaaacaaatttgcagtcaacaaaaaaaattgccgcaggttttaggctgccgctgcttctgcctccgtcgaacttaaacatgtcgcttgtgattgcgcttgctgctgttgccgccgtgtatgtttttttaataaaaaccagactgggatatgaatttagaatcagcggcgccaacgagatttttgcgcgatacggcggaatcaacacccgattaaatacggtgctggcgatgtttttaagcggtgcgctgtacggccttgccggagggctttctgtctttggctcttattatggaacagtaaaggaattttcctcggggcttggatggaacggccttgcggcagctcttgtcgcggggtttaatcccgtggcaataataccggcaagcctgttcttcgcatggatttcctcgggcgcgagaatcgctatgcagaattcggatgttacctttgagatcgcctccattgtccagtcggtaattttctttctggctaccagcatggttttaagaaacatgttcagtaaaaaggagaaacaacggtga

SEQ ID NO: 9232 - protein, 271 aa, Unknown
  Obtained from environmental sample
  DOMAIN (1)...(256): Branched-chain amino acid transport system / permease component
  misc_feature (1)..(271): Xaa is any amino acid
MQTGSLNLGGEGQIYSGAFVATITALPLAFLGFSGGLISILAGAFFAGALAALSGFCKARWNTNELITSFLLSNAMILIVNYLVTGPFHDPETNLQSTKKIAAGFRLPLLLPPSNLNMSLVIALAAVAAVYVFLIKTRLGYEFRISGANEIFARYGGINTRLNTVLAMFLSGALYGLAGGLSVFGSYYGTVKEFSSGLGWNGLAAALVAGFNPVAIIPASLFFAWISSGARIAMQNSDVTFEIASIVQSVIFFLATSMVLRNMFSKKEKQR

SEQ ID NO: 9233 - DNA, 780 bp, Unknown
  Obtained from environmental sample
  misc_feature (1)..(780): n is a, c, g, or t
atgagatngtccaacaccatacgacgcattgctatctgcactggcggcggcgacgccccaggcctgaacgcggtcatccgcgccgcagtggtctcggccgcagaccgtggctgggaatcctacggaatcagggagggcttcaacggcatatttttcggcgagcgctatcctgacggcggggtggtcaggctcaccagggagagcgtgaggggcattacccacctcggcggcacaatccttggcaccacaaacaagggcaaccccctgcactttccactcaagatgccagacggcaccatcaaagagatagaccgcagcgacgaaatcctcgactacttcgcgaagaaagagatagacgcgctggtctccatcggcggcgacggcagcctgacgatagccaacgccctgtatatgaagggtctgcgcgtagtcggagtgccaaagaccattgacaacgacttagacaagaccgccaccacgtttggcttcgacaccgcagtggcattcgccacggaaagcctagaccgcctgcacagcaccgctcagagccaccagagggtcatggtggtcgaggtcatgggccgctacgctggctggattgcactacattcgggcatcagcggcggggcgcactccatcctgattccggagataccgtacgacataaacaaggtcgcggaaaagataatcgagcgcgacaaccaagggaggcactactccctagtggtggtggccgagggcgcgaagcccaaggacggcggctccacgagctcgcgataa

SEQ ID NO: 9234 - protein, 259 aa, Unknown
  Obtained from environmental sample
  DOMAIN (8)...(259): Phosphofructokinase
  misc_feature (1)..(259): Xaa is any amino acid
MRXSNTIRRIAICTGGGDAPGLNAVIRAAVVSAADRGWESYGIREGFNGIFFGERYPDGGVVRLTRESVRGITHLGGTILGTTNKGNPLHFPLKMPDGTIKEIDRSDEILDYFAKKEIDALVSIGGDGSLTIANALYMKGLRVVGVPKTIDNDLDKTATTFGFDTAVAFATESLDRLHSTAQSHQRVMVVEVMGRYAGWIALHSGISGGAHSILIPEIPYDINKVAEKIIERDNQGRHYSLVVVAEGAKPKDGGSTSSR

SEQ ID NO: 9235 - DNA, 696 bp, Unknown
  Obtained from environmental sample
  misc_feature (1)..(696): n is a, c, g, or t
atggagttgatccgggcggttctggagcggccttgtctttccctggtgctggaaacttccggcataggctggaaacctggggaattggaggcgttggccgccgatgcatcccgcgctcccccgcgtaagggagcgcttcttccatcgcctttatcctgggtggtttccctggatgcctntgatccaaaccgttacaaggagatcagggggcccggcttcgcggaggcttcggcctgcgccacccagcttctgaccctctttccgggaaacgcatacgtgcaggccctccgggttaagggcgctgaagatgacatcgaagggttctaccgtttttggaaagaggggaaacacaaaggggcggcaaaagagccgagcggggcttctcacgtcatcatacagaaatacgatcatttttgcggaaaactcccgcggctgcaggcttcggatcttgccccaatacggcggcggccttgctggcatcttttgcgggatatatgcgtcaccctggatggaagcgcgctgcgctgccgggaagacttggaggcattacaccataatgagcagagactcaatattattaccgattccctatcggaaatatgggaaacaggcaaaagactctatctggaacattccgcgggaatctacccaagagaatgtgcggattgcgatgaatactatacctacaacttttaa

SEQ ID NO: 9236 - protein, 231 aa, Unknown
  Obtained from environmental sample
  misc_feature (1)..(231): Xaa is any amino acid
MELIRAVLERPCLSLVLETSGIGWKPGELEALAADASRAPPRKGALLPSPLSWVVSLDAXDPNRYKEIRGPGFAEASACATQLLTLFPGNAYVQALRVKGAEDDIEGFYRFWKEGKHKGAAKEPSGASHVIIQKYDHFCGKLPRLQASDLAPIRRRPCWHLLRDICVTLDGSALRCREDLEALHHNEQRLNIITDSLSEIWETGKRLYLEHSAGIYPRECADCDEYYTYNF

SEQ ID NO: 9237 - DNA, 867 bp, Unknown
  Obtained from environmental sample
  misc_feature (1)..(867): n is a, c, g, or t
atgggcaataatgttgaaattgaccttgctgaaatactgattgtcgcgggagcgaaggtagaggccgaaaacaaccagggggtcactccgcttcatgtagcggcggctcatgggactatccctctggtaaaattacttcttgaaaaaggcgcgtttatcaatgccgaggatattgaagaaaagacccctttaatttatgccataaacggcggtcaggaaggaatagcggaatatcttatttccacaggggctgataagtattccagaaccaccaagggtctttctcccatggatttcgcgaaagccgcggaaatggataccctgtttcctttttttgacagccggttcccatgggtagatgaaaaaggaaatagcagtctccacaacgcggcgcttcagaacagtatcggtacggtggaatctctcctgagtacagataaatccgggatcgacgtcaggaacaacgacggctttactccgcttctcatttctatttcccggttgaatttcgccatttccgacatactccttcagtttggcgctaatcctaatctccctcgtctaaaagacggtgacgctcctctgcatattgccgcggaaaacggttttaattggctgggaaaaagccttctggaccacggggcaaatatcaatatccggaatcaggaaggacttaccccccttatgctggcgattcagggacaacaccgggaattcatttccatgttgatccgccgtggggcggcactgggaatatcggatcataaaggaaaatcagcccgggactatgcctgggaatgcggctatgttgagctgggtcatctgctggacgcgcagtcttcnaaaccaaaaaaagacggcggttaa

SEQ ID NO: 9238 - protein, 288 aa, Unknown
  Obtained from environmental sample
  DOMAIN (156)...(188): Ankyrin repeat
  misc_feature (1)..(288): Xaa is any amino acid
MGNNVEIDLAEILIVAGAKVEAENNQGVTPLHVAAAHGTIPLVKLLLEKGAFINAEDIEEKTPLIYAINGGQEGIAEYLISTGADKYSRTTKGLSPMDFAKAAEMDTLFPFFDSRFPWVDEKGNSSLHNAALQNSIGTVESLLSTDKSGIDVRNNDGFTPLLISISRLNFAISDILLQFGANPNLPRLKDGDAPLHIAAENGFNWLGKSLLDHGANINIRNQEGLTPLMLAIQGQHREFISMLIRRGAALGISDHKGKSARDYAWECGYVELGHLLDAQSSKPKKDGG

SEQ ID NO: 9239 - DNA, 648 bp, Unknown
  Obtained from environmental sample
  misc_feature (1)..(648): n is a, c, g, or t
atgccgcaggtgttgatattcccgctgtttgtagtggcgttaatggcggcgctgttcgtcttcctgccgggcggcgtaccccttatagcggcggaaaccgttctttttctggtctttgtctggatgctgagctttttccggaatccccggcgtaaaatacctatggacagccgcgtattgctctccccggcggacggcaccataacggatatttccgagacggaaacgcctgaaattgggggtaaagcgctgaaaatcgggatgtttctcagtatcttcaatgtccatataaaccgctcgccctgcgcggcgcgtgttgaatcgatcaattacaagaagggaaaatttataaacgccaaggactccaaagcgggcaaggtaaacgagtccaatgacatattgatgacacggcttgacgagccgcgggacaaactgctgctgcggcaggtaagcggagcaatcgcccgccatattgtctgtgaggcgaagcccggacagcagtacgcgcagggggaagcgttcggcatgattaaattcggttcccgcgcggaactgtaccttcccctgaaagacgcgggttatgacattaccgtaaagatcggggacaaggtcaacgcgggtataagcccactggtagtatacaaatga

SEQ ID NO: 9240 - protein, 215 aa, Unknown
  Obtained from environmental sample
  SIGNAL (1)...(30)
  DOMAIN (38)...(212): Phosphatidylserine decarboxylase
  misc_feature (1)..(215): Xaa is any amino acid
MPQVLIFPLFVVALMAALFVFLPGGVPLIAAETVLFLVFVWMLSFFRNPRRKIPMDSRVLLSPADGTITDISETETPEIGGKALKIGMFLSIFNVHINRSPCAARVESINYKKGKFINAKDSKAGKVNESNDILMTRLDEPRDKLLLRQVSGAIARHIVCEAKPGQQYAQGEAFGMIKFGSRAELYLPLKDAGYDITVKIGDKVNAGISPLVVYK

SEQ ID NO: 9241 - DNA, 480 bp, Unknown
  Obtained from environmental sample
  misc_feature (1)..(480): n is a, c, g, or t
gtgacaaaaaatattacgacaaatatcattagcgatgaaaatatggcctatcttccccaaattcgcgcgttgctggatatatacggcctgcccaaacggatgtaccggattaccgacgcgtcggcgtttgaccggcgttattccctctttaacagtgtccgctatatcaggacctttcattgcgatgaccttaaaagctccgcgatactgtttgaaacaaacagcgggcttgtgttttattcaggcgacatgaaagaccctgccccgctcatagaaattatcaaaagcggcaaaaagatcgataaaatatacatggactcctgcgatgacccggagcccaatccgtttcatatcaggcttaaagagatatacgagattgttccgccggaattaagatctgaagtttattgtatgcatttcaacagcagcaagtgcatggatgacgccatcagcatgggcttcaaggttgtcacgatctga

SEQ ID NO: 9242 - protein, 159 aa, Unknown
  Obtained from environmental sample
  misc_feature (1)..(159): Xaa is any amino acid
MTKNITTNIISDENMAYLPQIRALLDIYGLPKRMYRITDASAFDRRYSLFNSVRYIRTFHCDDLKSSAILFETNSGLVFYSGDMKDPAPLIEIIKSGKKIDKIYMDSCDDPEPNPFHIRLKEIYEIVPPELRSEVYCMHFNSSKCMDDAISMGFKVVTI

SEQ ID NO: 9243 - DNA, 594 bp, Unknown
  Obtained from environmental sample
  misc_feature (1)..(594): n is a, c, g, or t
atgtctcaaacgcatatcttgctggaatccggcaccaacgagctggaaatcgtcgaattttttctggaagaaccggagccggatgaggatggttcggcaaaaagcaagacgtatcgcggctattacggggtcaatgtagccaaggtgctggaaatcagccggatgcccaaggtgaccgaactgccggaagtccagcacccttcggtgatgggcgcgttcaacctgcgttcgcacattgtgccgctggtggatcttggcctgtggctgggcaaggggcatatctccgcccaggaatcgcccaaagtcattgtcaccgaattcaacaacgtgaccacggcctttatggtgtccggggtcaaccgcatccaccgcatcagctgggagcaggtcgagccgcccaatcgctatgtggccatggtttccaaaagctccatcaccggcgtggtcaaactggaaggccgcatcgtttttctgcttgatctggaaaaaattgtggcggatttgaatcctgccttgggtctgcgtctggatcaggccgtggattggggcagtgaaacgagttaccgcgcgctgattgccgatgattcgggctga

SEQ ID NO: 9244 - protein, 197 aa, Unknown
  Obtained from environmental sample
  DOMAIN (37)...(169): CheW-like domain
  misc_feature (1)..(197): Xaa is any amino acid
MSQTHILLESGTNELEIVEFFLEEPEPDEDGSAKSKTYRGYYGVNVAKVLEISRMPKVTELPEVQHPSVMGAFNLRSHIVPLVDLGLWLGKGHISAQESPKVIVTEFNNVTTAFMVSGVNRIHRISWEQVEPPNRYVAMVSKSSITGVVKLEGRIVFLLDLEKIVADLNPALGLRLDQAVDWGSETSYRALIADDSG

SEQ ID NO: 9245 - DNA, 399 bp, Unknown
  Obtained from environmental sample
  misc_feature (1)..(399): n is a, c, g, or t
atggcactttcaggcatgggcgatttaaagatgttagaggaaaattttaaaatcgcgtcacgtaccggtcatttaacggaagacgaattactgcatattaaaacgatgatggaagaaaacaaaaaccttgccaaactttactgcacaggctgtaattactgcaaaccatgccctgcgggcatagacattccgtacctttttgaaataatgaaccgctaccgcgtctacgatttaaaagaacacgcaaaaagcgcgtataaggaaatgatgaatggctggagctggataaaaagcgctgacgcttcaaagtgtacagcttgcggcgcttgcgaagaaaaatgcccgcaaaaacttccgattataaagcagttgcaggaaacgcataagacgcttttgtag

SEQ ID NO: 9246 - protein, 132 aa, Unknown
  Obtained from environmental sample
  DOMAIN (97)...(120): 4Fe-4S binding domain
  misc_feature (1)..(132): Xaa is any amino acid
MALSGMGDLKMLEENFKIASRTGHLTEDELLHIKTMMEENKNLAKLYCTGCNYCKPCPAGIDIPYLFEIMNRYRVYDLKEHAKSAYKEMMNGWSWIKSADASKCTACGACEEKCPQKLPIIKQLQETHKTLL

SEQ ID NO: 9247 - DNA, 966 bp, Unknown
  Obtained from environmental sample
  misc_feature (1)..(966): n is a, c, g, or t
atgaaaacacaaggacagggagtcccggtgatgattacgatgctcaaaacagccgctacagcgggcgtgggcgttactctttatggaaatggcgaagcagtggcagtaagctacagttccagcgggactagccgctcaatgtatatgggcaaggacatcatgggaagcgtgcggagcataacgttagacaccggaacgctggatgacaggtacgagtacgacgtattcggccagccttacaaaggcgagctaacaggcggcatgaatcttggctatgctggcaaaccatacgacacagctaccggcctatacaattacggttaccgcgactataaaccccaggcagcgagatttactaccgtagatccgattagggacgggaacaactggtttgcttatgtgaacaacgacccggtgaactgggtggatttatgggggttagctgaaatttttgcagatgatattaaaggaaagtccattgcggtaaggtctggtaccaacctaaaagataaaacaaagatagttatagaacgaagtggaagcgataaaacattttctgataccctaaatattaatattgcaaaccaaacactcttacagttacctgtacagagtacagcaaatatagcagaaccaagattaaccgatgtttataatggtcgtactcttgatgcaggtacttactctggaacacttatggcacaatcaggttcatatctaaatgccatattaatggagaaaccagatttttatatccatccgaatgaagtaacagtacctgaaaagataaataagaatataaaagcaggtatttctaatggtccattctataatcaagtaagcgctggctgccaagttttaccgactaatgattttaacacgatgactagtatcttgcaagggattggatttcaatataatggtgaagatactatcagtgttacaattaaaattaaaggcaaataa

SEQ ID NO: 9248 - protein, 321 aa, Unknown
  Obtained from environmental sample
  misc_feature (1)..(321): Xaa is any amino acid
MKTQGQGVPVMITMLKTAATAGVGVTLYGNGEAVAVSYSSSGTSRSMYMGKDIMGSVRSITLDTGTLDDRYEYDVFGQPYKGELTGGMNLGYAGKPYDTATGLYNYGYRDYKPQAARFTTVDPIRDGNNWFAYVNNDPVNWVDLWGLAEIFADDIKGKSIAVRSGTNLKDKTKIVIERSGSDKTFSDTLNINIANQTLLQLPVQSTANIAEPRLTDVYNGRTLDAGTYSGTLMAQSGSYLNAILMEKPDFYIHPNEVTVPEKINKNIKAGISNGPFYNQVSAGCQVLPTNDFNTMTSILQGIGFQYNGEDTISVTIKIKGK

SEQ ID NO: 9249 - DNA, 423 bp, Unknown
  Obtained from environmental sample
  misc_feature (1)..(423): n is a, c, g, or t
atgacctgcgaccttcccctggttcccaatggcaacaagcagcatcagaccattattgacaaatatcagggaaaaaaatctctgacccgcttcaagcttttgggcagcgcgggcaatttaagcattcttgaggcttttcctgaaaccggcagaacccatcagatacgggttcacgcggcggcgctgggctttcctgttgtgtgcgattctttgtatggcaaaggtaaaccggtgctgttatctgctattaaaaaaaattggcgcggcgatcttttggaggaaaagccccttctggcgcggctcggcctccatgccgcggaactttctttgccttcatcacaaactctgtgcgctcccttgccgcgggacatggccgcccttatcaagcagatgaaactttttcatctaacaaaacataattaa

SEQ ID NO: 9250 - protein, 140 aa, Unknown
  Obtained from environmental sample
  misc_feature (1)..(140): Xaa is any amino acid
MTCDLPLVPNGNKQHQTIIDKYQGKKSLTRFKLLGSAGNLSILEAFPETGRTHQIRVHAAALGFPVVCDSLYGKGKPVLLSAIKKNWRGDLLEEKPLLARLGLHAAELSLPSSQTLCAPLPRDMAALIKQMKLFHLTKHN

SEQ ID NO: 9251 - DNA, 813 bp, Unknown
  Obtained from environmental sample
  misc_feature (1)..(813): n is a, c, g, or t
atggctcagaaagaactgaaagacctgccgtggaaaaagcttggggtcgaatatgtaatcgagagtaccgggctctttaccgatgacaaggccttcgggcacatcgatgccggcgccaagaaggtaatcatttccgcgcccgcaaaagccaaggatcataagattcagacctttgtaatgggagttaatcaggacaagtacaatcccgccgaagacaaggtcgtttcaaacgcgagctgcaccaccaactgccttgcgcccgtggtttacgtgcttctaaaagaaaaagtcggagttgaaaaggggcttatgaccactatccattcctataccgcgacgcaaaagaccgttgacggagtttcaaagaaggactggcggggcggcagggctgctgccatcaatataatcccctcaaccaccggcgcggccaaggccgtgggcgaagttcttcccgaaaccaagggcaagctgaccggcatgtctttcagaattcccactcccaccgtgtccgtcgtggatttaacctttaccgccgcaagggatacgtccatcgaagaaatcgacggctttatgcttaaggcttcaaaaggctacctaaagggcattctgggctatagcgacgaggaagttgtttcaacggattttgttcacgatccgcgcgcttccatatacgacagtttggctactaagcagaacaacctgcccggcgaaaagcgcttctttaaggtcgtttcatggtacgacaatgaatggggctattccaaccgtttgattgctctgcttctgtatatgattaaagcaggcgccaaataa

SEQ ID NO: 9252 - protein, 270 aa, Unknown
  Obtained from environmental sample
  DOMAIN (1)...(80): Glyceraldehyde 3-phosphate dehydrogenase, NAD binding domain
  misc_feature (1)..(270): Xaa is any amino acid
MAQKELKDLPWKKLGVEYVIESTGLFTDDKAFGHIDAGAKKVIISAPAKAKDHKIQTFVMGVNQDKYNPAEDKVVSNASCTTNCLAPVVYVLLKEKVGVEKGLMTTIHSYTATQKTVDGVSKKDWRGGRAAAINIIPSTTGAAKAVGEVLPETKGKLTGMSFRIPTPTVSVVDLTFTAARDTSIEEIDGFMLKASKGYLKGILGYSDEEVVSTDFVHDPRASIYDSLATKQNNLPGEKRFFKVVSWYDNEWGYSNRLIALLLYMIKAGAK

SEQ ID NO: 9253 - DNA, 375 bp, Unknown
  Obtained from environmental sample
  misc_feature (1)..(375): n is a, c, g, or t
atgccggggagcttctttccctcaaggagttccagcgaagcgccgccgcctgtgctaacatggctcatttttgaagccagcttgaacttgttcaccgcggcgaccgaatccccgccgcctacgacggtgataaccccatttgccgttgcggctgcaacgagcttggcaacttcctcggttcccttggcaaaggcgtcgaattcaaagacgccgacagggccgttccacacgattgtctttgccgtggaaataacctttttgtacaaggcaagcgttttcggccccacgtccatggcaataagcttgtcggggacatttacgctggcaacggccaccggcttggcggcggcgtcaaacttctccgcgcccacatga

SEQ ID NO: 9254 - protein, 124 aa, Unknown
  Obtained from environmental sample
  misc_feature (1)..(124): Xaa is any amino acid
MPGSFFPSRSSSEAPPPVLTWLIFEASLNLFTAATESPPPTTVITPFAVAAATSLATSSVPLAKASNSKTPTGPFHTIVFAVEITFLYKASVFGPTSMAISLSGTFTLATATGLAAASNFSAPT

SEQ ID NO: 9255 - DNA, 891 bp, Unknown
  Obtained from environmental sample
  misc_feature (1)..(891): n is a, c, g, or t
ttgataactccggaaacagcccagcaaaaagacagcgcgggaaataccatactgcaccttgcggtaaaaaacaaaggggatgccctgatcatcgggaaaatccttgatcaaaacgccaatatcaacgcccgtaaccgcgagggagacacagctctgcatatagcggcgcggacaaatcaaaaagaatccggtgaatatatcctttcaaagagggcaaatattttttatgccaattccgttggtgaaagcccgttgtacatcgcgctcactcacccatccggagtacttcagtggatgtttaccaatgagacagcaaaagcccatgatgatttagggaataccatgctccactatgtcgcgctgtggagaatggataagcatatacctttcattattcagaagggagtctctaccgaagcggcaaacgccaccggggaaacgcccctgttctgggcggtcaaatacgacggcgcttctaccgtcagggcattgttggcggcaaacgcaaacctgcatgcccgtgacaaccagggtaattcggtgctccatgccgcggtacgctggaacgcgaaaaacgcggttactaccctccttaacgcgggtatagacgccaatgttcattctctggatatgaccacccccctgcatgaagcagtccgcctgggcgtaaccgatattgccgttattctcattaaccggggcgccgatcttgaagtccgcgacgcggggggcaatacaccctttatggaagcggtaaaggccggccaaataggaacggttaccctgctcgccaaaatgggcgccaatgccatgacgagaaataccaatggggatacccccctgcatgccgccatagcgcgggaggacatcgccaccctcgtgccgatctga

SEQ ID NO: 9256 - protein, 296 aa, Unknown
  Obtained from environmental sample
  DOMAIN (177)...(209): Ankyrin repeat
  misc_feature (1)..(296): Xaa is any amino acid
MITPETAQQKDSAGNTILHLAVKNKGDALIIGKILDQNANINARNREGDTALHIAARTNQKESGEYILSKRANIFYANSVGESPLYIALTHPSGVLQWMFTNETAKAHDDLGNTMLHYVALWRMDKHIPFIIQKGVSTEAANATGETPLFWAVKYDGASTVRALLAANANLHARDNQGNSVLHAAVRWNAKNAVTTLLNAGIDANVHSLDMTTPLHEAVRLGVTDIAVILINRGADLEVRDAGGNTPFMEAVKAGQIGTVTLLAKMGANAMTRNTNGDTPLHAAIAREDIATLVPI

SEQ ID NO: 9257 - DNA, 858 bp, Unknown
  Obtained from environmental sample
  misc_feature (1)..(858): n is a, c, g, or t
atggataaacagtcggtcactttccttcctcaaggaataaaagtaactgtagaaaaaaactccactcttcttgccgccgccgttttagcaaacgttgaaataaaagcctcttgcggcggggacggaacctgcggcaaatgtgccgttatcttgaaagaaggtcaggctgatatagctcaggaaagttctgttgcggtcaaaatgaaagaaaagggatttcatttggcgtgccaaactttggtcggaaaagaagatttagttattgaagtgccggtatcggcggcaatgcgcaaacatcaggtaatgatgggtgagggaatgattttaggcacagatgtttccaaacccttgcgcgaatatcttctgaaagtttggcagttgaaaaccttatttagtgaaacgcaagaaaacttcctgcaagattataagttaaatcctttgtgccgatggataaaccttgaaatgaccccagccgatcttcaggataaccgggatgatttgagccgtctgttgctggctctgaaaaaagagactcataagcaagatataaatcctgatatttccctctcgacgcttcgtaatttgagtgaaacattaagagatgaaaattttaaagtatcagtattggtgttagaatctaacggcagatggcaaattttagatattattccaggtcataatccagaacatctctatggtttggctgtagatataggcaccactactgttgttgtttatcttcttgaccttatttcgggaaaatttattgacaacgccggtacatataaccgtcaagcgcgttacggcgatgatgttatcagccggattatttacgcaaccgaagaaactgacggataa

SEQ ID NO: 9258 - protein, 285 aa, Unknown
  Obtained from environmental sample
  DOMAIN (6)...(83): 2Fe-2S iron-sulfur cluster binding domain
  misc_feature (1)..(285): Xaa is any amino acid
MDKQSVTFLPQGIKVTVEKNSTLLAAAVLANVEIKASCGGDGTCGKCAVILKEGQADIAQESSVAVKMKEKGFHLACQTLVGKEDLVIEVPVSAAMRKHQVMMGEGMILGTDVSKPLREYLLKVWQLKTLFSETQENFLQDYKLNPLCRWINLEMTPADLQDNRDDLSRLLLALKKETHKQDINPDISLSTLRNLSETLRDENFKVSVLVLESNGRWQILDIIPGHNPEHLYGLAVDIGTTTVVVYLLDLISGKFIDNAGTYNRQARYGDDVISRIIYATEETDG

SEQ ID NO: 9259 - DNA, 882 bp, Unknown
  Obtained from environmental sample
  misc_feature (1)..(882): n is a, c, g, or t
ttggctttagatcaagatttcggtgaaatcctgattgctaagttcaagtccgactatccggcgattattgaccgggtacaggtaactctcattactgacgccaaagaaattgaagaaagaattaaaatcgccagagagaaatatgatgcccgtgatgcaaggctcagagatcttactgacgaagcggctgaagatttctactcctgcactttgtgtcaatcctttgctccaaaccatgtttgcatcgtatctcctgagcgcgtaggactatgcggcgcggtaagctggctggacgctaaagcgtctaaagaaattgccccgaccggccctaaccagccgataccaaaaggagcctgtgtggacgcacacaaaggtatctggcagagcatgaatgatttcgtttacaatcattcgaacaaatcggtcgaagaagttagtttttacaccatcatggatcgtccgatgacttcctgcggctgctttgaggcaatcatggctatgctggctttgtgcaacggcatcatgatcaccacccgtgaacatgctggcgaaactccttgcggcatgactttctccacccttgccggaacttgcggcggtggtatgcagacacctggctttatgggtgtcggacgcagttatatcctgagcaaaaagttcatcaaagccgatggcggtttgggacgcattgtttggatgccgaaagaattaaaagaatatttaattgagcgtggcatcaaggaagtttccaaagaagcgggacttggcgaagatttcattgacaagattgccgatgaaacagtcggtactaccgaagaagncatcttgccgttcctgcaagaaaaaggacaccctgccctgaagatggatcctttnatgtag

SEQ ID NO: 9260 - protein, 293 aa, Unknown
  Obtained from environmental sample
  DOMAIN (1)...(293): CO dehydrogenase/acetyl-CoA synthase complex beta subunit
  misc_feature (1)..(293): Xaa is any amino acid
MALDQDFGEILIAKFKSDYPAIIDRVQVTLITDAKEIEERIKIAREKYDARDARLRDLTDEAAEDFYSCTLCQSFAPNHVCIVSPERVGLCGAVSWLDAKASKEIAPTGPNQPIPKGACVDAHKGIWQSMNDFVYNHSNKSVEEVSFYTIMDRPMTSCGCFEAIMAMLALCNGIMITTREHAGETPCGMTFSTLAGTCGGGMQTPGFMGVGRSYILSKKFIKADGGLGRIVWMPKELKEYLIERGIKEVSKEAGLGEDFIDKIADETVGTTEEXILPFLQEKGHPALKMDPXM

SEQ ID NO: 9261 - DNA, 888 bp, Unknown
  Obtained from environmental sample
  misc_feature (1)..(888): n is a, c, g, or t
atggctgcggaagctgaagaaaaattcaagaataagctggcttcctaccctcccgaaattttatatctccttctaccttacttaaccggtgttaatatggcagattttttcccttcatcttttgacgatttttctgttacttatccgtcaaccggaactcttgaaaattatcaagccggtcttcgtttcacaacaacaataggttccgctgatatcggcgtacagtatttttacggccatctctttcgtcccagttttacaatctcgggaattgacaattatattgacgattatgtagacaatattttacccggtcctcctttgtatttaaataatgcctatccgggtgatccttcccttataaagccggaaataaaatacaaccgctaccatcaaattggccttgattacgcgcaggtgcttttaggttttaacattcgcgctgaagccgcctttcatcttacggaagatcattcaggtgacaatggaactattcaaaacccgttcataggctggtcatttggttttgacaggagtcttttttggggtttaactcttaatattcagtgcaatgaaaccgtgcgcctgtttaacgacaaaatcggagacaatcccattcttgacacggaagccggcactaaagccatttccacccacttaaccatgcgtttatccaaaagttttttcatggacaaactggaaagcagcgcgacggttatctgggacgtagaanattccgattactacattatcccgtcgattgtctggaccgatggcagcatgagctggatattatccgggggcattttcgccggaaaagaaaccggagatttgggacagtaccgganaaacaattacgtcaagtttggagttacatattcattctaa

SEQ ID NO: 9262 - protein, 295 aa, Unknown
  Obtained from environmental sample
  misc_feature (1)..(295): Xaa is any amino acid
MAAEAEEKFKNKLASYPPEILYLLLPYLTGVNMADFFPSSFDDFSVTYPSTGTLENYQAGLRFTTTIGSADIGVQYFYGHLFRPSFTISGIDNYIDDYVDNILPGPPLYLNNAYPGDPSLIKPEIKYNRYHQIGLDYAQVLLGFNIRAEAAFHLTEDHSGDNGTIQNPFIGWSFGFDRSLFWGLTLNIQCNETVRLFNDKIGDNPILDTEAGTKAISTHLTMRLSKSFFMDKLESSATVIWDVEXSDYYIIPSIVWTDGSMSWILSGGIFAGKETGDLGQYRXNNYVKFGVTYSF

SEQ ID NO: 9263 - DNA, 870 bp, Unknown
  Obtained from environmental sample
  misc_feature (1)..(870): n is a, c, g, or t
atgaacggttcatcggaaaagttacagataaatcacgatatgtgtattggttgcggaaactgtattaacgcctgtacccacaaggcaagaaccctcattgacgacaccagccgtttcatggaagacttgaaacaaaacaagaaaataatcgccgtagccgcccctgctgtcgcttcgttttttccagatcaatttctaaacttaaacggatacctgaaatcacttggcgttgaagccttttttgacgtgagtttgggagcggaactaaccgttatgtcatatcttgaatacatcaaagaaaaaaatccccgagcggtaatcgcgcagccctgccctgcgattgtaacttatatcgaaattcaccaccctgaattactgccttttctcgctccggcggacagccctatcctgcatataattaaattgataagagaattttatccacaatataaaaaccacaagatagcgataatttcaccctgcattgcaaaacggcgtgagtatgacgaaaccggcatgggcgattacaacgttaccatgattgaattaaaaaatcttctggacagtcggaaaataaacctctcctcatttcccaaagtagaatataccggagtaagtgcggaacgtgcggccggatttccaattcccggagggcttttagataccgccgagcgttttacccctggcataagacggtacaccgaaaagattgaaggggtttataatatctatccttacttgaaagaaatagcggaaatgttgaacaccaaagctaaactgccgttattgattgactgcctgaattgcgaaaaaggctgtatcggcgggcccggcacggggaacgcccgaaaaaccgcttgctatgcttaa

SEQ ID NO: 9264 - protein, 289 aa, Unknown
  Obtained from environmental sample
  DOMAIN (8)...(31): 4Fe-4S binding domain
  misc_feature (1)..(289): Xaa is any amino acid
MNGSSEKLQINHDMCIGCGNCINACTHKARTLIDDTSRFMEDLKQNKKIIAVAAPAVASFFPDQFLNLNGYLKSLGVEAFFDVSLGAELTVMSYLEYIKEKNPRAVIAQPCPAIVTYIEIHHPELLPFLAPADSPILHIIKLIREFYPQYKNHKIAIISPCIAKRREYDETGMGDYNVTMIELKNLLDSRKINLSSFPKVEYTGVSAERAAGFPIPGGLLDTAERFTPGIRRYTEKIEGVYNIYPYLKEIAEMLNTKAKLPLLIDCLNCEKGCIGGPGTGNARKTACYA

SEQ ID NO: 9265 - DNA, 423 bp, Unknown
  Obtained from environmental sample
  misc_feature (1)..(423): n is a, c, g, or t
ttgtatgaagcggcgctggctgtaggcgatgaaagcctgatctccggggtaaaacaaaccgcattggcaatttcggaagttatctatactatcgccattgataataaaaacggcgggttaatcagcggctgtgacgaagcgggacatatccacaacaaaaaagaatggtggccccaggcagaggcggtcgtgggtttttacaacgcatatgagttgtccggcgaccaaaagtaccttgaagcggcagacggtatttggagttacatccaaaataattttgtggatcgtacaaacggcgaatggcacaacgaactaagccttgacaatacgccggatacaagcatgcctaaggctggtttttggaaatgcccgtaccataacgcacgagcctgttttgaggtggtgaggcgaatgggggagtga

SEQ ID NO: 9266 - protein, 140 aa, Unknown
  Obtained from environmental sample
  misc_feature (1)..(140): Xaa is any amino acid
MYEAALAVGDESLISGVKQTALAISEVIYTIAIDNKNGGLISGCDEAGHIHNKKEWWPQAEAVVGFYNAYELSGDQKYLEAADGIWSYIQNNFVDRTNGEWHNELSLDNTPDTSMPKAGFWKCPYHNARACFEVVRRMGE

SEQ ID NO: 9267 - DNA, 528 bp, Unknown
  Obtained from environmental sample
  misc_feature (1)..(528): n is a, c, g, or t
gtgatcagatggccgagcgcgtttacggcggttttggattgcgccgaagaagcgtcaaaaacaaaaactccgataatcgcggacggcggtattaaattttcaggggatattacaaaagcgataggcgcgggagcgggtgttgtgatgattggcaaccttttcgcggggctaaaagaagcgccgggtagcgagattatttttgacgggagaatttataaagagtaccgggggatgggaagcatgggcgcgatagcggacggttcgggagaccgttatcagcttggcaaggatgaagaaccggtacccgagggaattgaagggcgcgtcccatacaagggggagcttcgcacttacatgaaccagcttctcgcggggttacgaaaaggcatgggttactgcggatgtaaaagtatcgcagaacttaatgggtataaaaagtttgtaaaaataacctcggcgggcttaagggaaagccatccgcatgacattacaataacgcaggaagcgccaaattatacgcgatcttga

SEQ ID NO: 9268 - protein, 175 aa, Unknown
  Obtained from environmental sample
  DOMAIN (1)...(161): IMP dehydrogenase / GMP reductase domain
  misc_feature (1)..(175): Xaa is any amino acid
MIRWPSAFTAVLDCAEEASKTKTPIIADGGIKFSGDITKAIGAGAGVVMIGNLFAGLKEAPGSEIIFDGRIYKEYRGMGSMGAIADGSGDRYQLGKDEEPVPEGIEGRVPYKGELRTYMNQLLAGLRKGMGYCGCKSIAELNGYKKFVKITSAGLRESHPHDITITQEAPNYTRS

SEQ ID NO: 9269 - DNA, 510 bp, Unknown
  Obtained from environmental sample
  misc_feature (1)..(510): n is a, c, g, or t
atggtcagattggccgagggtgccggttccaacgcggttgatatttccggatccaccatcgcctggagcgatcaatcgatacttcccattcagaacattccgattgtcaagatgactaccgaggacgaggcggattcctacaggctgtttgcgtcccggcttgcggaaaaattcacctggtttaaggatgaatccggggcctatcagcttgtggcggtgggttttgcgggggttcacaacccttccttcggacttatcaaagacctgaccggcaagatcatccagggcatggatgattaccttaaaggaaacaatcctgtaattttgattatagaaaatgacatggcaaaatcgctgggctactctttgatgaacgcattgccaaaaaagaaatttatcgttttggacagcatcaaagtggataccggggattatattgatatcggcctgcccgcggcggcgggccgggtgattcctgtggttgtaaaaacactggtgtttggaaaatag

SEQ ID NO: 9270 - protein, 169 aa, Unknown
  Obtained from environmental sample
  DOMAIN (1)...(168): Ethanolamine utilisation protein EutA
  misc_feature (1)..(169): Xaa is any amino acid
MVRLAEGAGSNAVDISGSTIAWSDQSILPIQNIPIVKMTTEDEADSYRLFASRLAEKFTWFKDESGAYQLVAVGFAGVHNPSFGLIKDLTGKIIQGMDDYLKGNNPVILIIENDMAKSLGYSLMNALPKKKFIVLDSIKVDTGDYIDIGLPAAAGRVIPVVVKTLVFGK

SEQ ID NO: 9271 - DNA, 423 bp, Unknown
  Obtained from environmental sample
  misc_feature (1)..(423): n is a, c, g, or t
atggacaggacaataacagccaaaatacgcgaggcgggagtggtcggagcgggaggggccggatttcccactgcggtaaaactggacagtaaacctgaatatatcctggtaaacggagtggaatgtgaacccctgatccaggtggatcaacaactggccgccctgtacgcgagtgaactgccggaaacccttgacagactggtaaaaaccctgggcgccaaggggggcgtttttgttataaaggaaaaacacaaggccgcccgtgaggctttggctgggacgataggaaaataccccgcattgacgcttaaaacactcacctcagcctatcctatgggcgatgaacaggtgctggtctacgagaccctgcgccggatcgttcccgaagggggaatcccccttacgtcgggacgatggttgtaa

SEQ ID NO: 9272 - protein, 140 aa, Unknown
  Obtained from environmental sample
  misc_feature (1)..(140): Xaa is any amino acid
MDRTITAKIREAGVVGAGGAGFPTAVKLDSKPEYILVNGVECEPLIQVDQQLAALYASELPETLDRLVKTLGAKGGVFVIKEKHKAAREALAGTIGKYPALTLKTLTSAYPMGDEQVLVYETLRRIVPEGGIPLTSGRWL

SEQ ID NO: 9273 - DNA, 762 bp, Unknown
  Obtained from environmental sample
  misc_feature (1)..(762): n is a, c, g, or t
atggcaaattcgtatcggacgcataattgcagcgaactttcaaagaggcacataggcgaagaagtgaaactttgcggatggattcataacagacgagaccacggcggcgttttgtttatagatttacgcgaccactacggattgacgcaggtcgtaatttatcccgacaatcccaaacaatacgagatagggcatttgccaaaagaaaccgtagtaaaatttacgggagtcgtcgtcgaacggacagccgagaacgtaaatcctaatatgaaaaccggcgagatagaagtaacggcgaaagattacgaagttttgggcgaatgcgaaacgcttccgtttcccgtttttcccgaaaaagacgcgccggaggacttgcgtctgacttatcgctatatcgacctgcgcaaagaaaaactacacaacaacatcgttttgagaagcaaggttatttcgcatttgcgccaaaagatgattgaacacggatttaccgaatttcaaacgccgatactgacaagttcgtcgcccgaaggcgcaagggactatttggtgccgagccgtattcatccggggaaattttacgcgcttccgcaggcgccgcaacagttcaagcagttgcttatggttagcggattcgacagatattttcagattgcgccgtgctttcgcgacgaagacgcgagggcggatagaagtccgggcgaattttatcagttggatatcgaaatgtcgtttgtagaacaagacgatatttttccattctga

SEQ ID NO: 9274 - protein, 253 aa, Unknown
  Obtained from environmental sample
  DOMAIN (122)...(253): tRNA synthetases class II (D, K and N)
  misc_feature (1)..(253): Xaa is any amino acid
MANSYRTHNCSELSKRHIGEEVKLCGWIHNRRDHGGVLFIDLRDHYGLTQVVIYPDNPKQYEIGHLPKETVVKFTGVVVERTAENVNPNMKTGEIEVTAKDYEVLGECETLPFPVFPEKDAPEDLRLTYRYIDLRKEKLHNNIVLRSKVISHLRQKMIEHGFTEFQTPILTSSSPEGARDYLVPSRIHPGKFYALPQAPQQFKQLLMVSGFDRYFQIAPCFRDEDARADRSPGEFYQLDIEMSFVEQDDIFPF

SEQ ID NO: 9275 - DNA, 936 bp, Unknown
  Obtained from environmental sample
  misc_feature (1)..(936): n is a, c, g, or t
atggtcggtataaaggccgtgggccaccgcgttgtacacggcggcacgaaattcacaaagagcgtgattgtggacgatgcggcaatggcagcttttaacgaggtgaaagacctggggcccctgcacaacccggcgaatattatgggtatagaagctgcaaaaaaggtgctgcctaaagtgccgcactgcgcgactatggacaccgcctggcaccagaccatgccgccggagtcgtacctctacgctattcccaaagagtggtatgaaaaataccaggcgcggcgctacggcttccatggcacaagtttcctgtacaccgcgaaaagggcggcggtgctgctggggcaggaccctttcaagactaacctggtcatctgccatttggggaacggcgcttctgtaaacgccgtcaaaaacggctgttcctttgacacgagcatgggaatgacaccgctggaaggcctgataatgggaacccgctcaggcgacatcgatcccgctctgcctttctatataatgaaaaaaaccggcatgagcgcatccgaggttgagaacgctctgaacaaaaaatccgggcttttgggcctgaccgggcagtacactgatcgccgcgatatacaggccgccgctgtaaagggcgacaaacaggctctgttggcgcagcatgttgaggcgcagcatgtaaagaagtacattggcgcgtaccaagccacgcttggcagggtagacgccctggtttttaccgccggcgtgngggaattcgcctggttcatgcggaacaagatacttgacgggctggatggaatcggcatagtgtacgatccccaaaagaacgaaatgtctcatacccgcaacaccgagaccataatcagcaaaacccgaatcgcgcatacccattttcataatcccaaccgacgaggaactgggtatgactga

SEQ ID NO: 9276 - protein, 311 aa, Unknown
  Obtained from environmental sample
  DOMAIN (1)...(297): Acetokinase family
  misc_feature (1)..(311): Xaa is any amino acid
MVGIKAVGHRVVHGGTKFTKSVIVDDAAMAAFNEVKDLGPLHNPANIMGIEAAKKVLPKVPHCATMDTAWHQTMPPESYLYAIPKEWYEKYQARRYGFHGTSFLYTAKRAAVLLGQDPFKTNLVICHLGNGASVNAVKNGCSFDTSMGMTPLEGLIMGTRSGDIDPALPFYIMKKTGMSASEVENALNKKSGLLGLTGQYTDRRDIQAAAVKGDKQALLAQHVEAQHVKKYIGAYQATLGRVDALVFTAGVXEFAWFMRNKILDGLDGIGIVYDPQKNEMSHTRNTETIISKTRIAHTHFHNPNRRGTGYD

SEQ ID NO: 9277 - DNA, 603 bp, Unknown
  Obtained from environmental sample
  misc_feature (1)..(603): n is a, c, g, or t
gtggaacgttatctagaatctaataaaataatcattgagcctgtatctataggtaatgaccctttgaaaagaaaaataatgtatatgctcaacatgaataaaatagttgaacatttatggaaattcattgaatgtgaaatgactacccggctaatacctgtttttaaccccggctgtaaaatccgttccacaggagacatgcccacatggtggactaccaaacaccgcgaaccgttaaaaaaatcccatataagccatatcgtttatgacagcacatgggaagctaccgaagcctataaactcgaaaaaaatccccatgtatcagcctttgctaaaaacgatcatctcggttttggtattctctatacctttggcggcgttccccattattattatcccgactttcttattaaactcaataacggtaaaacccttgtgcttgaaacaaaaggccaggacagcccacaagtacaagcaaaaaaagccgctcttgccgaatggatagaaactgtaaactcattaaaagagtatggggagtggtgcagtgacatttctttcaatgttgccgatgttgacgttataattgggaagtatatgaaatga

SEQ ID NO: 9278 - protein, 200 aa, Unknown
  Obtained from environmental sample
  misc_feature (1)..(200): Xaa is any amino acid
MERYLESNKIIIEPVSIGNDPLKRKIMYMLNMNKIVEHLWKFIECEMTTRLIPVFNPGCKIRSTGDMPTWWTTKHREPLKKSHISHIVYDSTWEATEAYKLEKNPHVSAFAKNDHLGFGILYTFGGVPHYYYPDFLIKLNNGKTLVLETKGQDSPQVQAKKAALAEWIETVNSLKEYGEWCSDISFNVADVDVIIGKYMK

SEQ ID NO: 9279 - DNA, 918 bp, Unknown
  Obtained from environmental sample
  misc_feature (1)..(918): n is a, c, g, or t
atgggggaaagcgcattcttcagttgcgaaggacttacggaaattaaacttccggaaagccttacttctatcggaaaaggtgtatnttctgaatgctcagagcttaagaagattaaacttccaaaatggcttatttcaatcggagagtgggcatttcatgaatgtacaggacttaaggaggtaatacttcctgaaggtctttcttccattggagaatgggcattcagtcactgtacagggcttaaggagattaatattccaaaaaaaattacttcaatcgaagagtatgaattcagttactgtacaagccttaaggaaattagtcttcctgaaagccttacttccattagggatagtgcattctccggttgcacaggtcttaaagaaattaaacttcctgatagccttacttctattggggaacgggcgttcagcaattgtgcggggcttaaggagattaagcttcctaaaggacttattacaatagggaaatatgcatttgaagaatgtacaggacttaaggaaataaaacttcctgaaaatcttatttctattgagaagtcattatttagaaattgttcagggcttacaaccattaaacttcctaaaaatattacaatttttagatttgatacattcgatggctgtacgaagcttaaggagtttatcgtggacgaaaacaaccctgttttttgtaccgttgacggtgtaatattcgacaaagctatgacatgcttgagtttattccctcaagggaagaagggagtgtattctgtacccgaaggaattatcagtatatcaacactctcttttaaggaaagtaacctgaccggcataaagtttccgaaaagtcttttattcaataaatattgcttttctttatgttctcaacttacagatatcatggtaagcgattaa

SEQ ID NO: 9280 - protein, 305 aa, Unknown
  Obtained from environmental sample
  misc_feature (1)..(305): Xaa is any amino acid
MGESAFFSCEGLTEIKLPESLTSIGKGVXSECSELKKIKLPKWLISIGEWAFHECTGLKEVILPEGLSSIGEWAFSHCTGLKEINIPKKITSIEEYEFSYCTSLKEISLPESLTSIRDSAFSGCTGLKEIKLPDSLTSIGERAFSNCAGLKEIKLPKGLITIGKYAFEECTGLKEIKLPENLISIEKSLFRNCSGLTTIKLPKNITIFRFDTFDGCTKLKEFIVDENNPVFCTVDGVIFDKAMTCLSLFPQGKKGVYSVPEGIISISTLSFKESNLTGIKFPKSLLFNKYCFSLCSQLTDIMVSD

SEQ ID NO: 9281 - DNA, 612 bp, Unknown
  Obtained from environmental sample
  misc_feature (1)..(612): n is a, c, g, or t
ttgtgtgggtacgcgttgataatcctcttttgcacggacttgactgagtacctgctacctgaagagatgcaattcccgctgatggcacttggcttgttgtttgctctgccacaagcgttttggccagaggccacggtcattgtttctgggggcgattgggactatatttccgccaatgttttttacaatggcctgcagcaggcacccgcttggcatcaatggcatggggccgtgaccataaagagcagcgccattggtctagctttgggttatggcttcccttgggccttcaattttgcctatgtgaaaatccgcaacaccatcgccacgaatatgttccacaaagaaccactggaatccggcatggggatgggggatttcaagatgcttgcgtggcttggggccttttggggctgggagcacatgctgggcatcctgttcgtcgccgttgtgataatgactgcttttgttttgcctacccactttttgcgcaggcgggctgctaacacaatgtaccccttgggctgcggccttgccctagccgcgccgatagtggttttttgggggcccatgctctggggggcatacatgggccttggatatgggttttag

SEQ ID NO: 9282 - protein, 203 aa, Unknown
  Obtained from environmental sample
  DOMAIN (1)...(158): Type IV leader peptidase family
  misc_feature (1)..(203): Xaa is any amino acid
MCGYALIILFCTDLTEYLLPEEMQFPLMALGLLFALPQAFWPEATVIVSGGDWDYISANVFYNGLQQAPAWHQWHGAVTIKSSAIGLALGYGFPWAFNFAYVKIRNTIATNMFHKEPLESGMGMGDFKMLAWLGAFWGWEHMLGILFVAVVIMTAFVLPTHFLRRRAANTMYPLGCGLALAAPIVVFWGPMLWGAYMGLGYGF

SEQ ID NO: 9283 - DNA, 774 bp, Unknown
  Obtained from environmental sample
  misc_feature (1)..(774): n is a, c, g, or t
ttggaaagcgtgtttactcacgtaacgagggttcgaatccctctccctcttcttgtgcagatagacagcaactttttcttggaaagtctggagcttggcgaaacagttctagacaggcacgaaagtctgcatattgctaaatcttttagggcgcgtgttggggattctttggaattgtgcgatggcaagggccgctttgcgagagcagagcttgtagaggtaggttcggataagtgcaaagttcggataaaaagcataagcaagcaaacgcctccaccacaggttcacttggcaattagctgcctgagcgataacggcgaagaagatataacattccatgcggcacagctaccacttgcggctattcatcttataagaacggataggagccttgagcctaaagcctccgacttgagcaaactttgccgccgcatggaagcgaaaagccttgcggcacttaaacagagccgcaaagcctggctaacagagataaaagccccggtttatttaaacgaatttttaaaaagcttcaaagggaatctaatagtatgcgataaaaacggagatctcgctgttaatcattcactcgctgataatttatcgttagccatactaactggccccgaaggtggattctcggctgccgaacttgagatgatgagaaataaaaacgcttactttatgtcgcttgnggatattaggctaagagctgttagcgcacctatctttgcgctcgctaaagttattttttcctattctgccaaaactgcatga

SEQ ID NO: 9284 - protein, 257 aa, Unknown
  Obtained from environmental sample
  DOMAIN (35)...(250): Protein of unknown function (DUF558)
  misc_feature (1)..(257): Xaa is any amino acid
MESVFTHVTRVRIPLPLLVQIDSNFFLESLELGETVLDRHESLHIAKSFRARVGDSLELCDGKGRFARAELVEVGSDKCKVRIKSISKQTPPPQVHLAISCLSDNGEEDITFHAAQLPLAAIHLIRTDRSLEPKASDLSKLCRRMEAKSLAALKQSRKAWLTEIKAPVYLNEFLKSFKGNLIVCDKNGDLAVNHSLADNLSLAILTGPEGGFSAAELEMMRNKNAYFMSLXDIRLRAVSAPIFALAKVIFSYSAKTA

SEQ ID NO: 9285 - DNA, 942 bp, Unknown
  Obtained from environmental sample
  misc_feature (1)..(942): n is a, c, g, or t
atgntgcaggagcataatacttgggcaaaggctgaattactggaaattatcganccgtctccttcgcgtataccgcctgtttgtactttntacggtctntgcggcggttgtaatcttcaacatattgattatgaaactcaactagcgttaaaaatcggtattttaaaagactcgcttgcaaggattggcggattacaaccgccggagattgaagttttttcctcgccgcagtgggagtaccggaacagaatgcagtttcattgtttaagacaaagagcgaaagacagcgatatacatcaatacgctcttatggggcgcaagagcggagaattaatcgagattaacgattgccctgtggcggttgcgggaataagagaacttttaaagagcccaaaaggtaaaaaaagtgaagaaaataaattgcccatacctgttgaaaaagacaggtttacagttttttccaaagacgatgttttgttaagcgagggcggcaggcagaagggaaaaattaaattactggaaaaagaaatttctcttgacgcaagtttgtttttccagagcaactgtttcatgctggaaaaattaattacggagcttcgcgtaattgccgctgacgcggataacagtaagcctatggcggatttatactgcggcgttggtacattctctttttatttaaaagaaagttttcctaaaataattcttgcggaggaaaacaaaaccgccgtaagtcttgcgagggaaaatttaagggggactgagtctgagttttttgcagtccgcgacacaaattggcagaacgatctattgcgccgaaaagatacgtttggctttgccgttgttgatccgcctcgggcgggacttgcgtctaagacggcggcggctctggcgcgggagggaccgcctgttttagcttatttcctgcatgccgcccggccataa

SEQ ID NO: 9286 - protein, 313 aa, Unknown
  Obtained from environmental sample
  DOMAIN (43)...(312): tRNA (Uracil-5-)-methyltransferase
  misc_feature (1)..(313): Xaa is any amino acid
MXQEHNTWAKAELLEIIXPSPSRIPPVCTXYGLCGGCNLQHIDYETQLALKIGILKDSLARIGGLQPPEIEVFSSPQWEYRNRMQFHCLRQRAKDSDIHQYALMGRKSGELIEINDCPVAVAGIRELLKSPKGKKSEENKLPIPVEKDRFTVFSKDDVLLSEGGRQKGKIKLLEKEISLDASLFFQSNCFMLEKLITELRVIAADADNSKPMADLYCGVGTFSFYLKESFPKIILAEENKTAVSLARENLRGTESEFFAVRDTNWQNDLLRRKDTFGFAVVDPPRAGLASKTAAALAREGPPVLAYFLHAARP

SEQ ID NO: 9287 - DNA, 591 bp, Unknown
  Obtained from environmental sample
  misc_feature (1)..(591): n is a, c, g, or t
gtggatgggaatgtgcgcgtgggcgatctcgcggccgcgacnacgggtgatttttcgcgcaccatacagaatttcattccggaactggccgcaaccaccctgccctttcacagcaaaaacggcatggctgagatgggactcgagatcagtctgctcggtcaatttggctttttatctatgttctcgaaccacttccctgtctatgcgctcccgccgccccccagaggacagacgcgcgccgtatttcatcactccggaatcatcgtggacgcgcggcatctgtctttccagcccgcgctcggtacgcgcatcctgaacgcgagcggcgatctggtgtacagcatagcctataccgaccgcaccatatacgtgcaggatgggcacatcctcttcctgagtgatcccaccgatccccgggctatagcgcgcgcggggacgcggttctttctggtcgtcgccaaggatgtgtcgggcgcaagcgatcttgtcctctttgacgccgacagcgatcacatcctcgcctcgtccgttacccgcacacagctcaaacgctgccgcgtggtcgtgctctgcaattctatccagaaataa

SEQ ID NO: 9288 - protein, 196 aa, Unknown
  Obtained from environmental sample
  misc_feature (1)..(196): Xaa is any amino acid
MDGNVRVGDLAAATTGDFSRTIQNFIPELAATTLPFHSKNGMAEMGLEISLLGQFGFLSMFSNHFPVYALPPPPRGQTRAVFHHSGIIVDARHLSFQPALGTRILNASGDLVYSIAYTDRTIYVQDGHILFLSDPTDPRAIARAGTRFFLVVAKDVSGASDLVLFDADSDHILASSVTRTQLKRCRVVVLCNSIQK

SEQ ID NO: 9289 - DNA, 873 bp, Unknown
  Obtained from environmental sample
  misc_feature (1)..(873): n is a, c, g, or t
gtggaacgggtcagcgtcagacaaaattatgccaacgtttcgcttaccgcaggtcagtaccgttaccgtatcgatatttacgatcttgttaatgagtacgcttcctcctccagttggcatgattttgaaataatccgcgccctccagcctgaattaacaagtttcagtccgcactttttttatcttgacgaggacagtgtttgggagattaccctgcatggacaaaacttgcttcccaattcggagatataccttgtacaaaatgactcaaaaatcaggccgcagaaatatactaccaatggagaatccgcccgtcttgttttttccggattgtctcttgccgtcggcgaatactccttatacgttagaaatcccggtggacttgacattgcattgggaccgtttgttataacaaacaaaaaaccttacgacttgaatatctccttgggttacgctcccccctttcctttgtatgggtacttctttaaagattctgatgattttgaggctccatttacggacagtttttatccattgggcgcaattgttaaaataagttacattccttttaaacacgtctggggatatctgggagcggagttatccggcactttatcgttatttgataatgaaagagaaatttattcaacacatgcgattttcctgaatacccatatcagtcttttgtatcaaaaatattttttcaaaaaagcctttgcatttaacgctaacattggggccggtttcttaacattgcttgatttctattataactaccctagtggttatcaagcggaatccataatcaatattattccatcaatcacttttgatctttccttattggtatttgtctttaatccttatacataa

SEQ ID NO: 9290 - protein, 290 aa, Unknown
  Obtained from environmental sample
  misc_feature (1)..(290): Xaa is any amino acid
MERVSVRQNYANVSLTAGQYRYRIDIYDLVNEYASSSSWHDFEIIRALQPELTSFSPHFFYLDEDSVWEITLHGQNLLPNSEIYLVQNDSKIRPQKYTTNGESARLVFSGLSLAVGEYSLYVRNPGGLDIALGPFVITNKKPYDLNISLGYAPPFPLYGYFFKDSDDFEAPFTDSFYPLGAIVKISYIPFKHVWGYLGAELSGTLSLFDNEREIYSTHAIFLNTHISLLYQKYFFKKAFAFNANIGAGFLTLLDFYYNYPSGYQAESIINIIPSITFDLSLLVFVFNPYT

SEQ ID NO: 9291 - DNA, 726 bp, Unknown
  Obtained from environmental sample
  misc_feature (1)..(726): n is a, c, g, or t
atgtttgacaaggcgcttaaatattcttacgcggcacaaaaacaggaacgccacaaactgctgcggacggtgttgattctgttgttcctctatctgttgtataacataatcagtacttttttctgctccgtatgggtcttgcagaataatactatgcagccggaactgcgcgccggggatcgttttctggtagcatcttcggccttgccttccctgcttgcggaactcaagcagacggaaggaactcctttcaaacggggaaatatcgttttgattgataccaggcgcgaggtaaagcacaactggtttttaattattgctgataatcttgtccgtttttttaccgcgcaacggtatagtatgataaaaacggatgaatacctttacatcaaacggctgattgcccttcccggagacgagataagcatgactaattttgtcctgcgggtaagaccggcggacagttcctattcactgactgagtttgaactttccgaccggccctatcatccgaatattccccaggtcccggccctgtgggatgactcaattcccttttcaggcaacatggacaaaatggtgttgagctccggcgaatattttgtcgtttccgatgaccgtnggaactcaggcgactcccgcagttgggggccggtcagcgcgcangaaataatcggcaggccggtattcccgttctggcccccggcgcggataggccgtccataa

SEQ ID NO: 9292 - protein, 241 aa, Unknown
  Obtained from environmental sample
  misc_feature (1)..(241): Xaa is any amino acid
MFDKALKYSYAAQKQERHKLLRTVLILLFLYLLYNIISTFFCSVWVLQNNTMQPELRAGDRFLVASSALPSLLAELKQTEGTPFKRGNIVLIDTRREVKHNWFLIIADNLVRFFTAQRYSMIKTDEYLYIKRLIALPGDEISMTNFVLRVRPADSSYSLTEFELSDRPYHPNIPQVPALWDDSIPFSGNMDKMVLSSGEYFVVSDDRXNSGDSRSWGPVSAXEIIGRPVFPFWPPARIGRP

SEQ ID NO: 9293 - DNA, 876 bp, Unknown
  Obtained from environmental sample
  misc_feature (1)..(876): n is a, c, g, or t
ttgatgccgagtttgttttcttggcctttatgttccttaatcttctttactggcattctggtcatggttcagaactgtttctggcaaaggttttatctggaaggatcgaaaggtgggctgatgccgtataaacgcggaagaccggtaattgatttatcaatatttttcagaattgcatcagcattgtgtttttattttcttctcccaattgcgtatttattcaacttcatacatctttttacaaggtataaaaacagattcaggctttacggtattcgcagggcaattacagtctccaatcacacgacatttcttgatcctgtaaaaattgccgcgctcgtactaccgcgtcttatataccagacactgcttgaaattactgtagaatctcctgtgttgggtacatttacaagaattctgggcggcgttccaattccgcgcgggatacagggttataaaaaaatacttgagatatgcaataaagcgtttaaatatcgaaggtatttgcatttctatcccgaaggcgaatgttatctttacaatcaaaaaatccgtgaatttaaaccgggcgctttttttatcgccgccgaactggatattccggtaatacctcttgtaactgttttttcgcaaggaccgttccgtccatggtcgtttttcgggcgttccgttcctttggaaacgttagtggtaatggaaccggtatatccttccaattatgtcaagcgtgaaaagaacggagaattatcaaaagaatcaatcagggaattcgccgaagttgtcagaaaaaaaatgcaaaatgaaattgacagacgaggcgggtcttccgccttttacagagggcatatggaacggattaaaggaattaacggttag

SEQ ID NO: 9294 - protein, 291 aa, Unknown
  Obtained from environmental sample
  DOMAIN (80)...(208): Acyltransferase
  misc_feature (1)..(291): Xaa is any amino acid
MMPSLFSWPLCSLIFFTGILVMVQNCFWQRFYLEGSKGGLMPYKRGRPVIDLSIFFRIASALCFYFLLPIAYLFNFIHLFTRYKNRFRLYGIRRAITVSNHTTFLDPVKIAALVLPRLIYQTLLEITVESPVLGTFTRILGGVPIPRGIQGYKKILEICNKAFKYRRYLHFYPEGECYLYNQKIREFKPGAFFIAAELDIPVIPLVTVFSQGPFRPWSFFGRSVPLETLVVMEPVYPSNYVKREKNGELSKESIREFAEVVRKKMQNEIDRRGGSSAFYRGHMERIKGING

SEQ ID NO: 9295 - DNA, 384 bp, Unknown
  Obtained from environmental sample
  misc_feature (1)..(384): n is a, c, g, or t
atgttcgctgcggccggccgaacctatgtctatttaatttacggaatgtaccattgtttgaacattgtcagcggaaaagaaggcgaaggagaagctgtacttatccgcgcacttgaacctgttataggcattgaagttatgcaaaaaagacgcaaaacagaaaaaatagagaatctttgtaacggccctggaaaattgacgcaggctttcggtataacaaaaaaacaaaacgataaaagtttatttgacggtcctattagtatacacaacagccgcattaagcctgaaatttgttcaagcagacggattggactgtccgcagggaaagaacttgaactgcgatttttcatcaaaggcagcagatttgtttcaaaatatgtataa

SEQ ID NO: 9296 - protein, 127 aa, Unknown
  Obtained from environmental sample
  DOMAIN (1)...(122): Methylpurine-DNA glycosylase (MPG)
  misc_feature (1)..(127): Xaa is any amino acid
MFAAAGRTYVYLIYGMYHCLNIVSGKEGEGEAVLIRALEPVIGIEVMQKRRKTEKIENLCNGPGKLTQAFGITKKQNDKSLFDGPISIHNSRIKPEICSSRRIGLSAGKELELRFFIKGSRFVSKYV

SEQ ID NO: 9297 - DNA, 492 bp, Unknown
  Obtained from environmental sample
  misc_feature (1)..(492): n is a, c, g, or t
ttgattgtacggggagatgccgttatttcaggtaacaccggtcctgtggacggtggtggaatttacgcttacgaaagttatgtcgttcttgacgataatgcgcttctggaaggcaacacatcagaatgcggcggcggcttttgtatcgaacattattcttccgctattgttcgcggcaaagtaattgttaggggcaacaagtcttggggatcgcagggcggcggcggactttgcgccggcgtgttaagcaatattcacatgacaggcggaactgtgacagacaatgccagttctaacggcggcggcgtttatcttggaggagcggtttttacattctcaaaaggaagcattacagataatgccgcaaaaacaggcggaggtatttactccggtataggcagcgctattcatattgaaaatgattcgcttgtatatgataattttcctgatgatatttttgaatatgaatataattatggtttttatttttga

SEQ ID NO: 9298 - protein, 163 aa, Unknown
  Obtained from environmental sample
  misc_feature (1)..(163): Xaa is any amino acid
MIVRGDAVISGNTGPVDGGGIYAYESYVVLDDNALLEGNTSECGGGFCIEHYSSAIVRGKVIVRGNKSWGSQGGGGLCAGVLSNIHMTGGTVTDNASSNGGGVYLGGAVFTFSKGSITDNAAKTGGGIYSGIGSAIHIENDSLVYDNFPDDIFEYEYNYGFYF

SEQ ID NO: 9299 - DNA, 645 bp, Unknown
  Obtained from environmental sample
  misc_feature (1)..(645): n is a, c, g, or t
atgaatttaagaactgctgatggaaggtgtgttgaaggggtgctgtttggttattcggcatataattttcagacgcggcaaaaagcctttgacgcgatcagagagaaaaaactcggcgcggtggtgatgaaccccctggggggcgggattattccccatcaccccgaacggtttagttttttgcagcggcccggtgaaggaatcattgcggcggccctgcattttttgtgggaccatcctgagattaatgttacccttgtgggttttcagactattgaacaggtgcaggaagcccttgcggcggttgaaagctataagccccggactaaggcggaactggaggcggttaaggccggcgccaacgcttctcttgagggaatttgtaccggctgtaactactgcgatgactgccctcacaatattcccattcctcaattcatggatgcctacaaccaaaaactgcttctcaatattaaaccgggagaggatccgattggcgaccgtctgcgctggcactggaatttggatcgttctgttgccggtacatgtacatgctgcggcaagtgcgaaaaagcctgcacccagcatattgatattatcaagcggctcaaagaaattgcgtcgccggggataacggctaaatga

SEQ ID NO: 9300 - protein, 214 aa, Unknown
  Obtained from environmental sample
  misc_feature (1)..(214): Xaa is any amino acid
MNLRTADGRCVEGVLFGYSAYNFQTRQKAFDAIREKKLGAVVMNPLGGGIIPHHPERFSFLQRPGEGIIAAALHFLWDHPEINVTLVGFQTIEQVQEALAAVESYKPRTKAELEAVKAGANASLEGICTGCNYCDDCPHNIPIPQFMDAYNQKLLLNIKPGEDPIGDRLRWHWNLDRSVAGTCTCCGKCEKACTQHIDIIKRLKEIASPGITAK

SEQ ID NO: 9301 - DNA, 741 bp, Unknown
  Obtained from environmental sample
  misc_feature (1)..(741): n is a, c, g, or t
gtggaacggaatattctccttcaccggatagaactgcaccttcgcctggcctcttaccaggcgaagaccgaagaaaccgtcatggccctttctgacagtatcgctatctcatttgcggaacttattgaatacagggatgaaaataccggcggtcatgtgatgcgtacatccaggctgatggatctgctgggccgggaactgatcagaaacaatgtctttcaggaagaactcaacccgttggaattgcagctcatggtacgggctgctcctcttcacgacatcggaaagattgccatcagtgaccggattcttctgaaagccgacaggctggatgacgaagagttttcgcttattaaacgccacgccgccataggcggaggaattctggagcggatgttcaagcgaattccaacgcagcattatctgcactatgccgccctgattgcctcgtcacatcatgagcgctatgacggcagaggctatcctgacggccttaagggcgatgacatacccctgtgtggccgcatcatgtcggtagtggatgtcttcgatgcccttatggctgaccgggtctaccgtaacagcattgggtactctcaggcctgcgacattatcatcggaggcaaggggacccaatttgatccccgcattgtggaagcgtttgtaaatatcaaagataaattgattgagcaatatgagtccctgtttaaaataaaagaaaatcaaacaggaaacaagtga

SEQ ID NO: 9302 - protein, 246 aa, Unknown
  Obtained from environmental sample
  DOMAIN (49)...(186): HD domain
  misc_feature (1)..(246): Xaa is any amino acid
MERNILLHRIELHLRLASYQAKTEETVMALSDSIAISFAELIEYRDENTGGHVMRTSRLMDLLGRELIRNNVFQEELNPLELQLMVRAAPLHDIGKIAISDRILLKADRLDDEEFSLIKRHAAIGGGILERMFKRIPTQHYLHYAALIASSHHERYDGRGYPDGLKGDDIPLCGRIMSVVDVFDALMADRVYRNSIGYSQACDIIIGGKGTQFDPRIVEAFVNIKDKLIEQYESLFKIKENQTGNK

SEQ ID NO: 9303 - DNA, 942 bp, Unknown
  Obtained from environmental sample
  misc_feature (1)..(942): n is a, c, g, or t
atgctgcgcttcttagaccgcatcgacctgatagtcaccaataccgaagccgaggcgctgattcttgaagctaaccttatccgcaaacacaaacccaagtacaacatcgaactgcgggacgataagcattatccatacctcaaaataacggtcaacgaaccgttcccgcgtttgcttgtagtgcgccgcgtggagcatgacggcgcaaaatactacggcccgtacaccgacgtggggacgatgcggcggatggccgatttcgcgaagcgcatattcttgttgcgcaactgcaacaagaatctcccgttaaaaaaagcgattcgtccgtgtataaaccactcaatgaaacgttgcggcgccccttgtgcggcgaagatcggcgctgacgattatcgacgcaacgttggcgacttagagcgttttctcaaagggaaacgaaaaggccttacgaaggagctggaggagcggatggaatcggcgtcggcggagttgcgattcgaggaggcggcgcggttgcgagaccagatcaaactcatctgggaggcttcgcggccgcagcgggtcgatttgacgttgacagacgcgaattgcgatgtgttcggcattgcgagcggcgatagggatatatcgatggccgtgttacattttagggacgggttgctaatggcggcgcgtaattttctgttcaagcgtgacaaatgggaattttcgtccgagggtaatgacggtatcgtcacgcagttttacatgttggaggatatggagataccggaggaggttatagtcccggataacgcgggattttcgcaggaagtgttgcaggattggtttgacatgcgggagaataatacggagagtatcgataatgttaataataatattgataatccgaatcaacaaagtaatcatcaacagaaatatgaacgtacaaaagttcggtaa

SEQ ID NO: 9304 - protein, 313 aa, Unknown
  Obtained from environmental sample
  DOMAIN (147)...(182): UvrB/uvrC motif
  misc_feature (1)..(313): Xaa is any amino acid
MLRFLDRIDLIVTNTEAEALILEANLIRKHKPKYNIELRDDKHYPYLKITVNEPFPRLLVVRRVEHDGAKYYGPYTDVGTMRRMADFAKRIFLLRNCNKNLPLKKAIRPCINHSMKRCGAPCAAKIGADDYRRNVGDLERFLKGKRKGLTKELEERMESASAELRFEEAARLRDQIKLIWEASRPQRVDLTLTDANCDVFGIASGDRDISMAVLHFRDGLLMAARNFLFKRDKWEFSSEGNDGIVTQFYMLEDMEIPEEVIVPDNAGFSQEVLQDWFDMRENNTESIDNVNNNIDNPNQQSNHQQKYERTKVR

SEQ ID NO: 9305 - DNA, 903 bp, Unknown
  Obtained from environmental sample
  misc_feature (1)..(903): n is a, c, g, or t
ttgatcagatcggccgagacaatcttggttgttttggcagccggcataggaagtcgctacggcggaattaagcagatggagcaatttggcaaaaacggcgaagtgcttctggattattcggtgtttgacgccttgcggggcggttttggcaaggtggtgtttatcatcagaaaggatctggagaaggattttggcgaagcagtgctggcccgaatgaagggaaaggtaaactacgaacttgcctatcaggagctggacagccttgtccccccggatatttttgaaagcgtaaaaaaaattggcaggagcaagccctggggaacagcccacgccctgttgtgcgcggcggagcaaattgactcgccttttgcggtgatcaacgccgatgatttttacggaagggaggcctttgccgcgatgggcaaattcatggcggagaacgggcataaggaaggcgcgatagtgccgtacccgctggaacccactttaagcgagaagggaaccgttgccagaggagtctgtaaattatcaggggattacgttggatctatcgacgagctaaccgcgattgaaaaaaaagacggcgtaatttttaacaccggggcagatggcgcaaaacaggagcttgctcctaacactcctgtctccatgaattttctggcttaccccgacagcatattaccaagatttaagcaatattttgacgactttattgccgccgccggtggggacttaaagaaagaatgttacctccccagagcaactgacttgtttatcagaaacggctatcttaaaatgcgcgttcttaacgcgaactcagagtggttcggcgttacttataaggaagacaaggtcattgttgcccaacgcctggcggagcttacagtcaggggtttatcctga

SEQ ID NO: 9306 - protein, 300 aa, Unknown
  Obtained from environmental sample
  misc_feature (1)..(300): Xaa is any amino acid
MIRSAETILVVLAAGIGSRYGGIKQMEQFGKNGEVLLDYSVFDALRGGFGKVVFIIRKDLEKDFGEAVLARMKGKVNYELAYQELDSLVPPDIFESVKKIGRSKPWGTAHALLCAAEQIDSPFAVINADDFYGREAFAAMGKFMAENGHKEGAIVPYPLEPTLSEKGTVARGVCKLSGDYVGSIDELTAIEKKDGVIFNTGADGAKQELAPNTPVSMNFLAYPDSILPRFKQYFDDFIAAAGGDLKKECYLPRATDLFIRNGYLKMRVLNANSEWFGVTYKEDKVIVAQRLAELTVRGLS

SEQ ID NO: 9307 - DNA, 459 bp, Unknown
  Obtained from environmental sample
  misc_feature (1)..(459): n is a, c, g, or t
gtgcttggcgatagccaaagtaactgtactatttatggtagattatataattgttcaacggctatggcaaattcagctagttccactgcaaatccgagtggtgttagaggtatttgcccctctggctggcacttgccaagtaatgcagagtgggaagcactgaatacaacggttggtgcaggcgcaggaaccaaattaaaagcaacttacggttgggatactagcagtggctatatggctggtacggactattacggtttttccgctctgcctggcggtatcggcgatatttacaacatcaatgatgatcgccaaattggctccattggctgttggtggagttctagtgatggcggtatcccagcctactactggtatatgacctacaacaacgagtatgtccagttgcataacaacaataaatccctcttgttcagtgttcgttgcataaaggactag

SEQ ID NO: 9308 - protein, 152 aa, Unknown
  Obtained from environmental sample
  misc_feature (1)..(152): Xaa is any amino acid
MLGDSQSNCTIYGRLYNCSTAMANSASSTANPSGVRGICPSGWHLPSNAEWEALNTTVGAGAGTKLKATYGWDTSSGYMAGTDYYGFSALPGGIGDIYNINDDRQIGSIGCWWSSSDGGIPAYYWYMTYNNEYVQLHNNNKSLLFSVRCIKD

SEQ ID NO: 9309 - DNA, 918 bp, Unknown
  Obtained from environmental sample
  misc_feature (1)..(918): n is a, c, g, or t
ttgatggccgaggcctaccgctgctggagtacttcacatccacccacggntgcccgcaagggcttggccgacaccgcactcaagacagccgactccggctaccttaccaggaagctggtggacgttgcgcaggacgtgatcatcaacgaggacgactgcggcacgctggactggatagaagtggccgccatcgtcaacaccgacggcaccatcagggcccgtctgcgcgaccgcatcatgggccgcgttgtggccgaggacgccattgacccgtacgacaaaaaggtgtttgccccagccggcacgctcatcacagaggagctggcgttcaccatcgaaaccagcggcatacaaagtgtcaagatacgctcgctgctcacatgcgagtcccgcaggggcgtgtgcgccaagtgctacggcttgaacctctccactggccgcttggttgacatcggcgaagcggtgggcaccatcgccgcccaaagcatcggcgagccaggcacccagctcaccatgcgaaccttccacgttggcggggccgccagccgcgccaccgagaagaacctgcacgaggcccagatacagggcgtcgtcaagctggacggcataaggttcgtcaagaaccgcaacggcgagaccgtagccctcagccgcacgggcaacatcttggtgctggacgcaagcggcaacgagcgcgagcgctacaaagtgccgccaggcgccatcatccacgtcagcgatggcgaaaaggtggaacccaagacggccctggccgagtgggacccgtacaacgactacctgatcaacgaaaaggaaggcatagccgacttcaaagagttcgagcttaacatcagctaccaagaagaaaaagaccagatcacggggccgtttcccgcagcgcatcatagacgcaattga

SEQ ID NO: 9310 - protein, 305 aa, Unknown
  Obtained from environmental sample
  DOMAIN (18)...(300): RNA polymerase Rpb1, domain 5
  misc_feature (1)..(305): Xaa is any amino acid
MMAEAYRCWSTSHPPTXARKGLADTALKTADSGYLTRKLVDVAQDVIINEDDCGTLDWIEVAAIVNTDGTIRARLRDRIMGRVVAEDAIDPYDKKVFAPAGTLITEELAFTIETSGIQSVKIRSLLTCESRRGVCAKCYGLNLSTGRLVDIGEAVGTIAAQSIGEPGTQLTMRTFHVGGAASRATEKNLHEAQIQGVVKLDGIRFVKNRNGETVALSRTGNILVLDASGNERERYKVPPGAIIHVSDGEKVEPKTALAEWDPYNDYLINEKEGIADFKEFELNISYQEEKDQITGPFPAAHHRRN

SEQ ID NO: 9311 - DNA, 738 bp, Unknown
  Obtained from environmental sample
  misc_feature (1)..(738): n is a, c, g, or t
atgaagccaaagaggagatgcaccaaaatgaagcgcagctctatccccaaccatctggccggaggtgaaaatacctacctcgccaaaaacataaaggaaaagaccattaatgttgacgcgatatgcgcggccatgcggaacaggggcgggtatgacggcagccacgatgaggcggtcaaaaccgtcaaccatttctttaaggagatgatgtaccagctatgcgacgggttttccgtaaacacaggatggttcacggttaacgtccacattggcggccttttccattcggttaaagaaatctttgatccgaaaaagcaccatgttacctttaagttccatatgcttaaggcaatgaagaaccttacatccctcattgaaataacgattaacagccacattgaagaaaccgcgtacatatctgaatacaacgacaaggaagacccggagggcagtaatctttttgagcctggccacgtatgcgagattcatggccgccggattaaaatcgagggccccgccgctgaaaccggcctctggatggttcccctgcaagacccctccaaagcggtgaagataaaccgcgtcgtgtccaacaccccttctcgtatcgaattcattccggtcgctacaggctttcctgaaaaccgcctggaaatccgcacgcggttctccggttccgccacacccctaaccatgttacgcaccgtcaccagtcaatttgtcataaccgaggcataa

SEQ ID NO: 9312 - protein, 245 aa, Unknown
  Obtained from environmental sample
  misc_feature (1)..(245): Xaa is any amino acid
MKPKRRCTKMKRSSIPNHLAGGENTYLAKNIKEKTINVDAICAAMRNRGGYDGSHDEAVKTVNHFFKEMMYQLCDGFSVNTGWFTVNVHIGGLFHSVKEIFDPKKHHVTFKFHMLKAMKNLTSLIEITINSHIEETAYISEYNDKEDPEGSNLFEPGHVCEIHGRRIKIEGPAAETGLWMVPLQDPSKAVKINRVVSNTPSRIEFIPVATGFPENRLEIRTRFSGSATPLTMLRTVTSQFVITEA

SEQ ID NO: 9313 - DNA, 879 bp, Unknown
  Obtained from environmental sample
  misc_feature (1)..(879): n is a, c, g, or t
atggagcacgtcctncacgtgtcgagcatcgccacggtcatagggcgctgccttaacctgaacacggacttgatcaacgccatagccaaggggcacgatctaggacatacggcgttcgggcatacaggagagcgcgcgctgaacgatatcctcgccaacgataaaaaagtacccggcgggttcatgcacgagatccacgggttgcgtgtggtggacaagctgaccaactatggagccggcctcaacctcacctacgaggtccgcgacggtatagccacgcactgcggggagaacttcgagcggataatatgccccgaccgcaaccgcgacctgcataagctcgatttgctgaacgaccgcagttgcgtgcccgctactctagaggggtgccttgtaaggttggtcgaccgtatcgcctacttagggcgcgacttggaagacgctatcaaagcgcgcctgataaataaggacgacatcccgccgaatgtggcgcacgggttgggcaccgacaacgggcgcatcatcggggtcttcgtgaacgacaccatctcgaacagcgccggcaaggatcaaatagagatgagcgaggagatattcggccttatgaagacgctgaaggattttaactacgaacgcatctacaatcatccggaggtgaagcgtgtgaccgacaaggcgaacaagatgctggggatgctgttctacgaggtggagaggatatacgagaaatcggattgcggtcgcaacgcttcgttcgtgtccgctacggtgaaagagtcgccggtgctggagacgtttttcaaattttcaaagaacacaaactacaccgatgatatcaaaccgtggcgcnngtggtggccgactacgtggccggaatga

SEQ ID NO: 9314 - protein, 292 aa, Unknown
  Obtained from environmental sample
  misc_feature (1)..(292): Xaa is any amino acid
MEHVLHVSSIATVIGRCLNLNTDLINAIAKGHDLGHTAFGHTGERALNDILANDKKVPGGFMHEIHGLRVVDKLTNYGAGLNLTYEVRDGIATHCGENFERIICPDRNRDLHKLDLLNDRSCVPATLEGCLVRLVDRIAYLGRDLEDAIKARLINKDDIPPNVAHGLGTDNGRIIGVFVNDTISNSAGKDQIEMSEEIFGLMKTLKDFNYERIYNHPEVKRVTDKANKMLGMLFYEVERIYEKSDCGRNASFVSATVKESPVLETFFKFSKNTNYTDDIKPWRXWWPTTWPE

SEQ ID NO: 9315 - DNA, 411 bp, Unknown
  Obtained from environmental sample
  misc_feature (1)..(411): n is a, c, g, or t
atggataaatatttattggataccgatatttcggtattttgtcttcgaggaagatataacattgatcgaaaattgaatgaggttataggatacgataattgctttatatctgaaataacgcttgctgaattaaaatatggtgctgaactaagtgaaagagtagaggaaaatttacatgttgtaagtgaatttgcaagtaaaatgggtatcctgccgatatttaattctcttgaactttatgcaaaagaaaaagctcgtttaaaaagagcaggaaatctgattgatgactttgatttgctgattgggtgttcggcaataaagaatggtttggtattagttacaaataatgagaaccattttaaaagaattaaaaatatcaaaatagaaaattggacgaaaaaacaattttga

SEQ ID NO: 9316 - protein, 136 aa, Unknown
  Obtained from environmental sample
  DOMAIN (4)...(131): PIN domain
  misc_feature (1)..(136): Xaa is any amino acid
MDKYLLDTDISVFCLRGRYNIDRKLNEVIGYDNCFISEITLAELKYGAELSERVEENLHVVSEFASKMGILPIFNSLELYAKEKARLKRAGNLIDDFDLLIGCSAIKNGLVLVTNNENHFKRIKNIKIENWTKKQF

SEQ ID NO: 9317 - DNA, 357 bp, Unknown
  Obtained from environmental sample
  misc_feature (1)..(357): n is a, c, g, or t
atgggtttttcaatcaatttctataaaaccagtagcttaaaatgcccagcaacggagtttttggattcgctttccggaaaagccgcccaaaaaattacatgggttttgaaacttattgaagaaactcaaatcgtgccaaaagaatattttaagaaattaacaccatacgatatttgggaggtacgcataagtttttccggaattaaatataggattatgtcatttatatataatgattccaagctaatattgacgtatgggtttatcaagaaaacacaaaaaattccaaagaatgaaattgataaagccctttcacataaaaaagattttttggataatggaggttggaaacgatga

SEQ ID NO: 9318 - protein, 118 aa, Unknown
  Obtained from environmental sample
  DOMAIN (57)...(110): Phage derived protein Gp49-like (DUF891)
  misc_feature (1)..(118): Xaa is any amino acid
MGFSINFYKTSSLKCPATEFLDSLSGKAAQKITWVLKLIEETQIVPKEYFKKLTPYDIWEVRISFSGIKYRIMSFIYNDSKLILTYGFIKKTQKIPKNEIDKALSHKKDFLDNGGWKR

SEQ ID NO: 9319 - DNA, 849 bp, Unknown
  Obtained from environmental sample
  misc_feature (1)..(849): n is a, c, g, or t
atggtcttaaaaattgattaccccgtaacggaagacccttgttttccgggtcttgtgaaagatcttgccctgctggcaaaaacgggctttaaggtagtcatcgttccgggagtcagggaaaacatcgatgccgtattcaaacagcatgatattaattcgtcctacacatcgactcaggacagtcccgtccgggttaccacatcggaaggaatttcctacgttgagatggccgcgtttcatatcgcaagcaggtttatgacatccctgtccggcagcagggtggacgcggtaatcggcaactttgtaagggcgagggggttaggcgtaattaacggcatagacgctgagtacacgggcgttgtcgataaaatctacacagattcgcttaaaagggtattggaattgggtatggttccaatcctcccctgcattggctggagtccttcaggaaagccctacaacgtgccaagcgatgaaatcgcccttgctgtttcaaaagcgttgggggcgattaaattgttcattattacagccacagaaaggctaaacattacaagacttaccccaaaagaaacagaagaccttataaatacaggcacaaccttcgtgcgagagcttaaattggcattaaaagccagtcaggagggcgttcacagggtgcatattatcgacggaagggaagaaggcgccgttttaaaggaaatttactcgaacctgggcgtaggaacgatgatttataccgatgaatacgactctatccgcccattacactccaaggatctgcccgacattttacgcttaatggaaccttttatgcaaaaagagcatccttatcagacggaaccctga

SEQ ID NO: 9320 - protein, 282 aa, Unknown
  Obtained from environmental sample
  DOMAIN (9)...(224): Amino acid kinase family
  misc_feature (1)..(282): Xaa is any amino acid
MVLKIDYPVTEDPCFPGLVKDLALLAKTGFKVVIVPGVRENIDAVFKQHDINSSYTSTQDSPVRVTTSEGISYVEMAAFHIASRFMTSLSGSRVDAVIGNFVRARGLGVINGIDAEYTGVVDKIYTDSLKRVLELGMVPILPCIGWSPSGKPYNVPSDEIALAVSKALGAIKLFIITATERLNITRLTPKETEDLINTGTTFVRELKLALKASQEGVHRVHIIDGREEGAVLKEIYSNLGVGTMIYTDEYDSIRPLHSKDLPDILRLMEPFMQKEHPYQTEP

SEQ ID NO: 9321 - DNA, 603 bp, Unknown
  Obtained from environmental sample
  misc_feature (1)..(603): n is a, c, g, or t
atgaggtcccatgatattgcgttctgcataggccccgcggggacaggtaagacctatttagccattgccgaagccctgcggctggttctgtccaaaaagatgcgcaaaatggtactgacccggccggtggtggaagccggtgaaagcctcgggttccttcccggagaccttatccaaaaggtaaacccctaccttaggcccctctatgatgccatggaatccctgatcccctatgaggtgatacaccgcatggaagaagccaggtcaatagaaatcgctcccctggcgtatatgcgggggagaagcctgaacgaatgcgtgatcattctggatgaggcgcaaaacaccactcgggagcagatgaaaatgttcctgacccggattggagaaggcgcccgggcggtaataaccggcgacgttacccaggttgatcttcctaaacgtcaggagtccgggcttttgcacgctatttcagtgctttccggcgtggaaggtctcgctttttcctggcttcatactgatgatgtggtgcgcaatccccttatcaagaagataattcaggcttacgacgacaatagtaacaataatgaactcaaaaactga

SEQ ID NO: 9322 - protein, 200 aa, Unknown
  Obtained from environmental sample
  DOMAIN (1)...(190): PhoH-like protein
  misc_feature (1)..(200): Xaa is any amino acid
MRSHDIAFCIGPAGTGKTYLAIAEALRLVLSKKMRKMVLTRPVVEAGESLGFLPGDLIQKVNPYLRPLYDAMESLIPYEVIHRMEEARSIEIAPLAYMRGRSLNECVIILDEAQNTTREQMKMFLTRIGEGARAVITGDVTQVDLPKRQESGLLHAISVLSGVEGLAFSWLHTDDVVRNPLIKKIIQAYDDNSNNNELKN

SEQ ID NO: 9323 - DNA, 504 bp, Unknown
  Obtained from environmental sample
  misc_feature (1)..(504): n is a, c, g, or t
atgagtcttgcaaggtatttggataaaaggagagatgcggacgagcgcttgtcaagggatatatacaggcatagaatatgctatctttttcttgcgccgtacgctattgtttttatccttttttatgtagcgcccgttattatatcggttttctacagttttacatatttcaacgttcttgagccgccgaaatttatcggcttgcgcaattatatcaacctgctgttagctgacgatgtctttctaatcgcggtaaagaacacttttattatcgcggcggttacaggccctgtcggatatataatggccttcctgttcgcgtggtttatcaatgaattgccgcgttatatccgcgcctttgtaacccttgttttctacgcgccgtctcttgccacgggcgctttcatgatttggacgcttatcttttcaggcgacgcttacggttacataaacgggcgtattgatgaacttcggaatactggatcagccgcgtgctttggctga

SEQ ID NO: 9324 - protein, 167 aa, Unknown
  Obtained from environmental sample
  misc_feature (1)..(167): Xaa is any amino acid
MSLARYLDKRRDADERLSRDIYRHRICYLFLAPYAIVFILFYVAPVIISVFYSFTYFNVLEPPKFIGLRNYINLLLADDVFLIAVKNTFIIAAVTGPVGYIMAFLFAWFINELPRYIRAFVTLVFYAPSLATGAFMIWTLIFSGDAYGYINGRIDELRNTGSAACFG

SEQ ID NO: 9325 - DNA, 378 bp, Unknown
  Obtained from environmental sample
  misc_feature (1)..(378): n is a, c, g, or t
atgatttttcccattcaaagaaaaaagacccttgcgtgggaattcatgaaatggtggataagcgctgatacacagcttagattcgggcgcgaactgaaagcattatggggcgctgccgcccgttatcccaccgcgaattacgaggcgtttaagaggctttcgtggggttccgagcaaatggcggttcttgacgagcagagaggctggactgtcggaacgccggaagtgccgggcggttattttgtaagcagacatattaccaacgcggtgcggaaaatattaaacgaaggcatggatacacgggaaacattattggattatacgatcaccattaatgatgagttagctaaaaaacgaaaagaattcggtttggaatag

SEQ ID NO: 9326 - protein, 125 aa, Unknown
  Obtained from environmental sample
  misc_feature (1)..(125): Xaa is any amino acid
MIFPIQRKKTLAWEFMKWWISADTQLRFGRELKALWGAAARYPTANYEAFKRLSWGSEQMAVLDEQRGWTVGTPEVPGGYFVSRHITNAVRKILNEGMDTRETLLDYTITINDELAKKRKEFGLE

SEQ ID NO: 9327 - DNA, 426 bp, Unknown
  Obtained from environmental sample
  misc_feature (1)..(426): n is a, c, g, or t
ttgaacttggataatggattaaaaacaaaattattatttgaaatttctcaagtagataaattacttaatgacagcaagccgttgtttgatttatataaaataaaaacaccggattttattgagatgtccgccggcgctatggtattacattcgttttatggcgggattgagaatattttggtattaatatttaaacattatgatgaacaattacctaatagtaataaatggcatatggaattattggataaggcatttgtctctgataaaaacagaaggcaaatcttctcaaatgaatcgcaaaaaagactagaagaatatttgaaattcagacattttgtcagacactcttacggatttcagcttgaatgggaaaggtatggaagatttaatcaacgacatagaaattttctgggagacaattaa

SEQ ID NO: 9328 - protein, 141 aa, Unknown
  Obtained from environmental sample
  misc_feature (1)..(141): Xaa is any amino acid
MNLDNGLKTKLLFEISQVDKLLNDSKPLFDLYKIKTPDFIEMSAGAMVLHSFYGGIENILVLIFKHYDEQLPNSNKWHMELLDKAFVSDKNRRQIFSNESQKRLEEYLKFRHFVRHSYGFQLEWERYGRFNQRHRNFLGDN

SEQ ID NO: 9329 - DNA, 306 bp, Unknown
  Obtained from environmental sample
  misc_feature (1)..(306): n is a, c, g, or t
atggaaccgcgaaccagggaaaaacagacttcaaagtcaagggaaaaatttaaagaacctgagcaattcaaggtgattctcttaaacgacgattatacaaccatggattttgtggtcgatgttttgatggaaattttccataaaagtattgaagatgcaagtaaaataatgttggatgttcacaaaaaaggcaggggagtggttggggtgtatacctgggatattgccatgaccaagacccagcaggtacatgcggcagcggaggctaataattttccgcttatgtgtattatggagcctgtttaa

SEQ ID NO: 9330 - protein, 101 aa, Unknown
  Obtained from environmental sample
  DOMAIN (17)...(98): ATP-dependent Clp protease adaptor protein ClpS
  misc_feature (1)..(101): Xaa is any amino acid
MEPRTREKQTSKSREKFKEPEQFKVILLNDDYTTMDFVVDVLMEIFHKSIEDASKIMLDVHKKGRGVVGVYTWDIAMTKTQQVHAAAEANNFPLMCIMEPV
